United States Patent Application Publication US 2011/0183924 A1 - sequence listing, part 204

SEQ ID NO: 485930 - DNA, 1419 bp, Homo sapiens
  misc_feature (499)..(499): n is a, c, g, or t
  misc_feature (502)..(503): n is a, c, g, or t
  misc_feature (510)..(510): n is a, c, g, or t
  misc_feature (512)..(512): n is a, c, g, or t
  misc_feature (525)..(527): n is a, c, g, or t
  misc_feature (533)..(533): n is a, c, g, or t
tttggtgcccctcctccacccgctatcatgttcctcattacctcttttcattctcgcatggtcactacgtggattgtgttttctctgatgaattgttggactaccatcgtgatatgcattctgtggtttattcattgggtgctcccccatttgtttcctcgtaccgtgacctgttcctttggtcccggtgctcatatgggcgcacgacggttctgctcaaaccccttctgctcagtgcctctagttctcagtttgtagtcgtcttgtggtcacttcttgcttctccatcatctgcctccctcttctcccaggcaaggtcacaagcaacgtatgtcgtgtgagttctcaaggggtactccggtcagagagtgccagtagtgggttcagcgtcgctcacagaaccgttgatcaggacccaaggtcgctccctggaagtcactgcgtggtgctaagcgagggggatgggcggtagggctgtctttttctcggagagagactntanngccgagntnggacaaagctggnnncttgcncgggggccatggcgctgccatcccgaatcctgctttggaaacttgtgcttctgcagagctctgctgttctcctgcactcagggtcctcgtgtaccctgccgctgctggcagctccggtgtgtgtcctgatgtcctgctgtgtgatgctgttgagtgctgtggctgccctgtgtgctgttgtgcttgctgctgccatgatgccctgctgcatgtgtgttggtgacccatgtgacctgtgctgcactgacctgccatgctgctgtgctccactgtgtgacctgctgctgtgccctgtgtggtgttgtgcccctgctgctgtgctgccttgcttggacttgtacatctgtgctgtggctgatgcaggctgctgttgtactgatgtgccgctgtggacctgctgtgcctgccttggatgcgtctctgtgccctctgtgccttctggagctgactgtgcaagcttctctgcttgctcagtcctgctgctgtgttggtggatgtggagacgtgactgctgtgtggtgctttgttacaaccctttgcaacctttggcacccatcaacttaactttgcgcagcctttcttaaccgaatgatgacccttgggcccttggttccgtggcctgttggggaatgtggtacacgcttggacttgtggccccccgctgtggtctcaaccacccctctggcgccgtttaccttttgggggactgttgctggatgacatgtggatgtgtttgctttgggctgtgttgtgcgtgctgcctgtggttggcaacccccctgggtgggcctttttctttggaaccctttggtcggtttgaaccctggcgttggcgactgtttgttttggcccggacctgtgcactgttcggaagcgaagtgcttca

SEQ ID NO: 485931 - DNA, 762 bp, Homo sapiens
tggctagccccagacagtagtacgggctctcccggcaggtagcgatgcttacagtacctctagatggtacagaccatattgccaagcttgtgaggcctcctgtatcaggtatacggtcattgaaggtcgctatgcccaccagctctttattctgctgccatcaaaacagaataagctaggagcaagtagaaaaggcagttgtatgcagagtagcacaaatcctgcaaggcaacccaacagtggcatagctatctagtaatatagaatccctcatagtgcacagcgcttccattcaacagtagaaacagcctacaaatagcacaatcaaccagccacaacagcagcaggattacatcatacccacatccacctcaccgagaccctgcatccaatattgcgtatgccctcgcaacaacatggttccgatttcacacgcagcataaccctcacaggaagttacgctattactagccctatatatccttagcacatagccatacgcagtaggtcgcgataccgacgtgcaagcaagagtaaaccctattgccaacacaagatggaagccttactggcgaatacattcccactcatatacagcgaaaagggcaaaaggcgcccaacagaacacttcattctgtaagcaacagtgttgcagtcccacacacatgggttacccagtcacacaggcaaggccttatacccctgtaaaaagggtcgcaccaggggcccccaacacggtcaattttggaaagattataggcg

SEQ ID NO: 485932 - DNA, 399 bp, Homo sapiens
  misc_feature (1)..(1): n is a, c, g, or t
  misc_feature (32)..(34): n is a, c, g, or t
  misc_feature (36)..(36): n is a, c, g, or t
  misc_feature (39)..(39): n is a, c, g, or t
  misc_feature (61)..(61): n is a, c, g, or t
  misc_feature (65)..(65): n is a, c, g, or t
  misc_feature (78)..(78): n is a, c, g, or t
  misc_feature (89)..(89): n is a, c, g, or t
  misc_feature (114)..(114): n is a, c, g, or t
  misc_feature (136)..(136): n is a, c, g, or t
  misc_feature (190)..(190): n is a, c, g, or t
  misc_feature (198)..(198): n is a, c, g, or t
  misc_feature (210)..(210): n is a, c, g, or t
  misc_feature (226)..(226): n is a, c, g, or t
  misc_feature (229)..(229): n is a, c, g, or t
  misc_feature (252)..(252): n is a, c, g, or t
  misc_feature (255)..(255): n is a, c, g, or t
  misc_feature (259)..(259): n is a, c, g, or t
  misc_feature (267)..(267): n is a, c, g, or t
  misc_feature (271)..(271): n is a, c, g, or t
  misc_feature (277)..(277): n is a, c, g, or t
  misc_feature (297)..(297): n is a, c, g, or t
ngcgttctccgcagggacctcgagcgaaagannncnggncgcggcccagccctcgcctccntgcncaccgggcaaacngcgccgccacnccgaccccgctgcgcacggcctgtncgctgcaaaaaagcttgttggngtcttcgtcgccgcgctcgccccggggtactcctgagcgcaaaaatgagctccngaatcganagggggctcgcnttagtcgtgacccttntcnacttgaacaggatggagctctcnacntgcnccggtgcntgcnactgcnccctggaggcgcacaagtgngcgcagggagtggggctggtacgggaagggtgcggctgctgtaaggtttgcgcaaagagctaaaagaggactgaagcaaaaagaagcactgcgaaaaaaaaa

SEQ ID NO: 485933 - DNA, 186 bp, Homo sapiens
gaggattctgctgaattatgctgtgtacaacccagacatcggctactcacagggcatgtcagacctggtggcacccatcctggctgaggtcttggatgaatcagacaccttctggtgcttcgtgggtttgatgcagaacaccatctttgttagctctcctcgggacgagacatggagagacagctg

SEQ ID NO: 485934 - DNA, 224 bp, Homo sapiens
cttgaagccaggagttcaagaccagcctgggtatatagtgagactccatctctataaaaaatacaattacctgagtgaggtggtgcatacctgtggtcctagccactcgggagactgagacagaaagatcatttgaacctgggagttagaggctgcagtgagctagaattgcaccactgcattgcaccttggacaacagagtaagactccgtcaccaaaaaaaa

SEQ ID NO: 485935 - DNA, 177 bp, Homo sapiens
ccccggtgtttatcgcatgccagcagagggaacggcaacgcctttcagtgggatctacctgaataacaaggaagcaggaatgtatcattgcgtgtgctgcgacagtccactcttcagttctgagaaaaagtacggctctggcacggggtggcatcgataaacaccgggtaccgagct

SEQ ID NO: 485936 - DNA, 247 bp, Homo sapiens
tgacgtgtccatcatcagcgtccgctcgtaggtgtatgcagagatgtcactgttatgcatctccaccactccacctctggctcaaaggcgcagacggtacatgaaagacagccaggtccttctttcatcgtgggatgctgttgtcaatccattctgtggccacttgttgaaggattgcgccatcgcgggcactttccctccaagaccctttattgctgggcgcaagcaagtgaatggggccagaaag

SEQ ID NO: 485937 - DNA, 299 bp, Homo sapiens
cacgaggcctcgtgctgtccatgaatttcggtagccatctcgcatccgttaggaagagggatcgcgccctcgtgctcacactcgcagtcgccgatctgctgggcagaagtggggaacgcgtgggtcttctggggctcacagagccgacttcgagccggcgcgccgcgagccgcatcgcggaagacatcgactcgaattcggacgcaccgcaactcgcctccgggagaccgtcgatcgcgcgcgtgagacgcttctcgaggctcattctcgcgagcgatttccttgatccaatcgagacc

SEQ ID NO: 485938 - DNA, 327 bp, Homo sapiens
gagtcgtaactgtctgattcctaagctcataatccacaaactcttcacctttcactacagcacaggaaaaatgtaagaaaagaaaaaaaaaaaaaaaaaaagggaagaaaacttagggagggaaaaggtaaaaaaaaaagatgttattgtcggagaattattctgtacccccttggttacagtttggcggggtgtaattaaccatttcaaaattataattttctacaggaaaaaactaatttggtcttctccaaacactctcactttcaccaaagaaactttggggaaccccaaggaaaatttaggttgtggaaacttccgctatta

SEQ ID NO: 485939 - DNA, 166 bp, Homo sapiens
gtaacgcttcgaaaagtgactcttcgcatattcagatgagttgcttggcttttgtggatataaaagttcagagctgctatagtctttccatgatggggttagcctggtatatgtaagaaagttgatggacttgttgttcacgaagcgggaactccgctgggtggat

SEQ ID NO: 485940 - DNA, 967 bp, Homo sapiens
ctactcaggaggctgaggcaggagaatcgctggaacccaggaggcggaggttgctgtgagccgagtatcatgccattgccactccagacctgggagacagtagacaagactctatctcaataaatataaataaagaaaaaattgcggtgcaaaattcccgttattttcatagtcgtatctttttaaaggtattcatgatttcagtctggtggtcaggaaggtatgtgccttaaatcctctgatctctgaggacccaatagtttggagagctatattgagtttaaatacatgttcgtttgtagaccacgccttggttaccctttccccattttgatttgagggagaaatgactgttgtatcctgagagattccttctcataaaatggcctaatgtgtttcagtctaggacttctggggagggaacctctaccatggctttctgtcccactggttgtccaaggtcgctcagaatcagggttccccgtgtactataccttctgtgtaagagactattgtcctgttatctttggatgtccattgtatttgtctggtgggccgcagtagttacttttctggatcctatcatatgtctagagcatctctggtgccttcgttgaattgcccgcagttctatccatcttcctatttattgccatcttatgacgctattggttaggggtttaacgcgttgtttttgtccacctgtgtttaacatttcggtaactatttcgttggaagggtgtggcccatgtgttctggcctcttttggtctgtacaatttgttcccatccttgtaactatctcatcatggggggggattataaaacactggggggtttaaacaggtcttctgagcctattttatagggcccacccaggggaattgtgaggggggattagaactatcaaagaagctccacaggggggtgagtgtccggcaataggggctacaggggtttgggtcaac

SEQ ID NO: 485941 - DNA, 518 bp, Homo sapiens
cccaagagcggagcgcgcagcactgaagctcgagccgcctccgccgcgcgacccacctcggccgccgcgcctgcgccgtttgatccgccccggcctccccgagagcgagccccggccgccgcgaccaccagccgcgctaacctgcccgaccaaccgccaccgaggcgcctgagccgagagcacgaggagggaggaggcatgagtgatggcgggcgaggccacaaccaaacaccgaccacgcacccatcacacgacaagggactccgaccggcgcgcgggcacgccaccgcggcatccacccagagggaacccccgcaggccccaaaggaagccaccagcgtagggagcaaagccgcgctgcaggcagcccaagtgccagaagggaccccagggcagccccaggacgacacaaaccactcgcaactggacaaccccaccagagtgggagaaccggcggaccccccggccaggccacagcagcgcaaccgccggccagcagacactcgttaaaagcaacg

SEQ ID NO: 485942 - DNA, 292 bp, Homo sapiens
cccaggatttaagtgatacatcacaaacagactcaccaggaccacagacttgttttacacaagcacgttcttaccttagccacgaagtgaccaagccacacgtactaaaggttgaactcaaagcatatgtacagggtattaaacaaataccaaggggaccagttaacttcaatacaaggtcaacatcagcaacaagttctacaatccagtgctgatatcagatacaagcttcaaggacaatttcttttccgaaggcttataacctgttttgtgagaggtatgcacctgggta

SEQ ID NO: 485943 - DNA, 861 bp, Homo sapiens
gacaggactcgctaagtgttcgctacgcggggataccggatcggtcggaaatggcagaggtggaggagacactgaagcgactgcagagccagaaggagtgcggggatcatcgtcgtcgaacacagacagggcattcctcatcagagagcaccatgtgagaaccccaccccataacccagtatgccagcctctatgctacagctgttatcctgaagaggcatcgtgaggcacccgtgcgtgatatctgatcccacagaaagatgctcaccttcctttcgaatccgtctccatgaaatattgatatcatggttgcaccaagataaacgacataatattctctgggaatggttgaattcggagaattcccaagcggaataagccaacgtccgtcttttgtgcgtccctttggggtcattttccttttaatttgaaattgccccctccggaggaattgtttgaagtgggtcgaactcattgtcgggtgtgagctagcgacatttgcggtagtcggaggttggaacgctaagcatcaacactcaaatccaggtggagccgtgttgtgcgccatggcggcatcttctctcaccaagcaagggatagctccctgtgtgtcacaaatcgcttccccagaagcgtccgggagtggcgcctctcctcacttcccaggttttggtagcgcacgagccttgctgggaaagcccgcgacctcagatttcctttctgaccttcaagtagcaagttgtggtcggcctgtggagaacagctgtgttccttaactaacataatcaaaatggcagaaagatcgggccacaacaacgaaactttcgcggggcggcgcctcaggagagtgccagacactgg

SEQ ID NO: 485944 - DNA, 348 bp, Homo sapiens
ctgcctcctgggttcaagaaattctcctgccttagcctcccaagtcactgggattacaggtgcccaccaccataccaggctaatttttgtatttttagtggagatgcggtttcaccatgttggccgggcagtctcgaactcctgacgtcaagtgatcttccagcctcaacctcctgggctcaagcaatcctcctgcctcaggcctcacaagtagctgggactacaggtgcttgtcacacacctcactaattttcccatttgtgttatatgtggattcacaggactgactttgagaacttgagtatgcgtggattttggtatacacagaaatgggagagctggaactaa

SEQ ID NO: 485945 - DNA, 638 bp, Homo sapiens
gcttcatgaaatagatgagtaggaaacacctaccagcctattttattaagccagcattatcctattacaaatgacaagaaaactacagactaatatatgttagaaatgcttgtttttcggtgccataaagaaatagtacttgaacataaattcagtctcctcagcaaggccatttgtactttctacggaaagggtacactcgccagcagtttgtcaagagggtacaccgaacaaagaggatcattgtaacctgggtcatttataacctgatgcgtctaccttactgctgtgtctggtttccactggctggaacggtacctcacattctgtatttgtcctgattggctagcaacttagaagcttcttaaaagaggcaaaggcagaggagaacaaaggaaggaggaatgttgagaaaggtaaaatcaccttcaaataaggaagagcaacaggctatgacctaatgcatgcttggaccagcataagcatgccagggcaaatatttaggctgaattgtgcgagctaagaacataaagtactttgatttcctcattacggcagcagatatttaagaatgttagcacaggtctttgaataaattatgcttctaagagaagttagtattattcctaattagacgg

SEQ ID NO: 485946 - DNA, 586 bp, Homo sapiens
  misc_feature (10)..(10): n is a, c, g, or t
accaatcatntactgctctggtaaaattaaacggtcagaattacataattatttttcattagagataagaaaaaatcaaatgtgagataagaacatgcaaaataaggcaatcttccacaatgcttactttaggaaaagaaaaaaaggaagttttacttttttaagagaaaaaaaacactagaataagatgcagcttctgaagagacagccattttccttcacagtgttttcctcttccggcctaggtagttgatttgagtagctaagattccagtcagttctcacacacttttggtgtagcccattcattatggatgtgcaaaacaatatcccaccttccttatctcacagacagacttgcacaccttactaagaaaccttcccatggccatgaggtataactttctgccttagatcatgtagcaaataagcagttgtaggacatggaaattaaggttcataaaagaagtaattgtcactgaacccatttgcctgttcttaggcctgactagacaaatatttctatcgttttagaagcctcatctttcagtctaagtggttgaacagtttccacaacaaatgagag

SEQ ID NO: 485947 - DNA, 219 bp, Homo sapiens
  misc_feature (135)..(135): n is a, c, g, or t
aagctgcctaaagtgagaaagcttgaactcagtgaaaatagaatcttgggaggtctgggacatgttgagctgaaggacttccaacatctcagcacacctaagactgtaagcggaaataacactgaaaggatatcnagcacctatggaacctgttgaagaaagtttagaatggtctgcaaaaggcctggcacctcttctagactgtcgaggttgaccaag

SEQ ID NO: 485948 - DNA, 146 bp, Homo sapiens
cagtgaagcctcgatcacttgcccaagttgtttcgaaaaaggatagaaaggctcctgtggtgaaactgaaactgatgtagaatgggcctcctccgaattcaggaaaaaataagatgaaccaagtcgtaaataaccaaaaaaaaaaa

SEQ ID NO: 485949 - DNA, 210 bp, Homo sapiens
  misc_feature (7)..(7): n is a, c, g, or t
  misc_feature (54)..(54): n is a, c, g, or t
  misc_feature (56)..(56): n is a, c, g, or t
cgtgttngagcggtctcagcaatgctggatccttaacccactgagcaaggtcangnattgaacacacatcctcatggataccagctggatccacttccactgcaccacaatgggaagtcctccaagaaacaattttttgctaccattcacctatatccagataacccagcctttgccccagagtttagaggcactgtcttgctgtacccc

SEQ ID NO: 485950 - DNA, 408 bp, Homo sapiens
tcaatttctacacacagtagctggtatacagtaggcactcagtaaatagtggtaactatataaaggggtacatggctcagagcccttggaatataggcaccatgacatgaagtccgagaaaaaaggtgtatggtggaatagggcaaccagggaaggcttcctggaggaagggatcctggaaccaggccttgaaagatgaggcagagtctgggagaaggagaacagatagctttctgggtcacagtggcagagtgaggaaacttgttcagagtatgtttaggaaaccctgagagataggtgacggtggtagaagtttcatgctggggaaagttaggacttgattttataagcaatggggagccatagaaggcttctgagctgaggaatggaatgatggccataatgaag

SEQ ID NO: 485951 - DNA, 304 bp, Homo sapiens
tctgtatttagttactctatactgggcatactttttatggaatacacgcgcgctatatgataaccactggatgcttgagtgtaatacaaaaattcccaacccagcctagcatagacacggaaaatgattgggcagttgaatgaatgaaacagcagagcacgtggagtcaggataccatggggaagccacttagtctctctgtgcctttgtttgctcatctttaaaatgggactcagttagacatggtggctcaggcctgtaatcccagcactttgggaggccaaggtgggcagatcgtttgagc

SEQ ID NO: 485952 - DNA, 1016 bp, Homo sapiens
agcagcgcagctgcagtggttgttgttggtctgcgtctcgtgcaaacctggtcagctgcttgcagccatggctgcacccaactgcactgcaagcagccagatttgctagcaattcaacagcacagccttcttctccacgtcatttttgaccaacagcattggttgcatggcacacctcatacaccacacacaacaggcacattgtggcacacttgtcaaattgcagcatcctcttgtgcgccaagcaatccccaaccagcacagccagcagcttcctcagtgcacctatggcatttcacatggaacagttcagcataggcttgcattgggtcacattgtggcacaccaaatttggcactttcgccattgcacatttctcttggaaccacatctgcattgggcccagccaacccacacatgcatctgagccaccaccagccaccagcttgccacagcacagcaagacgtttcagccaccacagcccatttcccagctgattgctcggagtcatcacgaggggcattgggccacatgggcgcttcatcattccagacttgccctgcccagccaacactctcagccctaatggctgcattgcaccagacactcttttgggcaggcagccaagcttcaaacactgcaatgccataggccaaagtttggcattggaaacatgcaatcgccagcggccccattccaagccatcatcctgcaccgtgcctcgcagtgcgctccccccgattcacacacactcattctcaaatcgagcctcgcgggctcctcccaaattggctatttacacctcgtgccacaatggttgactacgaacccctttgttctaccactggcaacttgagtggatcaaaacaatattcgcttgggaacacacaaccatttgtgtataacctcattgtgccctcttagacaatatagcgatctcaggcacacctattaattcttggtaaaagacgtgtttccagtatgccccttacttgggacacacagagaccatcta

SEQ ID NO: 485953 - DNA, 206 bp, Homo sapiens
gaagagaggatatggcaatcgtcttctggtgtggaacgctgctgtgttactaaacagtaactggacttagggggactgcccccaacaccattgtgcttcttaactgcccctgtggcttcatctacatccatctcttcttcttcctcatgaatgttttcccacattcaccacatccatggggtttctctcctctttcagttctctga

SEQ ID NO: 485954 - DNA, 250 bp, Homo sapiens
attcaaagaattcggcacgaggcctcaccctaccaccagacaaccttagccaaaccaatttcccaaaataaggaaaggcgaaagaaatttaaacccggcgcaaaaaaaattggaccgcaagggaaagaagtaaaaattttttccaagccaataattgcaaggaccatcccccatatcccttgtaaaaaagtaaattcagaaaaaatcttttaaggggagccaaagccatggcccccgaaaccagacgagg

SEQ ID NO: 485955 - DNA, 512 bp, Homo sapiens
gggcacgatgggatgtgcctgtagtcccatctactcagtctcccaagtacctgggattacaggcggcgtgctcaagcaaagcctgtctaatgagctagtagtttctgtaagtggagatggggtttcacacacgatgtggcgcaagactgggtcgtcgaaacatccatgatctcaggtgatcatggccaaccatcagctactttgggaggcgagggctggggcggatcaccctgaggtcaggagataggagactaggctggcccggcatggtgaagcccagtctctactaggaatagaaaaattggctgggcgtggtgacacgtgacctgtagtcccacgctgctcgggagactggggcaggagaatcagcttgaaccctagaaagtggaggctgtaagtgagccgagatcgcactccaggcctagactcgtgtcgtcatagaaaagcaaatgtggtgaaagataatgtcgggaggggccccgtgtagatatcagcgtggtaaaggtccctaa

SEQ ID NO: 485956 - DNA, 766 bp, Homo sapiens
ccccacttggggggccccccccacctctcttttcttctttgggggccccactgtcgccccatacaatatttttctctgggagaccccccctttgtgattaaaggcccgcgcttgggggccccccccgtgtgggtgaaacctctcccccgagagttattgccccgctttggtcccccctgtgaggggatttctcctctctctcgacccgctctttctactatggggcctgccgccccaatatgtgccactgcacactctggagaaattggtttcccacgcggagtcttggagacccacaacttctgagagggagaaagagataatgccccctcttgttcgcgccccaccagctgtggtgttcgaccaagcccccttccttctgttgttgtggggaggacccccccacccccatttagagcacggcgcccacctatttctggaattctgggttctttccgaggcccaccgaagcttgcctctttcccctgagtccacagacatgcgccacacgtgggagactaacgaattcataacacacactggccggagaaacttggagttcctcggcacagcgaaggaggaaccccgaaccctgggtttcgaagagtactctttttcctcgcgagagggggcgccttcccccaagtgggccaaaccttccatccgggccagattttcaaatggacattttttgccctcacctagctgcctgcacctgccctttcagggagatgggggtcctttaagggaactgcacccattggaa

SEQ ID NO: 485957 - DNA, 127 bp, Homo sapiens
  misc_feature (53)..(53): n is a, c, g, or t
  misc_feature (64)..(64): n is a, c, g, or t
caagggttacgttctccagactcaggacgtgctattgctatcaaagtgagggngcttcctctcncattccgggtccagtgtagggtgcccgctatggcttccccaaacactccaggttctatcgtga

SEQ ID NO: 485958 - DNA, 468 bp, Homo sapiens
ggaggcggaggaatatgtccgagagggaagtgtcgaactcgcgccgggggaacagacatgctgggcagagcagaagctgagcagtgacgagacagcatcagactctctggagacgaaatgatgacgctgtcagtatgaaagtgtacaaacatgaagccctgataactaaaaagccaaatgcactggaagaaagtggggaagggactggaagtcagaatgctatcttcaatgtgtatagtctcaggaaatcataacaacatgttgagtcagtttactgcacagaagaaggagatccatagtgttgcaacgtggagccagagtactgttgatgtcattcaaagagatccggttgtgcatcttactgatgcgtgcgatgaaaatttacacttgtgctgactagatagcatagagcctccctgtggtgtagtgatctaagcatataggatataatctataacatgcgtgtta

SEQ ID NO: 485959 - DNA, 171 bp, Homo sapiens
cgctgtggagaacatgcatactacaattaagagagtgaacatatccatcatccctcaaagagccactcaacgagccacccaaagagccccgcaagggagccacgcataggaggcacaactgagccacgcaatagagccacactcatgagccgggtaccgagtctcgcaatt

SEQ ID NO: 485960 - DNA, 503 bp, Homo sapiens
tatatttgcaaaggaaacatatctaatccttcctatagaaagaacagtattgctgtaattccttttcttttcttcctcatttcctctgccccttaaaagattgaagaaagagaaacttgtcaactcatatccacgttatctagcaaagtacataagaatctatcactaagtaatgtatccttcagaatgtgttggtttaccagtgacaccccatattcatcacaaaattaaagcaagaagtccatagtaatttatttgctaatagtggatttttaatgctcagagtttctgaggtcaaattttatcttttcacttacaagccctatgatcttaaataatttacttaatgtactttggtgtatcttcctcaaattaatatcggtgctcaacactatatctactctcctcccatccccttcacaaacaaacttttactcaatgtaaggcacttttctatgaattttcaatataaaaataaatattgttctgattattactgaaaa

SEQ ID NO: 485961 - DNA, 250 bp, Homo sapiens
ggtgactcagaggatccccacgatggtctcatgctcacgatggtctagctccagcatcctcctgggccacaggacgcacttcagtgcagacacgtggctggagataatcacaacttttctttctttttttttttttttttttttttttttttttttttttttttttttttttttttttttttttttggggaaccggaaatttttggggggcccggggccccaagggcgcgcccgcgtgtggggggggata

SEQ ID NO: 485962 - DNA, 878 bp, Homo sapiens
  misc_feature (30)..(30): n is a, c, g, or t
  misc_feature (123)..(123): n is a, c, g, or t
  misc_feature (401)..(401): n is a, c, g, or t
  misc_feature (429)..(429): n is a, c, g, or t
  misc_feature (436)..(436): n is a, c, g, or t
  misc_feature (451)..(451): n is a, c, g, or t
  misc_feature (547)..(547): n is a, c, g, or t
  misc_feature (553)..(553): n is a, c, g, or t
  misc_feature (557)..(557): n is a, c, g, or t
  misc_feature (577)..(577): n is a, c, g, or t
  misc_feature (665)..(665): n is a, c, g, or t
  misc_feature (711)..(711): n is a, c, g, or t
  misc_feature (733)..(733): n is a, c, g, or t
  misc_feature (758)..(758): n is a, c, g, or t
  misc_feature (761)..(761): n is a, c, g, or t
  misc_feature (767)..(767): n is a, c, g, or t
  misc_feature (783)..(783): n is a, c, g, or t
  misc_feature (801)..(801): n is a, c, g, or t
  misc_feature (811)..(811): n is a, c, g, or t
  misc_feature (843)..(843): n is a, c, g, or t
aaaaacaacaaaaaaagcaaaaaaacattngggtacttgtcatgagtgcatcagtaaagatcacactgttacaaaagcctgcattttcagcagtacacaactgcaactctacataaatgccanagatgcagaatactgttttcttgctctatttacacagctgatatacctattctaacgaaggagggagaggagtaatgcacaagaaactcaggccaatgggggagcaagaagaaaacgaagaagtgcagtgcatgcgtcatcggtgtttaacagtcagaagcgaaacagttcagaacaaggcctgccctgtcaaaagaagagctaaagacagttatataaaaattaaggtgggctttcagactgggtaacccaacaacattccatgagtagatggtaanttatttttgtttatccatttcgttgggngcaaggncaaaaatgtaaatcnacaccttgcttatcaaaattgccgaaaaaagaatgctctgccttttaaaaaagtatcatgattttgtagaccttgttttccaatttaatatttggnaaaggngtcnttttcctattccccctcagntgccagtgttttgggctttttttccagggcgcgcggtttatttaacacgcgcttttgctcttttttattcgacaaaatatccttttcnaaacagcaaagaaacccaaaagagcacacctcaacaatgccctgtnaaaaattattagcttttacttntctctcaagtcaaggcgaggcgagngcntacggnaaaggcaagagatttnggttaagttaaattacantttttgtganttgctcccgcataccgtgaactgcaatgttcngtggagcgcccagccaaacgagaacaatgggtctc

SEQ ID NO: 485963 - DNA, 296 bp, Homo sapiens
  misc_feature (39)..(39): n is a, c, g, or t
  misc_feature (41)..(41): n is a, c, g, or t
  misc_feature (46)..(46): n is a, c, g, or t
tggtaagcatcgcgattgccgaagacgtaacagtggtgntnggccngtgggcaccgccgacatggtaacagagaaagaccaccacaacaaagagggcgaggagcagaacgccggcattaagaagacactagtgagcgcggggctaagcgcagagaagacacccctcgaggaatagggcagccgcaaggcgggctccgccactaaccgtaagatgacagggggtaccggtgcagtaggaagcgacagaggcggcactaaaaaagccggcaggagcgagggcatgaccagccacacta

SEQ ID NO: 485964 - DNA, 123 bp, Homo sapiens
tcagttgaagatagatggtagctgtggcccactagtgctggctccctgcatcactgtcacccctgtcccaaacatctcgacccaccacttacatatttcacctggctggctgctacatatgat

SEQ ID NO: 485965 - DNA, 208 bp, Homo sapiens
cccaggttgtctggtccccagttgtgctggtccccgagtgtctggtccggagttgtgctgggtccccagttgtgctggtccccagttgtgcctggtcctcagattgtgctggtccccagttgtgctggtccccggttgtgctggtccccagttgtgctggtccccggttgtgctggtccccagttgtgctggtccccagttgtgctgg

SEQ ID NO: 485966 - DNA, 446 bp, Homo sapiens
ctgacgaatcggctctctgggttataaagagcctgaaaatccaggtataaagccctttctctttttttttcaagacagagttttgctcttattgcccaggctggggtgcaatggcacaatcttggctcaccaggacctccgcctcctgagttcaagcgactctcccgcctcagcctcccaagtatctgggattacaggcatgcaccaccatgccaggctaattttgtattttttttgtttgttttttttgagatggagtcttgctctgtcacccaggttggagtgcagtggtgtgatctcagcttactgcaacctctgcctcccaggttcaagtgattctcctgcctcagcctcagcctgccgagtagctgggactacaggcgctcgccaccacgcctggctaatttttgtatgtttagtagagacagggtttcaccgtgttagcc

SEQ ID NO: 485967 - DNA, 353 bp, Homo sapiens
gcaggtctgcagatgaagggttttttgaatgaaatgccactgtgcattttcagaaaaaaaaatctctgataaacagactttgaatggatgtttgttcctcctgattctcttttctcttcgtggcgacttagagttggcggatattcggaactgtgaatgtacatagcgttgagttaaccccttttgtttaaaacagaacccagcaagcccctggtggttggggcaagaccgtgggcaggtgggcatggccctggctgcgggacctgctgggtttgaggcaagagggaggttgccatgaaggaacttgggattttcaatggaataagtaaaacataaagtctatacttgggaaa

SEQ ID NO: 485968 - DNA, 296 bp, Homo sapiens
tagacactgtacttactctgtcaaataggctagggtgtagtggtgcgatcgtacctcactacagcctcaaactcccaggcccaagggatccgactgcccctccctcccaagtagaaggatcactggagcctgggaagtcgaggctgcagtgagctatgatcacgccactctactgcagccttggtgacagagtaagacgctgtgaaagaaaaagaaagagagagaagagagagaatcaaagaactagagtttatcaaaattaaaaacttctgctctgtgaaaggtcgacgcggccg

SEQ ID NO: 485969 - DNA, 414 bp, Homo sapiens
  misc_feature (16)..(16): n is a, c, g, or t
ccccctgccgcctggntttctcacacttgttaatctcagcactttgggaggctttggcaggcagatcacttgaggtcaagagttcgagaccagcctggccaacatggcgaaaccccatgtctactaaaaatacaaaaattagctgggtatggtggtgcatgcctgtatttccagctactcaggagacagaggcatgagaatcggctgaacccaagacgtggaggttgcagtgagcccagatcacgccactgcactccagcctgagtaatggagtgagactctgtctaaaaaaaaaaaaaaaaagggaaaagaaagtttgctggttagcaatggggagctaatggggcagtaaaggatttttgggcccaagtttcaggaaagggaaattcaaagggctgaccccaacattgcaac

SEQ ID NO: 485970 - DNA, 1239 bp, Homo sapiens
  misc_feature (550)..(550): n is a, c, g, or t
  misc_feature (840)..(840): n is a, c, g, or t
gagtcctggtatagcctttcagggattagggattgggttttattttgtttctcgtcttttataatactagaatatctcagttgtttatagaaaggtagagttgtaaaatgtttattggtgccattgattggtaactgggcatctggaaagaacagtaggttttactccatgataaagtggattccagtaagaattttcagtagtataccaggtacctggaaagttcttcagataagttagtagatccaaggagatacatgcctcagtgagataaactggacctttttactagctaaactatttagccagagcaatactctgtagaactggtgcttttctaaagtaaagattatctggttctcaattttatgtgcataatacttttcctgggggctagcttgtgataggcaaaatatttggaccatgtgggtcccataatgatggtgctagtccataagcttggctgtatgagtgtaatcataaaaattatttccaagccagttttgccctttattctacattctgggcttgtcatatggaatctaacggnaataatatccccacaggtgggttcagacttcatgcaaagaaattcaagcatatatcttctaaaaggtttaggacgggctcgcaatttagggccccccttagggcttagattgaccctaacacatttgggactggacatttggtgtaccccacgtgttctaccgcaacttcgccgtcgtcagcgcagcagcgcgccacaggtgccacctcgacacccgtggacagcgcgtggtatccattctactcttctcatggtcttttcttactagtgtgctttcaatttattctctngggagcgctgcgataccgcaacccgccaacgcaggcctaccgaccgcgtagaccagcattaccgccgcaccaagacaacatatgcacgtcgctgctagacgacacaagcagagagaagagtcgcagactcgagaagggtagagtctaacgcagaggacgacaggccgcaacgccaacgactcaagagatcgcccaaagagccacatacagcagcggagagcggcagcacgacaggaaaagcgggcgcgggacggcacagagagaccaggcaagagggaccacaactcggccacgagaagaacagagacgtacgagccagcagcaccaccgacgaaccgccgaccgcacacacacaccagcaaaaccaaccgacgacagaacacggcaacccacaaccaa

SEQ ID NO: 485971 - DNA, 268 bp, Homo sapiens
  misc_feature (186)..(186): n is a, c, g, or t
  misc_feature (233)..(233): n is a, c, g, or t
  misc_feature (250)..(250): n is a, c, g, or t
gtacatatataatgaatggataaaaaattgtagcatatccatacaatggaatatcattcagccataagaaagaaatggcaggccaggcgcaacagctcatgactataatcccacgtgctttgtggaggccgacggcaggaggattgcttgtaagccatggagtttgagaccagtcctgaggtaacnatagctgagaaccccatttttacaagaaacttttaataaattgaccnaggcatgtgtggcacancctgtagtcccagtctat

SEQ ID NO: 485972 - DNA, 816 bp, Homo sapiens
  misc_feature (354)..(354): n is a, c, g, or t
  misc_feature (424)..(424): n is a, c, g, or t
tggcaaaaaccaaaacagctctttccaggcgggttggaggttttttaaaagctggaggaacgccagatttccaaaagggaaattggtgcgtttaatccccagccaatataccgaggggttccccccatttttggggggccgcgggcatttcaaccttgaagcaattgggcctcgaaattgtgggtgaaatcctgaaggccaaaccattttccctgtgagcacaacttctgtcacaggtgtgccccaacccctaatttgtcccgtcacaagagggcaccataacgtgtctgccgtcccccgcgtctcgcccagagtacattagagtgcatcccccggccttctgtaattttgcangaggagattggacaggctccctgggccgggggatggaaagcagcctcgctcttaggttcgtgttcgcacncactgtcaaaccccagtatggctcaagccctaacctgtagctgtggggcttctgtgtttgtaaatgggcagtcctgaccagagtgccagacatcgcgtgattcaggtggctccaagcgaagccaagggagctgagctggactttatactcctttaggaatttctaggacggaatagatcgtgttgttccatctcgctccaagggaggagttataggtggcaatttggaattgtgggaccctggcttttcccgaagggagacccccctttgctctcccccgatttttttttgccttcactcccctagacgtgaaaacagctctgggttgtttaaccatatatctctttgcacacatggcctctgctttttgtgcgccgaaaaataaaaaaaaa

SEQ ID NO: 485973 - DNA, 351 bp, Homo sapiens
  misc_feature (32)..(32): n is a, c, g, or t
  misc_feature (236)..(236): n is a, c, g, or t
  misc_feature (288)..(288): n is a, c, g, or t
  misc_feature (312)..(312): n is a, c, g, or t
  misc_feature (333)..(333): n is a, c, g, or t
  misc_feature (345)..(345): n is a, c, g, or t
ggcacgagcagcaaccggggaaccgcgccaanagctccggcgctttctccatcgccaccctgcggacttcggggtgggcaagcgaggcatcgaggagcgcatccaggaggaggcgggcttcctcatcgacgccctccgggaactggcggcgcaattatcgatcccaccttcttcctgagccgcacagtcttccaatgtcattcagctccattgtcttttgggggaccgcttttgantattaaggacaaagagttccttgttcattgtttgcgcatgatgcttagggantttttccagttttaagttcaaacntttcaaggggggcagtttttntggagatgtttntttttt

SEQ ID NO: 485974 - DNA, 900 bp, Homo sapiens
acttcattcggggccgggttttcgttgttaaattagctggtgcctcggcttacaatttaccacatcagaggtcacctgagaatcaacgggatccctgtggagagagctaggacaaagaccaaagtaccggattcagcgtggcgccctgatcctgagcaagtgcagccagtgacacaatggtgacccaatgtgaggccgcaacggacacgggctcttgctggccaatgcctacatctacgtagtccagcatgccagccaagatcctgactgcggacaatcagacgtacatgagctgtccagggcagaactgcctaccttctgtgcaaggccttcggagcgcctgtgacccaatgttacagtggctggacgaggatgggacaacagtgcttcaggacgaacagcatcttccccctatgccaatgaaaaccctgggctattacgagacctccaggaccaaagacaccggacgacgtactactgcctgggctgaccaaatgagcaaaacacaagttaccatcatggactaacctgaaggttaaaagatgcaagctcagatcacatcaggggccccgcaaggcaaccaatcgagaagaaaggttcccagggtgaccttcacgtgtctaggcctccttatggagcgcctcccttagcagcccagaattcacctgggcgtgaaggaaatgttcgagaaacctccagggaagctggggggacaagtgacaagttacttcaataagaaggatggagcgcctagttcatcacacaggacaggaacaacagagaccaaggcaactacaagataatgtgcagtacggacacgaataggtggaaaaaggaacactgctatgagacccggcactacacaactgattagccaacacaaaaaaaacaaaaatgata

SEQ ID NO: 485975 - DNA, 106 bp, Homo sapiens
tggggggccccccccccccccccttttttaaccaggggttcttgggccggggaaatttttccgtttttggtttttttaaacctttaaattaattgggaaaggggga

SEQ ID NO: 485976 - DNA, 278 bp, Homo sapiens
  misc_feature (47)..(47): n is a, c, g, or t
  misc_feature (78)..(78): n is a, c, g, or t
  misc_feature (91)..(91): n is a, c, g, or t
  misc_feature (191)..(191): n is a, c, g, or t
ccttggaatgctttccccggatatgtggctctgccctggagaacatntgcaacacaaacgagttctacatgtcctatnacctgttcattgnggcctgtgcaggagctggtgccaccgtcattgccctgctgatctacatgatggctactacatataactatgcgggtttgaagtttaagagtcgggaagantgctgcactaaattctaaattgcataaggaggtttagagagctatgctctgtagcatgaaatattactggccttcagactaaagcag

SEQ ID NO: 485977 - DNA, 356 bp, Homo sapiens
cgtaccccgagaagactgctcacacccaccagcgtcaccgaagtccgtcccaaagccaatgacggtatcccgcgcagcagcaacgttgatgtgatcgcggtaatcatggactgcccgccacgtcgttgaacaccagcttgtccgtcgcctggtagccgatcacccggatcattgccaaactgcccgctgaacaaaaacgtgttgtacccaactgctgtcgcggacgtggtgtcacttgcccaggaccaccattcgataaacgtccgacgccccatgccgccatttgactcaagatcagtcgccgatcgcatgccgactgatgaagagtattgcccagccgagcagacgatttcggg

SEQ ID NO: 485978 - DNA, 350 bp, Homo sapiens
  misc_feature (1)..(1): n is a, c, g, or t
nacgtagagttcaactctttataacccgcttacaacaccagttccttagaagccaacatcacaggtgggtcagatttccatatgagaaccaaacctggccacttacagcaaaatatcaaaatgggtaagtccttccttcctcttcctcctgattatatccaccatatctcctttcaagactattatttccttcatgcttattccttcacaattctaacccttaaggtgatatgaaggaacccaccctcaagaaaagaaacctcaattcaaatatgaagaaacctgccaggtacacaatacacccacagagcatctcaatatccgtggcacagtacatattcctctcgtgc

SEQ ID NO: 485979 - DNA, 90 bp, Homo sapiens
accaagagggagcctttaatagagaccggcacagacaggagacacaacacccaggccctgcaagcacaggctggggcctgagcaacagag

SEQ ID NO: 485980 - DNA, 100 bp, Homo sapiens
gccccccccccccccccccccggggggggggcaaatttttggcaattttttggggggggttccctggcccgcccggggttaaaaccccgggggtttttga

SEQ ID NO: 485981 - DNA, 1720 bp, Homo sapiens
agagtgcctcagagtgtggagaagatcgctactgaatttggatggtggtgtgccctcagccatgggcatgcctcatgtgactgtgtggacccatgtgaatgtgtggcgtgtcagtgaccctgtggtgaggcatgtgcatgccctgcctgcaactccctgtggacgccatgggctggcctgacaatggtgatggaacgctgtgagtgaatggttgtgactgacgtggttgctggtgtgacatgatgcattgctgtgttgtgctcatgtagtgcttgtgcttgccacaatgtacactattgtgacccatatgacactgtgtgtccaccattgccccccaatctgtgtgtgcagacccacaaatggccttgggaccacatgtagacggaacgaggggtatgaaggacggacaccacgaacgggtcgaaactgtgggacccaacaatggaacggtagccccctgtgcgcagccctatcagtgcactgaacccacaatgggaccaccaatgacctcagagcccaagggaccacttgcgacggcgcgagcaccgaacgcgcgatgcacagaagtcagcccccaactcagggcagggaccccaccctaagcagcacaccacagacacacaagggaccaggggaacccattgccacgagagagacacatgagggcgccagagcgcagagagaacgaccacgaagatcagagaacggagaccgcacgctagtgagagcccacgtcggaccaacaaggaccaactggcaacacatcggcaataggccgaggcaccgaagcgcacaagggcaccaggacgaacggcctcaacatcgggcggagaggagagagccgcgacgaggacgccacacacgaccaccctctgctgagcagtcaaacaagcactactgaagcggtagggcacagaagccacatatggtgcgcgcgttagagtacttccgcacgcgagagtcgatggcgaacagaacgtacgacctcggggtcgtcaggctaagtcggagctcccccacgttagagcgtggggctagcaccactagaccacagcagtagcagaccacatgccgcgtacctcacagacctccggatttaggcctttcctcctagctctgcgagtattaggtaagctaccactggttcgcgacaggccactactagcctacgccgtgtcgtacggtgcactctgctttatcagacatagtctcgatctagacattcctatcactgcagcccactagtctcactttaccacccaactctttcgtgtctacacacacgctagatccgactgctgaatagcgcaatcactgactataagcgcgtcgctcctccaccatcactcccgcacacctatgcgtcagtctccctctttcatctggcacgcggcgaggacgaggctactcagcagcacccgagcccgcggacgagcgacgcgagaggacgggagctcgcgacgagggaggcagccgcgccgcggacgagcgcgcaccgccggcgacggacgagcgcgtgaccggagacaagacgcaggcgagacggcgacgagacgctgactcgaacgcgcggcgcgctccgacgcgcagcgaccgccgccgcgcccgccccgcagaccgatccgatccgcgcgcgccgacgcggagaagcaagaccgatgacggacgcaccgagcggccgcgccgagaacagcagccacaacgccgcagcgccgcggcg

SEQ ID NO: 485982 - DNA, 612 bp, Homo sapiens
tccattggatagcggatagggatggtctgggtatggcaggaacgaaggctctagataaacagggagcgcttggagcctggcccctcctgctggggcttcttgatgtttccgtgtggaagggctgaaagcaaggagagggtggttggcccgtctttcctagcctgctcctccctccattcttcaccccacaaggcctagactgtgcggctggctaggaaaggtccagggagttcacccaggccctgatctgggggggcaagcagcttccagagccaaatgggtagggagagccgagtgacagtcagagctagaggttcctctgcccagtcagcccaggcatcccttgtctacccgccaccatggagccaaggctgtggtggccaccctcagtggatcttgtaccctccaaggcagcctaggagtggggtgggagtgggcggcatctgcagcctgaaatgggctgaggaccactctggctctgaggcgtgggggcctgtgcatcagatcccgtccaggcactctagggctggaggaggggcaggccacgccggagtccctccttcaggaactgcatgtaggtggccgtggacgggtcttcaaaggtggatgaga

SEQ ID NO: 485983 - DNA, 115 bp, Homo sapiens
ccttctagttgatgttgtctagcaatgctccttgcctccgctgtgtcgctctgggagggatgtctagccctccctggctgtcagagcaggctctgcctgaggatacctccatccg

SEQ ID NO: 485984 - DNA, 270 bp, Homo sapiens
cggagatgttaatcaaagacaccaaatttcagctggaccagaggattacagttcaacgagatctatggtacatcgtgatgactacgttaataacaatatattatgtactgtgaaaattgctaagtgcagatatttacagtgttctacacctacgaaaaaaaataagtatatgtgatcatgcatatgttaaatagcttgatttagccatccacgatgtatacctattttaaaacatcatgtagtccactataaatatatacatacaatttt

SEQ ID NO: 485985 - DNA, 872 bp, Homo sapiens
cagcgccctcctgcaacgctcgctgcacacgccccttgcggcaccgcgcaagcccgcgcgctgcgcctgccattcgcacggccaagcgccgcccccccgggcgcccggcttcccgcgcacgggccctcgcactcccggcacttctaccagccactgagcgtttctgcccgcttctgcctgagcagcgacgccgactctagctccctgcaacggccaaggcgaactcaggccactgaacgtcacttcaacctatcaacccctgcaacacacactacagcctgcagctggcttctttaagcaaacacactccctttggtctggtgccagcttctggcaaaaccagtcacgggctcagctgatctacgagtctgccatcacctgtgagtacctggatgaagcatacccagggaagaagctgttgccggatgacccctatgagaaagcttgccagaagatgatcttagaagtagttcctaaggtgccatcctcggtaaggaagctttattacgaagccaacataacgaagactatgatgggcctaacagcacgaattccgcaaagaatttaccaagctagacgaagctcctgactaatatcacaacaagaccctctctggcgtgcacaccctatcccccataaatgaatcctcctcgtgcccggtttaacggctgtacccacagacttaaaagcagggttaacccaccctcaaactgcaccgcgcggcgcccccaaggaacccccgaacccaccgcgccaactccaaaacgccggcccacacaccacacaccaccaccagcgcaaccacacagacgaaaaacacgggacctccgacgaaacaaaacgaggataaccccccccgccacagcacagca

SEQ ID NO: 485986 - DNA, 297 bp, Homo sapiens
gctcggcctatcttagttcggggttgggcgggatggcgagatggggttggaggggcccaggatccgggcaggccgagtgtgagggtccccccaggctgggacatctcgtcgctgaacctggccgaggcgatgcggcgcgcgaaggtgctggactggtgggctgcagcgagcaacctgtgtgcctgcactatgtgagtgccctgctggcccctggccattcttgtttacatccccagaattcatcagcggccaaccagagcgcgcgcgcggacaacctcatcccaggctcgcgtgcgc

SEQ ID NO: 485987 - DNA, 133 bp, Homo sapiens
tttttggtagagccgttaacacttgtccgtatttagaggtaacttgtgacatttatatactatcagtctcacactgcttgctatgcactaccgacagatgtggattactagtatttcattcactcctggaggg

SEQ ID NO: 485988 - DNA, 662 bp, Homo sapiens
tgaaaaaaaaaaaaaaagaaatttttaaaaacaaaaaaaattttaaaaaaaaaaaaggagaaaaaataaacaaaaaggaaagaaaaaaaaaaaaaaagaaaaaaaaaaaaaaaaaagggaaaaaaaaaaaaaaaaaaaaaaaaaaaacacttgtggcccccttggcccaaaccgtttttaactggggccagttttttcctggggcccaattttggggtcatttggcccattcccccttttgggggggattttaaaattccagggccggtgttttaaaaccgcgggactgggaaaaccctgggggtcccccatttaaacccctttggaaaaattccccttttgcccgggggggtaattgcaaaaggcccccacccggaggccctttccaaatggtggccacccctaatgggaaagggaaatttgagggggttaattttggcgaaaattcccggcaaatttttgttaaactcccccattttttaccccaagggccgaaatttggaaaacccctttattataaaaagaatttccccgtatagggttcggcggtttctccaatttggacccaagggcccctttttaaaagccggggctcttcaacgctaaagggcaaaaaccgcttttttagggcggtggcccctctcgtggaccccttcccctta

SEQ ID NO: 485989 - DNA, 156 bp, Homo sapiens
gatcatctgagcatcccccgtattgacattcaacaccccacaatactatgctccctttcgtgatcgtggggttgtacgtattgcattcaacacaccacaatactatgcttcgcacggttagggaggctaggaaagatagtgatcgtggggttgtaa

SEQ ID NO: 485990 - DNA, 632 bp, Homo sapiens
tccaatattggtcaaaaccaattaatattttgtgggaggaaaaatctggcttacccagtacaatctttattttctccgaggcaaataggttctacaaatatatcttcctggtctctttggagacaagaaactctcagtcttcaccactttggccagccggggaagcccttgggaaggggaatctgggccgccatctggcccccagtctggcctcttccccagggggcaatcttcaccaaagtattgtgggaatatcctggggccccccccacacaggttcaggtcatatcgctctccattattcttctcctgtgagacacccacccacctctctccatctctgtggcctgtgctctcccaccaaccccccaagacacgcgggtgtggcgcccagggctctccagggccagtgtcgccccacatctcagagattactccagacacgttagagggcgatatcttctccccaccggtcgctgtggtgcgtggaggagagaacttttccccaaatctccttctccttcctctcttgtgtgttccaaggaggctgtccaagagcttggagggggccccccagctccgaggtgtggaaacggaggcccggaggctatcggggaatataagaagtggta

SEQ ID NO: 485991 - DNA, 129 bp, Homo sapiens
cgcggtcatacagggcctgttcaggcatcgagcacgaagtctgtactcatggtgttgctcacgcgccagccgacgatgcggcgagcgaatacgtcgatgacgaagccacatacagccagccttgccagg

SEQ ID NO: 485992 - DNA, 142 bp, Homo sapiens
ccggatcttatgtatcccacccccacaaaacaaagtagtataaactcccccccgcataagttacacatccaaactctacatttacaaaacgaattcagggtgaggaagtaaaaacaggtcatctgggtggggataccagggg

SEQ ID NO: 485993 - DNA, 583 bp, Homo sapiens
gaggagaggtagagaggacgcagacagagcatatgtaccagtatttgataagggtctgaaggaggacagtgctccttggatgaaggaactacattatgtagcagctgtgtgagcagccagtttccttgattctcctgggctggttctggttgtatctgaggtcaggaagctacttaatgatcatattgaggaagccctgcagagctgtagaattttacaagttaggtcttaaaagatcagatcactggtagccatggagtttttccaaaaatggttgactagaaatcattaaggaagaaataaatatatagtaaaattcctttctgccactgaagaagccttaacttgggaaacatacagaagtttcggtgtgtcccatttacctggtaaaaatcacattatgacattttttatgataggaaagttgttaagactatatcaagctggtaaacttatgagttctaaagaatactttcaagatagttttattactggaaaaaatataagccactgttgcccagcccatcaaacagttttatcttcagagatgggattatcaaatgaacagacacaaagccattat

SEQ ID NO: 485994 - DNA, 317 bp, Homo sapiens
tgtctatcaggacgtgtgtatccaggcagcagtggctggggccagtgtgcggtgtgggtggggagtgatttccaccaggactggccctgtacggggtgagctgtgtcaaagtagctgggagcagctggtgttgatagtggcataagggacgtggagagcagcctgggaggcctgcttgggtgcccatgctcgtgctctcagcgcctaggagctgctgtgggctggctgtgagcctagggggtttttgcgggttgcttcctgtcggcaccgccgatgaaggcggtagccacagttcaaagagaagggctccttgagac

SEQ ID NO: 485995 - DNA, 252 bp, Homo sapiens
cttcaggaaattttcaagacattttacttaggcaagcacagtggcaggaaactccagtggcagtcaaccttgggacactgtgtgctaaaagctgaatttaaagagggcaaaaaagaacttcaggtctctctttttcaaaccatggtgcgtgctaatgtttaatgaaggagaagaattcagtttagaagagatcaagcatgctactgggatagaggatggagaattaagaagaacactgcagtcactagcctg

SEQ ID NO: 485996 - DNA, 125 bp, Homo sapiens
tcgatcaggagcaggaagcattacagaactcagccttcttgaaactggcaaactccgtcaccgctcagtgacttgcaaacgggggttcagtataacatcactatctatgctgtggtctgctgcag

SEQ ID NO: 485997 - DNA, 370 bp, Homo sapiens
cggacacaggaacgccgtctccttcattggggacagtgcgtcacacttaccgccgccgagagagggacccaaatacagaccgggctaataatctgacttctgggattaccacacaccaaaccaaagcatccacaggaatgaaagcagcagcactaatccacttccctgaactacagcccatcacagaacactggtctcgtgacgactcggactcatctggactgaagagtttgtttactaaaataggtactttagggtcaggcgcggtggctcacgcctgtaatcccagcactctgggaggccgaggcaggaggatcacctgaggtgagtgattactaaatcaagctgctaccaacgagagaaaacttcc

SEQ ID NO: 485998 - DNA, 120 bp, Homo sapiens
agttctctgaagtcatccttatggccccttccacagagccattagacgcatcccggcactcaatggattaccaaggctggtcacaagctcagttaaatgcgcggcctcacgtaagcgggc

SEQ ID NO: 485999 - DNA, 366 bp, Homo sapiens
ctgcaaggttgggcttacacctctgaaacaaagcacgagctatacttggccttttagcgtgctggagcaaagcagctgggattcagggcaacattgtcctgaggcagcacagagcagggagaccctgagcctggccaaggaaaacatttttctctcccataggagtggctgccatgaaagtctctgacatgcgcagagatttttttcccattgtcttggagattaacattcagcttctcactacttatgcaaatttctgcagcgggcttgaatatttccccagaaaatgagtttttcccttctatcacattgtcagtctgcaaattttctaagctttttatgttcgttccatttcgggtaccgagc

SEQ ID NO: 486000 - DNA, 332 bp, Homo sapiens
  misc_feature (255)..(255): n is a, c, g, or t
gtacaacgtatgaataaaagcagccttggggcggggcggggcggttaacaaaatgcatctcagcaccagcctagagaaacttttctgtgtgtaaacagaagaggggttaccatgcgagaaattcattacaggatttcggagagggctttttccttcagacatagcagtgacaaagaataacgtcgtggtgcaactaaatctggatactggacgctggtgtcgacttagaagtccggtccacaaagttcatcttcnaggcaattatgcctagagtgatcaacttacacattcttctggcaacacggtgacacgtaacctgttgcagctgtgct

SEQ ID NO: 486001 - DNA, 888 bp, Homo sapiens
  misc_feature (25)..(25): n is a, c, g, or t
  misc_feature (61)..(61): n is a, c, g, or t
  misc_feature (73)..(73): n is a, c, g, or t
  misc_feature (109)..(109): n is a, c, g, or t
  misc_feature (130)..(131): n is a, c, g, or t
  misc_feature (134)..(134): n is a, c, g, or t
  misc_feature (138)..(138): n is a, c, g, or t
  misc_feature (171)..(172): n is a, c, g, or t
  misc_feature (185)..(185): n is a, c, g, or t
  misc_feature (188)..(188): n is a, c, g, or t
  misc_feature (192)..(192): n is a, c, g, or t
  misc_feature (195)..(196): n is a, c, g, or t
  misc_feature (201)..(202): n is a, c, g, or t
  misc_feature (208)..(209): n is a, c, g, or t
  misc_feature (211)..(211): n is a, c, g, or t
  misc_feature (213)..(213): n is a, c, g, or t
  misc_feature (216)..(217): n is a, c, g, or t
  misc_feature (240)..(240): n is a, c, g, or t
  misc_feature (242)..(242): n is a, c, g, or t
  misc_feature (246)..(246): n is a, c, g, or t
  misc_feature (270)..(270): n is a, c, g, or t
  misc_feature (310)..(310): n is a, c, g, or t
  misc_feature (340)..(340): n is a, c, g, or t
  misc_feature (386)..(386): n is a, c, g, or t
  misc_feature (413)..(413): n is a, c, g, or t
  misc_feature (420)..(420): n is a, c, g, or t
  misc_feature (423)..(423): n is a, c, g, or t
  misc_feature (433)..(433): n is a, c, g, or t
  misc_feature (474)..(474): n is a, c, g, or t
  misc_feature (521)..(521): n is a, c, g, or t
  misc_feature (882)..(882): n is a, c, g, or t
tattttgctatatctgtttctcagntaagcaggaacagctatcctaagctgggacattacnatacctataatnaccctcagaacacaagttccattaagtagaaaggangcatcatatgtgttctttttnnggngagngccccccttgggggggagagacatacccctaannatcttactctacngtncaanggnnggggnngccacnngngnggnntcaggggactgggattggggggngngatngggggaggggggagaggggcgagnggccactctggactttgcatcttggagtttcaattttgcnttaggatttagaccccagtttataattaanaccaaatcattcccacattattatacttatgtaggaaagccttgcngtgtccactgttaacacaaagataganaatggcnaanagtttaagcnagtatttggcagaccacagacatgaaacagtgccggcgganacggaaacactttagtgttttagaggtgagagagagtgaggggtgtnagggcagagggcgcagctccttcttctacatctttcagattgagtacttccaaagaacctttgcctttagtttccttttttattagctcatcaatttctcggaagcagcccgggtcaatcagacatacgatttctaactgttggccataatcttcactttctatgaccttgatcagtggcttgagcttttctttcagcttcttgccttcattgactggaaggatgaaccgaagcctcatgtgagcacgttctatcttcattttctcttttaactgctttatcacttccaaagcctgctgttttgtactcttgttgggtttcaccgaatagtggatgtccttcatggctctctcaataaggntcacgg

SEQ ID NO: 486002 - DNA, 125 bp, Homo sapiens
acaggaaattcttcactccagattcctcctttcaaaagcaaccttcaacagactcatataatatgtatgctgggcaggagtctggagcacattcttacagatgatgtagtttacagtgttatgat

SEQ ID NO: 486003 - DNA, 918 bp, Homo sapiens
  misc_feature (18)..(18): n is a, c, g, or t
  misc_feature (66)..(66): n is a, c, g, or t
  misc_feature (68)..(68): n is a, c, g, or t
  misc_feature (75)..(75): n is a, c, g, or t
  misc_feature (79)..(79): n is a, c, g, or t
  misc_feature (93)..(93): n is a, c, g, or t
  misc_feature (143)..(143): n is a, c, g, or t
  misc_feature (183)..(183): n is a, c, g, or t
  misc_feature (188)..(188): n is a, c, g, or t
  misc_feature (197)..(198): n is a, c, g, or t
  misc_feature (310)..(311): n is a, c, g, or t
  misc_feature (375)..(375): n is a, c, g, or t
  misc_feature (383)..(383): n is a, c, g, or t
  misc_feature (397)..(397): n is a, c, g, or t
  misc_feature (399)..(399): n is a, c, g, or t
  misc_feature (467)..(467): n is a, c, g, or t
  misc_feature (484)..(484): n is a, c, g, or t
  misc_feature (499)..(499): n is a, c, g, or t
  misc_feature (506)..(506): n is a, c, g, or t
  misc_feature (510)..(512): n is a, c, g, or t
  misc_feature (529)..(529): n is a, c, g, or t
  misc_feature (531)..(531): n is a, c, g, or t
  misc_feature (536)..(536): n is a, c, g, or t
  misc_feature (542)..(542): n is a, c, g, or t
  misc_feature (658)..(658): n is a, c, g, or t
  misc_feature (663)..(665): n is a, c, g, or t
  misc_feature (670)..(670): n is a, c, g, or t
  misc_feature (675)..(676): n is a, c, g, or t
  misc_feature (691)..(691): n is a, c, g, or t
  misc_feature (704)..(704): n is a, c, g, or t
  misc_feature (716)..(716): n is a, c, g, or t
  misc_feature (835)..(835): n is a, c, g, or t
  misc_feature (917)..(917): n is a, c, g, or t
cattcttttctcatccgngtcctttaactgctaatattacctttacagagacaaacattataaaangngcctgantggnaatttattaactcnatctgtcaagtgataatattctgtaggcagcctttgaaatgatgtgttgngaatttatttacaaccattgaacacagatggttttgtaanactgncaattagcnngcgccttaaactcacaacatacatatatttcaatatttaaatagcctgttttcttcaaaagtaattttctactgctttttcataaaaatataaaaaagacaacatttatagnnttaaaaacctatatttaacccaaatcaaatgtttttctacaaatgatacctctttccaaaaagngaaaaagncatcacagaatacngngatgttaaaccaaagactcatcacaataacagcgttttacttttaagaaatattgtgcagtatctccnttttaacctttcatgcnagatttcaactatgngtatccnatgnnnacggcgggcagtttgtngngagtngttcanatatatgcagtagactgtcatatatgaccagttaccatacaaactataataccatattttcaaaaatagcaaaaagcaatctttatgaaagcttaaaaaaagcttttaataaaagncgatnnncattnttttnnttttcagtaaaaatnacctcttcttccnacctttcccccngctttgaatggtaccttttattgcatgttaatacacaaagatatttctagcacttctacttaagtgagcctcttacatggctgctttcttttctgatacactgacttttaacagaaggnaccaagattagactcctaagaagtttcaatttttgttgtcccttttttaggttcctctagaataattttcctcagaaaaggnt

SEQ ID NO: 486004 - DNA, 1272 bp, Homo sapiens
ccctagagagccctgagcagccccaccgcctgccgccggtcctagttaccatcacaccccggtgaggagcctgcagctgcctgctagccggcccctattctaccatcactcgtcataccatgtagcatgctgatggcctgataccctagcaggcctgcttcgtggttccccttgtgtgtggtcccatccgtcgtccaagattacctaattgcccttgcgcacacatgatagagcaccgatacagcacgtcactcaggtagcgcaccgatcgtgccgcagcaggaccggccttgtacaagcactaatattagccatgccatgctcatgcatacgcagagaagcgactactaggtaacgaataaagacacacgtataaagcgttagatcggtggatcccaccaccgtaaatagatataggagcaacacaaaagagtacgcataacatcagggcgcgcgcgagcaatcaataggacaacttaaacaaaatgggtaaccactccgcttcgagaattgctgcgcaccccacaatagggtccatctcacgcggagtcaatcacctcaggctagagacatctatgattctctactggtcgacccaacctcgacgatgcaggacccaccccacactcatcacactcccaccctctagaacgcgcacacagcaggagtaaatcctcatttcttccctacgccgaccataccagtacctacacacgagaacgccgcagctccggacgacccagcccccacacacatacagcacaagacgcgtcgtttacccgcacccggcacacggtctgcctgataaccaaccaagcgcgcgcggcgcagaccactacacactagcggcagagcacactcccatacgtagtcgacagtagcagaccatgaaggaacacgcccgaaccagacaccacgctgcccactaggggtagtagttgttagtatgagacacctactattaacgtcacttagacggcaacacagccaacacatacacagtacacacgaaccaaacaacactaaaaagcgtcactatcaataccaagtcgaacagccccccccatacaagatctatggcacaaagcaactcctccacctttcaacggacagtataatcctattattacagagcagaaagtgtcgataatgcagtaccagcatttcgctagtagactatgccacacaccaaagagcacgcaccccactcacggatacagaaacagaactgcgttattggagcaacctatacacgatagtcagcgcaacaaa

SEQ ID NO: 486005 - DNA, 1045 bp, Homo sapiens
ggagagaactagttcgagtttttttttttagggtccaaatggctccaaaaaagaagaaaaataaggggaaaaaaggtgttggagccttctcaaagcactgctgccaaggtgcccaaaaaagcgaagacttggattcctgaagtcatgatcagaaagcagatgttgtcagcttggaaggacctgtttgtccccaggccggtaactccgaagcactcagcttactaaggctatctctgcacccacaaccaaatccaagccctgaccttggcacctgccatccgtgacaaatgtggacatccttggggctgctgaaaacaggaaggtgggaaaactctgtgcctttgtgccatcccaagtgatttcatgcggtgttgcagtggcaaaagcaggaatgctgccccttcactccaagtaacaccgaagcaccaccgtggagagaccagaaactgaggccggagctgagattagaatccaccaggcaaggctgaagctgagtctgatgcatgtgcctgaggaatactgtaatgtgaaagtgaagcactgcccagggatatggcaagccgaggccaaagccaagactggaggcactgtctcaaaccaggggtaagctcttgggtgacagataatgctggtgaagggccttatccctgatacagggagaaactgttcccaaacagattgagaatgaggagggaaatcttgataaagaagcagactgggaactctaagaacaaggagtagaatgaacaaagggaaaacttgaaagggaatttcaaaagggtccatttgttggacattgttactgaatcacatattagagagaagcgtggacacgacaagtgttcaaaaaaagcacaaattgaatgccttagtgcacaagttaccacgaaacataaacacactggaaaataagagtaatagaagaaaattccaccagcaacaaagcgcaacagggaatgtgtaacccggtgagccctgagcaaacggggattggacaaaccaagaggcagtagagtgggagaaaaaatacacacaacagcctaca

SEQ ID NO: 486006 - DNA, 289 bp, Homo sapiens
tacgtacttagtctctctatacttcaacttctagcactagatagcgtactatgtttggcctctaacttcctatatacttgtcactataacaggctgatgatcgaggcgtacggcccagcttagtacaaaacttcataccactcttcatcgtccccacagataatgtattcagagaggtccatgctcttcagcttccctacttccttctagtgtttctcctgaaattcctttgctgcttcatctaggtcgtcactgagggtcttcatcgtgggccaccataacactgacc

SEQ ID NO: 486007 - DNA, 1072 bp, Homo sapiens
ggcacaagcacgcctcgacgtgcttggcagggccgcatctagtgctacccaggcgctgacgatgcagttggcactatacggatcagaggctgtgcttgacgagatgatccgtagctggtggtgccggaacaggagaggctgtactgtgccacaaatgaagtggtagaggtggagacgccgtgctggtgaatgctgtagatagaaggagctggcgtgcgagaacgctagactagtgtgcaagcaattgggcgctgtgactggtacaaagatggcgtgcagaatgggtgtgcctatcgccgtagtcagctcgataaacacatgttcgtgtggctagttgcaggttctagaacatgaaataaggccattctgtgagtgtgacgggatgtgaatgtgctatgctggatatgccagtccagctatcagagtcagccatggggaacacttagtctactaatagaagactggaagcgtctaagtcatcccctggatcggtgtccgtgtccttaagatcatcgaagtactgggtgcctccggacgctgtggaagactcccccaagtatgatctgtgttgatgtaccagcctggagatgaacgagtggacgattgacgcgtggctactgtgtgaccgacctgtacctggtagggagtgtgggctctaggacgtgtgttaatcccaaggggagggctcgacagatctttggcgggaggccttggggattgggcggtggcatgcctcataacaagaagttcgacctccggggggatcaccttacctaagcaagatggaggaagtactacaaccaagggggggcactcagccactgaacactggctgcacgcgagggataagccgactccttcaccaaacgaggacacagccgacggagacacaatcccaaagtacaagacgcggaaggaccctccgacgtcccgagaaccttggatgtacaccaaaaggggcgcatccaggaagagtgacccaaaggggaagtcctgcatggcggccggaacacttgcgacctgaaaagaaacagagaaaccacaaacaaacaaaacccacgaaaaaaaaaca

SEQ ID NO: 486008 - DNA, 182 bp, Homo sapiens
agattcatcagactatgccactcttctgctccaaaaccttcccaaagcttgtcacctcactccagagtaaaaaaaaaagacctcagccaggcacggtggctcacgccggtaatccgagcactttgggagtccaaggcgggcagatcgcctgaggtcaggtgttcaagaccaacatggccaac

SEQ ID NO: 486009 - DNA, 256 bp, Homo sapiens
  misc_feature (12)..(12): n is a, c, g, or t
ccggtggccaantggcatctctcatgagaaaacttctgagtgcagcatgtgctggggcgacactgttgggcttcagcaaggtgcttccaggtagatgtggtggtcactcagagccttgtagacatgagcagcaccttctcggtcacatactggcagctgcttcaagtcatggtccgcatccggcaggatctcaggctccatgatgggcacaatgacattctgctggtagatactgtgatagtggcagagcggggta

SEQ ID NO: 486010 - DNA, 258 bp, Homo sapiens
gacttagaatgcccccatacaaaacaataagctaccgatctctcctttgctgtcatgttcttactttttccctgtgtgttaaaaatttcagcccatgtccttttgatggcgacagccacattgtttcagtttataaggcacattcgaataccttttcccacttgctactcacacccatcacttgaggtaggcagtttgggttttatcagagagattagatgatttgaccaagaccccacagatgactaggtagacaaa

SEQ ID NO: 486011 - DNA, 1272 bp, Homo sapiens
  misc_feature (380)..(380): n is a, c, g, or t
  misc_feature (547)..(547): n is a, c, g, or t
  misc_feature (575)..(576): n is a, c, g, or t
  misc_feature (603)..(603): n is a, c, g, or t
  misc_feature (605)..(605): n is a, c, g, or t
  misc_feature (713)..(713): n is a, c, g, or t
  misc_feature (724)..(724): n is a, c, g, or t
  misc_feature (798)..(798): n is a, c, g, or t
  misc_feature (938)..(938): n is a, c, g, or t
ttctttattactattatttattatttctactattcttttaaaaaattattatcgttacacgcagcggttttaggcactatgaagtgtttattgcctcggggctgggaacctttgcgcccttcttcagctgtgctctcaggcagttaccggccagacccggaccggaaccttggcgcggtgacgctagtttccggcgggctacttagagcgccgaacagctctgggccaaaggaccatgagagggccggagccgggtccccaaccgacgatggagggagacgtgctggacacactggaggcgctggggtataaaggaccattgttagaagagcaagcccttacaaggcggccagagggtggattatcttcacctgaatttncagagctctgtattggttaggctctcaaataaaatcattatgcaacttggaagaaagtatcacgtctgctggaagagatgatctagagagcttccagcttgagataagtggctttttaaaagaaatggcatgtccatattctgtactcatatcaggagatattaaanatcgtttaaaaaagaaggaggactgttnnaacttctattatttttaagtacagaantncaagcttcacagatattacagaacaagaaacataaaaattctcaattagataaaaatagtgaagtttatcaggaagtcaagctatgttgatacacttggtatacccangtcaacaactnctgacattccgcatatgctaaaccaagtggaatcaaaggtgaaagatattctctcaaaggtccagaaaaatcangtgggaaaaccactgctgaaaatggatttaaattcagaacaggcggaacaactggaaagaatcaatgatgctctttcctgtgaatatgagtgccgcgacgaatgttaatgaaacgattagatgtgactgtacagtccttnggatggtctgatagagcaaaggtaaaaacagatgatatagcaagaatttatcagctaagcgttatgcttgtcaccaaagaaaaacgattacaatgggaaatctactgctggtcgtgaagatctaatccagatcataggaccagttctgggacagcggaaaaaacgatgtgccctataaggcgccggaagggcctgacaggaggcgggactgcaattggaccccctcgaaggcctggaaaaaaaggaggaaggggagaaggagaagaaaaaaacgggagaagaaaaaagagacgagaaaacaacgacaaagaaacaaccgaacaaagaaaacaaa

SEQ ID NO: 486012 - DNA, 482 bp, Homo sapiens
ttctttattactattatttattatttctactattcttttaaaaaattattatcgttacacgcagcggttttaggcactatgaagtgtttattgcctcggggctgggaacctttgcgcccttcttcagctgtgctctcaggcagttaccggccagacccggaccggaaccttggcgcggtgacgctagtttccggcgggctacttagagcgccgaacagctctgggccaaaggaccatgagagggccggagccgggtccccaaccgacgatggagggagacgtgctggacacactggaggcgctggggtgagtgcttttggagacgccttttccctgaaaacgcaacctctccttggcctggctgcttagcctacttcccttgggcctctgtgggcctgggcggccatgtgtaggcctccttccctgcctcgatccctccggcgccgacggagttaagcgggaggcgggagagaaatctattt

SEQ ID NO: 486013 - DNA, 442 bp, Homo sapiens
caatactagttctactactacataaatgtgaggaatactatattccactcacagaaactgcattatagtttgcaatcatgtatgtttcattgccagaaacgcttactgtgtatttgactgactgtacgtcacactattagttcataagattatattttcccatacttactacacttgttatatcctcactaatcatttggcttacattggactcatttccagcacttcgtttttgttcatctcgtgattaaaaaccctactagtgtaatttgatttgagccataaaacacattttaatattagcttgtattatagttattaagcttgtttttgtggaaaaaaacttactaaaacctaggtaactctagattaggccagttcaggtgtattttgtatcttagtaatggatcatatcgtacaaatagagataagttgggaagat

SEQ ID NO: 486014 - DNA, 313 bp, Homo sapiens
  misc_feature (14)..(14): n is a, c, g, or t
  misc_feature (22)..(22): n is a, c, g, or t
  misc_feature (165)..(165): n is a, c, g, or t
  misc_feature (210)..(210): n is a, c, g, or t
  misc_feature (287)..(287): n is a, c, g, or t
  misc_feature (306)..(306): n is a, c, g, or t
gggaaggctctggnttgggacnaaagtgtcatggcattacggctcccattgaggctcaagttcggctaaagggagctggctaggagccaaaggcagcgcatatggtttgcgggcgccgattcctacaaagatgctgtccgggccatgtttgcccggttcactganatggagtgagagagagagagagagagagatgacaaggagcacaanaagtggtccatctcccgaattcgctgataccgctgtctctttaagggcatgccttgtgctgtttagatcttagggtnaccacttcattctgcgggntctccct

SEQ ID NO: 486015 - DNA, 484 bp, Homo sapiens
gagtgcagagcatccagctgctgctgcaggcagcaggagctgtcaacagcagcaccatggtcagctccacaccagcaagcaaccttgcaaggctcatgtgggcattatgccaatctaccccaacatccaagtcatacgagcaacaatcaggtgcaagcagcaggtattagcacattccacggcttcatgggtcagtaggagtgcaatcctaggcattagggcacacagatacagcacaacttcaatccaaactaccattacataaccagtcacaaggagtcttgcatattatctcccaggagataatccacaggtcactgtcctcaatagcacatataaaaaaggacgtgatacaagagtggagaacaaaagtcccaggcagataaaagaaatcaacagcagaccgcgctggcaaggataccaggccagtggtcgatggacgtacaagcatacgatagactgtggagtaaagcccgcaagagaa

SEQ ID NO: 486016 - DNA, 338 bp, Homo sapiens
  misc_feature (75)..(76): n is a, c, g, or t
ggtattcacagatacatttattaatgccacattataaatggtacttagataagtgtacagtgatgttccatgttnncatctaacaaagcttgctcaagtttagccgacgtcttcatcttgtggattcggagcagttagtgatggccatgggcaggtgcaggacctttcaaagctttacttcttttatcagcactcctgattttatatacgatgaggctcattaaccccactcctacccaaatttcctggtaaacctgggtatagtagggtttcatggggacccagactttttgaatcaaggtttgaaacatctgtccaggctcgtgccgaattcctgc

SEQ ID NO: 486017 - DNA, 352 bp, Homo sapiens
ctaaaattggaaaaaactgtggcgaagatgagagcgccggcaagggcgtaggagatggaggccagcaagtcactcgaggtagatggagacaagcaggtggagagatgcatatggaacttgatgaggcaaagaaatagaaacttagagcaactccaacggttttgcaaatgagcttggcattcctgtttttgcaaaaaagtctataaaactcctatctaacggtttggcaaatgggctttgcatttttgttaacttggcaaaatcctgggatggattggcatatatgcaagctcgcgatcggcttggcattccgtctcatgcgctactcccgcgtgcgctcttccctctcacg

SEQ ID NO: 486018 - DNA, 374 bp, Homo sapiens
acacccccctttccgctaccaggagtttctgtgcctgaccaaggcacagatggtccagtagtagcttccaagtggacgattgagaaaactatataagtgaagcatgcaccctcgtcacaggcctcacatatgagccttatcgttagggcataagtcggtttgttccttaggtcactcaccgcccagcgggaatcaccaatgaagggaagtatggccggtctgggccaatccaggcattatgtcgtgtaacatagcagcgcttgttcttaacggagggtctggtccacttgcacccctcctcttgatcacgtgctatgtgtcacaaaaagtggcgccatgtgtccgcgttagcacaacatccactaacaccgtct

SEQ ID NO: 486019 - DNA, 168 bp, Homo sapiens
acagctcctgattagctggtcagctacaggcgcccaccgaccgaaacctgggtaattcttgtatttttagtaaagacggtgttttaccacgttgggcaggctaggtctcgcactcctgccctctggtgatccaaccacctctggacctcccaaacgtgctgtggatta

SEQ ID NO: 486020 - DNA, 883 bp, Homo sapiens
  misc_feature (6)..(6): n is a, c, g, or t
  misc_feature (83)..(83): n is a, c, g, or t
  misc_feature (94)..(94): n is a, c, g, or t
  misc_feature (96)..(96): n is a, c, g, or t
  misc_feature (123)..(123): n is a, c, g, or t
  misc_feature (125)..(125): n is a, c, g, or t
  misc_feature (153)..(153): n is a, c, g, or t
  misc_feature (158)..(158): n is a, c, g, or t
  misc_feature (206)..(206): n is a, c, g, or t
  misc_feature (210)..(210): n is a, c, g, or t
  misc_feature (239)..(239): n is a, c, g, or t
  misc_feature (247)..(247): n is a, c, g, or t
  misc_feature (287)..(287): n is a, c, g, or t
  misc_feature (302)..(303): n is a, c, g, or t
  misc_feature (336)..(336): n is a, c, g, or t
  misc_feature (348)..(348): n is a, c, g, or t
  misc_feature (363)..(363): n is a, c, g, or t
  misc_feature (366)..(366): n is a, c, g, or t
  misc_feature (399)..(399): n is a, c, g, or t
  misc_feature (420)..(420): n is a, c, g, or t
  misc_feature (430)..(430): n is a, c, g, or t
  misc_feature (438)..(438): n is a, c, g, or t
  misc_feature (494)..(494): n is a, c, g, or t
  misc_feature (523)..(524): n is a, c, g, or t
  misc_feature (526)..(526): n is a, c, g, or t
  misc_feature (529)..(531): n is a, c, g, or t
  misc_feature (534)..(535): n is a, c, g, or t
  misc_feature (537)..(537): n is a, c, g, or t
  misc_feature (542)..(542): n is a, c, g, or t
  misc_feature (714)..(714): n is a, c, g, or t
  misc_feature (769)..(769): n is a, c, g, or t
  misc_feature (799)..(799): n is a, c, g, or t
  misc_feature (810)..(810): n is a, c, g, or t
  misc_feature (869)..(869): n is a, c, g, or t
tatctntctgctcccagaccacgtgtgatgaggcaggatgggcagctcaggtggtgtctccattgaggtcagggtgctttgangggctggggtngnttctaagacccccgcgtccttggagananctgcaggctctggtacagcatccctcanctgancctgagttctctccatctcatttaggcggtgctccaggtttttcagantgtncccttcattgcttgttaggttgtgctctnaatcaaantctgattctcccagcacggagcctggatgtccagatcctncagctggccccgcanntgctccttctgctccgtcaaggcccggatttgngtgctcatcgantccactaggcggganagnactttctgctcctcacgcatagcggctacctcncattgcagctctgccaacttnttcacaggtnggtgcgtncccagtgctctggtttcggttttgcggttgttttatttttcgctgccagggtacgncggcttccgaggcagcgaggcggagtccnntnttnnntgnngngcgcngggcgctggtcccatgctcagggagcctttgggtcgcggccagggccccgcagattggcggcggcgggcaggacgccggaccgggacactctgcgtgcgctgcaccggccggggccgccgcaggcgccgctcttcgtccggccgtggcgggcccaactctctgagcggcgancctgcgcagagactggctcttggagatgagaggggtgtgcttggggaggtcccgnggggccaggaagccgggcttctcccctgcngagaggctggngtggacctgggccgggggcagtgcgagacgcattgcactgacacaagcacaggctggcnctctcaatggctcg

SEQ ID NO: 486021 - DNA, 715 bp, Homo sapiens
cgtggaaggtttctcgacgtcccccgaggggcatggccagtgtctgtctaatccttctggcccatctctgtgtggtgatggagcctctctggtgatagcgtcccctcactcctctcccagccatcgcgatttagtcattcaccacaggtacagaagggggcccctctccaggacctcacacacattaactttcactcgtacacatggcaacagacaagaccatctgctagcaggcctggaccaaggagtatccaccttatcagaagccatgccacgttgctcatagctagcattgctaatctccatgtggaccacttgccgtgccactggacccacattgcaagcatcccatcccttcatatccaaacacctactttcatggagccttcatcacacactacacagggatctcagcacgttgcaccccaagtggattgtgccttggcatcgtgaccaccaggctcgcctgctctgacgaacgtcccaaacaccgcactcagatcctggccctcaacaagcatcaagggggatggaacccttgtccacactaatttccacgaaactacacacaagaggtacaaccccaaacggacatgtgagctaacgcatagtctggccacagcatacttagcgattggaacatccgctataatcaactttaccactaatatctggcgcgaacgataaccatcaacgactgtgatacccgtctata

SEQ ID NO: 486022 - DNA, 125 bp, Homo sapiens
tctctccacactggatacccatagtagctgcacacagtaggaaccccagaaaagacttgccccttctgtccctgcagatgacgtcacggctcccacggccggcaggtctgccgtcggcatgagct

SEQ ID NO: 486023 - DNA, 415 bp, Homo sapiens
ggcacgcgagttatatttttttaactcttatatcaggttcacgggtacatgtgcacgtttgttatataggtaaattgtgtgtcttgtgggtttggggtttggtgtacacattatttcaccacccagtaataagcataggacctaataggtaggttttttggtttggtttggtttggtttggtttgtgaccgagtcttgctctgtcgcccaagctggattgcagtggtgcgaacttggttcactgtgaccttcggcttccaggtttgagggatttctttggcttaggcttcctattagctggaattacaggcatgtgccaccatgcttggctttttggattttcagtgtagaccgagtttcataatgttggccaggctgtgcttgcccctgagcttgggtgataccctgtcttcgg

SEQ ID NO: 486024 - DNA, 334 bp, Homo sapiens
tatatataataatagagtttgatactatcacatgaagttataaaaactttaaaggaaagattcctgacaggtgaaccaaaatcaatatattacaatacagcctacatcaaataatccatatttaacagtgacaattctttgcacatatcttaatcatatgactgcgttggatagcaccacaagaagtttgggttcaaaataacccatacttttatatcttaaaaaaacaaatcttaaaggaaggtctaaacttttataacctcagacaaagaatcttaaagaaaggtctaaaaggcatatattagaccttctacgggaactctgtatatttccg

SEQ ID NO: 486025 - DNA, 1097 bp, Homo sapiens
tccattttaaagggggtgcccttttattcaacgggtctcaagtcagggtacaggtaaccccgggcttgccctccacccacttcccggggagaccaaaagccttcatacattctcaagtggggggacaaaaaggggggaaggggggcgcacgaagggctcatcatctcaaaattaacaacacaattaaaacaagtattaggggcgaacgattaaaacaattttggcattacttataattttacacgaaaagcaagtgcttattcaccctccccgtggtgtgtggcactggggagaggcacgtgggccattctcctttaggagagaaggtggggtgggactttaaggagtggcaagggacttccgtgttaacaacgcatcctcatattgggaagtgactattataaaagaaacaccaagtggtgccacactcaaagttccctcggccacattgggtaacccttggggggaatgcctcgctttccaaccgaatggccgtgctccaccttttcacgcgtcccagctctttacaaaactcgcgtgagagtctcacagccccaaaaaaaaaacgcaacagaacagacacccaccaacaaccacaacaagaaaacaacacccggggggagacactctattagactgcgggaggcgcgggcgaacacacacagcggcgcacacacaaaaggggcacccacagagggagcccaacaaccgcggtggttctcgtaggaccccacacaacataactctcggaacccacaacgcgggcgccaacaatcctcaggcgcgggacacaccccccaataaatagcagaggacccccgtcaaactccctcgccgaacaccaccccgggtgttcaaccccgggacctaaacaggacaccaggctgccacaaacgggatgtcacagcgcacacacacacgcccgacaagcgccccaccgcaggggcctcaccacaaccgctgccggggacccaagagaagacacacacgaacactcaccgaccccaccggcaccaccccaaacacatacaacacacaacgagcaactgaacaccctaatacgatacacgacaccaccacgcagcacgcagcgtacg

SEQ ID NO: 486026 - DNA, 268 bp, Homo sapiens
tcagaagctgagatatctcatctagatcttttgatgtagctgtttatctctttggaactttatagaccttgttccatgttctgaaatttccaggaatgcccaaaaggtctttttctccatagttttgatgggcctttccaacctggaactggtagccttaggttctgggaaatctttctcaaatggttttgctgatgattttctcccctccactttctttgtcttttctttaggaattcagacatgtgactgtctggattgctggggc

SEQ ID NO: 486027 - DNA, 122 bp, Homo sapiens
taggactctctacctgcgatcccctggtgatagtggtaaccaggatgatggtccgtcaggcagataccaccaataccaggaggccatcagcgccatcgctcccccacctccttttcaaaatc

SEQ ID NO: 486028 - DNA, 372 bp, Homo sapiens
ggtctctaattctagtgccacttatttccttcttcccccaggtccgtgactctggctttgagacagctgctttcccaactctcattcatgggaaacccaccctaggtgagcttcccacctcagagcaaactggagagaacccatgccaagtgcttcagcagtcgcggggatgagagtcctacgcaaatatgaaatgtggcatgcagtctcacagaagaacatgttctcaccaaggattgttacagagagctgccttgttcaaaggtccaaaacagctttggcaaagggtatctttctttccatatttggccagaaatatgagctgacagcaaatgctatgattttgaaatacatggcatattatttttgcga

SEQ ID NO: 486029 - DNA, 291 bp, Homo sapiens
  misc_feature (161)..(161): n is a, c, g, or t
  misc_feature (176)..(176): n is a, c, g, or t
  misc_feature (189)..(190): n is a, c, g, or t
tggagggattcacggcgaaatgagactgttcgtgagtgatggcgtcccgggttgcttgccggtgctggccgacagccgggcgtgcccggggcgtgttttgaggtgctcatcagcactgtcggcccggatgattgtgtggtcccgttcctgacccggcctanggtccctgtcttgcngctggattgcggnncctacctcttctccactagtgcaatctgccgatatttttttttgttctctggctgggagcttgatgacctctctttcctgtggctggtctgggacgcgacc

SEQ ID NO: 486030 - DNA, 123 bp, Homo sapiens
acgtagtccctgtctacccacaccaagaactctgctctgaaacagcagtccaagagctcctacccagaagaacgatctttagtccctcaaggtcgactgaaacttcattagaggagtttagag

SEQ ID NO: 486031 - DNA, 266 bp, Homo sapiens
ccaacgtctcacacaataggcaccaagacgtgaaacttttctaaaccaaaaggacgaagaaaaaacactttcaagaaaaaaaaaaaagaaaaacccaaacctatatttggccacttttaatattccgtccacccatttttaacaatagggtaaacggaatcaactctctgccacttgttgagcgggttggcccatcgctcccccacccccgggttacacaatttttaattttttcagaacctcactccctctcttatatccatcca

SEQ ID NO: 486032 - DNA, 1004 bp, Homo sapiens
aatgaaagataacaaaactaatgaacaactcaagatgccatagaacaaggctgcttagtagaggccaaggctttatataaccatatcaagcttataccacgctatcccagtggcactgaattctctacagatggtcatacctcgctacaccaccacagcactcgcaaactgccactactgctgctgaacctggcactctaacgacagatgcctactcaacgggcacactgcactgctagcagctctcactatcacgcacactgcactagcgctctctctttcctgctgacccctgctgcgctgcctgcgaaaccacatgctcctaaactccatgtgactaccacttctacgccctggactagaagccgtaagcaccgaatgcactcacagcaactaccaacatcaatactggagctcctggcatcgcaagcccctactaagccaactcctacagctaccacttggcccagcccaccacaccctggcacactaaccccgactccccacctaaacaacgcaaaaccacaggctccacagccccaacatcgcccaacaccactccactcaaccctccacacagacccagcgtcacaccacccgcggacacgcacacgcaactcctacacccactaactccacgccccccaccaggccacaccaccgcggacacgaccacgctcggcacctttcaacaccacccgcgacctaccccaacacgggccccccgctccggaccaccccaactgacaacgcccccccggccttacaccctaacaccaccgcaacccggtgggcccacaaacaaataaatcggggacccctcaacgtggcaatccctcaaagaaagccctacgcgccccggttcaccaaagcaccaaatcaccacatgcagcctccaccccgacccgtcccgcaccgcggcgcacacccgccaccgcccggcacccagaccaaaactaccacggccctgccacaccacccgaagaaacccacgagctcatccc

SEQ ID NO: 486033 - DNA, 344 bp, Homo sapiens
cactatctttcattcacacacacaaaacactcacacacacacacacgacatacttattacctatgtatcatgtattctgtttaaatctgtctctatgactccgcacccaccctctggaaaccagacagacaggagcaggacctatgcatgtgcctcacacattatagtaataacataccttatctacatgtttaaatgtacatttgcacacttgtgacacttattgagaaaaccaaattaagcaatgaatgggaaactactttgggaatatattatcagcatctgtacagatggaaaaccttttttaaaccagtttttaattttctaatttgtgttttctcttt

SEQ ID NO: 486034 - DNA, 375 bp, Homo sapiens
gctcgactgaaatcaacatgtcaaaaagatatctggattcccgtgttcactacagtgttattcacgataaccaatacgtggcaacaacccaaatgtctgttggttgatgaatgaataaagacaatgtggtacatatatgcaatggaatattattcagccataagaagcaggaaatcctaccagttgagacaacagggatgaaccttatgctcagtgaaagaagcaagatatagaaacacaaatactgcacttctgtgtggatctgacccatatgtggaacctaaaaaagtcgaactcacagaagcagagagtataatggtggttgccatggtctgggagtttggggcaatcgggagatgttagtcaaagaatata

SEQ ID NO: 486035 - DNA, 452 bp, Homo sapiens
tctagaggataccctgcttgtcctgcctctggaaattttgaacagaatgatcagtgaagaataattacaatgatatatcatttattaattcatttcacaagtatctactaaagctgcaacataccaggcccaatgtgagtaccaaggattcaatgacaaataatttgtagcccctcgtctatggacatttgtttgtatgtagtcaggaatcataacacagtgggtaacccggtaatcactccatgcctggagatgacatgggaaggacacgtcttctccaccaaaaaaagtgaggcttccccaggaggtaatgtataaactgagacctaaagatgactatgagctagcaaaagtgaagaccagtgaagaaaatcaaaagcggcagcacgggtaaaatcctagacaggatacgatatgggatatttagaaatctgaaaacagtttagtggctt

SEQ ID NO: 486036 - DNA, 671 bp, Homo sapiens
  misc_feature (110)..(110): n is a, c, g, or t
  misc_feature (112)..(112): n is a, c, g, or t
  misc_feature (497)..(498): n is a, c, g, or t
  misc_feature (504)..(504): n is a, c, g, or t
  misc_feature (506)..(506): n is a, c, g, or t
  misc_feature (511)..(511): n is a, c, g, or t
  misc_feature (514)..(514): n is a, c, g, or t
  misc_feature (518)..(518): n is a, c, g, or t
  misc_feature (520)..(520): n is a, c, g, or t
actcccgcaggaacctggggatggctggagagtaactgggagccacaggagggtccctgaggcctgggggtgaagagatgcaagacacaggggtggagcagcgtgaggcncntgagtttgtaggtgattcctgggtgtggggggctgactccagctgaaatctggggttgtttggagagtagctgggagacacaggagaccccccgagagctgggggtgagctgctgggtgatggcagtaagaacatgtggtatattattgatgaacgtggggactctgaggagtcctcagaggaggacacggcagagcccaatggcttcattgattgcccatcacggtgaggacagggaaatgggagcttgtgggattctggtgatgacagaggtgagtgtggtgaagccctaggggatggtgaatggtagttccggatccctggtgaggagcttccccttaagcctgagtttctgagaggggagagggagaagctgggtgaggcnngcatgnancttgnggngtcngngctgggggaccgctcatattctcccgagacctgtgagtctctgggggactcctgggtgcatggggctgactcccgcaggaacctggggatggctggagagtaactgggagccacaggagggtccctgaggcctgggggtgaagagatgcaa

SEQ ID NO: 486037 - DNA, 438 bp, Homo sapiens
  misc_feature (7)..(7): n is a, c, g, or t
  misc_feature (24)..(24): n is a, c, g, or t
  misc_feature (291)..(291): n is a, c, g, or t
  misc_feature (429)..(429): n is a, c, g, or t
aatttantgggacggagacagtgnggacaaaggaaggagaaggtcccagataaaatttagaagggatcatggttaaattccccatacacagttattattgaaaaaagggaataagtaatagaacttctcctacagatagtgaaagtatatcaggcccagacgtggtggcctcatgtctgtaatcccagtgctttgggaggcccaagatgggtggattgcttgagccaaggagttgagaccagcctgaacaacgtggtgaaactctgtttctactaaaaatacaaaaattanccaggtgtggtggtgtgtgcctgtaatcccaggtacttgggagactgaagtgagaggatctcttgagcccaggaggttgaggctacagtgagcagagatcacacttattgcactccagcctgggcaacagagtaaaancctgtctca

SEQ ID NO: 486038 - DNA, 163 bp, Homo sapiens
cgtggtagcgtatactgatgtatactgatattaccgtacttgtggccttcaaagagcctcaacaacacgcagatatacgttatacctatgtcattgaacattttatggggttagcagatggagacaatagagctttactaggatacagtagcggagcagggga

SEQ ID NO: 486039 - DNA, 90 bp, Homo sapiens
gaacaataattgtaaccgaataggaggagagaggcgtcccacctggcactcttgaaatcacctcttcccaaatgcaaagcacggggtgag

SEQ ID NO: 486040 - DNA, 113 bp, Homo sapiens
tactccatccagcctgggtgacaaagcgagactccctctaaaaaaaaaaaagggacggaaaaaggggggaaaaagaaagctgggggcaggggctcacgcctgtaatccaagca

SEQ ID NO: 486041 - DNA, 368 bp, Homo sapiens
catcagccagcagtgcaatgggtagtacgactgtgttgacggttccgacgaggcctcctgccccaagggggacgtgcgtacttgtaccaaacacacctaccgctgcctcaatgggctctgcttgagcaagggcaaccctgagtgtgacgggaaggagaactgtagcgacggctcagatgagaaggactgcgactgtgggctgcggtcattcacgagacaggctcgtgttgttgggggcacggatgcggatgagggcgagtggccctggcaggtaagcctgcatgctctgggccagggccacatctgcggtgcttccctcatctctcccaactggctggtctctgccgcacactgctggctgatgaatt

SEQ ID NO: 486042 - DNA, 632 bp, Homo sapiens
  misc_feature (110)..(110): n is a, c, g, or t
  misc_feature (112)..(112): n is a, c, g, or t
  misc_feature (497)..(498): n is a, c, g, or t
  misc_feature (504)..(504): n is a, c, g, or t
  misc_feature (506)..(506): n is a, c, g, or t
  misc_feature (511)..(511): n is a, c, g, or t
  misc_feature (514)..(514): n is a, c, g, or t
  misc_feature (518)..(518): n is a, c, g, or t
  misc_feature (520)..(520): n is a, c, g, or t
actcccgcaggaacctggggatggctggagagtaactgggagccacaggagggtccctgaggcctgggggtgaagagatgcaagacacaggggtggagcagcgtgaggcncntgagtttgtaggtgattcctgggtgtggggggctgactccagctgaaatctggggttgtttggagagtagctgggagacacaggagaccccccgagagctgggggtgagctgctgggtgatggcagtaagaacatgtggtatattattgatgaacgtggggactctgaggagtcctcagaggaggacacggcagagcccaatggcttcattgattgcccatcacggtgaggacagggaaatgggagcttgtgggattctggtgatgacagaggtgagtgtggtgaagccctaggggatggtgaatggtagttccggatccctggtgaggagcttccccttaagcctgagtttctgagaggggagagggagaagctgggtgaggcnngcatgnancttgnggngtcngngctgggggaccgctcataagaagagccagacaagaccctactgttcgataggtgcagacatgattaggaaacctgcagctcccatggggcccccactaatgttctaactccg

SEQ ID NO: 486043 - DNA, 511 bp, Homo sapiens
  misc_feature (101)..(101): n is a, c, g, or t
  misc_feature (115)..(115): n is a, c, g, or t
tttccccaggaaacagttatgatatgattaggattttaaagggtctccctaaaggaattttggccctcgaggccaagattccggctcaaggttcaaatatnaggcatgacatgtnagttctccctccaaattaacccatcaatgcattctttcgggaaactactggatgatgaattccactataacagataaaaaccaagaaaggagatgctgtgcatcccaagaaacgagagatctaatacagcagagaggagcaacagctttccaggatagcaacaactcaaagtcagaggatgtcagctctgcagaaatccaatgcatgctggagcaaaatgacagacagtaatttgagagaggtgattgtttatttgatagatttcattatattacattttttgacttgagagctatttgggaatgtgaggaaaattatcatagaagcattgaaaactaacaaaataaaatacaaggcaattattaactaaaaaaaaaaaactttgaaactacgaag

SEQ ID NO: 486044 - DNA, 94 bp, Homo sapiens
ttatcatcatggattggctggtgcagtacagctaggcttaatagggactcgaattcgaggctcgaataaaaacgttagaagcttgaattcgagc

SEQ ID NO: 486045 - DNA, 438 bp, Homo sapiens
tactcgcatctacgtcgacgtcgtcatccgtctcgatcatcctcttcttcatctatcatcctcaggcacatgcttgggatcagaggaacaacttgtatgcagcatttctttcctttggctggtgtagtctccatagcttcttcttcagagtcatcttcctcatcgtcatcgtcatcctcatcatctgcggcatcctcatcgtcctcatcctctgaggaagagggcagcagctgctgctttcatcgctgctggtacaatttcatcttcatcctcatcctcgtcctcgtcatcctcctcatcctcctcactgtcatcatcctcctcttcatcactgtcttccttcttggcattcttgccattcattgcccccttggctgggatggcagcacccttcttaccaggagttgctaccaatgctttgcctggtgtggccccttt

SEQ ID NO: 486046 - DNA, 130 bp, Homo sapiens
gctaccagataacccgccgtcgttcaaggtggagagacgccaacgatcacgccgctcgctcccgatactagcaactccatctcagtgactacgcagaaccgtccatgatccagtgactccggactcatgg

SEQ ID NO: 486047 - DNA, 514 bp, Homo sapiens
  misc_feature (514)..(514): n is a, c, g, or t
ccactactgcctcacacaggcacaactggctcccgctgctgccacaggtggtgccgcaatgggcagtgcctcaggccgaagcctcaatcccccatctgagccaggcctaatctctaatagtgatggttggattgtcctcccataactgcaggtggattcccctggggatggaggctgcagatcaggcgtctggtggccctgaacatcccgcttccactcactgtggatggaggttgaagcctttagccctagagagctcacgggcccgcgagcacaacgtggtcaaccaacaaccccggtgccgacacagccacaatacagacaggcgaccaaacagagaagggagatccaaagcaaaaatgagacaaagacaactcgaggaggaccaacaagacaaaagaagagacagagaagatcgcgagagaacccccgacagagcggacacgacgatgagaaaaccaccggaaggacgaggaggtcaaattatgctctccacccccccggtcaggaggcn

SEQ ID NO: 486048 - DNA, 223 bp, Homo sapiens
acacgtacactggtgtgccatgcatgcgtatttttgtatgtttctttagtagagatggggttactcctgacctcaagtgatctgcccgccttggcctcccaaagtgctgggattacaggcatgagccacggcgcccagcctactttttcaatatttagagatttggtcttggtatattccccaggctggccttgaactcctgggcacaagcaatcctcccacc

SEQ ID NO: 486049 - DNA, 1127 bp, Homo sapiens
gtatctacagccggggctcccgagcggcagagcatgttccgaccatctctctggccgcttgggttgaggcgaaagccaggatcgtggcctggccatccgccaggatatggacgctactgtcgtcaccgctccgcggacgatagaacctgatcggatcctccgtagggctctctgcgtgctcactttgcgcacaagggactgagcttctatgacagaacccgatggtaatcgagctccaccggacctgccgcttcttccgaacgagcctggtactccgacggcctgattgcatcgtgtgggcgcagctctctgaaagagccactgagacgtacgcactcctggctacttacacacctgctgggtatgcgctgtcagagctccagagaacccctggtggcagccatcagattgaagtgaaccagcatgctataagtagccgggcagtcggtcccacaagaccgtgagccacactacctatgagctgtgcgactctgtcttagcctcttatcttgtgtggtgcacattgcaaaagtgtcagttgcaaggctggcgagaggacgtcacgcaataaacggacgctgaacactggctccgttgaaaatggccctcggacggcaacccgaattgcaggccggaacgccggggcagaccctgtccccgttgaaaggccaacgagagttacacacgtgaacagaggtcccatttgtggatggaagcaagccatcggagtgggcaggccttggacgaccgtgtcacgattggcaaagttcgacagagaatcccgatcgcggtatatggcgaccaccacaagtgcgtccggggacaggacattccccttttgtccgggactaatagacagccaccgacttacactagcacataagtaagttctcggagagcggggggacctcatttgacgatgagggacgtaacttaggccttagactaggcgggaactcccataggggtagccggctccggtagaggcaacacaccgctattggagtcagcgcccggagagaggcaccgagacacatttacagtatgttgccagccccagagggggccgcccggagattgccctcccactcagatgaggtacccgaggcccgagacaggagtgaaag

SEQ ID NO: 486050 - DNA, 239 bp, Homo sapiens
atcacattcgatgatgaactcagctcactcctagcgctgctaatctcaataacacaggctattctagcatgactactaacagacgctcaacagcttttatcattcgcccatcacttggggcggaatatgctgatcaaccctaccttacgcaatgcgctcaatattcttatatacccttccaacatagggcgaggcctattacgggcactctactatctgagaccgtaacacagggatat

SEQ ID NO: 486051 - DNA, 927 bp, Homo sapiens
gagccactggatgaagacatgagcaagtagaaagcatctgcagaggtcaagtaggaccatgggagatccagattccatttaaacaagaatgccttaaagaagtgggaatattatagtactgagtgagagaaaatgctctatacgtctgtgtgtgatcaggaggaggagaaaggaggacaaagttaacatcaagtgtgatcagcagaccagtttgatagagctactgtgtctcgagaggggacagatttgatttatacagtttgacaatggtggagccgggatcaatgagtgaacattacaggaaggaatattggggtcaatatttgggctcaatattttgggctcgaataattgtgggctcaataaaggaggactttgcgcaataattacaagcgttccagacttgtaaagtggggtgtctcagaaaggagtgagtgccctgttactgaaaaggattataggttagggtaaatagctcatgcaattcagggtgatataatgagattcctgtgactgtttccaagaagcatctggtgtgcatccagtcaatgtcagattcttaagagagcaggtgagcagcaaaagaggaatcacttgcctccgcttcaaagagcttccgggtgggccagagactgacatgtaaccaaccggtgatcatggaattgggttaactgtgccatggcgtgacgggtgcccaggacctggggccacattctactcgtgagagagaaaagcggatgcccgtaagggagcaggggtcgagaagtgaccgcgagatccgggcaagggagtggccacatcgcagcatgggcgattcggggcgcattgtcccctgcggcacaagaacccgtaacggggtggggggcgaacacacggaccagcttccgcccgcggaaccatgggcgggcaggcggcaaacaaaccaat

SEQ ID NO: 486052 - DNA, 278 bp, Homo sapiens
tattctaagaaacaattaactcaattaaaaatgggctaccaactagaataaacatttctcaaaagaaaaataaaactaccatacgatccagcaatccctcttctgggcatatactcaaagtaaatgaaatcaccaccttgtaaatatatctgcagtccgtgttcattgcagcattattcatagtagccaacatggagacaactgaagtgtccgttgacagatgaataaagaaactgtgtatatatatgcctacacacaatggaatattattcatccct

SEQ ID NO: 486053 - DNA, 268 bp, Homo sapiens
  misc_feature (43)..(43): n is a, c, g, or t
  misc_feature (127)..(127): n is a, c, g, or t
  misc_feature (233)..(233): n is a, c, g, or t
gaaaccttctggttgtagctgaaggaaatctgactcaaatttntttaagaaaaaaagagaattctagtttcctataactgggaagtctcgctgtgagttgacttctgtatatagggattcatctgtntcttactagttcagtcagctcctttcctgtgtgttggcttcattcataggccatctctcctcttacagtggcagggacggcccctgcagccctaggctgacccctncccttatagccagcgatctctgtgcaaagagcagg

SEQ ID NO: 486054 - DNA, 348 bp, Homo sapiens
  misc_feature (303)..(303): n is a, c, g, or t
ttgggacacaaaaccacaaggggctgaggcagggtgggaggaactggaatgaagagggagagatggcggagctcgctggagcttggaagtaaagtgttaagcagaggaaaaagtccaaaacaacgccaagctttctagtaagaatgatgaggaagaggatggtgtctactggtgtcagacactaaaaataaggagggagagctgattgtctgggaagtacagaggccccagggaagctgttgggctcaattctgggcatgttgaatttggtaggatgataagacattaaaataaaataaaacnccactttgttttatacatggggtgagttggaattgacccagagta

SEQ ID NO: 486055 - DNA, 108 bp, Homo sapiens
ctcacgcatggacaaagaacactgggacatggctgtctcgtctatcttcacgtcctatgaaagaggtgctgctgttaccgtccttctagccaggttaagatctcacac

SEQ ID NO: 486056 - DNA, 840 bp, Homo sapiens
ggacgcgtgggcacacttatcccaccttggctatcgatcacccgatgaggcaaccacagccagaacgcctgaacgcaggcacatacttcctattctacaccctagataggctcccttcccctactcatcagttcatctgaatttacactcatcaagcaccctaggctcactaaagcattctatctactcactctcgctgcccaagaactatcggactcctgagccaacaacttaatatgactagcttacacaatagctgaaatagtaatagatacctctttacggactccacttatgactccctaaagcccatgtcgaagcccccatcgctgggtcaatagtacttgccgaaagtagtcttaaaactaggcggcgttatggtataatacgcctcacactcattgtcaacccctgacaaaacagatagcctaccccttgcttgtgctatccctatgaggcataattataacagagctccatctgactacgacaaacagacctaaaatcgctcattgcatactcttcaagtcagcgcacatagccctcgtagtaagagccattctcagtccaagaccccctgaagcttcaccggcgcagtcattctcataatcgccacggaattacatccgtcattactattctggcataggaaactcaatactaaggaacgcaatcacaggcgcatcagtaatcctctctcaaagactggaaatctactcccacataatagcttttgatgattcgtagcaagactcgctaagactcggcataacccccaatattaaacgaagggggaaattatgagataggaagcaagaacctgtgaatataaaccgaaac

SEQ ID NO: 486057 - DNA, 847 bp, Homo sapiens
gctctctcgctcgctctctttctctgtctttcgctcgctgtctcttgctgtagggtccggtcgggcgttcctggcgacgcctggagtgcatgaacattacctggctccggggagactttcggatccggatcccaacgagcgcctagccgacctcgacgaccaggggatccgttccaacccggcccgaccatggacgtgctccccatgtgcagcatcttccaggagcgacagatcgtgcaggagaccggcatacttctcggcgcatgacgtcatcatggaggagtacgaggagaacagagacgtgcatagaactggaacgtaaccattccagagcgagccctgaatatgtttcagcctcagaaatcaaaaggaaagacaggaagatctgggaccaaaatcatgctggcatcgggagaaaaaggaggccaatccgaactgaagatactctgccagatcctccagaggacactctcatcagaacgagctaagggacgacgtgagagaccaacagactgaactcaagatgtcagcagcgaatcctctgacagtcagaggaacatactcccacggacaagttacctccgacccatagcgaaagtagccaagctcgggaaaatgagctcatctgtcaacctccagccatccaaacttctcaggaaatgacagggaaacttaataaacagtggaggaagatgccgaggagatgcacatcgccaggaaaggtcagaagaggaatacgagaagcaaggaaggaaaaggagacccacgaagaacaagggtgccggacataagagagaaagaagcaaagcaaagaacaccagaagaaagaagtaaagaggaagaaagg

SEQ ID NO: 486058 - DNA, 255 bp, Homo sapiens
ttggagcgcagggtgcatctcggtctgcaacctccacctccaggttcaggcgattctcctgcctcagcctcccaagcagctgggattacactacacctggctaatttttttgtatttttagtagagacagggtttcaccatgttggccaggctggtcttgaactcttgacctcaggtgatccacccgcctcggcctcccaaagggctgggattacaggcgtgagccaccgcgaccaatcctagcattttgggacg

SEQ ID NO: 486059 - DNA, 1090 bp, Homo sapiens
agcggacgggcgctgggctcgcggcgctgcaaggcggcgaggcccgggctccgccgcctgctgcagccttggtcgcggcgtgccggcgctgagcgcggcaggtggcggggcccggccgcccgtgtagggcccagatgtggcggggacgcctccctgccgggtcaggttctcagagacgggtctccggtcggcggccgacgggggccggcgccgcgcgtgacgcgccgaagatccacgccgttctaattcactagtagccttgttgctctaaggctggcggggctcaccctttctcctagaccgggttgaccccagggggaggttgaattgcagtgtggaactcttcatcgttgaaaagtgcctaaatggccaagcacgatttatttcaagagcttgagttgacctctttaaaccgcttggccgtggggaaccaggcgaagattttgcggggaccattcgcacatgagcagttggaccaaattgcatgaacctttccggatacacgcgaagattgggaattggcattcggagcagtggggaattggtattcttgtaaagaccagttgcagggcaagctacttttttaacctacatagttctggggaaagatcacggtgagaacgtttacacaggagggctggggccattggaaccacatttcaaagaagggcaaccccttgaaggaagccccccttttgaaaggaaacccaacattgggacaccacttccgtttggaaaaggctcaatttacgtccttccttttgccctatataggggttgttgaaaacaagggttagttaatcctgggtacccttttaccttttaccaggatagggttttccgtggtccactaaattagcatcctttggtacccaaagaagccttggagtccccccaaaaaacaaggttggggccctaacctggtaatccagtccccataatatttgcctttggcgccaggagtaattattggaaaagacgggccaaccacatgggcattttttggccaagcggggcttcctaaattccagaaatcacaggagaacataaccaacttgagtatgacccgggtaaaaatacagcggccacg

SEQ ID NO: 486060 - DNA, 110 bp, Homo sapiens
atcataggttcgcaggacagcacgtactgatgtagaggctacatgcacgttatccagaagatctagccaatgtgctcattgatgtaggtggctacattacgcaacagatt

SEQ ID NO: 486061 - DNA, 255 bp, Homo sapiens
gatagctccacgctccaaaaatataagaaaatggccggatatgtggtgtgagcctgtggtcccagctgcttgagaggctgaggcaggaggatctctttagcccgggagtttgaggaaacagtgagccatgatagtgccactgcattccaggctgggtgacagaacgagaccctgtcaaaaaaagaaaaaaagaagtgagagtgagagtgatactttacaaaaaaaaaaacagaaaaaattaaaaggggaatagga

SEQ ID NO: 486062 - DNA, 268 bp, Homo sapiens
aaggatcgttagctcagtgatctccctgaccaatcggctctcctggctcactggctctccccacccgccaagttatacttaaaaactctgctccccggcactccagcagcctgggcgacaagatcaagactctctcaaaaaaaaaaaaaaaaaaccttttgctccgaaattgctcaaagaaatcgattggagtaatattaaaccataaaactcgggtctcccgcacagccagctctgtgtagaataacctctttctcatatggcaatt

SEQ ID NO: 486063 - DNA, 654 bp, Homo sapiens
tgtatatacttatttttggattacacacacttgaccgaggagtttataattatgtaaagattacgggaaatgcaccttgacagaaaggggatagaccatagctcactccacagattgtgtcacaacatagaccaaaaaaaaaggtttattattaaaagtaggattactgattttttaaataagagatggataccaacagttgaaaagtgcagaaatgtgattaagtgtacatgccagggaaaatatagatagaaatctttatgggtaacggttagtcctatgtagcataattttcatgagtggagcaggatttcttcctgattagaatctctcttttgatgggtttggctcagttaatataaggagccttatggagcatttcctctccaccagttttcaccccaaaaaaaaaaaaaaagagaaaacagaacaaacactgttgtggcgaccggccgatgacgacccctgtggaaaacgacgtttgaacaacccaatttgtgttgtgggacgcgcgggcccaaaatagtgaatcagaagaacagggtggccaaaaacagggtcccaaagggagagaccgggggcaggagaagacggccggagtatctccacaataaaaaaacgccggggggacaacagcggtcgagaaacaatgcg

SEQ ID NO: 486064 - DNA, 168 bp, Homo sapiens
cgatgcgccgaccaatatgcacatgtacattccacaagcattgccatacttctattactcacttctagctgtatacctttgtaagctgcaaagaggttggatcaagtttaactgactgtgctgccccttatcacatcaaagaaatactgacaacgaaggccgagcctg

SEQ ID NO: 486065 - DNA, 188 bp, Homo sapiens
gcatataaatgtacctcataatgttctattaaaaatgggacaggagccttatgttttcataattacccaacatatgcgccgccatatttttgcctcgaaggtaaaggttccaacatgatgaaataagtacttcccaacttcccccgttgttaaaccttatcctcataatagacccaaatgtttgtgtg

SEQ ID NO: 486066 - DNA, 296 bp, Homo sapiens
gctcggcccactcctgcctgggcataagagctgtctattatttggaacagactttacttacttaccttattgattgagacagggtctcactctgttgctgtaggctagagtgcagtggcacgatcatggctctctgtagcctcgacctcctaggttcaggtgatacccccaccatagcctcctgaatagctgggactacaggtgtgcaccatcatgcctggccaatttttattttattttattttttgcgttttttggtagagacgaggtctagctcttattgcccaggctggagt

SEQ ID NO: 486067 - DNA, 365 bp, Homo sapiens
  misc_feature (8)..(8): n is a, c, g, or t
cccccccnaaaaccccccaaaaaaaaaatatttctttaaaatccctgccctaaaaggggccacaaggaagggcttgccccactcagaggattagactcctctcccagagtcactcacaggcaattatttcccattccactcagttctggctaccagaagatgctcccctctcagctgggtgaggctgctgatatctgtcggatgggtatcacagcgtaatttcatcatagggcttttctttataagatttgggtccaaatcacaccctttgtgatcttaagataatcaagaaatgcacagtaactgatgtaacttgggctgcagtctgtaatccacctcttcagctataagtaggggacatgtta

SEQ ID NO: 486068 - DNA, 225 bp, Homo sapiens
tgcacgagagcacacactacgtgactattacccgcactgtctgcgctccacatacttaggcctatggagcggggtaccataagtgccctgtacctcggggacacctaaccccctctgcacacagccagtgagccacggggcacataaccacgtggcagggaagcccgacaagagagctttgccggacccacctctgccccccgagaatcaacccctgggccattg

SEQ ID NO: 486069 - DNA, 138 bp, Homo sapiens
tcgctgacgtcggcttggtgctgtgggtgcccacgtatgctgagggtggtggttgtggtccactttcctcgatgtcgagccagctgcctcctttctgcaaggcgcagggtccaggcttgcattcgggcaggctcctca

SEQ ID NO: 486070 - DNA, 376 bp, Homo sapiens
  misc_feature (18)..(18): n is a, c, g, or t
ttttttcaccacctcctngagatccagcttggaacgctccatttcattgaggttgtcgatggtcattttcaggtcactttcagctttccgacgagccttttccacctccgcccggatttttttttcctgctcccagttatcctccagctacaaagacaagaacagcaagagaaggtagacgaggaaagtttgaggtcagaaggcaagaaggaaccaaactgggtccgatcctttaactgtggcatcaaaagggccctcacgccccgggggatgtgttggtccagttttcaaaactaattttcggaccccgtgcccccaaagggatttggccttggagttgtaaaggtggccacagcaatgggtattacctcatgga

SEQ ID NO: 486071 - DNA, 918 bp, Homo sapiens
  misc_feature (74)..(74): n is a, c, g, or t
  misc_feature (88)..(88): n is a, c, g, or t
  misc_feature (145)..(145): n is a, c, g, or t
  misc_feature (156)..(156): n is a, c, g, or t
  misc_feature (185)..(185): n is a, c, g, or t
  misc_feature (189)..(189): n is a, c, g, or t
  misc_feature (194)..(194): n is a, c, g, or t
  misc_feature (227)..(227): n is a, c, g, or t
  misc_feature (231)..(231): n is a, c, g, or t
  misc_feature (239)..(239): n is a, c, g, or t
  misc_feature (259)..(259): n is a, c, g, or t
  misc_feature (270)..(270): n is a, c, g, or t
  misc_feature (273)..(273): n is a, c, g, or t
  misc_feature (918)..(918): n is a, c, g, or t
ggcggcggcggcagggcggcgacggcgacatggagagcggggcctacggcgcggcaaggcgggcggctccttcnacctgcggcgcttnctgacgcagccgcaggtggtggcgcgcgccgtgtgcttggtcttcgccttgatcgtnttctcctgcanctatggtgagggctacagcaatgcccacnagtntaagnagatgtactgcgtgttcaaccgcaacgaggatncctnccgctatngcagtgccatcggggtgctngccttcctggnctngggcttcttctttggtgggtgctgcaagacgctaatatctcccccatatcagacaacgctgatgaccagtagctagctggttcgatgggtgacctgctcttctcagttctctggaccttcctgtggtgtgtggggtttctgcttcctcaccaaccagtgggcagtcaccaacccgaaggacgtgctggtgggggccgactctgtgagggcagccatcaccttcagcttcttttccatcttctcctggggtgtgctggcctccctggcctaccagcgctacaaggctggcgtggacgacttcatccagaattacgttgaccccactccggacccaaactgcctacgcctctacccaggtgcatctgtggacaactaacaacagccaccttcaccagaacgcggagaccaccgatggtaccagcgccctgtgtactgagcggcggttagcgtgaaagggggccaaaaaagggcctcccctctgcctgggattccgatgagctcgggaatggagccttctctttcactgtccatcgggcgttgaaacacaggtagggcccctagctggggcgcggaagcacacccatgttggccaaagggtaaagtggcaccccacggacagaaggaggggcctcgaaaacacacggn

SEQ ID NO: 486072 - DNA, 155 bp, Homo sapiens
ccggaagaccttggcttgttgggaaaacgtggattttctggaccactggggggttactggaagacactggacttttctggaccgaccctggacttttctggaacaccgtggactcttcaggaagacactcacttgagctggaacaccctggactt

SEQ ID NO: 486073 - DNA, 347 bp, Homo sapiens
gccgggcacagtggttaacgcccgtaatcccagcactttgggagccagaggcaagaggattattacatgagtccaggagtttgagaccagcccgagcaacacagcgagaccccatctcttgaaaaaaaaaaattagccgggcgtggtggtgggcgcctgtagtctcagctgctcaagcggctgaggcaggagaatcgcttgaatccgggaggcggaggtcgcagtgagccaatatcacaccattgcactccagcctagatgacagagcgagactctccaaaaataaaataaaaataaaattttccatgatcccaaaggatagagtatgaaaagaagaaaactagtaa

SEQ ID NO: 486074 - DNA, 417 bp, Homo sapiens
  misc_feature (370)..(370): n is a, c, g, or t
cacgaggcgctggtcgtgctcaaccaggaccaggcgggtaaggtcacgcagttattccccaacagcttcagcgcctccacgcaggcaggcaaagcccgcgagatcatccacgccggagagaccatcgagattccgggcagcgatcagagcttcatgctgaaggcctcgccgccggcggcccgcaacaccatcatcgcgatcgtggcgcctcccgatgcgaagattggggatctggtcgatccatcgaaggcgctgcaggagattgccgatcccgtggcgctgcttaccgaaatcacgcagcggagcaatgaggctgaccgttcgcgcggcgtcgacgtcgtgggagcggccaaggtcgggcgtgcagtanggaaacggtcgttcgatatcgtaaccaattagcagaacgtcaacacg

SEQ ID NO: 486075 - DNA, 248 bp, Homo sapiens
  misc_feature (97)..(97): n is a, c, g, or t
ttttttttttttgggggggggaaaccccggccctttttccccccccccccccccccggggggggttttcttttttttccacgggggggggggggttnaaaaaaaattcccgggggtttttaaaggggggccccccccccctggggtttttttttttaaatggggggtaaaaggggggggccttttttttttggggacccccttttccccgggcaagaattttaaatttttggggggttcccccaaaca

SEQ ID NO: 486076 - DNA, 215 bp, Homo sapiens
gagctcggcacgtttgggccaggtgaggatgctaaaaaacaaaaacaaaaaccctggcggggcacggaggctcacgcctgcaatcccagcactttgggaggccaaggtgggagaactgcttgagccccggcgtttgagaccagcctgaacaacatagccagccccccatctcgtcatctcgtctcttctcttgtacatctcgtccttctcttgta

SEQ ID NO: 486077 - DNA, 499 bp, Homo sapiens
  misc_feature (186)..(186): n is a, c, g, or t
tgctttattaaatcgatgtacttcatcaacaaaaataccagtagacttactttggtataaagcaaattgcgcctcactcacagcttctctaatttctttcacccttgaaaagattgctgaaaagctgattaaatgcgcttgactttctgcggcaagtaaacgagcaattgtagttttaccgactcntggaggcccccataaaatcattgagtgcacttttgccatgtcatacatcaagcgaatcggcccaccatcacctaatagatgactttgtcccacaacatcagataagattgtggggcgcaatctttctgctaacggctgttgcagcgactgctggaaaaaatcactcatcttaaaaccttattggaaattgaagttaaaaaaacaatcctaaaattaagcaaaattttattataccttaatctgtagaaacctttgaaagccctttatcttgctacttaatactgaataaactagaaacttttcatgtcgacgc

SEQ ID NO: 486078 - DNA, 315 bp, Homo sapiens
  misc_feature (39)..(39): n is a, c, g, or t
  misc_feature (54)..(54): n is a, c, g, or t
  misc_feature (92)..(92): n is a, c, g, or t
  misc_feature (224)..(224): n is a, c, g, or t
  misc_feature (230)..(230): n is a, c, g, or t
caggagttctagaccagcctggctaacatggtgaaactntgtttctactaaaantgcaaaaaattagctgggcttcgtggcatatgcctgtngtcccagctactcaggaggctgaggcggaagattcattgtacccaggaggcggaggttgcagtgagctgagattgcgccattgcactccagcttgggcaacaagaacaaaactccgtctcaaaaaaaaaaantaaaangagaaatttcataaaaaaaacattttcatcactaacatatagatacatatgcatgttttacacttcaccccacacacatgcattt

SEQ ID NO: 486079 - DNA, 771 bp, Homo sapiens
ccactgcgtacaggactctgaaaactacggtgctcaaatgggagcctcgaaaaggggaaggaacaagatcgagtaacagaaacacggtcaatctagacctcgggagctcagagtgacatgtatggagagaatgtgatatgatcgtcgcgcctatattctttgcaatcctttcgattgactagcttttacatgtactccatttgtctaggtgatgcgtatttacttggtctagggagaagctcgatcttggcccggtgatgacatggttagggagtgagacgcgtgaagaggcaatacctgaagcatgattccttgcatcactagtatggcttggccctagtgagtgcttggccccaagggaaatggtgggccgcgaggcaggtgctaatcgggcacgcgtcgctgtaatcaatcgcacactcaccagcgatccaaaaacgtgcacgggagcctacgagaagcaggagaatcacgtgacgcaacattagccgcctggactctggggcgggtccaaatgcgcgtctggtccagagccgctgtgatccagctactcgggtcatggaatgagacgggatcgtgcgatcccgcacgagatcgtctcctcgcaccatccacccttcgctgaacgagcgagcgtcggctcggcaagggggagcggctcgcccgttggggaccgcacagacttgctgtaacaaacgtattctcctctagtaaactaatattatctggcttatcattaggttagccctgttcattagtaaaacatgtttc

SEQ ID NO: 486080 - DNA, 285 bp, Homo sapiens
  misc_feature (102)..(102): n is a, c, g, or t
  misc_feature (128)..(128): n is a, c, g, or t
  misc_feature (173)..(173): n is a, c, g, or t
  misc_feature (177)..(177): n is a, c, g, or t
  misc_feature (180)..(180): n is a, c, g, or t
  misc_feature (188)..(189): n is a, c, g, or t
gggggggaagggagggagccagggggagcggggggggggggggccggaaggaccaggggcggaagggaaaggaggggggggggggggccgccgggggggggnggggcgggcagcaccagggggggcgncgcggcggggcgggggggggcgggggggggccacaagaggggcanaagnggngggggggnngggggaggcgccctcgggttcatacacctatcccccattctcctcctatccctcaacccggacatcattacggggttttcctcttaaaaaaaaaaa

SEQ ID NO: 486081 - DNA, 348 bp, Homo sapiens
tcttctcccgtagagatgatgagagagtagattttacgtgttttcaccacaaaaaagtgatgattatgtgaggtaatgtctgttaaatggcttgatttagccattctaattatatatatctttatcaaaacatcatattataccccataaatatatacaattttttacttaacaattaaaataactactttttttaaggagcaaggtcttgcttagtcacctagactggagtgcggtgatatgattatagctcactgtagcctcaaactcctgggctcaagtgatcctctcacctcaccctcccatgtagctgggactaaaggctcatgccacaatacttggctaatt

SEQ ID NO: 486082 - DNA, 121 bp, Homo sapiens
ctttgctcatgtatctacaggtggcttatgtcaacagctatgtaggacaatgcaccttgagcctcaaagctggcacatcgtccaaattcttcaagcctgccagaccgtctcctctctttgc

SEQ ID NO: 486083 - DNA, 421 bp, Homo sapiens
gcagcccctggtagcaaccactccgctccgagtctgtgaacctgactgctttaaacccttcatgtaagtggagttacacagcgtgtgcctgtttcttcagtctgttgtctccctctaatcttcgggtaagtggagttacacagcgtgtgcctgtttcttcagtctgttgtctccctctaatcttcgtgtaagtggagttacgcagcgtgcgcctgtttcttcagtctgttgtctccctctaatcttcgtttaagtggagttacgcagcgtgtgcctgtttcttcagtctattgtctccctctaatcttcgtgtaagtggagttacgcagcgtgtgcctgtttcttcagtctattgtctccctctaatcttggctcttctttctccagttccttaggcgtgagttgaggtaactccacttac

SEQ ID NO: 486084 - DNA, 191 bp, Homo sapiens
agtgatctagaggatcctcgttatgttctgagccagctgtaataggtaatccattcatgtggttcacaacatcataacagtagttggcagcctttcttgagatagctgcggctcaaacatctgtcttaagacatcaagagcttgcttaaatgatcacgacagttgcagccacacatcaccactggttctca

SEQ ID NO: 486085 - DNA, 1026 bp, Homo sapiens
gagcatgtaccgatctcacttctaggaatactagtatatcgctcacaccggtcatatcctccctactatgcctagaaggaataatactatcgctgttcatgtatagctacggtctcataaccctcaacacccactccctcttagccaatatgtgcctattgccatacctagtcttgccgcctgcgaagcacggtgggcctagccctactagatctcaatctccaacacatatggcctagactacgtacataatgctaaacctactccggaatgctaaaactaagtcgtgcccagagcaattatattactaccactgacatgagctttccaaaaaagcacataattggaagtcaacacaaccaggccacagcctaattattagcatcatccccctactattttttaaccaaatcaacaagaacctatttagctgttccccaaccttttcctccgaccgctaaaaagaccccctcctaataataactacctgagtcctaccccgcagaatcatggcaaagcgaaagcaccagcttatccagtgaaccatatcgacgaaaaatactctacctgctctatactaatctgcctgacaaatctgcttaatggataacattcacaggcacagaactaatcatattggatatcttcttcgaaacagattattcccacgtggtatcatcaccgagaggggaacagcagaagtctggaatgccgggacatacctcctattctacaccctaattggttcccttcgcactattcagtgggacttaattagatacaagaacctaggtcgtaaaatttagtatcactttaggccagaatattaaattccgagcaacagtataggaagttacacaagtcttaaaggaaccttagggagcaattagtcctagaagtgtgacccaccgggtaaaatgtggcacataaaggcggtaatagcactatcgcaaaaacactgtgcatggaaagaccggcgaaatgttgatcgtggacgcgggtaaataaagcctctcttacatgtgg

SEQ ID NO: 486086 - DNA, 174 bp, Homo sapiens
ttttgggggggggcccttttttttaaaagggaaccccggggggggggggccccccccccccccccccaggggggtcccccccccccctttttttcccgggggggggggaaccatttttgggggtttttttttagggccctttggccatttccccccccttttttttccccccca

SEQ ID NO: 486087 - DNA, 830 bp, Homo sapiens
  misc_feature (124)..(124): n is a, c, g, or t
cgccccacatccgagcctgggacgatgtgtctgtcccgggtgaccgatcgcattgcccgcggacggaacttcagaaaccgaatgaaaacaccactcctcctatgtgtctgaagatttcacgtgntgatttatgaaatctaagggggaaatggatcacacggattgtctttaaggggaattaatcacaaatgtataaaggatattacggcttttacagcaggcaataggattatcttataggaaatgaaaaacctgttggtaatggtatcaagtacaatatcgagttaaatgtaacaaggtgtggttcatgagttaagatgacggtctatgctgttttatgacctgttcattaatcccgtagaatttgtaatgggtgggatataaattagttttataatatattctcttaaaaaatcgaaaagatgagtctcttatcatgttgtgccaacctgttatgatgtgcagtggaaaagtggttaagccaggtagttgagtacttcctttacaaaattatcatgatagctgtatgggatattcgttacattatgtgaactttgtggaaatgctagtaatgtgttcaaacagcaagtatgggtgggccactgtatgtgtgtccttacggaggttacgctatgtcaccggttatgctgaggattgtaaaatacatcggaaaaatgtaaaaaacggagtttttttactgtgaaatttgggggaacgtggaacaggtccgaattggactggttggagttaaggcgttaaggggatatgcctttaatcttggcagcgaaaagtcttgagaagcttgggcaaagtatgtaggaggacaaatg

SEQ ID NO: 486088 - DNA, 163 bp, Homo sapiens
  misc_feature (99)..(99): n is a, c, g, or t
tcagactctttgcttcacacacaaagcagaatagtatttttatatttaaatgtaagaccaaaaactatatttatggttttagtgaattatgtgtgtttntgctaaagagaaaaaaccatccaggtcacggggcaccaatatttgagacaaatagtccgattag

SEQ ID NO: 486089 - DNA, 234 bp, Homo sapiens
gccaggtgtagctgcggagtacatttgcgcgtaacgttggcgcgttgccgcaacagcagctgaccatgctaatcatagccagccaggaggaggttcacatgatagtggggtccgactccgaagacagtcagccaggtttcggcgtgtgaagttagctgctgccgtgggagacaattcatatccatttcgcatcttatacagttgcacgtatttctagaatatattctagcaaac

SEQ ID NO: 486090 - DNA, 192 bp, Homo sapiens
  misc_feature (115)..(115): n is a, c, g, or t
  misc_feature (171)..(171): n is a, c, g, or t
ctagccacaagcagagcagttgcctgatgaggatgccccggcgcatgtgcagggtgatgtagtgggagccgtctctgccgttggactcccaaaaggtcctggtgccggggtgtgncagcccgccggcccggggcgggtttttttttttctccaccttctcccagcacttgncctccttctcttccacactgg

SEQ ID NO: 486091 - DNA, 575 bp, Homo sapiens
cacctgtgaaggtgtcagagagatattctgcttaaaaatcagagtgactccggcttaaatagcagctgggtgagataaggctgagacctactgggctgcattcccaggaggttaggcattctaaccttctatcaggatgagatagaaggccagcataagatataggtcacgaagactctgctgataaaacaggatgtggtttaaataaatgccagccagaacccaccaaaaccaagatggtgatgctcattctcactgctcattatatgccagtataatgcatttgcatgcaaaaagactctaccaccagtgccatgacagcttacagatgccatggcaagatctggaagttaccctgtagcctctaaaatggggaagaaccctcagttctggaaaatttctgcccctttcctgaaaaactcatgaataatctaccctttgtttagcatataatcaagaaacaactataagtatagtcaatcgagcagccaatctcaccgctctgtctatggagtagtcattcttttatttacatctctaataaaattgctttcacaaaaaacctcacccccaca

SEQ ID NO: 486092 - DNA, 1116 bp, Homo sapiens
acgttacatgactcacgccctcataatcattgtccttatctgctacctattcctgtatgcccttttcctaatcactcatcaacgaaaactaactaatactaacatctcgagacgctcaggacaatagtaaagccgatctgaacttgatcacttgccctgccgattcatccatagtcctctatcgcccttcccatccctactgcgatccgtttacgataacagacgaggtctacacgatcgcctccccttaccatcaaatcaattggacaccgaattggtacgtgacacctacgagtgtacaccgcacgtaacggcggaactgaactcttcaagctccgtatcataacgttccccgcgattattccctaggaaaccaaggacgggaccttgcgagcctcccgttgcacgtttgcaccaaatcgagctatgatactctcccgtatgttgcatacgcccccgccaattactgttactaatttacacttcaccattcgaacagatggaactgttgctttggcaacttccagttttaatgcccttgctcactcgcaaccgactttgaaaggggctttcacaagagataaccgatgcgatttgcccaaagtttccccacaggagcaactcggttccttacaatagaccccaaaaaatcgccgcacgcaatctagtccaacgcctgggcgttcaacccaacctagaaacccaccaggggaggcgcggtaaatagccgtgaacactgcggtatccaaacacttaggccgtgtccgcttgcgacgacgaatttcccctttggatggacgcgaaggcgccgaaatattgatgggccaacccagaggggttactattcccacaggtgtgccctagcaccaaaagtatcagggagttcccccagtttacatgggaacaacatctcctgacacagcttggtatgcagcccgccatttaactgagtcgcataaagattgcctttgtgaatgggcaaaaacaacatcttacagacgggagggtccccccggtcatgaaacttatgagctaaaaccaccacccgattaaaatttaagcgtcaccaacgagaccctcccacagactgttacgcttttaaaatcccgcgccgac

SEQ ID NO: 486093 - DNA, 183 bp, Homo sapiens
  misc_feature (29)..(29): n is a, c, g, or t
gaaggcagccaaaacccccgggcaaattncggggggtttctaaaggttttcaaacattcaaaccaaaaattgggtttttccccttttttggtttcccccttaaaaacaaaaaaaaacgggggtaattttttttgggggaaagggggggaaaaaaaaaccccaaaagccccccggttgggggga

SEQ ID NO: 486094 - DNA, 109 bp, Homo sapiens
acgcaccaaatagagttttttttcctcttttaaaaactctatttggtgcgtgcccacggtgctgcgtcccgtcagacatacctgtatagagttcctaaaagaggaaaaa

SEQ ID NO: 486095 - DNA, 357 bp, Homo sapiens
  misc_feature (114)..(114): n is a, c, g, or t
  misc_feature (120)..(120): n is a, c, g, or t
  misc_feature (124)..(124): n is a, c, g, or t
  misc_feature (158)..(158): n is a, c, g, or t
gtcgaccctctcaccccacctccatttctagcaacatgtccctctgaccccacatccatttcgcatgaaacatgcccctctgaccccacctccatttctagaaacatgcccctntgaccncacntccatttctagaaacatgcccctctgaccccacntccatttctagaaacatgcccctctgaccccacctccatttctagaaacatgcccctctgaccccacctccatttctagaaacatgcccctctgacccacacatccatttctagaaacatgcccctctgaccccacatccatttctagaaacatgcccctctgaccccacctccatttctagaaacatgcccctctgac

SEQ ID NO: 486096 - DNA, 417 bp, Homo sapiens
ttgacttttccttacaaggaaataaaacagatcatgtgtgtgtataaaattaaaaagtaatatcctaatcatctgccacttacacaaaaagaaatttattacctttagactaaaggaaaaatataataggaatgcaatatgtctcggtatgtgcagtcatgtgccacataattatgttttggtcaacaacagaccacatatttgatggtagtctcataaggtaatggagctgagaaattcctatgcttatgtgcttatgaaactgtcattatgcgggagcgatgtccgtcgcttgcagtttcgtggtcatggtagtgtaaagaaggacatgtgctcagttatatagacgaagagctcaggtaagttatgtacagagccttagccttcatgaatggacgacagagcaagtggctgttg

SEQ ID NO: 486097 - DNA, 916 bp, Homo sapiens
  misc_feature (132)..(132): n is a, c, g, or t
  misc_feature (136)..(136): n is a, c, g, or t
  misc_feature (145)..(146): n is a, c, g, or t
  misc_feature (151)..(151): n is a, c, g, or t
  misc_feature (153)..(153): n is a, c, g, or t
  misc_feature (155)..(155): n is a, c, g, or t
  misc_feature (162)..(162): n is a, c, g, or t
  misc_feature (186)..(186): n is a, c, g, or t
  misc_feature (392)..(392): n is a, c, g, or t
  misc_feature (608)..(608): n is a, c, g, or t
  misc_feature (655)..(655): n is a, c, g, or t
  misc_feature (659)..(659): n is a, c, g, or t
gttttacaccgtgttattctttgcggtaactatggaagtgcataatattagtattattattattaacaaggtgtcttacggccaccaccggcggttgtaccgtaggactctcattcgggatgattggaatanactnctggaattnntcaanantngggtatntttaatctgttatgtactagtgtncttgtttgttattgtttttgttaattacaccataatgctaatttaaagagactccaaatctcaatgaagccagctcacagtgctgtgtgccccggtcacctagcaagctgccgaaccaaaagaatttgcaccccgctgcgggcccacgtggttggggccctgccctggcagggtcatcctgtgctcggaggccatctcgggcacanggcccaccccgccccacccctccagaacacggctcacgcttacctcaaccatcctggctgcggcgtctgtctgaaccacgcgggggccttgaagggacgctttgtctgtcgtgatggggcaagggcacaagtcctggatgttgtgtgtatcgagaggccaaaggctggtggcaagtgcacggggcacagcggagtctgtcctgtgacgcgcaagtntgagggtctgggcggcgggcggctgggtctgtgcatttctggttgcnccgnggcgcttcccagcaccaacattgtaaccggcatgtttctgaggcatgcatagacgatacatatagactagatacatgaaagtctagaaattaaattggtaaaagcccaaaaagctgatgctagcagacatgggggtccacctaggagcccttctgggccctctatgctgttcagggagaagtcccatgtgcgtgcagtttagggggcgtcagtacaagattggggagctgaattcttgaagacgaggtagccacatg

SEQ ID NO: 486098 - DNA, 971 bp, Homo sapiens
  misc_feature (14)..(14): n is a, c, g, or t
  misc_feature (115)..(115): n is a, c, g, or t
  misc_feature (117)..(117): n is a, c, g, or t
  misc_feature (136)..(136): n is a, c, g, or t
  misc_feature (145)..(145): n is a, c, g, or t
  misc_feature (161)..(161): n is a, c, g, or t
  misc_feature (186)..(186): n is a, c, g, or t
  misc_feature (217)..(217): n is a, c, g, or t
  misc_feature (241)..(241): n is a, c, g, or t
  misc_feature (447)..(447): n is a, c, g, or t
  misc_feature (663)..(663): n is a, c, g, or t
  misc_feature (710)..(710): n is a, c, g, or t
  misc_feature (714)..(714): n is a, c, g, or t
ttttattcatttcnctgcagcatagctttttcttatcagcatattatttttagcatcttttttatgcttttcttttatctatttaattttcataattattattattattattatnancaattttttgctagcttgncagccgctnctttttgcctttattncgcgcatgctttattattttaatanctgctttaattttttgcaatttttttttatntttaatctgttatgtactagtgtncttgtttgttattgtttttgttaattacaccataatgctaatttaaagagactccaaatctcaatgaagccagctcacagtgctgtgtgccccggtcacctagcaagctgccgaaccaaaagaatttgcaccccgctgcgggcccacgtggttggggccctgccctggcagggtcatcctgtgctcggaggccatctcgggcacanggcccaccccgccccacccctccagaacacggctcacgcttacctcaaccatcctggctgcggcgtctgtctgaaccacgcgggggccttgaagggacgctttgtctgtcgtgatggggcaagggcacaagtcctggatgttgtgtgtatcgagaggccaaaggctggtggcaagtgcacggggcacagcggagtctgtcctgtgacgcgcaagtntgagggtctgggcggcgggcggctgggtctgtgcatttctggttgcnccgnggcgcttcccagcaccaacattgtaaccggcatgtttctgaggcatgcatagacgatacatatagactagatacatgaaagtctagaaattaaattggtaaaagcccaaaaagctgatgctagcagacatgggggtccacctaggagcccttctgggccctctatgctgttcagggagaagtcccatgtgcgtgcagtttagggggcgtcagtacaagattggggagctgaattcttgaagacgaggtagccacatg

SEQ ID NO: 486099 - DNA, 763 bp, Homo sapiens
attcatttggtgtaagggaaatgagatgatgtatcccaagggctttgctagaactacttgtgtgtttcagaataaaaccttattattttttagactgcacatgctgttgcctcaattggtgaattataggcaatgtgtatctttttctgaatgatgcaaaaagtagtgtgacttgctcattggtgagtgagttctacaaagtttcctgttaaaagagctgaaagcatctacttgtttcttaacccaagtgataataaacgaatattcacaacttgtcttaaattgtttaatgtcgggaaaccaagggttttttcaaatatagaagctagatgattgtgggtcacaaatggttaacatttgtcgatcctttgtatatacttgggatatatattaaaggcaaaatatctctggactaactgatggattcatttactaaagcacagctgtatgtatttttgaatacctattatgatcttgagactttataaagtcaatttcttatgactttatgcagtgtatcgggattatgcctttcaggctctatagggatcatgcgcttttataagtaccatagtatatccacagaggatttccacatggttgcggcatggcaagcccttcttgctgtggcaatcaattttccgaccctatgtgttgaatcctcgcgataacaagcattataggcggcacacgaccggggggcacacgagggcccctcaccatcctcaaaggggggccccgacacacatcttttcaagggggg

SEQ ID NO: 486100 - DNA, 754 bp, Homo sapiens
  misc_feature (132)..(132): n is a, c, g, or t
  misc_feature (136)..(136): n is a, c, g, or t
  misc_feature (145)..(146): n is a, c, g, or t
  misc_feature (151)..(151): n is a, c, g, or t
  misc_feature (153)..(153): n is a, c, g, or t
  misc_feature (155)..(155): n is a, c, g, or t
  misc_feature (162)..(162): n is a, c, g, or t
  misc_feature (186)..(186): n is a, c, g, or t
  misc_feature (392)..(392): n is a, c, g, or t
  misc_feature (608)..(608): n is a, c, g, or t
  misc_feature (655)..(655): n is a, c, g, or t
  misc_feature (659)..(659): n is a, c, g, or t
gttttacaccgtgttattctttgcggtaactatggaagtgcataatattagtattattattattaacaaggtgtcttacggccaccaccggcggttgtaccgtaggactctcattcgggatgattggaatanactnctggaattnntcaanantngggtatntttaatctgttatgtactagtgtncttgtttgttattgtttttgttaattacaccataatgctaatttaaagagactccaaatctcaatgaagccagctcacagtgctgtgtgccccggtcacctagcaagctgccgaaccaaaagaatttgcaccccgctgcgggcccacgtggttggggccctgccctggcagggtcatcctgtgctcggaggccatctcgggcacanggcccaccccgccccacccctccagaacacggctcacgcttacctcaaccatcctggctgcggcgtctgtctgaaccacgcgggggccttgaagggacgctttgtctgtcgtgatggggcaagggcacaagtcctggatgttgtgtgtatcgagaggccaaaggctggtggcaagtgcacggggcacagcggagtctgtcctgtgacgcgcaagtntgagggtctgggcggcgggcggctgggtctgtgcatttctggttgcnccgnggcgcttcccagcaccaacattgtaaccggcatgtttccagcagaagacaaaaagccaaacatgaaagtttagaaataaaattggtaaaccccca

SEQ ID NO: 486101 - DNA, 455 bp, Homo sapiens
ttgggtctcttttttggacagtggttcccccctttcccgggaggagtagacccttccagggtttgggttaacaagggaaaaattagggggttttggcccaaaaaaaaaacccccctttttttccaaccttgggatgggtggggggcctttttttttggcccccccaatggtccccccggtttcccattatatcgcagggttgggggcccattttccgggctttcccccagggcaaaaacaaaatggggggggggttttttttacaaaagggccttggtggccaccctttcatgttttttgcggggaggcccccagatttggttttctgcccccggtttgccccccaaaaacccttgggactggggcttttcaaaggggccctgtttaggtttaatggggccgtttattaaaggggggggaaagccccccttaaaaaaaaaggttttttgttttgt

SEQ ID NO: 486102 - DNA, 484 bp, Homo sapiens
  misc_feature (2)..(2): n is a, c, g, or t
  misc_feature (429)..(429): n is a, c, g, or t
  misc_feature (470)..(470): n is a, c, g, or t
  misc_feature (480)..(480): n is a, c, g, or t
anattcaatggtcgcgtccgtagcctggtgaatcgcgcggatctgatcaagattcagctctcgcgccaacaatctgcgtgaagcaacatcagagaggaacttcgctttttcaactgtacgaatgtcgcactgctactggcgtgcagttcaatcggcggaatatcaagttccagaatccccatatcctgaacaatcagcgcatcgacaccggtctggtagaggtcagtaatcagccgttgcgcgggttccagctcatcatcatgcaaaatggtgttaagcgtgacgaaaatttttgcaccataacgatgggcaaacggcaccagctcggcaatatctttcaagctattactggcattatgacgggcaccaaaaccagggccgccgatataaacagcatcggcaccgtgcaaaatagcttcgcgggcaatngcggcatcggttgccgggcttaaacagtttcaagtcgatgnaggaagatanggtt

SEQ ID NO: 486103 - DNA, 219 bp, Homo sapiens
ggcgttaccccgctggcccgatggcactcttacagccttcttcctgggcatggagtcctgtggcatccacgaatactaccttcaactccatcatgaagtgtgacgtggacatccgcgaaagacctgtacgccaacgacagtgctgtctggcggcaccaccatgtaccctggcattgccgagaggttgcagaaggagatcactgccattgggccagcggg

SEQ ID NO: 486104 - DNA, 614 bp, Homo sapiens
gggctttgtctaacccttgatggggagacaacatagcataggagacacagagttcctaggccctaagaatagccccttatatgacacacagaaatacagacaaatcttcccaatgggggacgtgatctatcccatgcagtcattctctgtgcagttactcccatgcgaactttgccgtacaagcaagcaggcacatgacaagcaattagaatctgttattagggagaaaagtcatatcgtagagatgataaaatctctatgctcaaggaccgaggcgcagtggctcacgcagtgtaatcccagtacttttgggaggcacgacggacaggtggatcacttgaggtgaggagtttgagaccagtcgtggccaacatggatgaaaccccgtctttactcaagctaccaaagaggtagctgggcgtggtgccaggcgcttgtggtcccggctactcaggaggcagaggcgggagaattgcttgagcctgggaggtggaggttgcagtgagccaagatcgctccattgcactccagcctgggtgacagtgaaactccatctcgaaaataaaagaataaaagtatgtctgtcatccagctcctatgtctgttatccagct

SEQ ID NO: 486105 - DNA, 277 bp, Homo sapiens
gtgagctcgacccccaccgcaggttgtactgggtagcattatacacacaagtcccttttaaacagaaagtctgttttaactttttgccctacctcagtctgaggaaggtcagttgaagtccttactgtacaagtccaaaattttaggaaaatgagtcccatgatgagtttcctcatgcttcagccatgcacggaccagtcagcttccaggtgtgactggagcagggcttgtcatcttcttcaaagtcatcttgcatgggttggccaagcttggtctc

SEQ ID NO: 486106 - DNA, 377 bp, Homo sapiens
cgacggtctgtaccctttaacttcccgtgtgaaacctgatcctccacattttataaacctctccttccactatgatgacctatattgctatgggagaatccaacagaattttattagcacgatgcctattttatgaagtacaagtcaataacagccaatctgagacacattatgttttctacgtccaataggctcaactgtgagaatccagaatgtgagagaaatgtggagaatacatcttgtttcatggtccctggtgtgcttcctgatactttgaacactgtctgaataagagtcaaaacaaaatagttatgctatgaggatgacaaactctggagtaattggagccaagaaatgagtataggtacagaccgtcg

SEQ ID NO: 486107 - DNA, 897 bp, Homo sapiens
  misc_feature (455)..(455): n is a, c, g, or t
tgcccgtttgtccaccctcctcctgtgtgtacagtggctgtcgcctctctaacgtctgccggaatgccctagccagggtgttgttttgtttgcgcggcgctcccctctctctccggcaagagtctcgtttctcggtctctataacaatgtcgtcttctgtgtacccaaactcatcgtgtctacggtggccccttcaatgattttgcctcgcctatttttatattggctccgggagccgctcgatggtggtgtgcaccgacacacacaccgtgtggtttatgtccgcgccctacgactccttcttgtgggaggaacggcttgaagacgtttcgcggtgacgagcgatatccccctcgcggtggagttacctcagcgaagttgtttccagcggccccaccttcttctggggccccaacacattgggtggtgttatcccccccctttctgtttgtcgnggagaatcgccccgtccgttggtagccccccggcgccttggtggtgggcacaacgccccttgggctttgccgcgccaccccttttgggtgggccgccgccctgcgtccgtggcgctgattctttccccccatgtctccaagcgtctcttgcgggctccgccgcctgttgtcaaacactggggtagaaactcccttctttcctgttcaaataatcacgcagaagtcacgccgcccatgtgtggacgaaataacctccggtgatgccgccatgatcatgctactgagtaaggtcgtgccgaccccacgatattgcattaggaccaccgcggggggccaccaggggctcccccggattcccacgattgttccctctgtcacataccccaaccttggggctggacgcaagcagaagccgatcccttctggttcctaatcaataaca

SEQ ID NO: 486108 - DNA, 625 bp, Homo sapiens
  misc_feature (625)..(625): n is a, c, g, or t
aagtaaccctatttaatatgctctgcagcgattccgcttaatgtttaaattcagtaacgtacttgaaaggcaaatttcagagcttttgtatgttggaggagggcttactgatgcgtgctaagaccgatttctgattgagggatgaaccttgggctcatttttttcttgtgaaggctctttctagaaaaaattttggttttggtctttttaaaaaaaacatacctttttgaatgtatcatgtcttcattaacaacacaaaatacacgatgtggttacttaacttgtttacgacactaaaaaaattactttttatttttagtagcccagggtgagttttatacaagagagatttttcttatcttgggggatagtgcttagccaggagaaattaaacccgatttttttgtgttggaaagacaggtttttattcaccgctttttcttgtttgtagaaagggggaggattggtcccggggtactaacccttttgtaggctggcccctcaattcctttgtcgtatattggccccaaccccccaagggtcctcactctttattttttccaccgcctttttcagccacattatttttgaccacccaccccctattatactcgccccccctccn

SEQ ID NO: 486109 - DNA, 174 bp, Homo sapiens
ggtctgtcttttccccctttgtttaaaaaaaaaccaaaaccaaaaaccccccctttggtgggggggtatgggacgtagcttttttcctaagcatgtctgccaatcccccttcttgctgattagctttcatatgcctatattaaatggaagtatttttgggaaaaaagaacccca

SEQ ID NO: 486110 - DNA, 417 bp, Homo sapiens
  misc_feature (65)..(65): n is a, c, g, or t
  misc_feature (68)..(68): n is a, c, g, or t
  misc_feature (303)..(303): n is a, c, g, or t
  misc_feature (326)..(326): n is a, c, g, or t
  misc_feature (333)..(333): n is a, c, g, or t
  misc_feature (342)..(343): n is a, c, g, or t
  misc_feature (365)..(365): n is a, c, g, or t
  misc_feature (389)..(389): n is a, c, g, or t
  misc_feature (402)..(402): n is a, c, g, or t
gaatttctgacctcaggtgatccaaccacctcagcctcccaaaatgctgggattataggcgtgcnctngcacctggcaaaaaattttttttaaaaaaggagaaagcagtttaaccacaaacagtgaaacagagctggcagacgcctgaaactccatggaaccatgcagctgtaccctagggctcctcccagggaaaagagagatgtcaacgtgggcccaaggtgtcctgaaggcactggggattgggattaactcgaggcgatggcctttcccaggccctccgtgctggcaggagccttttgntcggttagggctggcctttcatnttcactnttgtgttgnntgtggccttgtggcacctgttntttgttcaataaactggcatatantttgttgttttgncgtttgcctgttctt

SEQ ID NO: 486111 - DNA, 875 bp, Homo sapiens
agcggaggggttcgcgcggcattacctgtacccattcaccgcgcggctaccggcggcggcgcgcactgtgtcaggcggcagagacccgccgccaggaatgaatctgaatgtctgctgcagaaaaacgacagaaggctttcatcatgtgttgcttgcatagaatattcaagagacgtgttgtaagctagacgtgctgtatgaggaactagggacaggccgcacaggctactgtctgatctcgaagcatacagagaccagcctggtgtggctctatcaaccctccaatctggtgtgtgcaatgctgaggaacatggctcaagaaactaatcacagccaagtgcctatgctatggttccagctggctgtggagtttcactggaaaccctcgtgacaaaactggcagtgtgttcacgtatgctagtaaaggaacatcttccaagacagaagtagtagtaagtgggtagaagtaagcgccacctgcatacctctgtcagtactctgtctgaatcttttgacgcatgttcaactggcacacgatggctagtgtgccagaagcccatgtcatgccattagactctacatcttcagtcttatgcagcccagccctgtatcaaatcagtcacttttatcagaatctgtaggcatcattcgtcaattggacagtgagatctgtggacgaagcagtacctgaaaccagaagatgtgcaggcttcagtatcagacacaagcacagcagtcatctgaaagagcaaagcaagtctcttggaaaaacctgaacaaactaaagaattcgctgtttcatggtgcaggaagaaagtggggacttactgggtttgaattgccggtgttgggactgtttaactggggtgttaccc

SEQ ID NO: 486112 - DNA, 131 bp, Homo sapiens
tgtctgtgtagagtgttgtgtcctctgtgtggtgtgtctgtgtgttgtgtgtccatgtgtggtacgtgttgtgtgttgtgtatgttgtgtgtcgatgtgtgtgttgtgtgtcggggtgggtggagagcggt

SEQ ID NO: 486113 - DNA, 223 bp, Homo sapiens
  misc_feature (155)..(155): n is a, c, g, or t
  misc_feature (165)..(165): n is a, c, g, or t
  misc_feature (184)..(184): n is a, c, g, or t
  misc_feature (218)..(218): n is a, c, g, or t
gactctattgaggatccccggcaggttcgaggcacgcatcacaggcctcactgtgttgcttccacactcgtcagcaatcaccatcagtcagcagcaacagcatgaagtattgctggggacaagcccattcatgtctgaagcagatcctcctcctnaacccctgcnaacaccccagccacacatncccacactcataagaagtcccttgttacaggccnggtgc

SEQ ID NO: 486114 - DNA, 829 bp, Homo sapiens
  misc_feature (163)..(163): n is a, c, g, or t
  misc_feature (178)..(178): n is a, c, g, or t
taaagagaaaacagctgggccccggggaccactaccacaaagacacggagaccggtagtggccctgaacggctgggctcgctgatatttattgcatacaagacaagggggcaggataaggagggtcagtcttctaagtgattgacaaggtgaagcaagtcacntgatcacaggacagngggcccttccctcttaggtagctgaagcagagagagaaggcggcaggcatcagcgttttcttctatgaacttataagatcaaagactttaagactttcactatttcttctaccgctatctactacgaacttcaaagaggaaccaggagtacgggaggagcatgaaagtggacaaggagtgtgatcattcaagcaccacagggagggggttcaggcctccggatgactgcaggccaggcctggagaatatccagcctcccacaagaagctggtggagcagagtgttccctgactcctccaaggaaaggagactccctttcacggtcggctaagtaacgggtgccttcccaggcactggcgttaccgcttgaccaaggagccctcaagcggcccttatgttggcgtgacagagggctcacctcttgccttctaggtcacttctcacaacgtcccttcagcacctgaccctatacccgccggttattcctaggttgtattagtaatgccacaaagagtaatattaaaagctaatgactaataatgtttataataatgatggataattgttcatgatcatcgctgtatctaatttgtattatgactattcttattctattttctttattatactgaaacagtttgtgccttcaag

SEQ ID NO: 486115 - DNA, 319 bp, Homo sapiens
  misc_feature (5)..(5): n is a, c, g, or t
  misc_feature (38)..(39): n is a, c, g, or t
  misc_feature (64)..(64): n is a, c, g, or t
  misc_feature (74)..(74): n is a, c, g, or t
  misc_feature (86)..(87): n is a, c, g, or t
  misc_feature (94)..(94): n is a, c, g, or t
  misc_feature (98)..(98): n is a, c, g, or t
  misc_feature (108)..(109): n is a, c, g, or t
  misc_feature (120)..(120): n is a, c, g, or t
  misc_feature (153)..(153): n is a, c, g, or t
  misc_feature (229)..(229): n is a, c, g, or t
  misc_feature (239)..(239): n is a, c, g, or t
  misc_feature (251)..(251): n is a, c, g, or t
  misc_feature (253)..(253): n is a, c, g, or t
  misc_feature (281)..(282): n is a, c, g, or t
  misc_feature (287)..(287): n is a, c, g, or t
  misc_feature (304)..(304): n is a, c, g, or t
  misc_feature (313)..(313): n is a, c, g, or t
atgangacacgtgggtgctgaactcgggcgccgtcctnnccggcatggtcctcccgagctccgncagcattacntcacccggcccnntctgttncccnggtccagccnngatggcgcgcncctggtctgtctgattcccctagccgccacccngcgtttctgtaccgggtctctgcagtgttaaacggacgtgtaaatagtggtaaatagtgaaagcctgtccttcccnaaatgtaaanccatctgtccgncntaaggacgacaccgtcagctgtcggacnngcacncgtttaataaactgacncttgcattncctggg

SEQ ID NO: 486116 - DNA, 785 bp, Homo sapiens
ggctaggtagaggcccgtggttatcggccgaggcagagtatgacggggatgtacgatgctggtgtggcgggtgctgcacgcgctgctctgtctgcaccgcagttgctcacctcctggctccgcgttcggttcggcacctggaactggatctggctggctgctgctgcctgcgccgcctctgcctgcggtcctagcgccgctctgtgcttcactgctcctgcaatgccccctgtgcagtctggcatgtgaacctgcctgtcaccacctggcaccctgctgctggggtggtctgtgcctggcagcctgcacaccacctgtgattgctgctgtgctgctgctgtgactgtgtctgttccttggagaagctgcctgtgcatatgggcctgtgtgatcaccgaggtggatgcaggaacccagcttctcggacatcgcgagcctacgtggtgtggtgtatggccgtgggcatctcctacattagcgtctacgaccaccaaggtattttcaaaagaaataattccagattgatggatgaaatttaaaacaacatgcaagaacttctgggcctagatagtcaaaatactcaccagaattttgcaatagtaatgacaaaggatgatcaagtataaaattgccatttggcagtgaaggtgcttgactccggacaatggaaaagcagatattgtacgagcttgtcagggacttgccagtaagaaccaaaagcaaagaaccacagatttgctttgatacggaagcagtacttaattaatgtgtctatctgatagaaa

SEQ ID NO: 486117 - DNA, 503 bp, Homo sapiens
gatgcagaatggaggatgtcataccaggagaaggtgtggagtcagcgctcaaaaacaacagtcgaagatgtgcggttgtgccgggactccaagcacccaggcactatgccgtctacaacctgtccccgaggacctaccggccctccaggttccacaaccgggtctccgagtgtggctgggcagcacggcgggccccacacctgcacaccctgtacaacatctgcaggaacatgcacgcctggctgcggcaggacacaagaacgtctgcgtcgtgcactgcatggacgggagagccgcgtctgctgtggccgtctgctccttcctgtgcttctgccgtctcttcagcaccgcggaggccgccgtgtacatgttcagcatgaagcgctgcccaccaggcatctggccatcccacaaaaggtacatcgagtacatgtgtgatatggtggcggaggagcccatcacaccccacagcaagcccatcctggtgagggccgtggtcatga

SEQ ID NO: 486118 - DNA, 865 bp, Homo sapiens
gaatgtccttgacaacaaaaagaggacagctctgacaaaggtatgcagtagccaactatatcagcatgaggccgtacaatgccaggaagatgaatgtgcgttaatgttgctggaacatggcactgatccaaacattccagatgagtatggaaataccactctacactacgctatctacaatgaagataaattaatggccaaagcactgctcttatacggtgctgatatcgaatcaaaaaacaagcatggcctcacaccactgctacttggtgtacatgagcaaaaacagcaagtggtgaaatttttaatcaagaaaaaagcgaatttaaatgcgctggatagatatggaagaactgctctcatacttgctgtatgttgtggatcagcaagtatagtcagccttctacttgagcaaaatattgatgtatcttctcaagatctatctggacagacggccagagagtatgctgtttctagtcatcatcatgtaattgccagttactttctgactacaaagaaaaacagatgctaaaaatctcttctgaaaacagcaatccagaaaatgtctcaagaaccagaaataataggatggtgatagagagggtgcaagaagaaatgaagaagctgaacgtatatgtgggatttactagaaaatctgattaatggggtactgctggcaatggtggtgaaggataattcttcaaagagagggaactgaaattgaatttctgaaacgaagtgaaggatccaggtggggtggggcgcactgggattcaggcttgtgggcggaggggcaaaaatgggtttttgtagaaaagctttttttaacgaaattttttgaaactggggggggaattaaaaaggg

SEQ ID NO: 486119 - DNA, 147 bp, Homo sapiens
  misc_feature (19)..(19): n is a, c, g, or t
  misc_feature (142)..(142): n is a, c, g, or t
gggagggcagcatgcgacnttgatctttgagcccactcgtctgcatttgttctttgggattatataatctagggccaagaagtttactgcctgtggagcgggcaggaactctagccacctttctctgttacctgcagctganttggc

SEQ ID NO: 486120 - DNA, 366 bp, Homo sapiens
ggaaacctccgccttcaaggctcaagcgattctccgtggctcagcctcccgagtagctgggactacaggcgcattgccaccagtgccgggctaacttttttccacctttcagccagaaagggggcgtcacagtgtgggccaggattggtcccaatcccctgactctgtgatccgcccgcctcggcctcccaaagtgctgggaccacaggcgtgagccatggcgcggggccacaattctatttcttaggcagaatcaggtgataccaaaaacggcaaggtcctagggtcaacctaatatatagagactgggagcttacttgtacttcggaccacgagtacaaccggccgggggggggactcctctaa

SEQ ID NO: 486121 - DNA, 655 bp, Homo sapiens
aaagccgccgctgccaaagctgccgccactagccgggcatggccatggcgtccccggccatcgggcagcgcccgtacccgctactcttggaccccgagccgccgcgctatctacagagcctgagcggccccgagctacctgccgcctgcccccctgacctggtcctcgctgcctctgtgtccctggcgcccctctccactgcgcccggggctgcgctgagggtgcgcagcgccctggagggcttgcccgggggaacctggagcccccgccccgggcctcccgacccgctctgcccgctccggacctggtctgcagcagaagactagcggcggcggcctggagcgccccagcccccgcagacgatgcggagcatctatcgaagcagccgcatggatcccagagtccacggacggagcgacggcagaggggcactgcttcgccgaagttggtgctgccgggcggacctcggcatggtgtgacctgtgacggacgagcaggtgctgcgagcaaggctgcatgcgctgcacataacatgtaaaattcaccctgtcacccagaatgcctgcagacctgatccagtggacatgcagtcagcacggaagggtatatacccgggacagaccctctccagaaagacacctcaacagtgagcttc

SEQ ID NO: 486122 - DNA, 1979 bp, Homo sapiens
ggtactcatgtaatgattgttactagtgtagttggtgcatagggatgggtgaccctgcaaaaaaggggcacagcaaactctatttcaggtacaaatggaccttatctttaggcaaatccttgaaattttggcagggggaatcaggttttcctgtgagttttttgtttttggcttttcatagacatctacatgaagtctctgctttagaatcttaaaactgtagcttcagaggccgggcacggtggctcatgcctgtaatcgcagcactttgggaggctaaggctggaggaccacttgagctcaggagttcgagaccagcctggctaacagggcgaaatcctgtctctactaaaaatgcaaaaattagccagacatggtggcgggcgcatgtaatcccagctacttgggaggctgagggaggagaatcacttgaatcctgaaggcagagattgcagtgagccgagatgacaccactgcatgacggaatgagactccatctcgaaacaaaaaactgtagcttcagggattcacttaaattatcatttataggccaggagaggtgtggctcatggcctgtaatccaagcactctagaaggctgaggcgggtggatcagttgaggccaggattttgagaccagcctgggcaacatggcaaaaccctgtttctacaaaaaaagaattctctgggtgttatgatacacgcctgtagagacagggtctcgggccgggcgcagtggctcacgcttgtaatcccagcactttgggaggccgaggcgggcggatcacgaggtcaggagatcgagaccatcctggctaacacggtgaaaccccgtctctactaaaaatacaaaaaaattagccgggcgtgatggcgggcgcctgtggtcccggctactcgggaggctgaggcaggagaatggcgtgaacccgggaggcggagcttgcagtgagccgagattgcgccactgcattccagcctgggagacagagcgagactccatctcaaaaaaaaaaaaaaaaaaaaagacagggtctcactttgtcacctatgttggagcacagtggtgccatcatagctcactgaagtcttgacctcccaggcttaagggagcctcccacctcagccttccaagtagctggcactataggcatgtgccaccacacctggctgatttttgtatttttagtagagatggtgtttcgccacgttggccaggctcgtcttgacctcctggactcaagcgatcttccagcttcggcctcccagagtgctgggattacaggtgtgagccactgtcctggaccaattttttttaaagaaggaaaaataaaattaattcagttctacttaaaaaaaaaaaaaaaaaacggtcaggcacagtggcttacgcctgtaatcacggcactttgggaggccgaggcgggcagatcacgaggtcaggagatcaagaccatcctggctagcgtggtgaaaccccatctctactaaaaatacaaaaaaattagccgagtgtggtggcgggcgcatgtagccccagctactcagtaggctgaggcaggagaatggcatgaacccaggaggcggagcttgcagtgagctgagatcgcaccactgcactccagcctgggagatagagcgagactccgtctcaaaaaataaacaaaaaaaagctctttaaaggaaacgtgcccggcacggtggctcacgcctgtgatcctagcactttgggaggctgaggcaggtggatcacctgaggtccggagttcgagaccagcctgaccaacatggagaaaccccgtctctactaaaaatacaaaaattagccgggcgtggtggcgcatgcctgtaatcccagctactcaggaggctgaggcaggtgaatcacttgaacccaggaggcagaggttgctgtgagccaagatcgcgccattgcactccagcctgggcaacaagagcgaaactccgtctcaaaaaaat

SEQ ID NO: 486123 - DNA, 315 bp, Homo sapiens
cgcgttcaagttacctccgacaagaagatggaattacgtggacacttaaaggcctgtagcaattcactgtgcaatggatttacactttatgtaagagactcatctttcagtaacatattacatagtgggatgagggcagaggaagagtggaagaatagaagactctgttcttctctggacctcatttactcttttatgataatatcattgtaatgacttgctgtctaagatatacttttgtggtatgcagaagaatggccccttgcctacgtccttgcctttttcctgtgttcctgttgctttgacgcgtgcggt

SEQ ID NO: 486124 - DNA, 177 bp, Homo sapiens
tgaaagtatatccgtaggtatatgcagagctgacagtgacactgtagaggttcctggagagggtggcaatgccctggtccccaggcgaaggggagataggcgatgaagtagagtggtgcggactgctgagtgaactcctccagcttctccaggatagctgagtagaaggcagcactg

SEQ ID NO: 486125 - DNA, 659 bp, Homo sapiens
aggatatggaacataagattaaatctgatacatatgttagtttcggagatgctatgatggctatagtagagtgcctgaagtacaaagtatgactattgagctgtaaagctgtatgacgcgatgaatgacttgtgcactcgagataacatgctcatcagagcgatgggtacctcagcaggaattgacatggcgtatatcctggcgcacttcaagagactctatggatagtatctgtactcgaacatcatgggtgacacatctggagactacaggaaagtactgttagtactatgctgaggagatgatgaaactactgatcctagaacgacaggacgatgctcatgactatgaagtcttgtaacatcattgttctacgactgctatagtattatctcaggatagctatctacgactcgcctacagctggcgtctagaatatagactgcatgactattattccactatcattagtcattaggatgctttaaagctgtacttgcttattcaaagcctataagatgtaaacggcagatgttaagtagaacatgatatggataccatggatttcagagacttccttctactgttgcgtgtacatacatcgacttgttaaagtatccagaatgtcgttttaacgaaacactttttggactctgtct

SEQ ID NO: 486126 - DNA, 1574 bp, Homo sapiens
ttactaccagacaaccttaagcgcaaaccatttacccaaataagagtataggacgatagaaattgagcacctggcgcgaatcagatatagctaccgccaaggagcaacagatgcaaacaacttcataacctacgcaataatatagccaaggagtaacccactataccattctgcaatacatgacatcaactcagcaaataacgtttgcaaggcagagcacaaagctcacagacccgccagcaaacacccagcacgcagcatcaccatcaacgcacacggagcatacacaagcagcacaacacacggcctacatggatcagcacaacacatcagactggagcaagccacccaactcagcgctcacgcaggcgcacccagaaccctcacactgcagacccaatgtgcatgcaatacgcacctggcatagcctcacacaaagagattaagaacagctcacgagacgcatctcaaacattaaaaaagctaaagaccccaaccagcaacaccactcgcaaaaactcaccacactagactcacaccccacgcgaccactgcacaaggaacgcaaacagaacgagcacccagccactcatccagaacacccaccacccaccgccgcgacacacccctaagccacagcacccagcagccacccacacaccctcaccacccaccccacactacgaccaaccgcccaccacaagcaccacacacccccacccccaagccccacaccacaacacgcggcatcccaccccgacacaacgcacaaaccaaaacaataacccgaaaacgaccacaagagtgaacacacaaccacaaaacaactacaaacctcggacaccgtacccaacctaaccaccaaccaacccgagggcgcgcacaaacacgtcccatcccacacaccaccagatcatacacgacacgaacagcctaaacctgactacccgaatccacacgcagaaaacaaccgcaccaccaccgacaccatacgccacccacgcgcacataacagccacccggcccgcctcaagccacaacaacacaccaggaacgaacagactaaccaacccacgcacccgcaacgccaaagactaacaaacaaacgagaccaccacaacacagccagcacgacaataacgcccccaacacagccaaccaaccaacacccgaaccgcacacgaccaactcaacacagaccacaagacatcacagcaaacacaacaccgagaacacacaaggactagacgcacgcaccagcgaccacgtcacgctcgacgatcaagaacgacgacgcgaaagcaacgcgcagcatcgcgaaaggaacgcacggcagcatacgaaagaagctcacacagcagcgaccagcgacaaagcgagagctacgaacacctcgtagcaaccgcaacacgcaacccagaggacgagacagacaccagacagccagccgcaacgccaagaccagcacaactaccgccgcggcagacgacagcctgcgagcagcgagccccgcacgccaaacacgcaacccacaacagcaagcaagaccccacccgaagcgcggacctacccac

SEQ ID NO: 486127 - DNA, 350 bp, Homo sapiens
gagcatacaacagaactagtataaatccatagtagccattcattatcttacccagaagtttaacggtcatatttaaagcatcaaatagggactcagtgttctgagtaccctgctcgtctcagagtcttcaatccaccccccagcccaccggaagaagccgtttctcaagtgatctctttaaggccaatgtactgtgggctctagtacctccagcaatggccaggctggtgttgcttgatgagagagcactgacgggcaccagcggcatgtggccccatgtgacccctcagcctatggtgttgtgcctgtaacctggggctctccacggagctctgacgaagacctcagta

SEQ ID NO: 486128 - DNA, 134 bp, Homo sapiens
actcagatcatgtcctgaaacacatgcacagccttcaatgttaggaccacagccaagatggttccaaaataacacaagctagacactctggtgggagcctgctctctctcagcctcctgtcctctatgtaccat

SEQ ID NO: 486129 - DNA, 231 bp, Homo sapiens
tgacagctgtacctgttgtcacgtattctctgctcatagttctcagtctttagctgtaatacttttactgcagaatctctataccatgcctgcctgccggaagtgcttctaacgctttattgagttgatcgccaatagtatatatccattcctcttcgtcctgtagcatcactataaaggatggagtacatgacaggtacagttcgcgcttttagctgcaaacacacaatg

SEQ ID NO: 486130 - DNA, 243 bp, Homo sapiens
agcgcgtacagaataataccctaaacacaggccgggtgcagtggctcatgcctgtaatcccagcactttgggactccaagacaggcagatcacaaggtcaggagttcgagaccagcctggctaagcattgcgaaaccccgtctctactaaaaatacagttataattttacatacgatactaaatttcaatcataagcacgttcagaataataccccaaaacacaggccggtttgcagtaggca

SEQ ID NO: 486131 - DNA, 454 bp, Homo sapiens
tcagtcgacctttaaaaaggatttttgtgaagcaattgatttatcaaagcaaaaaaattaaaaatagaaacttgctttatggatgttttattttataaagctcatgtcaccaaaagctgcttctccattttatgtaaaacattgagaatgttttcatgttttctggtgacatgtagggtctgtagtcacccctgcatattgagaaactaggaccacactgcatcggactagtcaggtccattttatgtaaaacattgagaatgttttcatgttttctggtgacatgtagggtctgtagtcacccctgcatattgagaaactaggaccacactgcatcggactagtcaggtccatttacatgtccaagaatcttttcttaaattccttactttgttcattcattggctgttcaggctgaaaatggaaacaggtagcttttatgttttttattata

SEQ ID NO: 486132 - DNA, 159 bp, Homo sapiens
cgtgggcatgtttgcattgagcagagccccacactgagccaccactaggcgacaccccactgctgctggagtagtagcttccactgctacctccggcaagactccaccgaggcgccgcaagacctccaccgaggccaccggcatagccacttgcactgc

SEQ ID NO: 486133 - DNA, 211 bp, Homo sapiens
tctagctgatccttactggcagagctggacagttcgagagtactattgattcaaactgccaaaccaccgggcagcgaaaagactatggaaagtgtgcgtggagcatcataccttctacatggcttgttttctccatgagcatgcaccaaaagccaagttcctgaacttgggggtcaaatttccgcttatagtgtgcgcacccaagtcacag

SEQ ID NO: 486134 - DNA, 104 bp, Homo sapiens
  misc_feature (46)..(46): n is a, c, g, or t
  misc_feature (65)..(65): n is a, c, g, or t
accttggaattgtttccagtttggggctactgtaaataaaactgtnaggaacatctgtgtacaanccactgtgtagacataggtttccctttctttggggtaaa

SEQ ID NO: 486135 - DNA, 109 bp, Homo sapiens
gggaaatgctggggaagcaagtcagcagtcgagcctgcaggaggcagcaggaggtgtgcagtgaggacatgcgtgtgaccacgggacgtgggacgagggggggcatggg

SEQ ID NO: 486136 - DNA, 322 bp, Homo sapiens
acagtttggatttccatgattgtgtagttcttttaagaatgagcctgggggcagtggttcacgcctgtaatccagcactttgggaggccgaggcgggcggatcacaaggtcaggagatcgagaccatcctagctaacacagtgaaaccccgtctctactaaaaatacaaaaaattagctgggcgtggcagcatgcgcctgtagtcccagctgctgggaaggctgaggcaggagaatggcgtgaaaccgggaggcggagcttacagtgagccgagatcgcgccactgcagtccagcctgggcgacagagcgagactccacctc

SEQ ID NO: 486137 - DNA, 190 bp, Homo sapiens
caatggtggaatttcaggccctgtgactgtcaagctggcaagggccatgattgcgggaatggaactggggcttacctgggaggtggtctcaagcagacacggaatggcagaggaggatggcaagtcccccccaacgcctattccatcctgaaattctcagtgtctgaatggctattactgtacttgctat

SEQ ID NO: 486138 - DNA, 642 bp, Homo sapiens
  misc_feature (70)..(70): n is a, c, g, or t
  misc_feature (72)..(72): n is a, c, g, or t
  misc_feature (117)..(117): n is a, c, g, or t
  misc_feature (132)..(132): n is a, c, g, or t
  misc_feature (146)..(146): n is a, c, g, or t
  misc_feature (195)..(195): n is a, c, g, or t
  misc_feature (203)..(203): n is a, c, g, or t
  misc_feature (257)..(257): n is a, c, g, or t
  misc_feature (344)..(344): n is a, c, g, or t
  misc_feature (366)..(366): n is a, c, g, or t
  misc_feature (375)..(375): n is a, c, g, or t
gaaccaaaatgagaaggcaatgaagagccaaagtcctaaatttgtaataacaagtttatgaaaagtctananagtaacaggaaaatcatagaattatctacttagggagcacattgnaagggcaactgcatntatgcacacctaantgaaaatgatacttattcaaataaatgatatgctctacaggggtgctgncattctgnccttgttattcttttaaatactcataatttatctaagtttatcatgctgttcancttaaaagcactagcactaccataactcatgattcctcctttaagttatacttacagttggagcaggagccataatgctcattggtncaggaatcattggggtccctangaaaagaanaaccacactgattttacatgactgcattctctatcaacaacatgccacacaattaagtatccttactcataattaacataagtggaaatataagacaaatgaaagtgaaatactgataaatactatcttattttcaaaaggaatgtggtatcaggttggtccatataaacttacaaaaaagactatcctgaaaacaaaatggccacctcaatatgcttttgacttaaagagcataaaatcctggatagttatccattcgggttcatg

SEQ ID NO: 486139 - DNA, 103 bp, Homo sapiens
tgatcataaggactagtataaatgatttgccataataagataataacgtggatttatattgtactttcatatctgctatcgtcttgttttgacaacaccctag

SEQ ID NO: 486140 - DNA, 336 bp, Homo sapiens
ctgtaattaaaaaatgggtagtttctggtgcattataagaaaaaactggccgggtgcggtggctcacgcctgtaatcccagcactttgggagaccgaggcgggcagatcacgaggtcaagagatcgagaccatcctggctaacacggtgaaacccatctgtactaaaaatacaaaaaaattagccgggcgtggtggcgggcgcctgtagtcccagctactcgggaggctgaggcaggagaatggcgtgaacctgggaggcggagttgcagtgagccgagatcacgcaactgcactccagcttgactctgcagtcagccagagcgagactctgtctc

SEQ ID NO: 486141 - DNA, 218 bp, Homo sapiens
gtgggtgtcagatgcccaaaaagttcgagcattgttatccgctgcaggctctccaagtcatcaacgctgtctctactcatacttcgtcgcacagaccacgactcatgagacactagccacaggccatttcattagcgtcatccacatttagatgcagctgagcaaaagtttgcaatcatcgccatctgttcgagccactaccacctgccggatcccat

SEQ ID NO: 486142 - DNA, 1002 bp, Homo sapiens
  misc_feature (47)..(47): n is a, c, g, or t
  misc_feature (989)..(989): n is a, c, g, or t
  misc_feature (1002)..(1002): n is a, c, g, or t
aacagttttatatcgcttacccctcctcacgaaccagagcactttgngactacagtctgggtgcttaatcggaaatagcaacagataagctttcttttcctcttaaaaatattacgtcgaaagaatatctgctaaaatgatagccaggcaacagcacacgaaagcttcgaaaacaccacctgaccatagtaaaagatttactccatacttatgtcgaaacgcacctactcgatctctaactcgaaaacctataacagccacctcttatcctgaaaatactgatcatcggatattacccataatctgtgaccgagagacactctcctcctaattatactcacgagagtcggtgcggctctgacccctcgccctggaaacatgacatctacaataccccaacccccatggctatcgtaatctgcagtaccctaaactccctctgccactatcccgaacttctccgggcaaccggaccaggttaccagcctatctacgaattcattctcctatcacaacccactatgaatatcatagacatagaatataatacacttctccatggacacactaccccaccccgcccttgccatgaaccacacaccccacctcgcacccgcccacacccccgccccctcagccccctccccctcacccttcactgccatccactctacgaccctactgcgtcgccgacaacgtccgccaccgggcctaccatgccgcctcctagtccagtctcacgtttctgtccgcgcgacacctcacccacacgctactactctatcctacctcctctcctatcgcccctcccccctgaaccagcggtccactgcagtctctagatgagtcgttcctacgtccttcaccgttctgccctcgacaatgcatgactcctccatcacgatgtctgacatatacacgtagtcaatcgagtcgaccgccccacctctcgttcgtggatcgtgatcatctcgcgtatcgtcactatntatctcgttgttn

SEQ ID NO: 486143 - DNA, 1322 bp, Homo sapiens
  misc_feature (1)..(1): n is a, c, g, or t
  misc_feature (7)..(7): n is a, c, g, or t
  misc_feature (12)..(12): n is a, c, g, or t
  misc_feature (48)..(48): n is a, c, g, or t
  misc_feature (143)..(143): n is a, c, g, or t
  misc_feature (181)..(181): n is a, c, g, or t
nacaaancccangccgggttgggaccagcctcagcagctgctgccagngtaccagcagactcttccggccacccatgtcccagatgcctccgaccccaggcttccgacccatagtccagagaatggtaagtgccccagagctngccggaagatgatgtgggaatgagccccggatccccanccaggattaaaatcctccagtaaaataattttacccagttagcctgggaagctggtccagctctggggggattaagggccaaattatgcctgtcatgaacctgtcccaccactgacgtctgccaaagcgaatatgaactttggtagatccattgtctgttctatttatttttcccagtgaaaagtattttgatagagcttttcattttataaatacactgagttaaccaaatatcatggatttccgttgttcttaagacatgcaattcaaatgtaaatacagtagagtattacttaggtagaaactcgtggtgattttaagattggaaaagaatctgaggaagagttgaataacacacattctaaagactagaacattttattgtatgttgtaaaattgggtagaaatttgtgtttgtgaaaactgagcattaaaaccttacagagaccgtttctcgtttacttaagaaaatgtgcggtgtgttgtctgttgttaattccattccctccgtgtgtttccttaaaagcttctgtctattagtggcttcctgtgctctgggcacttaactcctaatctttcaaacaccgggatgcaaacagcacagggattagacctgtgtgcaccctgacctggagggtgagctttgcctgctgtctgctcgcttggctctttatacagactgaggctcagtctgcctgcccgtctctggggtgttccatctcagcattaggtcagttggttctgttgagtgtcttcaggtccacctccagctggtgattatttcagaataaccaaaaactgtacttggttatattctgaatttgcatgtttgcctgacttatatttctcattaaacctcttagtggataatttcttggtccgtgctaccgatgttgaagggattcggttccgcgggtaattaccggagtctccctaggagcggggggctcctcgccacgtgtttggggttacccaatttcctccccccaagggggtgtgttttccgcccggcattcctcacccgccttgttcccatctttcccggtccgagcacgtcggaacagagaggctccctcgtgtcacacggcgtctcggggacgcccccagtgtgaggcgctctcgtcctgcctcgtcgtctcct

SEQ ID NO: 486144 - DNA, 159 bp, Homo sapiens
  misc_feature (53)..(53): n is a, c, g, or t
gattactggtaccgctgtcgctcgcacgctctcggtgagtaccgtgcgcaacnatgaagcagaacctcatgttcgccttcctctacaacgcgctgggcatccccatcgccgccggggttctctatcccctcacgggctggctgctgtcgccgctgatcg

SEQ ID NO: 486145 - DNA, 470 bp, Homo sapiens
  misc_feature (26)..(26): n is a, c, g, or t
  misc_feature (40)..(40): n is a, c, g, or t
  misc_feature (63)..(63): n is a, c, g, or t
  misc_feature (80)..(80): n is a, c, g, or t
  misc_feature (222)..(222): n is a, c, g, or t
  misc_feature (230)..(230): n is a, c, g, or t
  misc_feature (258)..(258): n is a, c, g, or t
  misc_feature (298)..(298): n is a, c, g, or t
  misc_feature (395)..(395): n is a, c, g, or t
aggtttttccaagggtttccccccgngcccaacccgagangcccaaaaccaaatccagggaanaatgggaaaacccgtgnggtaattttaaaaaaaccaagttgaccttttccagttccctgaaacggttaaagggtggatttaaaaaaccaagacagtttaagttttgggggaaaccagaagcctcctcctccgtccttaagcccagattcctcctgattncttttagnacgtcatagctcccttagttcctgactncctgtcgcccctaaacttggcatgggtcaagttgaagttncatccttagactgtcagcgttctgagcatggctgaagtattaaaatgtttcatattttttagagcaaaattgatggaaagcatttggctgaatctanccacctgcagtcagattcttcaatgtggtttacccaactggagtagtgataaacaccttaatcataaaatgaata

SEQ ID NO: 486146 - DNA, 915 bp, Homo sapiens
gattttagtggcccgctatggctggcggtgttgatggttgggtcctgggatgcggggtctttgactgaaggggtagtgccaagtggagcgtatcagggacgtcgcgcggcacaagaagaggaccagcctggacgcctggggacgctgtcatgtactgtgctgcgatgctgtgtggtgcctgctgcccaaaacggctgagcaggcaaaagctgtgctgcgacaggatgtgatgtgcctggtggctcatgtgctggtgcctgtgcggtggggggcagacgatgtggagctcttggttttcggctatgcctgcaagcttgttcctgtggacgacgagctgggccctggctcaggaacagggacagcacctcatcccctggatgcggggaccacaagatcctcatcgacagatatgatggacgtggtcacctgcatgaccgtttctgagtacgatgctgacgtattaccacagtgcaacagagcattatcaggctgtctgaagcaggaggcgcgaaatagaggtgcccatttgatgactgaacgagagagctagtggagccattgcagtaacggaatatgccattgaaggcacggaccgacaaagagcaaaacgaaactgaagtgcaaagacgcacaagcaaggtagaacagcccggaagaccacgacaacggcacggagggaacgcaaacaagaaaggaccagacgaaggcaaaaacgcacgtacacaccgacgcaaaggcaggcaacacacaaaaaacagcaccacgagggccagaaaacgcgcccaccgaacagtacgcgaaggaagcgacaaacgaaccagacaagacaagcacgaaacaacaacagagccagagcccgaacaaagagtccacgaagcacagagcgcaacaacccccaacgggaccaggccacga

SEQ ID NO: 486147 - DNA, 169 bp, Homo sapiens
ttccttaaacactgtgctgcggtgtttgcctgcgggtccagtgctggcgggcacggccagtcgggtcggagcggtcggttcgaccccccatcccgagcgccacgaacgcagctggaagacccacgccagcacttccgccaccgcggtatatagctcgcccgggatttct

SEQ ID NO: 486148 - DNA, 707 bp, Homo sapiens
cacctcccacccgcctcttggctcctctcctctagggccgtcgctttcgggttctctcatcgcttcgtcgttcgccaagtgttggaggagaaggcgcagcgaggccttcagggatagatgggaggcgaggagaagccgatggtgctggtgaagagacagcaaaaggaaggaggcaaaaagacgaacaccagaaggatctggagatggaggtcgagctgagttgaatcctgggcctgaagtatatttacacacgtcttgagatgtataatatactaaaagcacgaacatgattccattctgggcagaaaaggcggaaaacagatagcaagccaattaaagtcacttgcctgatggtaaacaggttgctgcggaatcttggaagactaacgccatatcaaatttgcctgtggaattagtcaaggcctggtcgaaaataacgttattgctaaagtaaataatgtggtgtgggacctggaccgtcctctggaagaagattgtaccttggagcttctgcaagttgaggatgaggaagctcagggagtgtattggcactgctagtgctcacataatgggtgaagctatggacatgagtctatggtggatgtttatagctatggtccgtcaatagaaagtggattctattatgagtgtacctcgaagaagggggggtgttagcaatgataatcttatctggagggagtgtagaa

SEQ ID NO: 486149 - DNA, 345 bp, Homo sapiens
  misc_feature (334)..(334): n is a, c, g, or t
caacaaccccggggaatatcggcctgcctcccaactgtgttgaaggtgttaaagaaaagagccataaaattaaaaatgatcatcctgaggccctttatagtctctgcctcaagagactagagttttcccattccttaacctaaacacccaaatatcttaataattgggcaaaatctaaatatcagagataattttatcttgaagattgttaaattataatggtgattcactagcttgccacgtctctgagtcaaaaattaggtctttgtttaggaatcaatcataatctgcaatttggaaataggaagattttagaagactcagacattattanttcttgtgtgc

SEQ ID NO: 486150 - DNA, 308 bp, Homo sapiens
ccacagatacgtcccaacactccatacttccttttccagcaaaaggacctatgcggggggatgggatctaccccagggctgagtaaagaaacccggacacggtgtaatgcttctagcaagttgatcacactagagcccgacccaaaaccccaaaccactctccatcctccccagcctcgcagaatgctggattctaccaagccatacattaccttctagtctgtctcctctgctgagctaccatgtgccgctcctatactcctccccattctcccgtataatctgtcctcagaacacttcctcatatc

SEQ ID NO: 486151 - DNA, 129 bp, Homo sapiens
tgtgcatctgttgtagatattagaaggatgtatactgtcagtttgttctgctatcctcacaaaaaatggtattgccagctgcacaataatatttgattcatccacccacccctgttccccacccgatcg

SEQ ID NO: 486152 - DNA, 895 bp, Homo sapiens
gaagatggcggagctgtcgaagcggaaagcacccctactcctaatcccccgactagagaagcaggagaaaacggtaatctaatcgagtgaggttgctaagcccaggaacagctatattacaggatccctctagcagaagcagatggtggactctggtatgtgacaactgataaaagcaaaatttggccagcgaaaacctgcggtctgactctccaagattctgatactgtttgacgagttctgggctctgtacaagcatatccagttgtctcagttcattttacatgcctggcatgtgatctacctcacttattaaggatggtattgagcctatgtgccggaagagtgagaaaaacaaatggggtggacgattggctaggttacatgtgagacaaacacgcagcagatgaagtgacctcgatcgcttcggctaggagacccttctgtgccttcatgggagaatcttcggtgatgactacagtgctgatgtcattgtggcgctgtgttaatgtaagagctaggggtgatagatagcgagactggactactggactgttgaaaacagagatcgctgttgcaactatagggagggtatacaaggaaaacggtgacggagttcctccaacgaagtagtgaagcgatactaagtgccaagcagaacgcaggattatgtaagaggcgggtcctgacactagaatagggttagtggataagaagagctcttcatgagtatgccctaggaaggccgtatgcagtgagactgtgggcagaacaagccttcacagcaaagtgccgggttaatgaggtacttatgcacagagtaggaacactgcatgggacccgcgcaaacaaggaggcaaccacaaaaggggccgcagtatgctgccgaccgcac

SEQ ID NO: 486153 - DNA, 1030 bp, Homo sapiens
  misc_feature (251)..(251): n is a, c, g, or t
  misc_feature (345)..(345): n is a, c, g, or t
  misc_feature (922)..(922): n is a, c, g, or t
agcgggcctgtgtctgggagggagggaagatggcagccgtggacggcaggcgtggctggtgggaaatggggcgcgacatcagcctaacggccctgactagcgccacgcgatccccttatatcaatccgtcaatacgtggactgttgggccaggcaggtggctctgtacaaccttcggaccataccgggccaagcaagtgggaggacaaatctgatgtggaagtgaaccttattcgtgttatacaaagtctngacttcatctccaaagggccactgggatttcacacactatcattgagaatacgtggcttgatgccactggaacacattcatgggaactacgaancacctacttttacattaggacgtacctattggcactctcttccaaacttccccaggaccactcctgtttcacttcgttcgtaccgagggacatatcgtcgcgacgcactttcgttcccagtccgtattgtgaagagtatgtggtgctatgtttactcggattatatggcaaggtaaatttggggcaaataggaggaaaaattaaggcgacggagcggcttgatcggacatagagatccagtacaaattcgagagtacttggaaacaaggcttcttgatacagggcacgacgttccaatcggggagaaaatcactcgcgcaaacgacgcaacgagaaaaccttatttctcccccccacagatggtgcttcgcgttcgaaagatatccacagggacagaacagagggccaacagaggaaaaaggttagacaatcacctttttttacccggaaaactggccatccagttcgaaggcgggggcgcccatatggagaagcagaaaaaatgagcgaccaaaatcagggttgggcttatacagaaccccctggggtacactcctggacggcccccgagactgtnaacgaccgcaaattacgaccgccaagggtgagataccaccatactttgggggcccagcttccctttagatgcagcccatcagtcccgaaaacgagtcacgtgccattc

SEQ ID NO: 486154 - DNA, 246 bp, Homo sapiens
gaccagcctgaccaacatggcgaaaccccgtctgtactaaaaatacaaaaatcagccaggcatggtggtgggcacctataatgccagctactcaggaggctgaggcaggagaactgcttgaacctgggaggcagaggtcgcagtgagccgagattgcaccattgcactccagcctgggtgacagagtgtcttgaaaaaaaaaaataataaaatgggacctccacactgtgaaggcccttgccagtc

SEQ ID NO: 486155 - DNA, 150 bp, Homo sapiens
agttgacccagagtcgcgcgtatattattagtatttagaatttataaaaaatttatttatttatttatttattttagagacagagtctctctctgttgcccagtctggagggcagtggcgcaatgtcgacccactgcaacctccgcctcc

SEQ ID NO: 486156 - DNA, 426 bp, Homo sapiens
gtgcaggtgtctgaaaccactggcagtccctctcacatctttgctacctgtctggccgtcacggctttaaggttgtttttttgtttgtttgtttgttttgagacagtctcactctgtcgccaggctggagtgcaatggcacgatctcagctcactgcaacctccgcttcttaggttcaagcaattctcctgcctcagcctccagagtagctgggtactacaggcaggcaccaccacgcctggctaatttttgtatctctagtagagacggggtttcaccctgttcgttggccaggctagtctcgaactactgacctcaggtgatccgcccacctcgtcctcccaaagtgccgggattccaggtgtgagcccccgttcctggccacaagttgttttaaacagcttgattgtgcattctactttttct

SEQ ID NO: 486157 - DNA, 990 bp, Homo sapiens
ctgagaaggaggagctgagcaaggatgcgggaggccctgcggcggtccaatcgaggagctgaggtctgcagtgaagaaggcggagagtgagcgcatcaggtgagagcggcaagggactgcctgcttcccgtgccccattctctaactcagtggccctcagccttcctaaggctgtgacctttaatacactcttcatggtgtggtgaccccaaccataaagtcatttacactgctaccttataactgtagttttgctactgctatgaattgtaatgtagatatctgataggcagattgtatctgatatatgacttctccttcatcccgcaaagggtttgtgacccacaggtagagagagaaccactgctctaactgaaccttggcccggacctcacttcaccccatggttagggaatcatgtagatggtgccgcctaccacagagagtggacaggtggcagcagagagattgggtcacactcaggcctcccctgtgtcggtcaccctggaaactgaaccccacacagagacactggtgtgcctctcttcctcccaaggttgttcccgagccgcactatgtcagtgcaaggattgtcatatgggcaggtgcttaggctatctcgagggccaggacaaacgtcaagaccccagggcacagcctttggggcaccacgaactactggtcccaagaacagactcctgcccttgcagactggaagcctgccaactgacgacaagggaagccagaaagtaggcccatcctggaagaaaggctacgagatggctgacagccaaggagcgctggacgcactggcgggctcccaggcaggccacggacacagacccacgccggagggcacaaacagcacagcaagaaataaagcgcaaagaaggaacacctggagaccgggaacacgcaggtgtgacaccgagacagtgacgcccgacggcaccgagccccgaggagaagcagaaaaagcacaaagaacga

SEQ ID NO: 486158 - DNA, 304 bp, Homo sapiens
agaaaataattaatttcatgggactaaatgaactaatgaggataatattttcataattttttatttgaaattttgctgattctttaaatgtcttgtttcccagatttcaggaaactttttttcttttaagctatccacagcttacagcaatttgataaaatatacttttgtgaacaaaaattgagacatttacattttctccctatgtggtcgctccagacttgggaaactattcatgaatatttatattgtatggtaatatagttattgcacaagttcaataaaaatctgctctttgtataac

SEQ ID NO: 486159 - DNA, 212 bp, Homo sapiens
acggttgggccacgcaccgtgatatggaaggattggtgaagagatgtcagaatttctttggtctgctcttaggggaggacgacgcttctgatttattgactatccagtccccttgaaaggaggctccttgctgtatagcaaagctttctcggtgggagagttcttgggtaggattgctgggataacaggaaggagacggtgcgttggcccaa

SEQ ID NO: 486160 - DNA, 1097 bp, Homo sapiens
gcgtttcctctgcagggcacacacacccttaaagctgccagttgaccctgaactgagcaatcactcagaagaccagacatcaactcagacttgttctctcagtctgtggcctgggatctacttctgaggaagtggcattaaatgagctctcagaggcctcccagcagtgacccagaatgaggaaggagctggggccataccagagtcagagctggaccgggagcacggcagggcccagccatccacagcctccaatttcagtactctctaacaacctgagagcctgagccttcggatcttcttgattcctactttgataaagagagggatggggttggaaggacctggcatagagattggaccagtccggcattgacagagccaggacctggggtccggaactgagctcagctccaggctcatctgaagtcaccctgacagcctgaggatggagaccttatttccattaacaggcatggcggttggcagggactggccccagctgagcacggttttccaagtacacagctgggaattaagtcttctctgccgccctcccctgtagtcttgcctggatccccccagtcatctactcccagtaccaaaaaatcctgtattcttgaaaatccgtagtactgagaggtgacagcttgctggagtcctcaaagccctcgctcgtctcggcgcctcctctgcctgggctcccactttggcggcacttgaggagcccttcagcccaccgctgcactgtgggagcccttttctgggctggccaaggctggagcccgctccctcagcttgcacggaggtgtggagggagaggcgcgagcgggaaccggggctgcgcgcgcggcacttgcgggccagctggagttccgggtgggcgtgggctcggcgggccctgcactcggagcagccggccggacctgccggccccgggcaatgaggggtttagcacccgggccagcggctgcggagggtgtactgggtcccccagcagtgccgtgccactggcgctgcgcttgatttctcgccgggccttagctgccttcccgacgggcagggctcgggacgccatgcctgagcctctcaccccg

SEQ ID NO: 486161 - DNA, 115 bp, Homo sapiens
tgtgtcgttccgtggctgcgacaccccgatgtcgcacgtctgccctactcaactttctgatggtagctcgcctgtgcgtaccagtggctgaccactgggatgacgagagaatcag

SEQ ID NO: 486162 - DNA, 343 bp, Homo sapiens
taatcgcacaagggattatttgtggagggtacagagggacactgaacagaatcacaaagcaggaaaaactttagttctctccctccctgtgggtctctttggtctcccgggttttcccgatgttccacagaggtagattgtccctaagttactgcttgatcagagtgctgctcttattaaactcttcattcagcgtatccaattccagcaatggctacatcaatgtccgttttggccaggctacgggccttttcaggagagtttagaatctcatagtaaaagccggaaaattttagtgccagaccaagacaatgtggggtgtgtaggcggcattccttcctta

SEQ ID NO: 486163 - DNA, 245 bp, Homo sapiens
tgctgctgaggtcgtctaaggatccccgcgctagcggcattaatgacgcatctctgcatataacaaggaatttagatctgggccactggggaagtgcgatgggaaagacttgttctcctctccgagggcagcctttgaacgtgggaccatgcattatccccagtgacaaattaagactgttgaggatgcacacaggagctggccctaggacaccactggcattccgtcacttaatgccgctagcg

SEQ ID NO: 486164 - DNA, 172 bp, Homo sapiens
tgtatgtactcccaggtagggcctcatcgcccatccccaagcgctgtccctacatggcgcagccggtctgttatggagccttaccagacctgaggtcatgctcatacttgcaggtccttgactggtgctgttcttcgaactcattgaacatacctccagctttgcgggacac

SEQ ID NO: 486165 - DNA, 120 bp, Homo sapiens
cgctacctgtcccaaacgactgtataccaccaaatgctggttagcatgtggaacaagaactctccttcattgtatgaaaatcaaaatacaacaatccacatgggattcacgtaatggggt

SEQ ID NO: 486166 - DNA, 250 bp, Homo sapiens
tacttctgagggaggcctggaatgacttaagttctatagcaaatagtagctggttgactgtcaagggtccaaagaaagcaccaatacggaaacatctacctgaggctgagatctgtgtaacacataggggctgcagggatgtcggacggtcagatactgtccctcaacggaggtgcagtcagagaatgctagatggataagggttaagcacctctgtcaaggagtgtgcgaatttctgtgcccatttcaa

SEQ ID NO: 486167 - DNA, 431 bp, Homo sapiens
  misc_feature (6)..(6): n is a, c, g, or t
  misc_feature (12)..(12): n is a, c, g, or t
  misc_feature (96)..(96): n is a, c, g, or t
  misc_feature (114)..(114): n is a, c, g, or t
  misc_feature (300)..(300): n is a, c, g, or t
  misc_feature (364)..(364): n is a, c, g, or t
  misc_feature (375)..(375): n is a, c, g, or t
  misc_feature (395)..(395): n is a, c, g, or t
  misc_feature (418)..(418): n is a, c, g, or t
  misc_feature (424)..(424): n is a, c, g, or t
ccctgnaccaanccactccttgcctggggaccaaaaacctttgtaaaactaacacattgggccacaagattagaaatgacggctcaggagtcatgncaccaaaggcctcgagancatgaacctccccaattgctcctgtagataatattattatttaaaacctaacatgggtgtttgaggtatttttcagaccctgccttctgatggatcagctggcaccacccagaccagtaaactggctcatctggtcttctggcccccacccaggaaccaactcagtgcaagaggatagcttcaacnccttatgatttcatccccgacccaaccaatcagcattcccgcttcccgagccccctgcccgccnaactacctttnaaaaaccctagcctccaaantttcagggaggctgatttgagtnataatnaaacccc

SEQ ID NO: 486168 - DNA, 155 bp, Homo sapiens
tgagtcggttccagtatgtggtgtggtgtgaaattgtaaagcacatgtaagagatggggatctgatgtaatgggttaatggagagggcggcgaagaaggacccgcagcttggccagggaggcaacagccgattggttgacgaagggcaaagccaa

SEQ ID NO: 486169 - DNA, 345 bp, Homo sapiens
cgagagggtagtgcaaacgggatcggatgtatcgtatctacaagtccctttagaacatgttgagagaactcgttcaaatgtagtgcaactctcccaccccgaccaatgaatccctacggaccagcggtggcctgggagactgagtaatgaaaacatcctgtcaatgcttcaagactcttggggcatattgggactctgcagacccgtgggagcacgaaaggacgtaagatagcgcaggtaaccgtgttcggtaaccgagagcacatcgggccacagggataacttgcaaaattcccagaaccctgcttctggctcttaaagccagtgcacagagttgtcgagatt

SEQ ID NO: 486170 - DNA, 170 bp, Homo sapiens
ctacagcgtacaccagcttaaacatctgagacagagtgaccacattgtactgctgggctgtcctcttcgggtaagggccacggtcagtcggtatcctgttatttgggcccgatgtggagtccatttaccaggacagtagaatcagtttcatttaccaacttggaggttag

SEQ ID NO: 486171 - DNA, 942 bp, Homo sapiens
aaggcaaaatcaattctgctaaaattgtagcaaggacaaacatcaaattgatggtgaaagttgtgatgtggaagaatggtgaaatcattgatactttacaaatagtttatggggacaatgccccaaagaaatcagtagcagtttacaaatgcataactagtttaagacgaagcaaagttttagatgaagcctgcagcagcagaccagtcacatcgatttgcaagggaaaagttaatcttgtttatgccaacatctcaattggttcagcttacacaattttgatggaaaattaaatttgagcaaactttccactcattggatgccacaactgtacacccagatcagctgaagacaagagcaaagctttcaatggaaatttaaacaagtgtgatcaagaccctaaaggatttctttgaaaaattgtaacaagagatagaacatggctttactagtacacttttgaagacaaagcacagtcaaagcaatggctaccaagaggtggaagtggtccagtcaaagcaaaagcaggctggtcaagagcaaaggtcaagggcaaaacaggtttttggaatgctcaaatcgtttgcttgttgactttctggagggccaaagaacgataacatctgcttatgagagtatttgttgaaaaaaattagcaaagctttagcagagaacgcctgagagagcttcacaaaagtactctacccaacatgagccagccctcatcaactaggcagttggccaaattgtgggaactttaggcttacttggccgatgatctctacgtgatcaatttccacttttttagcccttttcgtgtgtaaaaagcttgacgacatccgaccggctaagagaaggttagcacagttgggtccgaaagttttcagtcatgacacatatgacaggagatcagcggttgtgtccaaaaaacaatgctgcgga

SEQ ID NO: 486172 - DNA, 393 bp, Homo sapiens
  misc_feature (7)..(7): n is a, c, g, or t
aggaccngcggatgatggctaaagatgaaagatggtgaagaaatcttattgtgtacatatcactgaattggaatgggcggctctttgaaataatatgtatgcctagcaatcttatcaatttaacattacttaaaacaatgtatcttttcagtctcttaaaaacacacttttttcttatcccacataattactgcctaggaaaattcactcattcacatggcttgtatctcaaatttgcatcactaaacctagcatcgcattgcgttccatgttacttgcacacatccatcacatcaaattcaatatattcaaaaccaactaagctattttttgccaaacttttatactataccacaatgctttaatgacttcattcctttaactaccaaaact

SEQ ID NO: 486173 - DNA, 453 bp, Homo sapiens
aaggtagtggtaagtaggaagaggtacatatgctgctgttatcattataccagcaaaccacctgccatgcattgcattgacagcagcaatagctgcagcaaattgatgggcacttcacatacacattgccctgagctgaatatatgtcaacataaatatgaataactcctccatgtctattacattcttcaatcacatcatccattaatctcggtatcccatccaacttcttcttctgagagagggttaaccatgtaagagagtaggaaacatagtgtagcaagtggctgaacagaggcagctgcagctaaagctgaagctacagtctgctgggaacgtcttgtcagcaaatctataacaaaagagaatcctgacacagcaacaaaatgccaaagagccaatacatctgtagggcttgctgtgctgctggcggaaatctgcaaacatgtacct

SEQ ID NO: 486174 - DNA, 1050 bp, Homo sapiens
attcggcgcatgagctggagtcctatgcacagttctaagcctccttagttctgagccgagctgggccagcccaggcaatgcttactacgagtaacgtaccactatctacaacgcttgatcgacacacgtccatgcatttctcgataagtaaggtcttcctctcagtacatcaataccgcactcaatacaatctggcatgagctatatgagcagactcgcacatatgttccccataattaatcaggatgcccccgatatggcagtttccccgacataaacatctataagcttctgactcttaccccaccatctctcgctactccttgcctcgctatcttgctagtagatggaggccggtagcaggaacagggttgagacagctcgtagcccgtcccttagtcagggcaactgtactgcgccacctcatggtcagaccatccgttagtaccataatccatcattcttacctttacatccataagcgagagtatcatcctctatcttaggggccagtcaactttcatcaacctagacacatttatcgaaactataagaagacgcgccttgccgatacaccgcacatacacaagacggccccgtcttcggtctgatccggtccgtaatcacgagatagttccgtacttcttcccaattctctcccagtccttagtctgctggcattcacatatactactaacagaccgcaaccatgcaaaccacctttcattcaaccccgccggagcaggaagaccccattcatataaccaaacacctaattctgactttactcggtcaccctgacagttaactatgcttatcctaccaggcttcggaattattctccccatattgcaaacttactaactccggaaaacaccgacgtaaccattctgggattaccgtacggtagcgccctgagcgtacgatactccattggctttcctaagggctaacccgggttgacccaaccctatattatccagtgggcaatcgacgtagaacccggaaagcacagttcacactccgtaccagaagtcgacgggatgcccc

SEQ ID NO: 486175 - DNA, 129 bp, Homo sapiens
ggatcacatgagccggggagccgaggctgtagaggtgggaggatcacatgagccggggaggtcgaggctgcagaggtgggaggatcacatgagcctgggaggtcgaggctgctgaggtgggaggatcac

SEQ ID NO: 486176 - DNA, 246 bp, Homo sapiens
ataaaatgatagaaattaaagttctttatgagttttctagatccatagccaacagaacataaaaagtagcaaatgtggccaggcgctggtggctcacaccatgtaatcccatgcacttatgggggctcgaggctgggtggccctatgacggtcacagagatcaagcaccactcctggctcaacacttgcaaaaaccccgatctctactaaacaatacaacaaattagctggctcatggctggcaca

SEQ ID NO: 486177 - DNA, 199 bp, Homo sapiens
cataacagcacttcgacactagttatatttggttgcagaagaagagaaaatccaagtcgaaattgccttcaacaaataaggaattgattggctcacataagtgaaagctgagagaatagatctcaattcaggtccaatttgagtccagaagttcccaagggctccaatagactccctctcaccccccggtacatgcaag

SEQ ID NO: 486178 - DNA, 152 bp, Homo sapiens
  misc_feature (5)..(5): n is a, c, g, or t
  misc_feature (64)..(64): n is a, c, g, or t
  misc_feature (125)..(125): n is a, c, g, or t
cttantctggaaaaggggacacagctgctgcagtaggggttttcataggactatgggctcaggngcgttcgaggaattgcagctgcagcagggtttggtacttgagatgcactgtcaaaggactntgatgagggtttttaactagtaggagt

SEQ ID NO: 486179 - DNA, 887 bp, Homo sapiens
tccgtgctctccagaaatccgcagccgtagttaagagaatctgtgttttgaggtggagtctcgttctcggccgaggctggagtagagaggtggctgtgagctgagatggtgccactgccctccagtctgggtgactgaccgaggactcggtcctgagaataatagattaaagggcagagtgtggtggctcacgccctgtaatccactagtcagtttgggaggcagaggcgggacggtggtcacaacgggtcgaggtagttcggagacacggtctaatataataatttttggcaggcgtggatggcgggtgccgtgttgatcccgagtcgtacattgcggcaggcgtgctggcctaggtagtaattttgcattgagcccgaggaaggttggtggattgcagctgagctgagatcgcagtcactgacactccaaagcctgaggacgtagcaagagtccatgacgtcccatctctcacaatccaaaacagtagaaccggaggaaagacgtgcctccctcgaggtacgttcgtagtggtggagcattgtggtggtagaactcctgagacgatcgggcgcccgcgtgagcgtgggtgtttatcaaaaaacacccaggatggactgtgttgtgccctgaactcaacgacgcaagatgtccctggctccttgcatatacacatgatatccgcacatgggtggcgattactggaacaaccccgcaacgagaccgcgattatgaggcgagccccgttcttgggtctaacaggggcccgattaacgagtgagcatgttgaccagaggcatgtgaggtgctaagaaacgttgggcgtggacaatgagcttccggccaccgggaaaggaactcacgatgggggagaggagggcgcccca

SEQ ID NO: 486180 - DNA, 409 bp, Homo sapiens
  misc_feature (47)..(47): n is a, c, g, or t
ctttccccggttcccacaaaaagcgcctccaatgggggcggaggttncccttgtttttttaaaaccccccccccgcccccccccacccacttttggccttatagggggttgtgcccctcctttaaggggggggggccccccaaaatccccccctccccccaaattcccccccccttaaacccccccgcggttttttaaggggggaatttattttttttttttttaacccccgggccctgggggggcccgggtttttttttggcccccttcccttttggtttttttgaaaatttgactgggggccctttcccctttttgggcccccccccccaaattatttttcaaagttttttttttttcccaatttttcttttttttggggaaaaaaacttttggggcccaagcccca

SEQ ID NO: 486181 - DNA, 412 bp, Homo sapiens
  misc_feature (412)..(412): n is a, c, g, or t
cgcaggtggtgactcaactgtatacacatgctcaatagtcaggctcgagagtgatgtgaggacacattacacgcgtgtgagccgatactgagctgggcattggcaccatatcttgagtatacactttctcttttttctctagtgtgcctatggtgtggcaatagcattcactgtgggattttgcagagcttaagaagtgggacgttaactttgaaggtgcttggttggattaactctggtagggttacctttacaacgtagatattcaacagctatgctgactgacacttcattctaggtcttaagaattttttttcagaacccccctttcccaggttgacatacgtagcatactttcatcttatatagactttctgtgacctggtggtggttttagacctcctcctcagtn

SEQ ID NO: 486182 - DNA, 261 bp, Homo sapiens
  misc_feature (55)..(55): n is a, c, g, or t
  misc_feature (75)..(75): n is a, c, g, or t
  misc_feature (118)..(118): n is a, c, g, or t
gtcgactgaaactttcagttttcccatctgtgaattaggggtaataattactgancctcacagcatgctttagtnaatgattaagaaattattgcaaccaacagtattaggacctagnctgtgtttctcaacaagggaaacatgggggtacattccctttgtgcaagcctgttgcatacactttaaaatattaagtatttcaggaagctgagttcaagatgtcagcatagtgcccccagtcattgaggcagccagatcggt

SEQ ID NO: 486183 - DNA, 128 bp, Homo sapiens
gtgatccgaggctgggaagaaggggttgctagatgagtgttggtcaagagagcaaaactgactatatctccagattaatgcctatgtgccactggcaccaggcaatcatccaaccacatgccactctc

SEQ ID NO: 486184 - DNA, 288 bp, Homo sapiens
gcgccgtggacgttcgtaccgcttcctctcgaactctctacagaagcacaagctaccctggagcactgttggcagctctagctttgcagtcgtgtcattatgcccaagtcatctgtttttctctgcctcactttccaccacagtgtctcagagtcatagtgagcctacgtgtcatctcctggggtgtgccagagtgctagatccccaggtggttattgtgctcacacataaaaagcctcagtgcaccactgacacacacaacaaaaaaaaggggatacaataaaacgt

SEQ ID NO: 486185 - DNA, 143 bp, Homo sapiens
cttctagctcggtaccctctctctctctctctctctctctaatgattcaatttttgcaaatttggtctctctcctttccttcaatctccacctcactttttagttgcttcttactcattctcactttcatgcacttctgacag

SEQ ID NO: 486186 - DNA, 169 bp, Homo sapiens
aagaacacatcaagcaggtagaaagccaattgattatgtcactatggagggtttctcgtatgccaaaccgaaactgtgacagcaaacgacagagacatgagagatcatcgacaccttgtagatagtttgcataatcttacgataaaggatcaagcctcttattacgaag

SEQ ID NO: 486187 - DNA, 926 bp, Homo sapiens
gccccagcctcggcgggcctcccgggagccgggcgtggcgttccagctagtgagccgtttctcccctgggctcggaggcggaagcttgaggggcgcggggaggagcttcgcgtgcgggtgaacgcccgtctacgtgctcgttctcttcgcgaccgtgcgcgcgagccccgtgtccccacggcggcagcagctggcggcggcgagggtgaacgcggagggggcggagggagcccgcggcgggggaagcagcttacagcgaaatggcggagaccgtggctgacaccgggggtggatcaccaagccggagaactgaatgacgcctacggaccccccaggaaactcctcgagatcggattgtgaagcaacccgcaaaacggtggggggtcggccggggccgttttccccgacttaggaaatcgggggttcaggacaaatcttccttattttccaaggctgaagcgaaattctcgctgttagaagaggatacccgggggacttttggatgggctgcggaggtgaattacgacagagagagcagggttcgtagtccccccggctcccttgggaacaggcggtttgggcgtcagcttccttctagaggacgctgctgccatttttgttgacacttttggaggaccgacaaccagggctggaccgtttataaccagtgtcggggtatcctcgtggccagaacgagcggtgcttcacttgtttcgacgtgaccttcttgataagcgttcctctaataaggatgctgacttggagaggggcaccggccttactggtggagccgggaaaggttctttgtgggccgacggtaatgctcgtacaaccatcgttgtgtggcggacagctgcttaacccactctatactgggggggcgccaccctccgacggcgggggggtgatatacacgtcgcacacaa

SEQ ID NO: 486188 - DNA, 246 bp, Homo sapiens
gcagcaggcacctcttaatcccagctactcaagtgaggcttgaggcaagagaatcacttgtaacctggtaggcagaggttgcagtaagccgatatcgcgccactgcactccagcctgggtgacaagagtgaaactctctcaaaaaataattattattatttagccaggcgtgttggtgtgtgcctttaatcccagctactcggaggtaacagagatcgttgatcctgagcagagtgcagtagcgag

SEQ ID NO: 486189 - DNA, 427 bp, Homo sapiens
tgttcccaataggcaaaatgtcccccagctgcgggatggataaacacatgtggtccatgcaggggaatattattcagccatgaaaaagaacaaagcagggaccccccccccatgggcaaacccagcaaacgtttccgcgagggaaatcccctagacccagaaggccccttgtccgatgaccccctttatatggaatgtacagaatggggaacatccatggacagaaagtagactcctgggggtcatctagccctaaggaagttggggggaacgggagggtgacacctaaggggtgtgttgtccctttggggaaagtgagggtgccagctgaggggtgtgttgtccctttggggaaagtgaaaatgtcgtcaatttgattgttgtgatgccaagcccaactgtgtgaataaaagcccgttaaatccca

SEQ ID NO: 486190 - DNA, 361 bp, Homo sapiens
  misc_feature (126)..(126): n is a, c, g, or t
  misc_feature (174)..(174): n is a, c, g, or t
  misc_feature (221)..(221): n is a, c, g, or t
gtagtctagagatccctttgctaggtggagtgagtggagatctcagctcacgaactctgctcctgggttcaaagtgattctcttgttcagctcctgagtagtgggattataggattgacactaggnctggtaatttttgtattttcagtagagatggggtttttccatgttggncaggctggtcccgaactcctgaactcaggtgatccgcgcacctcagnctcccaaagtgctgggattacaggcatgagctaacatgcctggccttctcatgtgttttctgattaaggctcttgacttccaaggctgtgtggggagatggggtgggggcccttggacttgatataaaacttttgtcaaa

SEQ ID NO: 486191 - DNA, 479 bp, Homo sapiens
tagtcccacacctgcaccggtagtcccacacctgcaccggtagtcccacacctgcaccggtagtcccacacctgcaccggtagtcccacacctgcacctggaagtcccacacctgcaccggtagtcccacacctgcaccggaagctgcccggcggttcattgaaaataacgccgccgcatcgccggtcggcatcgtttatggtcggaactacgaaggtatctgatcgtcgtcgaacctccgacttccgttcttgattaatgaaaccattcttggcaaatgctttcgctctggtccgtcttgcgccggttccaagaatttcacctctagcggcgcactaggaatgccccctgacgtccctctaaatcatggactcagttccgaaaaccaacacaatagaaccgcggtcctattccattattccttagctgcggtatccaggccatgattaagagggacggccgattcaagtgtgggactc

SEQ ID NO: 486192 - DNA, 993 bp, Homo sapiens
ctggactccccctcttggtcctactagagacctctcaacagatcgtgtgggcccagtcagttgaggtattatcaggtgcttaattgtgaagctaatgttggtacttgccacagaatctacaagccactaccttctgacctccccacacaccgtcactgaaccccctatcatcttgaaataatgcatgtggggcatagagacttccggaatgatcgagcatgatatcctcatgagtcttgtccccaggggtattagcggcctctttttatgaagcagggaattggattcgaagatttggacgatggtgctccatcatgattgatctagcgtaactgggaggctagatgggccatttcatagcacatacgctaagcgcgtcccgtcgcgtacgtcacgccatgtcgtctgggaaaacattggcactgcctatgatgttaatgcaagacgatctatgtttgcctacccatattgcgcctgcaggagctcgacgagtacagatgtttcgacgcaacggcccacaattgtggcacaggagatatttccagtgcgaacatcgaaggaattgcatctaactgtctttctatgtgcgtgtatgaagcaagaagggaatttaaaggatatccacttcgcatgcctagttgtcgctcccatttcatgtttcccttcgcaaaagattcccgtgacccatgaatagattttggtgggtgtgaataatcccaaggttcccctaactgagaagcggcaatcaaacgtaggttcaggaaggattttcggacccatccaacgtttgttagagagcccctcgatagacggtagatcgttgttcagaatggttccattttagatgtgcgactgaacatttccagaggaggtccaggatacctcggtatttataggcaattgggctcagatctatagcgagtagtgttgaagacattataagccgtaggatgatagcaagaaaaattgtcatgtagtaacaaaaggaatcag

SEQ ID NO: 486193 - DNA, 132 bp, Homo sapiens
atgagcctggtccgccacgcgataacaccacactcagaaaagtagcgtagagaggtctgagtggacgaagttgttgcgcaacaacttcgtccactctgatttagcgcatagtatggactctcggcgtgtgca

SEQ ID NO: 486194 - DNA, 252 bp, Homo sapiens
gataagcagacgatagttatctgtttcttttgacttaatctcatattggtgtgattttcctttttttaggctttcctacctcctacagactgtctaaggcatgtaacgcacactcaataattgtcatgagagagaaaagcatgtgtcatgcatgaggaacttaactgaggtggctcttgctggtacatacctggtatgttaggcagttagtcatctttgctctcagttgaacctgtatacctgtacaaggtg

SEQ ID NO: 486195 - DNA, 101 bp, Homo sapiens
catcgcttcataaattattcagcttctacactataagagtttacacaagcaccaccccagtcatacgtctttgcgagccacagctagcaatcgcataccgt

SEQ ID NO: 486196 - DNA, 183 bp, Homo sapiens
tgacgtaaactaaaagtatttacagctttctcaagttaacattttggtagtatacttcagagtgatgttatctaagttacgtagttaagtatgttaaatgtggatcttatacaccacatcacagtacacagaaagtataagtcaaggcctcaccacttcctacagtattagtatcgtgtctca

SEQ ID NO: 486197 - DNA, 614 bp, Homo sapiens
  misc_feature (566)..(566): n is a, c, g, or t
  misc_feature (578)..(578): n is a, c, g, or t
  misc_feature (604)..(604): n is a, c, g, or t
gtaaagctaaggagctcaccaaaatagctatagatgctggtttccatcactttgattctgcttctgtctataatactgaagatcatgtaggagaggccatcagaagcaagattgctgatggcactgtaaggagagaagatatattttacacctcaaaggtttggtgtactagccttcacccagaacttgtgagagcttccttggaacggtcactgcaaaaacttcagttcgactatgtggacctgtatctcattcattacccaatggccctgaaaccaggagaagaaaattttccagtagatgaacatggaaaattaatatttgacagagtggacctctgtgccacctgggaggccatggagaagtgtaaggatgcaggactaaccaagtccattggggtgtctaactttaactatagacagttggagatgattctgaataagcctgggctcaagtacaagccggtatgcaaccaggtagaatgccatccttatctcaaccaaatgaaacttctggatttctgcaaatcaaaagatattgtattggttgccaaggtgtctaggacncacgatatggangatgggtagaccagaatcccctgtcncttggatgac

SEQ ID NO: 486198 - DNA, 519 bp, Homo sapiens
tggaaagggggtttctttttgacccccaaatgggagtgcaggggttaatccgggcttcacgtgaaaaccctttacagcccgtggtgttcaacgcgattctccgtgcctcagccctcccgagttaataatgggaccacaatggtgcccgtgccacatacaccgtggactaattatggtatattataggtaaagacagggttttggccagtgttgggccaggtgtgttcctcaaactccctaacacccctcgagtggtgactccgagctttatattagagaggataattatacacttcttactcggcgtgtacaataagggcaacattgtgtggtctcacccagaagaacttctccctcccccacaacttctattcgcccttatacccaggctatacttcctatacctatattctctccccttttaattactataattacattctttattaaacaaaaaaacaaacacaacaaacacaaacaacaaacaaaagacaagaccaccacaaaaaaaaccaggcg

SEQ ID NO: 486199 - DNA, 988 bp, Homo sapiens
tgtccccggtgttcaacctgtgggccagctatcagcgtttgccgcatttacggcgtgatgccttgtcgcctgccgcatagtttggggaagaaaccctactgcttgcagagggtaatccctcctctgccatgcggggttcgccccactacaccacgcgtaggatggggccctgtctcccccctcgcggaataaccaatcgttttaccgttggccggcccccgaaatcctatagcccttgtgcgaaaaattctgccctcctaacggggaccaacaatgtgtcttttcccggcgctaccccaagaagaaaaggtttgacacgacggggtttggaaactagtgggccatgggcccccgccttcccccccccaagtttctaatctggccgccccccccgcctggtcggctggaagaggaagaggaacaagagggtcgcgacccccaagtgtaacatcgacccgccatggggctagcccgacttgctgaaacaacgcttgacccggagtaatcttcccggagggcttacctgggcaaaagcggctagttctctttagagtgattgccccggaccccgcgattgtgcacagtggactaagatatgttgttacaaggaccccgcgtattgtccttattccggcctctggtttctcccctggagaaaaaagataattctatccacaagatggattgttcgagatcaccagcccacgatctctacaattaggtatttcgtgtcgcgcccgtcacgtgctattaatatcccccctccctctctgattttcttgaatattctttccttcaaactctcttattcttcatcttcgaaacaccttctataacaagtggtgatagtttaatccgagaaaccatacttgtctaaacagacaagaaaatctaaatatttcctcgggcaggaacccaaaaggggtcatctatttccttaagagaaagtaattataaaaggacaaaaaaagaactgtcaaacacgaca

SEQ ID NO: 486200 - DNA, 303 bp, Homo sapiens
gttttttcatttttgtggggggctagaaaaaacataaaatgaggcagtttaataatagttaatgaaggtgtgctacagaaaataatctggtgttcttgctaactttggccttcactgttgcttaattgtgtagcaggccaaaagctatatgttatggcttattgtgtgaaggttaagctaagaagtggtgttgcatggacttcagagtacatacatgcggtagtgcatatttgagtttgagcatttaataagctttgctggtaaatgctgtaaaaaagaaaagcaagttttgctagtgtgcta

SEQ ID NO: 486201 - DNA, 221 bp, Homo sapiens
ggaagactgttgaacccaggaggtcaaggctgtagtaagccatgactgcaccgctgcattccagcctgagtgacagagtgggaccctgtctcaaaacaaatgaaagtaaggatcccagagaatcaacttattttaagatttaaaagatcatttctgcagagcatggtggctcacgcttgtcatcccagcactttgagaggccgaggtgagtgcatcacaag

SEQ ID NO: 486202 - DNA, 601 bp, Homo sapiens
  misc_feature (599)..(599): n is a, c, g, or t
tagcggccgcattggcagcaacactctgctgactagacttctgcccttactggggtccagtccagttctccatgactgactggtcttggagctgctaactcattagacagcctgagtcctctccattctaactccctccagcgctgtgtaagggtactttgggaggcagtatgatacagtggccaaaaccagggactttgaagtcagacaactctcagcttcacctcttggaatctttaggacctttgtcatgtaccttaacatctttaagccttcatccccttgtgtgtaaaatggaaataaaaatgtatttatcttgtggagtattttgaatactgactgagataatgtacttagcacaatggttgtaatagagtaacactcaataagtatcagcaattattattagcaacagtctacagcagggggtagagacattggttcctcctcctcctcctcctgtacaaggtcagagacagccaggaggagtaggtaggtgccagaatggcaagtttgccaaactaagctgtgaggcttccaggctggactggaaggcaatgggagagcggtgcattagagtgtgctgccaattgcggccnct

SEQ ID NO: 486203 - DNA, 167 bp, Homo sapiens
tgagatgggtgaatcagcatagtaagttccagcgcaataatcatagggggaagagactgaagaaaagaggagaagagagaatactgccccagggtggctattaagaacaagactacaggctggaaaatgagccacgtccagtgaggtgccctgtggggaacctaaaa

SEQ ID NO: 486204 - DNA, 1078 bp, Homo sapiens
ggggagcgggatggagcgggcgcgcgggccgcgggccgagtgccgacgcgcctgaggaggaggaggaggctggtgggcggcatggctgctgtggtggtggcggctgcgggtgtgcgcgggaccggcggtcctgcagtgtggccggtctctaccggggcctgtgctgcggtgcgcagcctgcgccctgggcctggggctcgtgtcacccgcgcagttgcgcgtcttcccagtagcgccccggctcagggccggagcccgagtgggggccgccgactggcaaggcaagggtccgggggcccgagggccgaagctcaaaggcccaaaaccttttcttaaagagcggataccgggacaaagaatccaagtctttgcattgcgccaggttcaagaccccaggtgactttttgagttccccgcccttgtggagaaggcggccaggttggacattttgcgagaaaggccaagccaggttggggggcattttcccgagggccaaagggctgacttttactccacaattgtctgtggcaaaccaggaaacgaacaggattgacctttggggggaccaccaggtcttgtagaacacaggaaggatttcactaaagggacaaagaagtcctcaagttcggaatcctttaaaccatttgggagcattggtcaacaagaaaaaaaattggaggaaagaatttaagcagcagcatttttgggcaagcaactattttggcaggaaaaaagaattaagggtcttaagcgccaggtttatttccgttgcgaggaacaacgttggatgggaatcatgggaaagcgggggttcaagtcactgtgtcaaacaaattgacatattggttgccctcgtggccaaacaaagggggaacagggtcaactggaaggtttagtggtggtaagggaacaacctgggcacaagggtcaactatgaaatctccagttttcacattggcgagtttactcgacgtttttcgggacaccacggaatgggggaaaacttgcaaggccagagcacgagttacaaattatattacgtaaaggtatccctgacactttcaggacaccaaaatgg

SEQ ID NO: 486205 - DNA, 210 bp, Homo sapiens
  misc_feature (20)..(20): n is a, c, g, or t
ggtttttttcccccccctcncccccgcccccgggcccccggggggggggggcttggcccccccttttttttgggcccgggggtttttgcatggcccccctttttgccttcccttttttttttccccccccccggccacttgggggtttcccccccccgggtttgggttctttgggggggggccccccaaaaattgtaagggggggggcca

SEQ ID NO: 486206 - DNA, 1249 bp, Homo sapiens
ggctcccactctgctttcctgagccctgcttgcacctcggcgatccccgactcccttcttatatggctgtcgttcctgtgcttgtgggccgaagctggcctgtctgcggacaatcgatcctcagacgccctgggagagatgatcaatgtcgaataactgctcggaatatttaatcaatgtcgcattcctgctgctgttgatatgagcgaggttacccttcaccggacgaaacgaattatcggagaagtggacccgcaggatacatttattacagacccttaacagatgcaacgttcagcgtaacaaccttgtttccatacggctagcagtgccctattagccatccttccctccgggaacgggactaacttccgtatagcttggaccaaaggataacagtgcatacaaggtaaacgcaggcaaatgcgaacataacagattgggaatgcggcgataagggggaccccccagatggcgcaggataattcccccacggctttcccaatggcgcacacattaccgctccagttaacattgcagaaaaaagaacccttcccgcgactggcacacccaagggatagttaacaacacacaaaagaggtcacaggactgaatcaccacaacgccaccaattatcggcacctgaggcaggcccccataccagttggatagtagagaacactatgggagtaatatcaccgccgagtgacgtacatgaacgaaacggaacactgggtaaaagtatccaccaatatccataccccccaaattcctttcatgtggtcaatattcgcggtgagtgcacacccaggaatgggcaaaaaatgggatgctatgacagaggatcaaggtggtggtagtacactaggaatacctggaatccatatcggtctcgaacacgagttatgcacaattatgagtaccccccgggaaaccaccaccacagctacagcacaggcgggaaaatccggtgggcgcccctcagtccacgaggacaacacaagacaaagaaagaaataggacataataaagagaaccaaaaaccaagacttatgcgaagacggccacaataacagcgacaacatgaaaaacaaagaccttacaatcaacaaaacaaacgacaccaccggaagaggggaacagctcgcagcacccgcacaagatagatggactcagaacatacacaagaggaggagccaacaaaacacttgtcacaggcaagagagacaaacacacaagtaggcagaac

SEQ ID NO: 486207 - DNA, 271 bp, Homo sapiens
tgaccctagaggatcccggaacacaaaagcggcacaattacctgtacctgaaaaaaatatatatatgacagctgctacattagagcatatgtgatgctctcctgggacctcagtaccctgccttctggactggtttctcttaatcagtcctctccttcttcaagtggtctggaagaatgtggataatcttaggcgtgaatgtaaatgccttaatatcgaaggtcctgattagaagcatgatataagacatccactggaccgcttttgggtt

SEQ ID NO: 486208 - DNA, 113 bp, Homo sapiens
aacttcagatcgatcatattaagtgtgatgaagatgacggacattgagcacagtcttcagtgaagtgcgtgggtgtgatgtgacatttgagtggaaaacaaaagttgtctgcc

SEQ ID NO: 486209 - DNA, 437 bp, Homo sapiens
  misc_feature (51)..(51): n is a, c, g, or t
  misc_feature (92)..(92): n is a, c, g, or t
  misc_feature (140)..(140): n is a, c, g, or t
  misc_feature (148)..(148): n is a, c, g, or t
  misc_feature (205)..(205): n is a, c, g, or t
  misc_feature (238)..(238): n is a, c, g, or t
aaaaaaaaaaaaaaaaacaaacaacaaaaaaaaaaacacaaacaaaaacanaaagccaaaaactccaagaaaaacaaaatcagaaaaacagnaataaaagaaaagaaagataaccaacaacacaaaaaataaacaacatnaaagaaanaagccagaaacataaaaaggaacaaaattaatcccacaaaacataaacaataaaaancagaaatatacggtgaaaaaaacgcaaaactgnacaggaaaatcatcctccaaggaccagacataaaatgctgcaagcttttgaactaatggcgaaagtagtaagaaaatgggctctacttcagtgatcctgtggcaggacgtggatcaagacttggaaccgcagaaaacgaaatcccatagtagcacaaagcttggctgttcagtgaataacattataaataatggtaaaa

SEQ ID NO: 486210 - DNA, 383 bp, Homo sapiens
tctagatgatccccctcccaacggataaggaattgactgacatgtcgcgaaccaaccgatgttggacgcaattctcccttcagagagtatcaagaaacctagacgtgtgatgactggtgagagcgggctgactgcaatggagtgtgcattacatttggacaacaattgttcttcagtcactagtggaactgctcaatcgggccattgtccaaaatgacccccaatgagtgtgagttcattgatgacacattaccgtgaatgcgcatggtaaagccatcaaagaattggttgaccagggttaccaagttttgcgctacatggtagcgcccgaagtctggcttgggggaaaaatctcttattacgatatctcagtccttgggagt

SEQ ID NO: 486211 - DNA, 300 bp, Homo sapiens
atgcttccacggtgacttctgagcatgtaacataaacatgtggctgagctcaagagacagcaagagaggacaggtatacagttacaactatatgggctaacaaatgaaaaggtgttctacccacggagaaggaaatctaagtcctagaaggttccaaccaagcctatctgcactcaagactccccaccactcttagaccaagaacaagaaccattccgtggcttaggagttcccctcagcaagccagcccacgcagtgcgtgtgtatatgcgcgcgtgaacgtgccagaaccacggggtc

SEQ ID NO: 486212 - DNA, 324 bp, Homo sapiens
  misc_feature (95)..(95): n is a, c, g, or t
aaaacgaacgagatctgatgtactagtacgcgacccgagcgtcgcgtcccaacttcttagagggacagtgcgtcatgccaccgagattgagcatnaacaggtctgtgcatgccttagatgtccggggctgcacgcgcgctacactgactggctcagcgtgtgcctaccctacgccggcaggcgcgggtaacccgttgaaccccattcgtgatggggatcggggattgcaattattcccctatgaacgaggaattcccagtaagtgcgggtcataagcttgcgtagattaagtccctgccctttgtacacaccacgaacacagtg

SEQ ID NO: 486213 - DNA, 549 bp, Homo sapiens
  misc_feature (3)..(3): n is a, c, g, or t
  misc_feature (17)..(17): n is a, c, g, or t
  misc_feature (34)..(34): n is a, c, g, or t
  misc_feature (38)..(38): n is a, c, g, or t
  misc_feature (48)..(48): n is a, c, g, or t
  misc_feature (75)..(75): n is a, c, g, or t
  misc_feature (81)..(81): n is a, c, g, or t
  misc_feature (106)..(107): n is a, c, g, or t
  misc_feature (114)..(114): n is a, c, g, or t
  misc_feature (125)..(125): n is a, c, g, or t
  misc_feature (128)..(128): n is a, c, g, or t
  misc_feature (153)..(154): n is a, c, g, or t
  misc_feature (158)..(158): n is a, c, g, or t
  misc_feature (161)..(161): n is a, c, g, or t
  misc_feature (168)..(168): n is a, c, g, or t
  misc_feature (170)..(170): n is a, c, g, or t
  misc_feature (188)..(188): n is a, c, g, or t
  misc_feature (191)..(191): n is a, c, g, or t
  misc_feature (199)..(199): n is a, c, g, or t
  misc_feature (207)..(207): n is a, c, g, or t
  misc_feature (212)..(212): n is a, c, g, or t
  misc_feature (216)..(216): n is a, c, g, or t
  misc_feature (225)..(225): n is a, c, g, or t
  misc_feature (229)..(229): n is a, c, g, or t
  misc_feature (236)..(236): n is a, c, g, or t
  misc_feature (271)..(271): n is a, c, g, or t
  misc_feature (294)..(294): n is a, c, g, or t
  misc_feature (296)..(296): n is a, c, g, or t
  misc_feature (311)..(311): n is a, c, g, or t
  misc_feature (313)..(313): n is a, c, g, or t
  misc_feature (316)..(316): n is a, c, g, or t
  misc_feature (319)..(319): n is a, c, g, or t
  misc_feature (334)..(334): n is a, c, g, or t
  misc_feature (348)..(348): n is a, c, g, or t
  misc_feature (364)..(364): n is a, c, g, or t
  misc_feature (373)..(373): n is a, c, g, or t
  misc_feature (378)..(378): n is a, c, g, or t
  misc_feature (397)..(397): n is a, c, g, or t
  misc_feature (431)..(431): n is a, c, g, or t
  misc_feature (445)..(445): n is a, c, g, or t
  misc_feature (454)..(454): n is a, c, g, or t
  misc_feature (456)..(456): n is a, c, g, or t
  misc_feature (467)..(467): n is a, c, g, or t
  misc_feature (476)..(476): n is a, c, g, or t
  misc_feature (487)..(487): n is a, c, g, or t
  misc_feature (531)..(531): n is a, c, g, or t
tanaaaaaataaaaaantttatttttttttttantttnaaccaaaaanacccttttctgaaaaaaaaaaaaacangcacanagacggcatttttaaaaaaaaaaannaaaaaanaaactgtaaanaantaaaaaaaaaaaaaaaaatttaaannaaangtnaaaaaantnaaagggaggtaaacggcnctnaattttanaaaaaaantaaantaantataaaaanaggntaagganaagcttctaattttccaaaaattttgaaaaaaaanttttttcaacgactgttttttananaccttttgtgaaaanantantanagttctatgaaaccnaaaattcaagttancttatgcagggaaggntaccttgtnaaaangagtaaaaatccacaaaantccaacagtattccctctaaaagttcaaatttanaacaaacccattanattcaaaananattaaatcccngttcttaanaaagaaatggnattgatctaaattttactttacagggaagaaaaaattacaattnagcatgggggaattttca

SEQ ID NO: 486214 - DNA, 388 bp, Homo sapiens
tggccccaaaaagattggggagttgttttttaatggtcccctaaaacagctgctaaaaaaaagttgaaataaaattttgcatttggtcaaaccctcaagcatttatcatttgcaaaaatttttccctccttattaaaaaacaggaacttttaggcttttaagatcatgtgggccaaagcaaattaaagttcagtttgtgtcccaattcattgccaaacttcattggaaagctttgtttgaaaaaggaagttcattttcagctttattttcaaaaggttaaatgggcaaagaagtttaacttcagggtgaactttttcatgtttaatttcagggtaaaagtaaaagaaatttgtaaagtttgaaaaaaaatttgtttactcctttttga

SEQ ID NO: 486215 - DNA, 359 bp, Homo sapiens
tcaaaaccgtatcagaaccctcccgggtcaagcaattctcctgcctcagcctcctgagtagctgggactacaggcccgtgccaccacgcccagctaatttttgtatttttagtagagacaaggtttcaccatgttaggccaggagggtctcgatctcttgacctcacgatccgcccgcctcggcctcccaaagtgctgggattacaggtgtgagccaccgcgcccggccagaagcagcatttttaaacttgtttggccctccctaacaccaaccttggcagttcctgggctgcagtaagccgagacttggaaatacattcgccatggaggttctgatacggttttgagggtaccgagct

SEQ ID NO: 486216 - DNA, 270 bp, Homo sapiens
ggctcgtacttgctgatactgtggcgctctgtgatacttagacgttatcagaagtccactgaacttctgattcggaaagttcccttccagcgtcgggtgcgagaaattgctcgtgactgtaaaaaataatctgcgcttccagagcgcagatatcggtgctttgcaggaggcatgtgaggcctatctggataggccttatagaagacaccaacctgtgtgctatccatgccaaaagtgtaaaaattatgccaaaagacatccagcttagca

SEQ ID NO: 486217 - DNA, 215 bp, Homo sapiens
agcttttagcagcgctgtcagcatttcagcagctagataggctttctcaactctcggatcagtgtgagccctgagaaacagggtcctgatcctcaggcattctgcatatcaccccataccaccatcagccagattaatccctcttgctcaaacttaataaatactgagcaagggacttaatataacaaacaaaaccagaaatttctatgacttcc

SEQ ID NO: 486218 - DNA, 134 bp, Homo sapiens
caatcagctcgtcccccggtagactaaccatcttctcctcacacagcagtgtctcctctatcttaggggccatcaagtttcatcacaacaatttatcaatatatgacccccttttttaacccactacctaagaa

SEQ ID NO: 486219 - DNA, 1464 bp, Homo sapiens
ttttggtgttgagcgttatatagtatgtgtgtgtgttgtgattttgctacttatgctgtgttatgctgtctgtgatttattgttgtatttatgtgcttctttgatgttatgttttgtttattgtcttgtgtaaagatgtttgtttcttgtgatggttggtattgttgtatgtgttatgtgttgtgattgttgtatgtttggagtgtgtatgtgtgtttatgttatgtttgtggtatgttcagattaataatgttttgtgttttgtgagttgtgtaagtcttagttgctttgttctccgtgtttctcattgtccttgctcttcgcttgttttcgttctccctgtctgagtgttcgtcttccgctgtgtagttctatgcttagtcttgcttcgcgagagctactgtgtgctgctgctgtttgttgttgtttgtttattgttgttttggtcttggtgatgttctttgtgtattctttgttttgtttgtttttatttgggacacgcacacaccacatcagcgcggacgcgcgacggggggacaaaggccgagaagactaccgcggctcggtgtgactgttggctggttagccgaatcttctcgcgatggctttgcacggtgtcggcgccccttggggcgcgcccgctccctgggggccttcgcccccgtctggtcacatggctggtagacactggccaatggttccgccgagagccacaattcttggccaataacttttgcctgggcaattcaggccggtgtccccaggctggacgttgcacccgtgtgacgggggttaagaccgccaccgccaggtctctcttgggagctgatcggagtcttgtgagagtgaacccccgcatggtgactcccccctggctctcctgcggaggatccggccgagtcgggccacccagggactctttgcaggcttccttcctcggatcatcaaggctgccccctcctgggcccatcatgatccgcccctatgagttcggccaaagcttcttccagaggctgaacccggaccggcttttggcgcggctgaaaggggcacaggaggcacaggaccccgtctctcccaccggatggggagaggccaaggaggagacccagcccagtgccttttcctcagcacctgagggagggggcttgtttcccttccctcccggcgacaagctcccgggcagggctgtccctctgggcggcccagcacattcctcagacacaacattcttcctgctgctcccagtcgtggggatccatcacttaccccacccccccagttcaagacccaaatcttcccagctgcccccttcgtgtttcccctgtgtttgctgtagctgggcatgtctcccggaacaccagacagccctcacacctggtgtagtcatccctgaccccttgttaattcccttaagttctcaaagatggatgcaacattcttaaagaaaaaaaataaattaaa

SEQ ID NO: 486220 - DNA, 350 bp, Homo sapiens
ggggggggaaaaaaacccccttttttttttttcgggttttttaaaaaaaggaaaaaaaaagacccccccccggccccgggggggtttggggttttaaaaggggggcaaagccccccccccccgcaaaaaaaaacaagggtagttggccggtttgtgggggggggggttgggggaaaaaaaaaagggggaaaaaaattccccttttccaaaaggaattttaaaaaaagggggggttggggggtaattttgggaaaaaagggattccccattttaccctgggggggaatggcaaacaaagggggctttcccccccctgaagggtagggattaaaggggaaaaacttttccca

SEQ ID NO: 486221 - DNA, 804 bp, Homo sapiens
gtgcgacggagcgggtgaccttccgtgaggcgggcgcgagcgaggaggcccgggagcgccgagcgtcgccgccgccgccgccatgaactatactcgggcgcctgacgagatcgggaagctcttcgtgggcggtcttgactggcagcacgacccaagagactctgcgcagctacttttcccaatatggagaacgctcgtacgatcgtgttatcactgcacgataaacaccaccaaccagtctcgatggctcttggcgtctcgtccccctcttcacagacccacacactgtcgtgggcgacggtgctggccagcagaccgcacatgcatagatggccgacaaccatcagaccccacagccaatgccacacaccctgcggtggcatgcaagccgcgcagcagaacgacagtgcctgacaggcccaggcatggcacgaaccggacccatggcagcgaataagcgagctccccctccacgcgtccagactcatcctgtccgcgtgcgacctctcgctcaccaaatccggcagagctgagcacagtagcactcaggagcacactcctttcacagcaaaactccgcgcactgcgccaccggcagcgccacagacaatggcatccttactgcatccgccccagaccagccacgatcaccagcggccaccagacggactatagtgggccactctacaatctaacctctaccgcaagcgaaccgaccagcaaacaccagccggcgacccaagtgacctagacctcactccttccaactaacccacagaacgacttccaacggcgcccaacactc

SEQ ID NO: 486222 - DNA, 510 bp, Homo sapiens
gctggcgtcatgaccaaggacgcggacccccgcttacgaccccggtggaaggtgatcctgacgtacttagtgggtgctgccatcctctggctgctctgctcccaccgaaaggaaaacagaaaagagccaacaaaccaacaaagcaaaacaaacaggaagagactagaaacaggcagcaagacatactgcatacaaagaaattataaacgcaaaagaaacaaacaaaaaggaaacaggatgacgataagacacaaaaaacgaaaaaaaacgaagaccaggacacatagatcaaagaacaccaaaaaagaaacaaaaaacaaagagaaaggaaacaaaggcaaaacggagcaaccagaaaacaaggaaatacaaaggaagcacaaggaagacaaaataaaaaacagaacaaaacgacacaaagaaaaaacagacacgcacaacaacaagaaacaaagaaacacaggaagcaaaaaaacagagaaaagaaaagcgaaacgaagcaaagaaacc

SEQ ID NO: 486223 - DNA, 893 bp, Homo sapiens
gggggccggcggcggggcgactctggacgcagcagtcctacttctcctatctctcccagtcctagctgctggatcactatactactaacagaccgcaacctcaacaccaccttcttcgaccccgcggaggaggagaccccattctataccaacactattctgattttcccggtcaccctgaagtttatattcttatcctaccaggcttcggaataatctcccatatgtgtaacttactactccggaaaaaaagaaccattggactacataggtatggtctgagtatgatatcaaatgtggcttccctagggtttatcgtgtgaggcacaccatatatttacagtaggaatagccgtaggcacagagcatattcactcgataccataatcatgcgctatccccaccgcgttcaaagttattaaggctgactcgcccaacactccacggaagcaatatgaaatgatctgctgcaggtgtcctggagccctaggatccatctttctttccaccggtaggtggcctgcctggcatcgtatcagcaaactcaatcactagacctcgtatctacacgacacgtacctacgtggtagcttcaattccactatgttctattaataaggagtgcactgtggcatccatagagggtacatcattggttttcgcctattctcagggtacaccctagacgaactagccaatgccattcatatcatattcaccgcggacactacttcttcccacaacattttcggcatcgggaggccactattcaccgatggcccagatacccatgcttaatatgtctcacaaaaacaaaaaaatgggggcgcgaagtaaaacttggggacgcaaaagagtcagacacggtgtggtcaaaggcgggaaagatcacg

SEQ ID NO: 486224 - DNA, 143 bp, Homo sapiens
agagaacctcattttacagcatagagaaaacgggacgaaggaggttaaggaaagttcccacagtcacacagactaacaagcacgtggagccagacattctggcttcatagtccatgctgtttaccaccatggcagtgccgctg

SEQ ID NO: 486225 - DNA, 152 bp, Homo sapiens
gagagaacgagtgagagactcgttgtgtatttgactagccatctcctaacttagatgtacatggcgaatgtgccttgccgattacatatgagtatatctagtctttgggacgtccagaaatccccgcagtcaacactcatctcttggaccgc

SEQ ID NO: 486226 - DNA, 274 bp, Homo sapiens
agtggtccattgttgaaggcgtggcgtgatctcggatcaccacacctctgcctcccagattcaagccattctcttgcctcagtagctgggattacaggcatgcgccaccacgccctgctaattttgtatttttagtagagacggggtttctccatgtttggtcaggctggtctcgaactcccgacctcagatgatccacccacttcggcctcccaaagcgctgggattataggcatgagccaccgagcccagctgattatgttactttttcccc

SEQ ID NO: 486227 - DNA, 987 bp, Homo sapiens
  misc_feature (598)..(598): n is a, c, g, or t
ggcattctactcggttggcagagaacactcacacacggggaagctgagccatcagtgcaggagttaattcccgtttgcaataatactaaggatgtcgcattcatatatactcaatgagcactaaaggaatcataggaatatgctctcacaggagataatgtagccacagtagataaaggaggatgtcctggaagaaggggaaccttttttaagccaagggagaaaaccactgaaaagtaaatctttgcatgtagctgtgcagctctgcagatctaaaatctgtgctttttaaaagtatactctgtggagtagcagtccacatcaaaaggtcacagtttaaaagttttgtattgtgcttgggttatcccttaagatgttagttatatcatcacaaaagaacaagagtaaactgtaatttactatttttggagtatttttttgttgttaggcatttgaaggatgaggtgcacagtgcccaagagtatgtcacagcggcaatttccactttatgcagaattaatactcaattacttatctgcttacctggaccttgagtgaataatagattcctaataaagggtttttgagcaaatggacnaaattggatgcatttatgttatagcagccacaacagcaaaagaaaatcaaacacttacaaaacagaagtcaatcaagttttaactagaggagacaccaaagtatcatacagtggaggaaaaattcaaatgttctgcgccaagctcctatcatgccaattgtacatgtttgtgcgtatgtagggtagctagggttggatgtgtaatcatccctaaaattcatttggtgaagaaaaatacattttatttgaaatcattgtctatttttattcctgccaatattttgtataacatagaagtctgccccagagtgtaaataaataatgaggaaggtcacagatctaaatatactatcttggttcaataataaaaagagaattttttcctcgta

SEQ ID NO: 486228 - DNA, 153 bp, Homo sapiens
  misc_feature (83)..(83): n is a, c, g, or t
gagtgaaatgaagtgagagcttgaagagaatgctttctcaaatctttaaattcataggatgtctcaacgtgtaaatattctgngttgagcaagtttgactcatgactaaaggtgttcccatagtctgtaccttcacaggatttgcactattag

SEQ ID NO: 486229 - DNA, 418 bp, Homo sapiens
ttcaagccttggggtaatgcgtgaaaaacttttgttagccgcaagggaagggccgccgtcgttccatctttcctgatcatagcaagaaatgccgtgtttgccttttaccgcaaaagaaacaaatcctggtttcttttctaatgttatcccctgggtcaaggaaacatgttacccctttttttttttggaaaaacggcttgccggttttaaagggacatttggttgattttcattaatggccccctgggcttaaagtgatccggccctaaaacgttgttttgttggggtttctttagcaagtttttgtttaaattatcatttatttggtgggtgaagtttttaacatgctttgctgtgtgaaatttaaaaaaggggtgtttttccagggtggaacaataaatttggctttgccgtttta

SEQ ID NO: 486230 - DNA, 153 bp, Homo sapiens
aacgccagtgtctgagaaggtgcattttaaattttatttttattacttttttgtagatgaacttgagctctgtaacttacacctggaatgttaggatcgtgcggccgcggcaggcgagctgcctggcggggttggcccttgtcttttcaagta

SEQ ID NO: 486231 - DNA, 270 bp, Homo sapiens
ggcgatggctgctgtggccgtggctgttcgcgaggactcgggatccgggatgaaggcggagttcccccctgggcctggggcagtggggagggaaatgaccaaagaagaaaagctgccagcttcggaaggaaaagaacaagcagaggaggaacggaaggaagaaagggggcagaccagagacttgctctctgtatctgcagccaatgtcaagtaggccaaccagagactcccagatcgggcattcagttggcactctcgggagaaagtcca

SEQ ID NO: 486232 - DNA, 234 bp, Homo sapiens
cctgtggtgacctgctggttcctttaggaggactgcttccaccagaagacacagttgaactaaattccattgaactagaagttaagactgccatccaaccactttgggctccttatgcctctgagtcaacaggccaataggggagttatggtgttggctggggtaatagatccagactaccatggggaaatctgacataaaagaggtaaaaaagaatatgtctggaacttttgg

SEQ ID NO: 486233 - DNA, 667 bp, Homo sapiens
  misc_feature (389)..(389): n is a, c, g, or t
gacctctgggggtgagatgtagacacggcccgacagcgtggagacacaccgtctgtactgataaactgaaagtatgtgggcagggtggtgcatacccgtggaggcagccgctcaagacgctctggctggggaatcactagaacctgggaggcactaggcgcagagagctgagatcgcaccactggacttgagcctatgcgacagaggtagactcctctcaaatatataggcctgtattctctagctttatggagacaatgaaactaagagtcgcgtgacagatcaccgggtacatcctgcttttgatagaaagctagcattctgaaagatgcggcaacacactttagagatcagaaccttaccctagtccataggagccgactcagggnctgtcctctggtagcacaactaagcagggagctgttccttgtatcactggagcaggagatcacgctagccttgttcatactggccatgcatagggcatggtattcagcgcaagagcatatactatactgctggcactcaccaatgcagggcatgcaataagcagaacctggacgatgtgaaggtctctggtcagcccctgctgccttatggaagcttgtgcatgggatcgtatccctgctgcttggagaaacacctcactgtgaggcgatatcttcct

SEQ ID NO: 486234 - DNA, 754 bp, Homo sapiens
aggaacccgggcggggccaacaagagcaccccccgcacgcggggccccccacacagggccccggcaaatctgccacgctctgccccactcgtagaaggaagacgcacggcgcacccattacgccgcggccacaacgcagtgcggggagggggaggcccccgcacacatgtctctcccgccccaccctctcggtgggagacacacagcgtgagggtcacacagcagtagagaaactatgtcctgtgtgttattcacctcagcgagagagggcgtgagagagagtggatcagcacgggcagtgcccggagagatagtgttcagactcgcaccggcgggccgctctctcacacccggccgtgggcgcacacagcctcctgacaagggaagtgtttgtggtgtcacgacacacacacagataacgctcccacatggaacgaactatgagggataggcccccgaccgcgacacatcccgcgcccccgcctcacactgaccgcacgtccgagatagattttgtgaccgctgcggtcctctccgtgtgacaattctcctcccaccctcacacatacatgctttgttcactgcattaaaaataagtacaatactctcattcatagtgcactcatatctgtttgcttcgcacagaatacctccatgacggacaggtcccacgatccatttgatcacccactgtcgtcaccgctaattaatcaccacatatcagaacaagttcggtccccatcaatagtacaga

SEQ ID NO: 486235 - DNA, 604 bp, Homo sapiens
aatccaatccaaggtttcccaaatcgcccgcacatccacgggttcttacgaattccgactcgccatcggcataataaccataggttataaccttcgcgaacacctacgtcgcacgaagctcccctctaggaaccatacgagtactctaaataggcctcgtcgtaagcgcatttacctcactaacgctaaccgctagaccacccgcaagagccctactactagaaggaccatgcaaccacggcggaccactcgtctccgaagccgtagtaggaggcgtcctaaaccgtactatctgccgacttaccctcgtcttcgccctactctttattaacagaggagtattccgagtcagcgacaaagaaggcacacccctacgttcaccgccctcgaggcgttgcgccgtcgtcttcggcgccttcatcgtagtacgactcttcggcagagtcggcacccacggagtccgcaacagacacggtatctttagcaacgtcttccaaggccccgtcttctacgccgtcatactaaacgcctttaccgtccgagtgataggtcatacgatttaagaaaggaccgttcgactactctccgctacgactaagccgat

SEQ ID NO: 486236 - DNA, 214 bp, Homo sapiens
gaaccaagttatgatcagacaacaaagaggaaaggagaaaggaagggacccacagactaaaataaaatacataaaaaagacgggcacctctcagtgagtggttgtgatggccgacctgctagggctcttccctcgcctcctggagctcctcccttcatcctctcctgtatagctgggcccagccatcagtgtggaagcagagtaaagctgagct

SEQ ID NO: 486237 - DNA, 1025 bp, Homo sapiens
atccgtctcgaatctggaaactagcagaaagtgtggccagtgagactgtgtggacagaactgctccaggaatgtagtgcatggtttcaccctttctgagatgttaagttgataccgtaaaggtgggcattatttctatatctagcctccaagactaacagctatgctaatgtcttggtatcatccagtagaagtctgctggtgacttaacacctgatttccggaaaacggctatgcgactgtcattgagccttgcgagacttgcgacttgggcagctgtggcaacgtaacccccattgtttgctgggcgctatagaatctgcaagtgacgggccgtggaatgggtaagtctgcacatgtgtcaacttataatgcatatattgtgctgccagggaccttatgattgattgtccctgaacagggcagtgtgttgtcgtctgaaagagcgttgtaccttggagtctcgtgtgtgagagctgccgtgttacatcttggcgccacaagagactttagtaagtttctacatctggtgactgatgcctgctgaaggaggagtaaccttgacttgttgatactgcatggatcaagggttagcggaattaccggagggcgtagacgcactactatctctgtggcttttttctcggcgcaaatgatgggcactcccacaccctcaacccatttggtgcttcgcgtgggggcatgcagaacattccgttcacccccctgtccatcgttggcctggtgaatgtctctacgatattacggggcttggtgccttggaggtcctgtgctgcctgttgttcccccttccaggaccgtcgccttggtcttgtcagcttggtatgggctgttaactctgtttgcggtgttacttcctcgggtcgaactggggtcaccgctgcgccccccctctcgccgttctgttgaccccgccggtactgccccccgcatgcgcgccctcgttcccgcgtaacgagtttcgcggcctccgctcggccggggacccattgttgcgcgcgttcc

SEQ ID NO: 486238 - DNA, 232 bp, Homo sapiens
gagaaagccagctgactttattctgttttcacatctaggttgttggggagagtgatagacaaagttctggattctgggcatcgtcggcgcatgcttgtaatcctacttgggaggttgagacaggaggatcacttgaggctaggagttggaggctgcagtgtactatgttcgcatctgtgaatagccactgcactctagcctggacaatatagtgagaacccatctcaaaaaa

SEQ ID NO: 486239 - DNA, 325 bp, Homo sapiens
tgctcgactctgaggatcccttacaacccagatcaccaaaagaagatacgtaaaaccatgtcaggcgtggcggtatcgcacctgcaatcgcaggcactcggcaggctgaggcaggagaatcaggcagggaggttgcagtgagccgagatggcagcagcacagtccagctttggctcggcatgagagggagaccgtggaagggggaggagagaggggagaggggattttgtattttttgtagagatggatttcaccatattggccaggctagtctcgaactcctgacctcaagtgatccaccctcctcggccttccaaagtgccgg

SEQ ID NO: 486240 - DNA, 254 bp, Homo sapiens
ctacagggagacagtgatacgcagcacagagtaatagagcaggctgaggcttataacttcacttgcaacctacagtggagattgcagtatgccgggatggcacattgcactccagactggcgtgatgcacgaaactccatctcagtgtgaaacaaaacaaaaaaaaaaggacttgatttcctccttaaagtgtgaggtcaccatccacttttatatcctggtatacacgcacaatgtatgtctataggcctaag

SEQ ID NO: 486241 - DNA, 227 bp, Homo sapiens
gtaaagctcattccaagagcacacaaaagtttgagcataaaaatagacaaaatttagcagtacagaataagattaaagatactgagtaagttgtttgacagaaacctgattatccatggtgatcgtttgcaggctgaattataaagattaaaagatactgagtaagttgtttgacagaaacctgattatccatggtgatcatttgcaggctgaagtatttatactac

SEQ ID NO: 486242 - DNA, 418 bp, Homo sapiens
tacaattttcatccctctcttcaacactacgacggcgtccctcccagagcagtggtgaggcttactcaaagtctggtgtatccatgatctgtctaccatgtaggtacactgaagatcctaaggctgtacaacaaggtgttgactgagccagtgagcagtatggacatcacttgatgacagaaagttcctgtacggccgacataaggacataaacgctgactgaactccaggcatcgaattgccaaacatcataaagttacctgaagtcctatactactgtatcaaacctgacaaccaggagctcaggctcaagcttgtaaaactagaactccgagagccatgcgcactgctaagacgaagtcaggaatcggagaccagcatgtgtactacagtgaaacccagtttctactgatactgc

SEQ ID NO: 486243 - DNA, 266 bp, Homo sapiens
  misc_feature (1)..(1): n is a, c, g, or t
nagttgtagcccggagaagtcacatattggtatagagtgtgccgcacagaagaactccctttagcagtatctccccttaaatgaagttatagttagggcaggtaatcgtagaccagactagttaaactgtgtttttagttagctttgttttgtattttatcattctgtcctcagtatctagcacatagtaggtattttaaaaactatattcattgaactgatgttaggatatgacataatatattatttctaacttttatagttta

SEQ ID NO: 486244 - DNA, 249 bp, Homo sapiens
ctctccccgcgatggacaacgtgacagatgtgaaggtgggcctgacagacacacggcctgcagcagaccagccagtccaccacacagcatcgagccaagtcattcaaaaaggatttaggccactgcctttttctgagggaggagcggccagcatgtgccccgcggctcactgggcctgtctaatcacacagcagtggcaaaaggagtatctgccagacgcttcctatcactctattctgtctcctcatc

SEQ ID NO: 486245 - DNA, 311 bp, Homo sapiens
  misc_feature (5)..(5): n is a, c, g, or t
cacanactagggtcagttttgcaggtggtaagccatttaccaagatagttgtaggtaaagaagggcagatttattagagaaattgtgaaaatatgttgcagtgggcagctcagcagagaaggggctacctgcaaagaggcaagggctggaggaaagttttatagggtcctgctgaagggtgctacgtgtggaatgaggtcattgtgcccgcaggttgtttgtgattagctgtctctaacaattgttcatacaataattgttcattattgttctcaacttggggctctccccaacctggggacccttcctta

SEQ ID NO: 486246 - DNA, 256 bp, Homo sapiens
caggagaatcacttgaacctgggaggcagaagttgcagtgtttgagatggagcaagactcctatctcaaaaaaaaaaaaaaaaaaaagacaaagccttgctctgtcactcaggcaagagtgcagtggcgcaatcatatttcactgcagcttcacattcctggagtaaagctatccccccaactcagcctcccaggtacctgggactacaggtgcacaccaccatgcctggcgaattaaaaaaaaaatttttttagt

SEQ ID NO: 486247 - DNA, 559 bp, Homo sapiens
  misc_feature (73)..(73): n is a, c, g, or t
atgaacaatgaagaatatagatgaatattcacaaatttggcatgagaatcaactttcagattcaagaagctgnagtgaaccccaaaaaggataaagccaaagatatatgttccatgacacataattaaacttctaaaaactaaaaaaaaaaaaaaaaaaattcttgacagcagcaagaaagaaatcataccttagctatagggtaaaacaatttgaatgatagtagatttctcatctgaaaccataaaggttagaaggaagtggcaaaatatttttcacgtgctgaaaaaataattgtcaacccagaatcccatgcctggcaaaaaatatcttccaaaaaatgaaaggcaaatcaaggcattctcagatgatgaaaaactaacagactctgacacaagcagagttactctaaaagaatggttaaaggaagttctttaaacaaaaaggaaaattaaaaaaaaagaaaccttagaacatcaggaaagaaaccagcaggtaagcaataggaacccctcctgaagttcctaaattatgtgtgagcggtcacggaaaaattata

SEQ ID NO: 486248 - DNA, 233 bp, Homo sapiens
tgggaactgaatggtgtcactatgaggtgatacgtgggttaaggctgtagacaaggcctgagaatggggcaaattttgaaagtgcggggggaggccttctgatagtagattaggtgccataaggggttattaagaagctgggaacctctatgtgagagattagcattgtagacattctggaagaatccaggcacacaaatgccaagggtgatccattcagttgcaaattcaag

SEQ ID NO: 486249 - DNA, 666 bp, Homo sapiens
gtgcactatagcttgtaagatgtcattgaggtgcatctcaccgtgtgggtcatgactgaagctgaagaagagaccacagagaaacagaaaacctgctcaatgcaagggaccaacattataatggtttaatgatgggagtccagtgtatatcccttccagtacagttttaataatcatatttttattgagccatataagtgttaccccactacttttgcaaggaagccctggcctctgttcacccacatactgtggctcgaacctgggacctcagcgctcacaaggcaagctctgtactgctataccaccaaccctttgtcgtttttctgtttgtgatataatagtgagggagtactactgtccaatctaggctgagagttattctaacctgaatcacatgcctgaactgtcttgatcctaggccgcatccgagtgcatggtatcggtggaggccacaaacagaattatcgcatgattgactttctacggttccggccagaaaaggaataggcaccagaaccgtttgaggagaaggttgtggtagtccgctatgatccttgtaggcaagtttgggatgggaaatgatgatggtgtggtctgaattgtagtttgtagcttctcagaaaatgtgggcttgtccatcatcctgaacaggtctgcgacata

SEQ ID NO: 486250 - DNA, 1031 bp, Homo sapiens
gggccaatgctcagcccgatgctccttcagtgacttctttgagggcatcggcaagaacacaagaaggtggtggccgtggcacgccgctgggtgtcgggggccctggccttactgagttgtgggcacccacgcaatacgtgggccggggggaggtagacgctgtgactgtgagaaggccagaagcgcaagatgacggtccccggaagaatgggactctgttcccatagcaggtgcccagtggcccagcgcttttggcgtgaggcaggtgcctgagctgggccaggggactaagggtgcgtggcctgggccccttcaccatgggcactccaggccgcgacaacgtgtggccgatagactcgtggcgtttgcacgggagccgaatgcccctggagccctttggccatcacgatcgtggagacttgtgtagaggtggcaggcctcgagagaccggatgcgcctaggcataacataacaaggcaacagtgggtgcctagcctcttcaaggccctagaagccgtacgtctctagcgcagggcactccgtcccagatatgcgccttgcgtttctatccggggcttcacatattctcggctccgcctggactccgtagctccggggcattggcatcttcccttcgcgtattgcttgcttttgagaaatcttttagcctcgctgctatcggaggcgcttgcttcggagcccacaggaggttcccccgggcacacagagcagctctgcggcaccccttagtcgcagagagggccatacccaacgcgaagttgccccccttgccctttgacccgcaatgccgtggtggccccttgtgccaaaacccgtttcccccttatgccccgcgggggacggccccaactgggcccaagggtccccaggggtggtgacaacgttgcggagtaagccaatgcctgtcgcggccattgcgcgcgccggggaacgccccctttcccgtttttgcaaaggcccttggttcccgtggtccccggccggcctggcccgagggaaccctttccgcc

SEQ ID NO: 486251 - DNA, 547 bp, Homo sapiens
taaaagcgagcacggcgcggaggagcccggccggcccatggcgctgtgtgcgctgacgagtgctctgcgctctttgagcctggcatccgcggccattaccgcccgggttccgactctgctccctgctgcccagatacagagcaatgtcctccttcagctgccccctgccttggtgtcgccctcttaccgcccagtgcatatgtctgcggaccgcagtgccaagtttgtgtcctggaagagtcgtaccaagtacacagttaaaccagtgaagatgaggaagtctgggggtcgagaccatacaggccgcatccgagtgcatggtatcggtggaggccacaaacagaattatcgcatgattgactttctacggttccggccagaaaaggaataggcaccagaaccgtttgaggagaaggttgtggtagtccgctatgatccttgtaggcaagtttgggatgggaaatgatgatggtgtggtctgaattgtagtttgtagcttctcagaaaatgtgggcttgtccatcatcctgaacaggtctgcgacata

SEQ ID NO: 486252 - DNA, 234 bp, Homo sapiens
ctatgctcccacttgtgccaggctgagtaagtggtgcaatctcggctcactgcaacctctgcctcctggactcaagtgatactaccaccttagcacccaggtaactagggactacaggtgcacataacccaagtctaggctactattttctgcattttatagtaagagaacaggggtactcgtcatagttagcccacggctaggtctacgaactacctaggactatgagtagat

SEQ ID NO: 486253 - DNA, 302 bp, Homo sapiens
ccggtcgtgccgacaaagataccatcgaggccgatgaaacggtcccagccgaggcggatcgcagcttccaccgcaaccttgaccggagcctcgccgatcagcgcgcgctagtagtcttcgctctgctgttcgaagagttcaaagcagggcacggaaacgacgcgggccggatgaccatccttttccagctgcgcacgggccgccagagcaatttcgacttccgagccggtcgcgaaaatcgtcaccgcagccttgccgctggccggagccagttcataggcaccgtaggcgcacttgttctc

SEQ ID NO: 486254 - DNA, 143 bp, Homo sapiens
ccccttgatttttttttttaaaaggaaaaataaaaatttggactggcctttcccttggcccatttgggttttaagggccaagttccagctttgtgtttctggactgactgtgtcacttattaaatacttttgtgccatgaaaa

SEQ ID NO: 486255 - DNA, 923 bp, Homo sapiens
  misc_feature (7)..(7): n is a, c, g, or t
  misc_feature (50)..(50): n is a, c, g, or t
  misc_feature (87)..(87): n is a, c, g, or t
  misc_feature (90)..(90): n is a, c, g, or t
  misc_feature (102)..(102): n is a, c, g, or t
  misc_feature (114)..(114): n is a, c, g, or t
  misc_feature (126)..(126): n is a, c, g, or t
  misc_feature (132)..(132): n is a, c, g, or t
  misc_feature (134)..(134): n is a, c, g, or t
  misc_feature (169)..(169): n is a, c, g, or t
  misc_feature (173)..(173): n is a, c, g, or t
  misc_feature (193)..(193): n is a, c, g, or t
  misc_feature (195)..(195): n is a, c, g, or t
  misc_feature (198)..(198): n is a, c, g, or t
  misc_feature (209)..(209): n is a, c, g, or t
  misc_feature (212)..(212): n is a, c, g, or t
  misc_feature (242)..(242): n is a, c, g, or t
  misc_feature (308)..(308): n is a, c, g, or t
  misc_feature (370)..(370): n is a, c, g, or t
  misc_feature (388)..(388): n is a, c, g, or t
  misc_feature (405)..(405): n is a, c, g, or t
  misc_feature (413)..(413): n is a, c, g, or t
  misc_feature (422)..(422): n is a, c, g, or t
  misc_feature (425)..(425): n is a, c, g, or t
  misc_feature (429)..(429): n is a, c, g, or t
  misc_feature (455)..(455): n is a, c, g, or t
  misc_feature (460)..(460): n is a, c, g, or t
  misc_feature (512)..(512): n is a, c, g, or t
  misc_feature (521)..(521): n is a, c, g, or t
  misc_feature (525)..(525): n is a, c, g, or t
  misc_feature (544)..(544): n is a, c, g, or t
  misc_feature (558)..(558): n is a, c, g, or t
  misc_feature (579)..(580): n is a, c, g, or t
  misc_feature (585)..(585): n is a, c, g, or t
  misc_feature (609)..(609): n is a, c, g, or t
  misc_feature (646)..(646): n is a, c, g, or t
  misc_feature (653)..(653): n is a, c, g, or t
  misc_feature (660)..(660): n is a, c, g, or t
  misc_feature (664)..(664): n is a, c, g, or t
  misc_feature (681)..(681): n is a, c, g, or t
  misc_feature (687)..(687): n is a, c, g, or t
  misc_feature (689)..(689): n is a, c, g, or t
  misc_feature (705)..(705): n is a, c, g, or t
  misc_feature (707)..(707): n is a, c, g, or t
  misc_feature (709)..(709): n is a, c, g, or t
  misc_feature (716)..(716): n is a, c, g, or t
  misc_feature (720)..(720): n is a, c, g, or t
  misc_feature (816)..(816): n is a, c, g, or t
  misc_feature (835)..(835): n is a, c, g, or t
  misc_feature (903)..(903): n is a, c, g, or t
cgcgctntcagactggctcgcaggcggcgcggccggcggacccgttcganacagcgcgggcggctcgggtccccttgggctccgcancangaggacgccatngacgacaagganttaatttaatantttaantntcagatgaaagaagatcctgacatggcctcagcantggntgccatccggacgttgcttnanttntttaagagagntanaggggttacaatccagggtctgagggcgantctcaccagttccatagaaaccctgtgtggtgtggactcctctttggcagtgtcctctggcggggngctcttcctcctgcttcatcagtcttgcctccctggtaatactccgattactccaaatttanaaagattatgattgagcngggagaactttttctcnggtgattntcactgttnagnaacnaaattgcagatctgttttatactttnatctnagattgagtgacaatattgactcatcgcctactctctgtatatgtgttctgnagagtcctnggangcagccgttggcgggccanggaagcgattttanttgtatacgtcactgagtcanngcctnaatttgtcaggtaagaaaattggncaaagccctctgccacctcaacgtccctgtcactgtngtgctanatgctgntgtnggctacatcatggaganagcagntnttgtcatagttggtgntnanggagttnttgnaacggaggaattattaacaagattggaaccaaccagatggctgtgtgtgccaaagcacagaacaaacctttctatgtggttgcagaaagtttcaantttgtccggctctttccantaaaccagcaagacgtcccagataagtttaagtataaggcagacactctcaaggtcgcgcagactggncaagacctcaaagaggagca

SEQ ID NO: 486256 - DNA, 326 bp, Homo sapiens
gctgtactctagcctgggccacaaagtgagaccctctctctctaaaaagaaaaagtaaaaaagaaaggtgttctaaaattgactgtggtgaagcttggacaactttgtttgtatactaaaagccaatggctgggcacagtggctcacacctgtaatcccagcactttgggaggctgaggtgaaatgatgacttgagcccaggagttcgagaccagtctgggcaacacagggagacctcatcgctataaacaaattcgaaaagttagcagacatggtggtccagctactcggaggcgaggtgggagaactgcttgaacccaggaggc

SEQ ID NO: 486257 - DNA, 116 bp, Homo sapiens
gcccgaacaaaaacaaacttgccccgcctgacttttttgtcccctgttttgcaagaatagtattttgttacaaacccctagtttttaaactcttcaaataaaggggccatggtttt

SEQ ID NO: 486258 - DNA, 217 bp, Homo sapiens
gtcccccttttttcccccttttattttatattatttgggtcataccttttctgttacggaagtgtttatttttctggtctttttggggccctttggggattttatgttttgttaggtttttttcccgtgttcttgtttttcccccacctgggtttttaagctatcccagctttttaaattaaattttaaaaccccccagcctgggtgagtgtgggga

SEQ ID NO: 486259 - DNA, 110 bp, Homo sapiens
caatttcatgggccccttgatcatgttttaaccttcccttaaccttgggggtcccaagccaaagtcaaggtttgacgcccccccaaggtggcagctcatttccagcccag

SEQ ID NO: 486260 - DNA, 957 bp, Homo sapiens
  misc_feature (7)..(7): n is a, c, g, or t
  misc_feature (172)..(172): n is a, c, g, or t
  misc_feature (183)..(183): n is a, c, g, or t
  misc_feature (198)..(198): n is a, c, g, or t
  misc_feature (429)..(429): n is a, c, g, or t
  misc_feature (434)..(434): n is a, c, g, or t
  misc_feature (490)..(490): n is a, c, g, or t
  misc_feature (492)..(492): n is a, c, g, or t
  misc_feature (507)..(507): n is a, c, g, or t
  misc_feature (513)..(513): n is a, c, g, or t
  misc_feature (519)..(519): n is a, c, g, or t
  misc_feature (523)..(523): n is a, c, g, or t
  misc_feature (532)..(532): n is a, c, g, or t
  misc_feature (557)..(557): n is a, c, g, or t
  misc_feature (577)..(577): n is a, c, g, or t
  misc_feature (583)..(583): n is a, c, g, or t
  misc_feature (587)..(587): n is a, c, g, or t
  misc_feature (589)..(589): n is a, c, g, or t
  misc_feature (593)..(593): n is a, c, g, or t
  misc_feature (608)..(609): n is a, c, g, or t
  misc_feature (621)..(621): n is a, c, g, or t
  misc_feature (625)..(626): n is a, c, g, or t
  misc_feature (629)..(629): n is a, c, g, or t
  misc_feature (642)..(642): n is a, c, g, or t
  misc_feature (651)..(651): n is a, c, g, or t
  misc_feature (658)..(658): n is a, c, g, or t
  misc_feature (666)..(666): n is a, c, g, or t
  misc_feature (668)..(668): n is a, c, g, or t
  misc_feature (675)..(675): n is a, c, g, or t
  misc_feature (680)..(680): n is a, c, g, or t
  misc_feature (853)..(853): n is a, c, g, or t
  misc_feature (940)..(940): n is a, c, g, or t
gggcaangggattaagaaataaaaattcattgcactacttagtaaagcattactagtaactttcataaaaaatgtacaaactttgttaaaaatttatcaagccttcaaatgatttggttacagatatttataatacatacatttaaaactatatgttaactgatacaatggnatatgatttgngaaaatgactcagcnaatgattccaaaaaacacgccctgtgagctttcacaatctgcaaacggcaaaactgaggtaccaaatgtaccaacagggggacaaacaaacagctttctaatgaaaaggcccaaagataatctgtgaaaaatattctcacaagtgagtcggtagatctcattcaaaattattctaagaggcgcgcaaagtttaagaatcttaacaaatcacatttgcgagtattagtgatnatcanatctgagaataatgctttcgacgttttcccgcttttgctccaaaaatttagggacngngaatgctctcaattntgagcnctttgntcanctggggggncttcatttttttggaggggctgggnggttcaaaaaaacacccaanttggcnattncntgcncaaaaaacaaaccannaacccacaaaanaggnnccnctgtattaaaatngttaaaccnatttttnttttagangnaagaagncgtangccaatgaaccaacatctgcctgctatctggtgcatcacccaaggtgaccaatggctgggcacaaataaacttctcttttgctagccacagagttgctcactgtggcaagcctgagctggtcagaacacctgtgtgtgtgttcctgatacacactaaccacaataagcaagtntgcacacatctctatgagccccatgcaaagacaagacattcccaaagatcagtcactagagtgcacaacgaaattcaagatttgacnaaaacagaccctactgc

SEQ ID NO: 486261 - DNA, 864 bp, Homo sapiens
  misc_feature (235)..(235): n is a, c, g, or t
caacaagacagagctggcctggatgtccggcggtctggccgcgatgagtaggtgattgtctgacaagcagaggcatgagctgggtccaggccaccctactggcccgatggtcctctgtagggcctgggggaggcacctgcgagggccgccctcacaggaacctcctatctctcaggtccctacgcgcagctccctcgcgggcctccagctgacatgcgcaggctgcccatagctnctgaacatgtccctggattacccagcccaccggaaccccggctagagtgcccaccaaggctcttggtgccctttgatggacctgtttgaggcaggcgcctggtggggaagcggggacatggcgagcgtaccctgcatacgcgtgcctaaatgtattcgcggagcacagcgtgtcgtaagctggtggccacacattgactttcagtctacctggcccgtgtcgaccagatgcgtggagtatgcgtgctcgaagcgtggacctggctgtgttacaaaacatgcgtgactcaaaacatctttccccagagggatggtcatatcgcggccctcagtcagacatcgatctcagcgcgcatctagtcggtccacttatcccttcgggagcaagagactgtgggaataggctagatcctggaagcaaatggagaaccaacaggtgtaatagccccaagcaagggagcacggtgaactctaccatgcgatagaattcaagaattcttagggaacagcgaaaaagactaacccctaatgctcaacgatagagatgcggcctgacaatcctgtggataccactcgaatacatggagacgttcaaacacaatatccaattggcccgggaaccctgaccca

SEQ ID NO: 486262 - DNA, 914 bp, Homo sapiens
gagttgcaatgagggccggtggcccttgtatcgcttcattttttgtggtacaagcctgggtcaatcctactcagtcctgctaccagccgtcatagcctcctggtgaccaagaattgggtcccccacactgatgctttttctctctcaagggctggacgcacggatgggctgactcgggcgtgccatactgaagtgcgggatcatgttccccagccggttttttcaccagatgaatgtgcctcgctttggtcccgggcttccatacgtgctcccccagatgggaagcccaactacgttgaagggtctttctcaagtgacttaacaggctgcccaagcctgtgacgtcttgccaagagctgcccacgcgttttttccattgctgctggaggccgtgtccgtgccctgactgtgtggggcagcttgccaccctcaggtgcgcttcagcctggttgtactggaagcacccccagtcatgagtcttcacgtggacaccctcgtcgacccaggtttttggaacactcagctttagccccttccataggctttttcgggttccccccattccaagtgcaaagcatagctctcacatcgcactgccacacccctgtgctgctgccgtaccaaaccacaaggtgattcgggccttagcccaaacccctggatgacaagaagagactggtgcgcacaggaagacagtgtcagcccgaggggataggttttctgttggggagccctggcacctgagccctcaggatcctggcctagactgttttgaccatctaacctgggattactaactgttgagccattttcccccaagccgggaaacccctggtctctgactgcccttcccacagacacagcaccaatgtaggcctctgttgcatggctgtaccaagaacataagagtccca

SEQ ID NO: 486263 - DNA, 192 bp, Homo sapiens
  misc_feature (19)..(19): n is a, c, g, or t
  misc_feature (26)..(26): n is a, c, g, or t
  misc_feature (106)..(106): n is a, c, g, or t
  misc_feature (121)..(121): n is a, c, g, or t
gcctctagcgccactactngagaccntgcccagagggtggtgctggtgttgcgggaacgttgtcttttctcccgggcgggccgggtgctgctgggctcgagggccntgagggagcggcacntaggcctgatgggctaccagctcctgccgctacccttcgaggaactggagtcccagagaggcctgccccag

SEQ ID NO: 486264 - DNA, 324 bp, Homo sapiens
cactaaccacgcggtgtcactgtgtacgtggtaggcatgagatcctgatgtagcgctcagctccgctctgaaggcactgtgttggtgctgcgtgactggagagctgtgtggaggccatgtgtgccccgtgcgaggatcaggagggcgggtgagggaccgagcaggcctcttgcccggtcgggtcagccctagtggttgactgcacacttgtagacgtcccagggcctgtgctgtgatacacctgcctttggaccacattagtgtatgctcttagagatcgagctcctcaagtggtacctgaagcctttgcttccggaaagcgcg

SEQ ID NO: 486265 - DNA, 418 bp, Homo sapiens
  misc_feature (6)..(6): n is a, c, g, or t
  misc_feature (35)..(35): n is a, c, g, or t
  misc_feature (84)..(84): n is a, c, g, or t
  misc_feature (109)..(109): n is a, c, g, or t
  misc_feature (137)..(137): n is a, c, g, or t
  misc_feature (192)..(192): n is a, c, g, or t
  misc_feature (290)..(290): n is a, c, g, or t
  misc_feature (313)..(313): n is a, c, g, or t
  misc_feature (317)..(317): n is a, c, g, or t
ccttanggcctttgttgtatggatcaaataagatnatgaagtgtaccctgcctttgtaaatcatgaagccagtaatttttaaanaccttttttcaagaaccttcttaanaatctgatgaaaggcccaggcatgatgncttatgcctgtgatcccagcactttgggaggccaaggcaggtggatcacttgagncccaggagttcaagactacccctgggcaacatggtaaaactccgtctctacaacaacaacaaaaacattagccgggcatggtggtatgcacctgtaancccagctactcaggaggctgagncagnaaaatcgtttgaacccagaaggcagaggttgcagtggaacccaggttatgccactgcactccatcgtgggcgacagagtggactctgtctcaaaaaaaaaa

SEQ ID NO: 486266 - DNA, 566 bp, Homo sapiens
gtgtctagaggatccggtggttcttgaagaagaataaaacagaccctgtctctcaccatatgcaaaacaacataagatggattaaaaacataaacataagacctaaaaacataaaaacccagaagaaaacctagggaataccattcaggacatagggcgggggcatggatttcatggattaaaacaccgaaagcaatggcaacaaaagccaaaattgacaaatgggatctaattaagctaacgagcttctgcacagcaaaagaaactatcatcggagtgaacgggcaacctacagaatgagagaaaatttttgcaatctatccatctgacaaaggactaatatccagaatctacaaggaagttaaacaaatttacaagaaaaaaaaaccccatcaaaaagtgtgtgacggatatgaacagacacttctcaaaagaagacatttacacagccaacaaacatatgaaaaaaaagctcatcatcactggtcattagagaaatgcaaatcaaaaccacaatgagatatcatctcaatgcagttagaaaggcagcattaaaaagtcaggga

SEQ ID NO: 486267 - DNA, 887 bp, Homo sapiens
ggcttcaaggccgctgtgtgcctgacggggatgactgtggccggcgtggttctagctgggctcactcgttcagtcggaaatgaccagactactgaccatccactctaccactccctacccccgttcgtctgctccaccacatcctccgttccagctcgcgcgagttgctcagccgaggagtaaccagctagcgatgcatgctcgcgatgacccaacactggcgccgatcacgagggttgtggagcgccgaagactcgtggatcgcctttgtcgaaggcatacgtattctctaagcaagtttacttcacaactgtgcgtggatgagggacaccctcgacagccttgcgaagttgcccctctgcgtgctgctagcatatctcacgaaaagactcttcccagctagagacaatcttgtcgctaacacgtgaggtgcctcggtcacgtggtactggaacgtgagtatatgttgggctaggcgagggcaaggacggggtcccgtatcatggatccgttgcaggccactataccccattagcactacccatgaaagatagtttggctggccatggagcttgataagattctcaggaacactcttccccagaaaggagactgaccaattgtcgtttgattcgagtgtctggtaggtcgtgcagaagtagagacagtatacgccgccggaagtctgccctagcacgtaactctgggttcgcctttcctttcccagtcgccgtaggccccctaaggaagccagtttaggggggccacctttttgatctagggaattcacggcatgttggggactagaagatgcctccgacactaggactccctgcctcagcttctgggacctgggtagaggtcctccactcccaggtccacatgtc

SEQ ID NO: 486268 - DNA, 172 bp, Homo sapiens
  misc_feature (113)..(113): n is a, c, g, or t
cggccgaacatccattttcaacgctcactcagcaaaacagaaagtattaaaaatttgaatttcaggagcattctcacagatttaggagggcactaactttattttaaatcaangactgggaaggtccagcgtggtacatatagctatagagaataaatcaactatcgttaaa

SEQ ID NO: 486269 - DNA, 162 bp, Homo sapiens
acatcttcacataaaaactacacaaatgccttctgagaaacttctttgtgatgtgtgcattcatctcacagaattgaacctttcttttgatcgaacagttttgaaacacttcttttgaaggatctgcatgtggatatttggatcggtttggggcctgtggtg

SEQ ID NO: 486270 - DNA, 1063 bp, Homo sapiens
  misc_feature (357)..(357): n is a, c, g, or t
  misc_feature (380)..(380): n is a, c, g, or t
  misc_feature (382)..(382): n is a, c, g, or t
  misc_feature (404)..(404): n is a, c, g, or t
  misc_feature (527)..(527): n is a, c, g, or t
  misc_feature (560)..(560): n is a, c, g, or t
  misc_feature (583)..(583): n is a, c, g, or t
  misc_feature (588)..(588): n is a, c, g, or t
  misc_feature (598)..(598): n is a, c, g, or t
  misc_feature (612)..(612): n is a, c, g, or t
  misc_feature (623)..(623): n is a, c, g, or t
  misc_feature (647)..(648): n is a, c, g, or t
  misc_feature (655)..(655): n is a, c, g, or t
ctgtctgctggactgctgtggtccttctgttagctagagccgaagcctgtgggatataccactggcagatgatcccataccgcataggcagcctcgggcgcctgctcttgcttgctgaccgcctggctggtggtgacgcgctgagtcgctgttgcccacgcgctgccgcatgatcatcgaagttcgatcgaaatacttcaactcatcttcgtcgagaatcgtactgggcaagtggtcacaaccctggccgatcggcttcgcaccatgcccctgtgatgatgatgatcatggtcaggatgacagtgagctccgctggatgcttgggagagggcgctacagaggcggtgagatcagtcntgaccagcactcgttggcggaangntgtctgtgaggagacgtctggngcttatgagaaaacagatactgatgggaagtttctctatcacaaatccaaatggaacataaccatggagtcctatgtggtccacaccaactatgatgagtatgccattttcctgaccagaaantcagccgccatcatggacccaccattactgccnagctctacgggcgggcgccgcanctganggaaactctnctgcaggacttcanagtggttgccnagggtgtgggcatccctgaggacnncatcttnaccatggctgaccgaagggaatggggccctggggaagcggacccacaagccatcctaattccagaaatccggaaggttttctttccccagaagaggaagatacaggggggggaaactgggaacggaactcccaggaaaagaaattccttccgttgggctatctggccggccttgtatggaaagaccaccaggtttttataaagggccatccagggccgggaaactttcaaaccgggggttattgggacagggaaaattttttcaaaaaagaggggtttgaaacctcccaaatggggggttgaaattcccaaatacgggggccctgggaagcttttataaatttggggtttagcggtaaggggaagaggccttttcccttagggggtccagggagggaaaaattttctt

SEQ ID NO: 486271 - DNA, 100 bp, Homo sapiens
gcgataaggtcgcggcatcttcaggccggtgcgggatgtcgccacgggcgtcttccgttgttggggatcactcacgagtctctgtctgctctgagctcag

SEQ ID NO: 486272 - DNA, 465 bp, Homo sapiens
acatgatctctaacagcctaagtgttgttccatgcatggttagctgctacacttcatctgcaccaggtcagtagcaccaagggtttcactatgcattatcttattttatcctcgccacagctggttccctgtggtgaaattagtttccatttcacaagcaagggagcgaggctgtgaggcacatggaagtgggacgaggagccggctctgatgcctgcagagaccatgggcggatggcctcacacttttttgcttgtcaaaattgccctgcagtggccagggccctgcccacctcactccctggctgcctctttgccccataggctctgaccagtggaagatggccgagaggaagctgttcaacaaaggcattgccatctacaagaaggatttcttcctggtgcagaagctggtgagctgggctctgtttcagggcaaatgagggccaggagctgcctgtgtgac

SEQ ID NO: 486273 - DNA, 383 bp, Homo sapiens
agctgccacctcatgtcacacatatctttctcaccgtttatttgcaatggagtctcgcgtctcttgcccagagctgaagtgcaagggcacgtcctcagctcagtgcaacctccgccatcttgggttcaagcaattctgctgcatcagcctcccgagtacctgggattacaggcatgtgccaccacgcccggctaattttgtatttttagtagagacggggttttgccatgtaggccaggctggtctcgaactcttgacttcagatgatccatctgccttggcctcccacagtgctgggattacaggcgtgagccaccatgcccggcctctttctcacctttacacctgtcttcttatcctcacatctgtattcacatttggcg

SEQ ID NO: 486274 - DNA, 153 bp, Homo sapiens
ctgaggtattctgcgataacgatcactctgactcgttcttcttccatcacatctcctacaaaatctcctgcctacctcttgcacttacaagcatccttgtgattacattgagcccagtcgaatcctccaggattaatctccccatttcacacg

SEQ ID NO: 486275 - DNA, 457 bp, Homo sapiens
ctttttcctatcacaggaagtttatacttatgtttgcctgttgcattagtacatcccagccacttattctgtccttggcatacttaattcctatagtggctgtcttatcagctctagtcgatgtctttctagagcaacaacaccaaaacagaaatgaatgtttcatcagcattatagacttgttctggcatcaggtcttcatcagcgataatcttggtatactcattaataaatttatctacagcctaatggtcagcagatgctttatccccataaatctttaaaaatgtaatgccatgacttttcttaaatttttgcaaccaatctgtttaatattcagagttctcttcaattttctagttcattgtaatagatctttgctaatgtcatgatccacacaccattaagtggcatgctttataaataaagcatatttatttttagctttattaaaaaa

SEQ ID NO: 486276 - DNA, 255 bp, Homo sapiens
  misc_feature (52)..(52): n is a, c, g, or t
gatgtcagtcaagacaggctggctttggcgtctaggaggcaaactgcacatnctgatatgctggtaaccaaagctgtcgtatacagagaaacagacccatccccagaggagagggacaagaagccacaggaatcctgacctctgtgaagagatcctggcatttactggtccaacaccaagccagagaaccattaagaaggggccttcattctgattctccgaggcaacactgacgtcccgaaacgaagaggggga

SEQ ID NO: 486277 - DNA, 268 bp, Homo sapiens
tctcttattgtttgttcggttatttttgacggcaggttctcacgtttgtcacccaggctggagggcagtggtgcaaaaaccacccactgaggcctcgacctctcgggctcaggtgttcctgtcactttagcctcccaagcagctgggactactggccatgccatcacacacagctaatttttgcgtattttttactaaagacagagtttagccatgttgcccagtgctggtcttgaactcctggacacaagtaatacctacatcagca

SEQ ID NO: 486278 - DNA, 337 bp, Homo sapiens
  misc_feature (128)..(128): n is a, c, g, or t
  misc_feature (291)..(291): n is a, c, g, or t
  misc_feature (329)..(329): n is a, c, g, or t
tatgtgctaaatctaatatccttgggctagcattcaaaactctccatgccattagtcctaacacagtatttctttttttttttggagatggagtctcgctctgtcacccaggctggagtgcagtggcngatactcgcctcactgcagcccctgcctcccgggttcaggcgattcttttgcctcagcctcccgagtggctgggactacgggcatgcgccaccatatccagctaagttttgtatttgtttttctttttttttttttagtagacagggagtttcgccatgttgncccaggctggtttcaatctcctgacctcaggtgatccngaggtcat

SEQ ID NO: 486279 - DNA, 127 bp, Homo sapiens
atgcagtaattgctgggttgatagtattggagggattaaggattttatcaggaaaaatagacccgctgcagaacaatttttttgaataaacaaccaaacccaggaaggaggcttcttgtgccttgct

SEQ ID NO: 486280 - DNA, 174 bp, Homo sapiens
taaaaatagataaagaaggagtcagatgagtgtagccatttaaaccaaggcagcacattggtaaattcctacaacttagtctcagcgatacccatggtattaagccaggtccaccaccaagtgtcagaaacggcacagattcctcccggtccagctgggtagggagagcactcc

SEQ ID NO: 486281 - DNA, 301 bp, Homo sapiens
ggcgcagtaaacgctcccttatactctagtctaagccagttacctctggtcctatacttagtgcgtatggagaatagctggtcgccaccctctctgtgccaacccttcatagtacgtgaaacccatgcaaggggtctgcccctcagtgtgtgtctgtcgccaggcacattaatcccagttcctttagttttccatcatagatcttttttcccaacccttaaatcatcttggtgattcctggaaaaaatagcagaaaatattctgattacttcatcagaaagtaagaccaacgtcaggaatg

SEQ ID NO: 486282 - DNA, 348 bp, Homo sapiens
agatctcggcttcccatcgatatgatcgtccctgctcggaaactctttaccacgatgtgagatattcaaactgactgctggaactagaagctctccaggatgccaccactgatgtaaaatcgcagcctcctcaaattacctctgtctaatttcacatgttagggtccaaggaagccctctgtcgcacacagatatgttttgaacccagttcattcagaaaccatggttggtggtcatcatcctacttgtattgtgaagaaccagaaattccaaattcagctcttcagtcatggtctttacatattatttcagaatgtgaaacttatgctgtgtgcccctccttttatg

SEQ ID NO: 486283 - DNA, 185 bp, Homo sapiens
  misc_feature (32)..(32): n is a, c, g, or t
  misc_feature (156)..(156): n is a, c, g, or t
  misc_feature (167)..(167): n is a, c, g, or t
gggagcttggcgcctgacccaggatctagaancactctgggcaggccgcgctccgccacgaaggtcccaacctctgggatagatcaggaagcgatggtagaccattttaccatttcgcgaggctggtacccctctccatcagggcgtttgagacgnaataacggttnaagatttgcccggtggcg

SEQ ID NO: 486284 - DNA, 440 bp, Homo sapiens
ctgtattcccagctactagggaggccaaggtaggagaatcgcttgaacctgggaggcggagttgcagtgagccaagatcgtgccactgcactcccagcctgggcaacagagcaagagtctgtctcaaaaagagataaaaaataaataaataaataaataaataaataaataaataaataaaagtacaccgtgtataggacacttaccatgaatagagattgcaggactggaaggtgctctcggtgagtcagtgggtgagtggtgagtggatgtgaaggcctaggacattactgtaaactactgtagactttataaacacctagactacattaagttcataacaatttttttcttcaaaaatgaattaactttaacttactataacatttttattttctgaacttaaatttttttttaacactttgacttgagtcatgtag

SEQ ID NO: 486285 - DNA, 801 bp, Homo sapiens
catgcaacttccggcacgaatcacggagttcaggagtctaagcggagatcgccaaatccagtaagtagatttgtagatgagattttcaggaattagaggagaatttctcggcctcccgcaccccatattgtaggaggagatccacctatgaggatgatcccggacatacgcattttgatcccccctaaggtcccggtttatcaactaaaatatgtgcctcctaataaattagggtccctcacaccggggctatttgtttggatatcctgaagatccatgggccagctgccatgactctcccgccccggtattattgtccattgccagccactattggccagctgcagagcccagatgatcccccggatgctgtagtagccaatccagtgacccaaccaaaatccccggaatgttccaaaccagaccagctcgactttgggcaccaagtgtattctggagccacccgtttctagtcccggataccccccaaaaatagaaacctatgtgctatgggctttgataggaaagccagtaatagtggcccttgtctttccaaaatcatgggatgtagagactgccaccagaattgcttctgagtaactgaggccatagagagctgctgatatagtccagccttgcctctttttgaggagcacccacatctgttatttttaggattctgcatagattttttttaaactggcatttttgcctaatgatgttatttaggcacccttggagactgaaaaaaaaaaatccctgctctgtaaataaagctaattaaacgtctgtgtaaattta

SEQ ID NO: 486286 - DNA, 276 bp, Homo sapiens
gcgtcgacaaatatttaaattaaaagtatgtactacccagtgcaccatctatctctggagtaaggtatattatttacctactgttgcataacaaattactctaaatttcagcagcttaaaacaagacacagtttctacagatcaggagttggggcacaatttggctgggtccccactagccagccccacctgactgagtctctcaccaggctgcaatcaagatgacagcaacagttatggtctcatctcaaagcttaactggagaaggagtcgacg

SEQ ID NO: 486287 - DNA, 1287 bp, Homo sapiens
acgacgctttctcagacacattctgttctggctgctgcgggcccacgtcggtaatgtgacacatggtcactagcttgtttcctagtgagatccttggtccattgactcagtgctgtggattctgcacgcaatcacaaaaactgccctgtggtggccaacccggagctgttcttgaaaccaagatcccaagattggaggttccttgcagtgtcatataaccttggggaatctaattccaaaccagggacgtaccaaaggcagaagcactcggaattattacaacactttaacgcccccctgacgcgctgtgggaacacagcgaagagagcaagagacggaccggagagcggacgtagcacccacgcagagcgacagggcggacagcagagagagagccgcgagcgcagagggccgagagagagggcagcgcgcagcgaagggggactaggccacgcacgaggcgcaagcgaccgagtccacagcgggagaggcgcagcgcaacgccgcgaggccacaagcagaagagagcggagagagaggcaggacgcaagcacacaacacacagggggaacgcagcgcgacgaagcgaatgcagaaacaaacaaacgagagagcgaacagaagagcaagaggacaacaagagaagacaagcacgagcagaacacaagacggaagaagagcagagagacaaagcgcgacgagcaggacagcaagcacgaaagcaggcgcgacgcaccaggacgcgaagacgagacgaaagcgacagaccagatcgagaccagagagagaacgcacgagcggagcataggaaaatcagagaagcgcaaggagacgaggaggagcaagagatgagaggaaacagaaagagaaacagcgcaggacaaagacagcgagcgcgagagaaagcaggacaacacagaggaagagaagagcggaagagcgagacgagacaacgcaagcggaacagggagaagaaagagacgacgggcaaccgcaaggagcgggagtgaaggacggacgagagaaggaacgcacgaacacgcgagagaggcagagaggcgagaagagaaggcgcgaacagcggaagaacgacaacgaagagagcaacagcgacgcagagcgagcggagagaacagaagccagaagaagacggaacgaagaggacgggagacagaagaggaaaaagggcagaaggaaaagacaaacagaggcgcagacacgaagcaagagagagagaggggagaggaggccagagagcgagatgcgaaggaaaagcgacagaggcgc

SEQ ID NO: 486288 - DNA, 717 bp, Homo sapiens
agtttcgccccaacagctaagtagggacatctgggcgtgtcctttgataatgtttcaatggtactgtagaagatgtgggatacctctgttgcagatcacgagcatcgttatgtaaacaagtctgcgcagctgaggtaagatacgtctaggatattgctgcatatctagctagagtcagcctttatgcagcattataggcagttgtctaggctgaaataagcaagactcagaaggaacaggaggcacataaggtagatgaagaggatgacaatcagcagttagatgtagaagatggccatgaatacgtgtatgatgatgatgaattagttggttctagcgcagctttttttttcttgtctataaagcatttcacccccctgcacacaactcactccttttcaagagtaagactgacatgtatgtttgcgccagattcgttttttcactgcacagtgtctttttttgtatagttcacacacggccgaatgtgtctttagatagccgtgtcctgcgtggtattttcaatagcctctaaccctgtctggtacagtatcggggttgtaaattggcatgggtatttagagcaggttcttgttggtgctcagcacgaattagttatatatgcggatggtagttttttcatcttcatgttgtctatgatgcagtcttatccgaaataattgttgttgtgttacctgaataccattcggttcttgc

SEQ ID NO: 486289 - DNA, 232 bp, Homo sapiens
agaaagatcccagaaataaaactctagccagtcagtaaattccccaggagacatggtacctcgttgttgtttttgttgttgtttgagacagtctcactgtcacccaggctgcagtgcagtagcgccatctcggctcactgcaacctccacctcccgaattcaagcgattctcctgcctcagcctcccaggttgctgggactacaggcatgtgccaccacacccagccaattt

SEQ ID NO: 486290 - DNA, 326 bp, Homo sapiens
  misc_feature (238)..(238): n is a, c, g, or t
caggcaacagctatgacgagggggaatgctggagattgtaatgggtatggagacatatcatataagtaacgctagggtgagtggtaggaagttttttcattaggaggtgtatgagtatggtcgtagacggaatcggggcgtatgcgtgttcagaattcataatgaacaggggaggttagacagtagggtcttgtgtggacaaaatatgtatgtgtagaagttcagagggagagtgcgnttatatagttggttcctagagaagattgtagtgtgtgagggtgtttattataataagtgtttggtgtgtcatagactgtttcctgggt

SEQ ID NO: 486291 - DNA, 1404 bp, Homo sapiens
tatttacgattaatcgttaatttattatcaaaatcatgaccaggggtgtagaacatcactggttgaacaaatatacagcacactgggggcttatcaacacatgagcaaagaatgcacattaacgacgtgccacggtcacacatctgggggtcatagaaggctcaagaaacaaagaactcacagaacaagaagcgtatacataaagcggaaccccgggcagagaggctcccgaaagtggcagaaactcactccaattctccagacagtggctcagccgcggagaatatctcacagaaagagaaacacccgagccaaagagtctcttcttcggagaggcgcgctctcagaagatccagacagagtcttatcctataacaacccttatatgggagaagctcccagcgcccccaaatataaacctctgtggagaaaccacgagttcccagtgttcttgggggtataaacacgcgggcttcttcacgcggggtggcacttcaaaacacccgctgtgggcccagtgcttcccctcgtggcttcttcacattccccaccaacacagcgaagaaaggggtagtgacccgaccgcgttaacttatttatcaggtacaagaaaagaacctctggaggagccagcgagggcaacagggggcccgcagaacaagcaaaagcatccatcgtgggggataagagtgccatataacgtggagtcacaaccaaaccgtggagccccgtggtttcccaagggtgcaccggggaggctttcccaaaaattccctaggaagaaaggcacgtgggtactcttaaagaaaaaggtcttgagccatagggtgtcacacgacgacaacatgtgggtttttcacgtgtggaattttcatttgttccctctcaatgcggcagatattattgttcacaatcttccccttctacaacgggagaggacaaatgccccatggtggggtggccccggaggacattccctccgaagggaaatgaaaacagcaggccaatttcccaaacccatcttcatcacagggggatcacacacggtgcgcgctgtgggcacactgagagatcccgggattggtgtccaccaagagtctccctggagaccagggccggaagaccgtacattgtgaaaaacgcgtggccgctgttcaaggggacgaacatgaggaaggggcacacgccagcagagatggctatacaagaaacgaggccacaaacaacccgaaaacgagacacgtgatgagcagcctgagtaaggacaacccggcaattgagcatgagagcacatgagatgagtcgtgcgtcacaaccagcgataataaatgaacagtgacaagccaggaacgtgtgtcctgcgctgacttcctctctcgcctgcttgcctagcaggaatagaga

SEQ ID NO: 486292 - DNA, 401 bp, Homo sapiens
  misc_feature (46)..(46): n is a, c, g, or t
  misc_feature (131)..(131): n is a, c, g, or t
ccccaataaattaaccggtggatcctgggcccaaggacttaaaaantggccctcccacattattcctgataccacacctgacccccatgactgtatctctctgatccacctgacattcaccccatttcccnaaatttccttattttctgttcctcaccctgatcacgcttgatttattgatggcggttccaccaggcctaatcgccacacaccaggaaaggcaggttatgctatagtacaagccactagcctgcctcatagaacctctcatttcctttccgtcgtggaaatctatcctcaaggaaataacttctcagtgttccatctgctattctactactcctcagggattattcaggccccctcccttccccaaaaagctcgaaatagggcaaggttcc

SEQ ID NO: 486293 - DNA, 710 bp, Homo sapiens
ggccaagaactcctggccaggactgcaaggctctgcgagccgatgcagctagcaaacccatctacgatagacatgtcatcaggactgtcctttagatagtcttcctcctctctgcagctgcgggaagagaggactggccaacgaagtttcaggtggggtcatgtgtgactgcagggtcaccgcaacaggtgtggctgtggcgttgaggacggaggtgggaagccggagcatgcagtggatgcattggcgagggactgtctcctggggtacccttcttggacatggcgcgggcatcgtcgggagcccatccgagatgtgtccaaggcatccccgtctaccactgtggtggtaggcaacacatgcagatagagcaggaagagcatgtgtagggcaggcagggtggcacagaggagcagccgctgtgctggggcgcccacggtccgagcagaccaagcactgtataccatgcgcagagtggacagtccacccatcaacaggcagaagaggtagaagagggcgtggaggtggctattataggtcgatgaacaggacaatgcaatgcccagagaggccatagcccagcagtgccaacatctgcagcatggtgatctgggcgttgcacaggtaggcaaggaagtaacatgcaggatgagactcccagccagtagtcgaagcaggtgccaatggctgtgccatcagcgtgccctcca

SEQ ID NO: 486294 - DNA, 942 bp, Homo sapiens
gcagtcgtgtctccgagttccggtggtctctgccaaggcgcgtccggatggtgatcccaaaaccgggacgcgacccggcaggtagcgtcgccggcgccgtacaggagctgatgcgagggggtgcgccgaactggggtgcgctgcggtgatgggctacagctaggagctgatgacccatcatgaggctctggatacttgaaggagatagcatcggcttctcctgtacactctacgacaagcttctgttgaaatggtgtagaggtagcattccactgataggcatgatgtgtatacagtcctatgaagtaccgtgagcgtgtaagctctcgcgtgatagttcccactgcggactagtccttacatactgaagcccaccagtggaaagttggctcacgtcgtctgctgtaaagcccaatggggcagacaccagggtaacatatgatcgtggacctcctgatggaatagagtggtctgccgctgtatgatgtcagggactgattctgatgctctatccagagcatttctagagagagaccaacgattgatacgttcctatgaacacatatgctgctgatgctcggggaaaaacccccaaagctgttcacggaagtacctgcagaagaagagctaactgcagaagccaggtcaccaggtcacgagtagacccgtgagtccatggctggtcgcaaggtctaggggctctgtggtacgtctcatttcgaacttctattggcttatgactggtcgtgtcctccttccgggactgtactgtaataggagctcgttgatgctctgagcgtggagaattggagacgaagaacggggctctgaaaatgacctgcctcgggttgggagccttgtttcttaaagtaaggtgcctttttgtcctgtttagacggaagaactgaagaaaagttgaggtccctattcaaattagctgtg

SEQ ID NO: 486295 - DNA, 227 bp, Homo sapiens
gcttaaaggctggtctttctatctctagtacttacactagaattcacccccactgaaaaagatagagtatagcctagcagtgtgaaccatgtgactttgtacacagcccaagatagttaagtgggatcgagacatgtaagcagcatcatggaggtttgaagatgccgcattgggctaggatgaattccaaatactgctggctggcttttataatatggatatgctta

SEQ ID NO: 486296 - DNA, 382 bp, Homo sapiens
ccagccactggccttagtttttaacttctgggcgactaaaaagtttggtcagtcatttcttacaagtcatttcaatcatttaattaatcctttcatactattaagataaattgctatctctgtccttacagccttaattaagcaaagactccagcaaaatctgggagacttccaattcctcccaaaacaaaaacttatcttgcaagctgtcaactgagttaaccagttacaaatgcttctgttatgtttatacattcttgcatgctctacatttataaagaatacatttgcagaaaattcattttcagtaaagtggttttaaagagggaaagttgatgctgtctttatagaaaataaaataaaataaaataaacttgtgtat

SEQ ID NO: 486297 - DNA, 172 bp, Homo sapiens
tctcattatggacttaatttccatttccctagtggctagagatatggaacatctttcctcacgtttatctatgtcagaggattgagggatttgggactgttcaaggaaaaagatgtgaccatgagaggtagtaactcaaaacactcggttgggctgtgtttggtcagggatt

SEQ ID NO: 486298 - DNA, 629 bp, Homo sapiens
tcttaaaataacatgatatttcattgttaggtctttattttattttaagctgaagtacccatgtggcttctttagtggatccccttgaacgtttggtggctttgattttctcttatttccacaaagaggggattcagaaatttcgtgacagcaaaaacaattatcccacataagggtggcatcaggtactcgtgtctcctcagaggccacttgtggggcagggggatggagtgaaactcctccattcagggcctggagtggtcacccacaaggcttgtggctttacagggctcaagtcccccttgagccattagttaccctcgtcagtaactacattgggatttggcctctatgacttctccagctcctcctcaggttcgtgtaccctcttgcaggtctcccactctgtgaattgtagcgagagctcatatgtgagtgggcagtgcgtgggattgtgacgcagtttataaaaacgctcacgtgctcagtgtctctaacgtgtggtcccgtggtttgggacaggactcccagaatttgtgttaaatccctttaaaggagattaaccagtaatttccagaaatatctccagggaaggccctgcattctacccaattttccaattgcagcta

SEQ ID NO: 486299 - DNA, 148 bp, Homo sapiens
tcggtacctcatcctatgttgtattaaaaattgctctaattatgccgggcgtggtggtgggcacgtataattccagctactcaggaggctgagacaggagaatcacttgaacctgggagacagaggctgcagcgagccgagatcctgc

SEQ ID NO: 486300 - DNA, 123 bp, Homo sapiens
agggccctgggcagcccctgggggaaaaattaaaaaacccaaaaggaagcagcccagggagaccccctttgtgatttgcatgggtgcccctgattttttggaaaaaaaaagtggaagccgcca

SEQ ID NO: 486301 - DNA, 552 bp, Homo sapiens
  misc_feature (204)..(204): n is a, c, g, or t
  misc_feature (210)..(210): n is a, c, g, or t
  misc_feature (245)..(245): n is a, c, g, or t
  misc_feature (259)..(259): n is a, c, g, or t
  misc_feature (321)..(321): n is a, c, g, or t
  misc_feature (354)..(354): n is a, c, g, or t
  misc_feature (385)..(385): n is a, c, g, or t
  misc_feature (398)..(398): n is a, c, g, or t
  misc_feature (400)..(400): n is a, c, g, or t
  misc_feature (434)..(434): n is a, c, g, or t
  misc_feature (436)..(436): n is a, c, g, or t
tcgacctcaatagggatcaaggactcgaacggccggtatgtcgcggcactgtgcatgaacctggacttgagtctgttccagagcatgcaaagcgcgatggggcaattcaccaacgtggtcaagaatggtgttacggaaaacctgacaccagcaatgtgacgccattcgccagcgtatcgacgagttcgccgcgcgtcaggctangacacnacgcgcactgaaggccgaagacaaacgtttgttcntcgcgagctgaagngcaccggttatctggaagtacgcaagtcaatggaggtcatcgcccagcatttgggcgtgtcncgcgcggctgcctatagctacgtgaaataaccntggccggtctcgtaccgacagtaggccaganagtttttgcccangngaggggctggttctcctcgaccggaataaaggtntngccatgcttaatcccgctatcctatgcaccaatagcagctccatccgccttctgcggggcactattctcatgtttgtatcgccggtggatttgtgattatttctggccaattacgt

SEQ ID NO: 486302 - DNA, 248 bp, Homo sapiens
aacattttgaaaaaggtttgttttcctaccgggggcccgggggggaaaaaacatccccacccaagggggtttacagccaaggccttagggggggggtcctgatatatccgaacaggggggatgaggccttccctttcacgctcctggggtggggaaccgagccccaattgggaagccctgctttaattcattcctgggggggggggttatcccccaaccttaggaccggggggttaaaaaatcttttg

SEQ ID NO: 486303 - DNA, 872 bp, Homo sapiens
attctagaggccgaaggcggccgagatgtgttttgttatgttatttgtcttctgggggtttacccaccgcacgagaggtggagatcgggtgtttgccaacgctcaccaagaagctactgtctggtagcgatcgagaggctcagagagcgttctacgggagacacgaagaaacttctggcagatgtgctcaaggtgaacgtcttcagacaagacagtggcgaccaggtgctaagtagagaagctactgtgtcttcagcaaatcagggagggctggtgcatcccaagacttcaattgaacgacccacggatgagctggtcctctcttctttcaagtcccccttggttggggggactgtgaacggaggcagtgaaggtgattgctgctgggatggtggtgaatgactggtgtgccttcttgtggcctggacaaaaagcagcaccagagctgtccagtggtggagagtgtcttcaagctgaatgaagcccagctagcaccattgccaccagatgcgggattccctcattgagagcctcatcgtgagtcgacttccaaagtgtccagtgggctccgtgctctggactgtgggccaacttttccaaagttctgaccagttgtgtccggatgtctggaggaaggtggcagaaagcctcactggaactgtgggtggtggcaccaagtcttttgtcacactgttgttttgcatggagtttatattactggcaaaactggttgtgtggtgagagagccttgtgttatggaggggtatgtgtattgagaccattaagagattcgggaagaaaaaagaaatatatgggtggaaatataaattgggcacgggaagaagttaatgaaagggagtgtaaacggggga

SEQ ID NO: 486304 - DNA, 474 bp, Homo sapiens
gtatcgggacgcatggcgtgccttccacgtctgcccctgagcatttgtttgtacagccctgtgctctgtgtgggcctgcaacagcttcttgaggttggctgctagggttccccattggagcctctccattccagtgttcctgggggcagatgagctcctatcctccactggcctgtcttgttggagaacacggtcgtggcttccactttgcgaggtcacctttcaggattcatgtgtatccactttgctgtgtcagaaactccctactgctgacctccctctcctctttgctgtcattaatggattctcattgtgggagataaacgtgtgctcagcctagaataccacatgatttttttttcttgactcattgcttttgcctgttagccttgttgttctaaagtagttcatttttctactctacttttcctttcccctcaatgacccccgtcccgaaactgagacagggtaccg

SEQ ID NO: 486305 - DNA, 280 bp, Homo sapiens
tgcaaaagttagaagatatggtgcacagataacccacattccactcacagcaacaactgactaggaacaaatagctcacacctacagtaggtaggcatctgagtttagcaattcctggacatactcaaagttatgatccatatcaggagctgaataacaggaatgaggaaggggcaagcacagacaaactaagaaaaacactagacattacagtctgcagacatcatccaagacattctgtaaaacagcttccttctcactcaggattagggcgtacggg

SEQ ID NO: 486306 - DNA, 862 bp, Homo sapiens
ctagttctagatcgcgacggccgccctttttgtcattaatagggggtaaagatttatctatttatgtttaacaaatatactggaaaatcatgcaaggctgccagaattggatgcaactccggggccaaaagtctgcacaccccttatgctactggtccggaaagtggcagaaaccttacatctcgccatgaatgggacacataggactaccggaataactctcaaagatcaacgaaacacgaccatcataagcatagcgggaatgaccacgagggagcaagcaagggacccggtggaggaacgcacctagagcacgaggaagcaccggagacggcacgaacaatctgaactagcgcggcccaatcaacccagtgtgcgacacagacgaacaccacacgagggggcgacagtccatgagcaccacgagccggaacccctagtaagatcccccctacaacggaagaaaggactagttacagcgggaaccagcgggagtccacggatgagtagccacaggaaccaaacgtgacatcaaaccggcctacattacccggaaaaagaaccccaaggtgaaaaataccgaggaaaatctagccgacgaccagcgaaagggcgaccccaacgccaaggactcattcacgcacagacaaaaattctggagaaacgaggtccggggagaaacgacaatagcacaaaaagtggcccgggccacgacgccagaagaggagcaaatcgcccaccagaaggaggggaccccaaaaggcgataacggctgggtgcaaccaccagccgaacaacatacaagacaaacgaagaaggtggagtccacaccaaactaagaacagaacgggcacgaataaac

SEQ ID NO: 486307 - DNA, 134 bp, Homo sapiens
ctctagcaggatctcgtatctctaacattatgtctggcggctagatttgaataccaggtaatgaatacattcagttatactagaccctacttatcgttgttttcctgttttagatcatgttaacttaaatattt

SEQ ID NO: 486308 - DNA, 335 bp, Homo sapiens
agagactctccatattttattaaatgcagcccccagagaagaggcgctatgattaaagaaagttatgttttttagacagggtggtggctttacaccaacggaaaagaaaaaccgatgaattagcttttgagcctcaatttctttttcttattcgcacgggaggccgcgatgcccttaaatgtgtaggtattagcccaaagctggttgagttgcggccaccaggtttttaccctcctcgtgaaaacaggtatccttatcggcaggcctggagcacttttctatagcttgtgtgttacgagctcagcaagtgcccattgtttcttgagtctggtctt

SEQ ID NO: 486309 - DNA, 990 bp, Homo sapiens
ggctgcggcaggccggtggggtcccgcaggtggctgggagcgcctggaggacgagtcaagccgccgccatcgaccaggacccgcgggcccaggagagcgctcggcagggcattcatggcgggctgaagagatgcaattggacatgtccctatgaaggccattggatgaccataaacctgcataaccatgcctgggggatgtggaacaaaagatggatacactgcacaaagaagggcgcgtaaccacccacgcttgacaaggctagagtagaaaaatcggaccaacttgacagcttatattgtcaatcaattcacaacaaaacaggctatgacgtcataaatacattacaaaggaggtaagacacacacactacatagcactcccccagacaagaggcagggacatatacatacacacattgaagtcgggctaattaacccaggggtagaatcgacgagcgtccggactttgaaagtagacagaaaacccaaccgattaccaccaaaacacaaaacgaatttagttaagtcaccaccatttacaaacagagaaattcaattccccacttaattaccaggccaaaggacaaggcacaacaggaaaacaggagtgaagtatcacataacagatcggaggaacataagttcccacgaaagaggaaagaggacacgaccagcacacgacacagaacatcggacagtgcggacctagtggaagagcgggcagggggtacagacctctgtgagcccacgattaaccaaacggaacaacaaggacaaacgaaccccatggcgccagttggggtagaacccacagacagaaatctctccaaggcaattcgagaagcacccaggcacacgggcgatacaataacagggaaagccagattggaagactgaaaccatagaattggaataaatccaagcaacatatataccgcccggataaacacacaaatggggaaaaaagtgaaaaagaaacataataaaa

SEQ ID NO: 486310 - DNA, 413 bp, Homo sapiens
caggacgctggaaaacagcaggcctcatcgatggtgtgttcagcgcggcatcccggtgatacaagtcttccatgttgaagaccaagggcatttctccatgcaatcgggcaacgtcaggacattgagcgagctgttgatcaagccgcaactggtgatccataagcgctaccacagtgctttggccggtacgccactggccgctcggttggtggaaatgggcgtcaccacgctgatcatcagcggcatccgcaccgagcaatgctgcgagaccacaacgcggcaggctgcggacagcggcttcaaggtggattttgtcagcgaggcgacgttgaccttcccgatgacccacgtgcgtagcggccgggtctatacgccggctgagattcgcgaacgcacggaggcgtccgtagcgg

SEQ ID NO: 486311 - DNA, 789 bp, Homo sapiens
tggggccgtaggggaatcggggggtatagctggtgccgaatccataaaaacggggaggttaaaagtagggtctgggggacaaaattattgtttgggtaaaagttcacggggggagaaagtggggtcctatctgttggtgtccccaaggagaaagattgtgtaggggagaagagggggggtggtctatatactaaaataagtggtggggtgtgatattcggcgctaatagaaagaaataggggcgagaaggggtgccttgcggggtgtattccgatggtatagaagcgccgtggagaacatagtgtcagcgggagctttcccccacaattcgagccagagtgtgtccgccagagggggcggtatctgcggggtggggggactaccctcgtgggacatcagagtgtgtggggaagacatataacgactcccaattattattcagtggggggaccccagaggggggtttcacggtgaaagtgcggacgaagagaggagtagttaatacttcccaggagaggggggtggtgtcctccagctgtggtgtcgcgtgtgtcgtgacaccaagaggggcggtgtgtggagaagaaaaagggtcgttatcaaaaagaggggccgaccgcaccaacacatataatctttacatgaggagatcaagaagtcgtcgttcgtgaggaacatgaaggtcgattcgagaaaaaaaggtggaagaggagggcggccaatagaagggagggggttggaggcaacaattctcaacaaaatgtaagatgagaagaaaaatgtgggttt

SEQ ID NO: 486312 - DNA, 144 bp, Homo sapiens
tgctgggattacaggtgcgagccaccaggcccaacccagaactcttttaatttagcaaaattgaaagtctacaccgctaaatagcaactcttcttttcccttctcccacatgccctaggaaactgcttatcaatttctatgaca

SEQ ID NO: 486313 - DNA, 1357 bp, Homo sapiens
  misc_feature (254)..(254): n is a, c, g, or t
  misc_feature (263)..(263): n is a, c, g, or t
  misc_feature (347)..(347): n is a, c, g, or t
  misc_feature (418)..(418): n is a, c, g, or t
  misc_feature (423)..(423): n is a, c, g, or t
ggcaatggagggagtgcggacccgtactacacatagtccttgcacataacatgtgacgcgcgccgcatttaccggcgtcctcgatcccgtgcgtccagctcacgaggctcgcggctcgacgggtcccgcctctgctcttgccgggacgcagcccccagcgttgcgcagtgtctggagagcagaacagcccacatcgggcacgcaccgtgagagacttgtgcgtacacgacgacagaatgtctgccatggccggngcagaaggnatgcgcccatccaaattgtgcagggcgctgtatttgcagtgcgaactgtcctgttgttgcctttgacgcaatcgcacagcgcgncattgtggccatatcttatctgtctgcatgtctaacctgtatgtgaatgtcttgtctgtggggcacaccgntacgntcgcgagggagggtggcgaggcacatgtgcccaggggcttgaggtcgacaaagatgctgggctggacgccttctaaggacattggagtcttcgcagtagtgactaaagctgacgcgcactccatggccgaggtccatgcatcggagctgttgtcccttgcgagcccctatgcgcgtatctgcagttagcactaatggaaaagtacacaattgaggagccattgggcacgtaaacctgccgaacattggaaggcgacaaggtggaggcgcagcagattatgcctcggtgcgaactcgccatcgggagtcggcctctacccatttggtatacggatccgttagggggagccctgtgtctttcatcgagactggaaggtcagaataccaggaaggttcgaagcaagtgaagtgctcatttgtatgggaatcctatcttatgaatttcgttgtcctcgtcaagacaagcataaggtaaagcttgagtggcgccattatcttacacgacacgagttgtgtcagtaaaccatggggcccacaaggcaattggcgccacccggccccaaggggttccccatttatccctcggaaaaattaggctcgaaaattcggctggcccgttgtcggctttttcctttacattcgctttaagcgagaataaaagaacctcccggaatggtcgctccgccaaggttggtttcgctaagaggagaccatgggggtcctttgggtggaggggtggccacagggcgtgtgcaaaaagacgactagggtgattggaagcgaaaaagtgaacatgtggggacaggcaagagaatttatatgacaattggtcataaagaattaacgtattctaggtgccagtgaaggaattctcaaaaggcgttaaataacaagcggacacacaagactgcaatagaacaaaattggacggcaac

SEQ ID NO: 486314 - DNA, 671 bp, Homo sapiens
  misc_feature (231)..(231): n is a, c, g, or t
ggttttactggatgataggacggcatgagttggattcttcaccaccattttccttgtactcttctctccatcccttcttagggcgttggcaggagtggactattatatctgcatagatgtaactgttcccagaggcacgatgccactacttgctctgcctttactaggtgcggacaaggagacgagggatagcctcactcagctcttctatcacgcattagagatgttcanactgtattccattccccatccatcttcagaatctgtgcctctggtagctctgactggcggggtggggatgcgtgaagctccagtggatgtgtgtgagaggacccaggagcatcgcgttgcatcggacggggcaaggccgtgatcgtcctctccactcgtatcgatctcgtcatgtgtcaggttccttattagatggctggagtcgaagagccagtgcgtgtcccggagtccctgtatcgcgtgtcctcttacccgggctgtccacacacgacgcagccctttattaggaatccttagagcggggtcagggaagtgtgggctcgatcgttgttccttgtgcggtccagccagtctcctcggagctctgtgctgctcccttgagtggccctggacccgatgggctagacatggtgtatccttgaatcgagagggctgggacc

SEQ ID NO: 486315 - DNA, 208 bp, Homo sapiens
ggctttgtcacacttgagcccaggagtttgaacagcctggcaacatggcgaaatcctgtctgtacaaaagtacaaaaattaactgggtatggtggcttgcttgtgtgatcccaggtactggggaggctgaagtgggaggatcacctgaacctgggaggtcatggttgcagcgagctgtgattgtgccactgcactctagccttttaca

SEQ ID NO: 486316 - DNA, 124 bp, Homo sapiens
ctcggtccttatgacggctgggacctggaccacctgtacgagaagatgctgctattataaatatagactctacttagtggttacggttgttattactatcatcaggtaaggctcttcataactg

SEQ ID NO: 486317 - DNA, 711 bp, Homo sapiens
ctgcatattgccccgctgtggagactgcgatcaactcggctcattgggctcatgaacactggctctgtgtcttagacactagagcactgcacagtatctaaccgacgaaaggcaagggaatcgggtgtgccgccaggttgcggctgggcattgcatcgtccggcatggtgcctcgggtgatctccgcggaccgagggccgcaatggtcaccttgacactctgtacaacatccatgagcagcgagcccggtctgagccgtcacgggaggctgatcggaggagactcagtggaatacagactcattaccgcaaacccttactgcgcaaggcacagagcctttgctgcgttgcaccggatcctcgactcccttgacatggaactgatccctgtcaaccctcggcattcgtagagcgacacgctttcactagtcaaaacgcaatcctgttgtatacccatcgggttgcatcgttccacgggaagatggtgaatcacctgttatcaacctatgtagagaaggaggaacttgggaagtgttacactaagggagttgaaagcaaaatttttaaagagcgtatatatgaatgagtaaaggtccagagacgtagatatgaatacggggtggagaaataaggaggcatgacaattacagagaagggtgtgaagagcaaaaggtaggaatacgtgaaatacgatatcaagaaatccaaatag

SEQ ID NO: 486318 - DNA, 160 bp, Homo sapiens
tagaccatgtaggttatttattccaatgaatgggatcatgaaggatggaaagagagtaggaattgattgtgtccaaaatggtgtgcagtggacaggtggaagcggacaccggaaggaggtttcggagaaccggacccaagggttgtgtgtgtgcgtgtgc

SEQ ID NO: 486319 - DNA, 360 bp, Homo sapiens
cacgaggccgtggtggcgccgggttccccaccggcatgaagtggtccttcgtgcctaaggacaatcccaagccgacctacctcgttgtcaacggcgacgagtctgagccgggcacgtgcaaggacatgccgctcatgatggtctccccgcacaccctcgtcgagggcgtcatcattgcctcctacgccatcatggccaagatggccttcatctacatccgcggtgaggtgctgcacgtcgtccgacgcgtgcagcaagccgtgcgggaggtctactcggctgggtacattggcaaaaacatcctcggttccgggtacgaccttgacgttgtcgtccatgccggagcaggcgcctacatct

SEQ ID NO: 486320 - DNA, 769 bp, Homo sapiens
tgtgggcttaagcacttgttgataatcagcagaacgtgtaaggatagggctcaagcctactccccaaacccgtcttaactcctaacatctggctcttcctctacagatgacctaacgtgctttcttttcagcctcctgtggctgtggccccttcttttgaaatctcccttgtttccgcaagcctcggaagttagaaagttctgactctccccttcagagaacagaagtgtgagagtagggctgtgatttatgtagatagcgttgggtggcatacgcgtggtctcaagagtgaccccagcggtgttggggcgcgtagcacttgtgaacagcgcgcgcgagggaaaaacactgtgatgtagggtgagtggtgagataggacagatctgcgggttttctcctttggaagcttcctttacatagtggcgtgtgacacgttgaaacttccacagcaccactccgtgggtgtctacggtgttgtagaagggtggttgacaagcgcgagcgccaatgtgcagcatggtgtgaagggaagagccgaggccatgtgttatagaagggcgccacgccattatatttcccaaacatgtgtggtgtcctccgagttcttctggtgaccccattgtctgacatgctcgtcttggacagacctggtgcgaatcacttctatggtggggcccaccatccccgaggagacctggacggactttgaggaaacatgagaaaggcgctcagttttgagcccaacgaggcggggttccatgtgatgtac

SEQ ID NO: 486321 - DNA, 653 bp, Homo sapiens
  misc_feature (407)..(407): n is a, c, g, or t
ttggaacaatgtaggtcagggaactctctcatttcactaacaaaggggtatgtgctgcttctttctgtgttcttcaagcagtctcagggccaccagaagtcccctctagatctcttcatgtggtattgaatgtcacaaaaaaggaaggagtagaagtaaatgggaaagcaagtcttagagcaaccatttggaaagattttaaaccttccaaaaaccaattaagttttacatttttttttctcagcaaaaattataccaacaagaaagaaagtgaacaaagggatggaacatataacttttttacaacagatttcattcaacggaaaaacttctagggagaaacaagatccaaaagaaaaaaagcagatggaccattaaatatatatatatagcctgaatatcagctntttattaagctgacttttgcctacagagctcttaaaaaatcttttcaaatctcttactatcagatttttaaaccaaaggtattttccaagtgactcagagccccaataagccttttatgacttaaccaaagactcatgaggcatcttctaagaggcacgcggtccttgcaacctcttaacaatctgcatttctggccagcaatattctctagcatgtcagctcttaagttgccatcagccacttgg

SEQ ID NO: 486322 - DNA, 204 bp, Homo sapiens
agcaaccggcactcaagtggaatcccgaaaaagtgatttaaaaatgatcttacctgtaccagaaaagcaaaattaaaggaaacaaaataagaaccatagtcccaaatgacatttaaccgtacatacagcgataacatgttcaaaatccaacaaataacgcaacttccagacgtaaatatccgccactcgattccctccccccct

SEQ ID NO: 486323 - DNA, 179 bp, Homo sapiens
tgcgggtgattctacgaggatcccctcctacgatgcgcagatgacggaaattaggccacacgagagttaagtgacttgctccaggttcaccaagattagtagagagtggaactgggattccatctcaagacgagtcaggttccagagcccatggtttttaaccagataagctctcatac

SEQ ID NO: 486324 - DNA, 673 bp, Homo sapiens
agagcatccccttttacgtctaccatcactggacttacagtgaatgcgaacacagacatcatttagtattttttttgatcatctctccattatcttcctattacaatgccaacagacaaatactggaatggggacatctatcccttcatttcctcctattcttgacccatactcattccgaacttctctgaaaccgccttgatcacgaattaactctaacaccatttccttggcttgttgaactttatatgggtctcctgtaatcctaagaggttagtcagcaccagtgttctgcggcccgtcttgaatcataaccattttaactccagcccgttcctgaagctgtttaatagtttctcccccttttccaatgactaatcctgccttgctagctggaatcatgatttcttgaactgcatttcccggtccatcgccatgatggaagccaggagctggtcttcctttttcaacaatctggtccagtaaccgttttgctgactggacagattcaggtgttccagttaacatacaggacctttctggaaggccaccactgtcaggagctatctgtattttgcatccagattcctgtcgtatgcgtgagatctgttcacctcctctgccaattttgaatcccaccattccatctggcactttgtattcttctgtcatt

SEQ ID NO: 486325 - DNA, 172 bp, Homo sapiens
caagactgggagtgtgttatacgggtcgaccacacgctgagagcttgcgttaatcgttcacagagcttgagagcgtgtcagtcggcggaggtcctcctccacggtcggactcctccatctcatcatccgctgagatcaggatctcagactcagactcctcgtgggatgcgga

SEQ ID NO: 486326 - DNA, 177 bp, Homo sapiens
gtgtactaatcaaataataatcaatcaatcagcatatacatttcagccaaagccatagaagaaaaagcaatagttgcttgaattatgatcatctaccaccaactcttgtcaagccctgtaaccaggtaagggaagagggtttaaccaggagggctttgactcttcctcggctataac

SEQ ID NO: 486327 - DNA, 279 bp, Homo sapiens
  misc_feature (132)..(132): n is a, c, g, or t
ggccccccgggccccaggtgttttgggttttggtccctttccccgcccccccgtttttttttccccccttgggggtccaaggggtttttccccggttttcccccctttccctcccccccccccggccttaantttttggccccgggccccaccaaaattgggggggggttcccccccccaaaaaatgggggggcatgttgggcctgcccccctgcccccccccccctttcccgggcaaaaagggccccgggttttaataagtaaataacttttttttta

SEQ ID NO: 486328 - DNA, 297 bp, Homo sapiens
atgcaaaaaacttagggggcctgctgggagtggctgtttttatgccccagccccccaagtttgggagtgtttgtgggggtccaaagccctcccccaacccggaaagaacccccccgaggggtttttttgttgggccctgtgtcccctgctcgggagtaaggctggttctggggtcctccctgcccggacccccctgggccttccgagtgctgtgtttttcctcagtctggctgtgggcaggaacggcctgcccagtgtcccccagggtgagtgccaaataaaaacggcgagtgtgga

SEQ ID NO: 486329 - DNA, 260 bp, Homo sapiens
  misc_feature (247)..(247): n is a, c, g, or t
  misc_feature (249)..(249): n is a, c, g, or t
  misc_feature (254)..(254): n is a, c, g, or t
  misc_feature (258)..(258): n is a, c, g, or t
tcccggctcaagtgattctctcacctcagcctcccaagtagctgggaatacaggcgtgtgctacccatgcccagctcatttttgtattttttgtagagatagggtttcactatgttacccaggctgttctcaaactcctgagctcaaagcgatctgcctgcctcagcctcccaaagtgctgggactataggcatgagccaccatgcctggcccataatatagtattctgacttgacaacttagcttntntttantaanaa

SEQ ID NO: 486330 - DNA, 739 bp, Homo sapiens
  misc_feature (157)..(157): n is a, c, g, or t
  misc_feature (217)..(217): n is a, c, g, or t
  misc_feature (222)..(222): n is a, c, g, or t
  misc_feature (239)..(239): n is a, c, g, or t
  misc_feature (249)..(249): n is a, c, g, or t
  misc_feature (251)..(251): n is a, c, g, or t
  misc_feature (254)..(254): n is a, c, g, or t
  misc_feature (268)..(268): n is a, c, g, or t
  misc_feature (275)..(275): n is a, c, g, or t
  misc_feature (298)..(298): n is a, c, g, or t
  misc_feature (309)..(310): n is a, c, g, or t
  misc_feature (312)..(312): n is a, c, g, or t
  misc_feature (325)..(325): n is a, c, g, or t
  misc_feature (344)..(344): n is a, c, g, or t
  misc_feature (358)..(358): n is a, c, g, or t
cggagcgggagcctggcgagctaaccctgagccagccggcgggcgtcccggaggcggtggctgcagtggatgtgggccctgacgctcgcactgtggccccggcggccgccatggcggacagcggcaccgcggggggcgcggcgttggcggccccggnccccgggccgggcagtggcggcccaggaccacgcgtctactttcagagcccccccggggncgcangagatggcccgggtggngcggacgatnanggnccagtgaggcgccnagggaangtcaccgtcaagtatgaccgcanggagctacggnngngcctcaacctaanggagtggatcctggagcanctcacgcgcctctncgactgccagggaagatggagatcccaaaactggagattgacgttggatgagctcctggacatggaggatgtgacgatgcccggggttgccagggttcaagggagctgctggatttgactgtaacaaaacccacagaggccttcatttctggcctgctggacaagatccggggcatgcagaagctgagcacaccccaagaagaagtgagggtccccgacccagggagaacggtggctcccacaggacaattcgctgcccccaaccttcgtagcaacagcataaccggggaccttcggccaggccttgtgcatgagcaggctctcgtgccttgccagggtctcttcctgccctaggttccactttgggtttatgtatcactg

SEQ ID NO: 486331 - DNA, 112 bp, Homo sapiens
  misc_feature (5)..(5): n is a, c, g, or t
  misc_feature (87)..(87): n is a, c, g, or t
tgtanttggctcatttatcattttttagaaaaaaaagaaaacaacagaaatgtgctgaatccttgtaactgttggccatggcactantttcatggaaggtggaagggcaggt

SEQ ID NO: 486332 - DNA, 1356 bp, Homo sapiens
gcgccctccccagccctgtccagcctctcgatctttgtcctaacctcagacggcgatgggcggggcaagacgctggtccttcaggcccgagttgatgggcacctcgggctcatcaccatgaagtcccctgcggccgaagggcggtggatttttagggtctctcccgcccacccctaatgccagtccccaccactgcgtactctgttgcggatcacaccatccaatacaaactttattggtaatggaagccagcttcaatctggtttcctgttagaaacttgaaagagtttaatttaccgatttatttttaacaaccctagaaacctattaaacccaatcacacagatttagcttttggttataacatggcctggcacagctttctgatattgtcggagtgtaaacataggtcttctttctccaaccagtgagaaagggattttttttttcttttctctttttttttttgagacgcagctttgctcttgttgcccaggctggagtgcaatggcgcgatctcggctcaccgcaacctccccctcccggttcaagcgattctcctacctcagcctcctgagtagctggaattacaggcatgcgccaccacgcccagctaattttgctatattttagtaaaaacggggtttctccatgttgtcaagctgatctccaatcccgacctcaggacaatctatgcaggaagaatgaatgggtgatgctggcatcttgaaaagttgaagctgatagactgaagaatgcggattacataccctgaggctgcagaggattttttctcaggcagccaagaagatggtggattgagactgagcatgcctaccacaagcagctgaccatcattcaaagcaagaagagggtactgctaaaggaaactggcaagaagcagctcctatggtacttacaagaacatcggtctaggcttcaagaggtccaaagagactattgagggcacctacattgacaaggaatgcctgttcactggtaacgtctccatctgagggcagatcctgtatggcatggtgaccaagatggagatgcagaggaccactgtcatccagagaaactatctccactacatccgcaagtacaattgcttcgagaagtaccacaagaacttgtccatgcacctgttcccctgcttcaggatgtccagatcagcgacattgtcacgttggataagtgccagtccctgaacaagacggtgtacttcaatgtgctcaaggtcaccaaggtcgcagacatcaagaagcaattccagaagttctgaggctgaatgtctgcctgctccccaaaatgaaataaagttattttctcattcatacacacaaaaaaaaaaaa

SEQ ID NO: 486333 - DNA, 1137 bp, Homo sapiens
cttctacaggaaccctgagacaggcctctgagggagatctgactgccattttcccaaaacagcgccccctgtcagctggaagcaactcgttcaaaacaagccatgactcctcagcaaaacagctccatcaagcgtctcgccaacctctcccttggggctcagtcaagggaatgaaaaaacgaggctagacacctgtccccaacggaaaaaccaagaacacacctggagagcagctcagacaaagggagccaggcggggaaaacagtaattggagaggagaccgtgcttccagtctgttgctggtttacaaggtaaatctattcctggacgaaaggggtacaggaacagcacccgaaaaccggcgacaggctgtggcaggcccgacgtctttcaagcccagctcctagcgtcgacgcccctccttccaagacgtttcccagcaggccctgcgcccagtttggatcaggacaatctatgcaggaagaatgaatgggtgatgctggcatcttgaaaagttgaagctgatagactgaagaatgcggattacataccctgaggctgcagaggattttttctcaggcagccaagaagatggtggattgagactgagcatgcctaccacaagcagctgaccatcattcaaagcaagaagagggtactgctaaaggaaactggcaagaagcagctcctatggtacttacaagaacatcggtctaggcttcaagaggtccaaagagactattgagggcacctacattgacaaggaatgcctgttcactggtaacgtctccatctgagggcagatcctgtatggcatggtgaccaagatggagatgcagaggaccactgtcatccagagaaactatctccactacatccgcaagtacaattgcttcgagaagtaccacaagaacttgtccatgcacctgttcccctgcttcaggatgtccagatcagcgacattgtcacgttggataagtgccagtccctgaacaagacggtgtacttcaatgtgctcaaggtcaccaaggtcgcagacatcaagaagcaattccagaagttctgaggctgaatgtctgcctgctccccaaaatgaaataaagttattttctcattcatacacacaaaaaaaaaaaa

SEQ ID NO: 486334 - DNA, 479 bp, Homo sapiens
ccaccccctagtcctgccattggctgctggacccccatgatggccggcggcatggccgtgcgcttcacagccctggacttgggctttggacgatgcagtgcatgtgtatgacgagccctgggccccctgagagctcccgactactgcgtagtctcaccacacttcagcaatggcaacggctgtcactgtggagacatctgtctaggaccaggcgtgtctgtgtccattaccacacacgttgcttgcgagcatatggtcgctggcttcaatgcgcacctaccatgtgcggggctattgcttgcctttgggaccagaccctgtgtgcttacggctctggtcctgcgtgagctggtggcgacagggcctaggtagagcgcttgctacagtgaggcacagcgcttgtgacggctcactgggacttttgctgagccggctaccagactgcaggatggactgctccaggctaggccaacttggac

SEQ ID NO: 486335 - DNA, 133 bp, Homo sapiens
cagagtgtacccattgagaatagagggaaatcagtagaatgaagcctacctatgatggcacatagaggctcctattgataggacatagtgaaaagagagctacaacgtagtaacagtgtcgtgtacgtacgat

SEQ ID NO: 486336 - DNA, 1783 bp, Homo sapiens
gtgtgtgggggggtgtgggtgtttggctgccgcgggcctgctagtgtgtgtgtgttgcagcctgtctcctgctgactagcttggtgtttctgcgttgtgtgtgtagaacttgttgtgttggcgtgtaggtgttaagttgatatgtatgatgggtgtgcgtgtgaggagtgtgtgctcggccattcgttgcgctcgccgtctggtacgtgggctgtcgttgggtgtggtgtgtgttcgccgctcgctgagtttgcctcgtctgtcgttgtgtgtgtgccagtcgtctgctctcttgcgtggctggggttggtgctccttcgccgtccgtgcatctgtgtttggtggggggtgcgtgtccgtgtgtttgtctcgtttgtttgtagtgctctccttcggtgcgcagtctgtgggtttgtgtggttgtacgttgcgagttgatcagttctaccgtcctctgtgtggtggtgattggttgttgtgtgtgttggtgtggactcgtcttttattctttgtctgctctgccgctggtgtgtgggtgtggtgttttcttctgttcttgcgtgtgttgcacagcgcgacacgactctagcgtgtttggagtggaggtgttcgtggccttcgtcgtgctgtgcgtcggtcgcagcagttgtgggcttcgttgtggggagggctcggcgcttcgtccgacgagcgttgtgctgttgtgagggtaggatcgcgcctagtgggttttggagtgcgacctctcgtgtgtgttggtggggtgtttcggtctgggggtcgtttggttggtttagtcctccctctcgtctgcgtggtgaggtgtgagtggtgtttgtcggcgtttctgtgtttgctcgcttcttggcgagggggatgtgggtctcctctcttctcacgtcgcccctcagcgctcgtctcggctctctcgcgtcgctgtgtggtgtgtcttcgctctcttagtcgactcggctagcgagtagggggggtggtgtgttagtggaggttgtggtagtgtttgtttgattatgattggtgattatgttagctgcctcacgacgcccttcgggggttatcctccctcttttgcgtgtcgcttcgctttgtgctttgcgctttgagttgtgtgtgatggcctctctcgccgctgctctgtcgatgtggggcgcgtggctgagagaggagtgcctgtctgtgtctctctctctgtcatatagtatggtgttgtgtagtgtgtgttggtgagagagggagtgggtattgttttggtgtgtgtattgctagtgttggggcctcctcgtgagtattagttgttgctctcctctcgtgggctgcgtctcctcgcggagcgcccgccgctcggtgatgatgctcccgtggtctcctcaccgtcggggggcggccgccgctgtgggttgggtggttgtgggttggtgtgtgttttgcgctcctcgctcgcgtctgttccgctctctgtggtgttggagagccacacgatatagaagatagaggtgtggatcatatctctcccctcggtttcctctctttctgttttctgatgcccctccggaggtggtagttgttgtgtggttttgtgtgttgttttagttgtttatgttgtgtgtgtgtgttgtgtgtgttgttgtgaatataataagagagagagcgcgcgacagagagagaaaaagaagaagaataaatataataaatataaagataaaaaataaaaaatatacttcgagcatccatatcgatcggggtctggagaagatatgaggcaccc

SEQ ID NO: 486337 - DNA, 119 bp, Homo sapiens
gcggccgcctactactactactgctcgattcaagcttctaacgatgtacggggacatgcaggtctacaaacatacggacttttggccaggggaccaagctggagatcaaacgaactgtg

SEQ ID NO: 486338 - DNA, 922 bp, Homo sapiens
  misc_feature (347)..(347): n is a, c, g, or t
gctcttgttgtcctctggtctggccccagtatggacagtaaggggaatctcgaatgtctctctgaacttaacagacaggagtctgggatttatgtacagacaaagagagaaaaccacagagtgtcctgtgtgttctctgtagacactcgttctgtgagctttcagtttccatgttctattgacatgacacgagtaatcgtgcgtatatccttgccgatggagggcaaaaacgtagaatgatgacgacagtgtctgatacagaccgacgtccgagtctagcgtcacttccgtggcgagctgtagcgagagaatgggctgagttaccaaggactcgagtccgtttcacnccggatggtcctttgcctcgaatgctaacgagtgcgctaggattgcgaatgcacatgtggcgacaagagagtctttgggttcgttgatgctgcgcagaggtacttccacacgattccctaatcaattcgacgtcataagctccccttgggacgcaacgactcttcagtgaacgggcttgcgattcgaccgccgagatcctagacaggaaggggagatcgatacgggagctacttgagtttacactcctttggggctcgcagcccaattgcttgtcgataaagacgtaaggcgtacatagagttgacgccatgtggccttggcagtttgacaatctcttgggaagagggaacatgtgggggactatttgcacgaggcaaaggaagagagcgtgatcactgcctccgatgggttggctttggccacttccccaaccatagctaactcattaggggagggcgtaaagcaagatctctggttttcgggtttccatgggtcaagataaatacccctggggtatggggggatgccactaataccttggcatttggctgaggttcaccttagagaagctggg

SEQ ID NO: 486339 - DNA, 749 bp, Homo sapiens
ttccaaaaaaagtaaaaaattttatgctaaaaaaaattcgcaatgaaacaatcagtagccctttgcttttgttaattgtcccagttcccttggtaagggtttaattttcccaagggtggtttttttccaaaataatggtgtaggtgtttaccccccaattctttctgtggctccacatttctgcaggtttcctttgttctcattcagttgtgctcataaccgtggtctcgtggagttttcgtgacgactctcctttgtttcaccaaatgtggcaccattttccgtgagcatttggcgtggcctcttcgcgtgtgagtctccactgtgtggctttcgtgctccctccaagagtctccatgtgtggccacgtgttgtgcatctccctatagggcttttttttcttgtctgtgcccccacgactcttttcttttccgacttgtgttgtgcacgttgcaatggtgccaaaaccttgcagagcagattcaataggccaataggcccaatgagggattgccaaagatgtgcattcacgccattttcgtggaattttggggggttgcttccctttatttgcgacacacgaaggttttgggtgtttgtggctctcccacccttttctttgaacttccccatgtgtgtggagttgtctcccattctggatgttccagaagctcctctgacagtgtggctttgtggtgaacccccccccagtgtggggggtgtgcggtatcgtggtgcttcatggggtc

SEQ ID NO: 486340 - DNA, 1047 bp, Homo sapiens
aaccttagccaacacatatacccaaataaagtataaggcgatagcacaattgcaaaccatggacgcacatcagatatcagtaccgcaagggaacagatgaaacaattatagccaagcataactatagcaaggcactaacccctataccttctgcatactgcaattaactagacaataactttgcaaggagagccaaagctaagacccccgaaaccagacgagctacctaagaacagctaaaagagcacacccgtactatgtagcaaaatagtgggaagataataggtagaggcgacaacactaccgagcctggtgcatagctggttgtccaagatagaatcttagtacaactttacaatttgcccacagaaccctctacatccccttgtaaatttaactgttagtccaaagaggaacagctctataggacactaggacacaaacctagtagagagagtaacaaaataaacacccatagtaggcctaaaagcagccaccaagataagaaagcgtcaagctcaaaacccactacctaacaaaatcccaaacaatataactgaactcctcaacacccaacaggaccaatctatcaaccgtatacggacagaactaaagtgagcaatcacagtacacatgaacacactacaccacagcactacagccatgacagaaaagagacaaacaaccgaacatgaccaatcacacaagaccaagtaacaacaatcacacaaacaaccaaaaatacacaacaaagacaacaccaacaccaggccatcaccataccgacacagcgcacccaaccgacaaccgcaaccagcaaaacataacaagacgaaaccacacaaaatacacatccaacaatacccaacaactcaacggaccgcactgaacaagacacactacaaacacaccacaaaagcgcaccacacaacagctcacaacgcacacaaagcaccaacattgtaaaaaagccacaaaacaaacaaacgcaaccgtacaacaaacccaaacgcaataaagcccaaacaaacacagaaaaacccccaa

SEQ ID NO: 486341 - DNA, 208 bp, Homo sapiens
ctccttcacacgtatccgccacaccacggaaatcggtgatactcccctagagttttccatcctggccacgctccctcccccgcattcacctgatcccgcgaaccaagccatgatttaccactcccccaagctccatccctcctgggcggatacacccagcagtctatactacgcacgcgtcctccaccttcgtgaaaatcccccgccc

SEQ ID NO: 486342 - DNA, 324 bp, Homo sapiens
atccccgggtatgtgtggtgttatggtcattggctcctagaacgacaacaccgctattttgcgttttcaaacccgcatcgtgcctttctgtgttgaacttatacccgttaattctacacgacataaacgttttggcgtatgtagttgggccactttctaagatttttagttatttatttctttcactttcatccgttaataggccaacctaagaatacaaatatattcatcattattgcattcttgaaatatcttacataaatttttgaatatcaatgaaaacttactttattcttgaaatatcttacataacaccacacaatt

SEQ ID NO: 486343 - DNA, 257 bp, Homo sapiens
  misc_feature (123)..(123): n is a, c, g, or t
  misc_feature (218)..(218): n is a, c, g, or t
gtgagatcaatgtccatgctctcctgatatgtctcctgtgtgcaagatgatacatcacaattcttcagacgaggtccaaagtcagagaagagtcttgcctcagatagagttcaagagtcaacntggctgtccatccataacacccaatggagtgtctcagtgggaagagccgtgtagggccctgttcatggtgctgatctcaacagcaataggctctngcacagacaccacgtaaaagcaagaggtgggggctgcct

SEQ ID NO: 486344 - DNA, 1598 bp, Homo sapiens
  misc_feature (260)..(260): n is a, c, g, or t
  misc_feature (295)..(295): n is a, c, g, or t
  misc_feature (477)..(477): n is a, c, g, or t
  misc_feature (923)..(923): n is a, c, g, or t
  misc_feature (1328)..(1328): n is a, c, g, or t
  misc_feature (1339)..(1339): n is a, c, g, or t
ccatgggaatttggtcgagtgcgcgtgagcgatacacagggatcggggccgcgagagggagagtggaggctacatggtacgcaaggcaaggtagtcagacagctacgttaccggtgggcgactcgtgagtaagagtagtgacgcgtagtgagttgacagcggagtaatgcctcggcttctaggcacactagatggcgacacaagaaacgctagctctgatggagacgcgcacacaaacaagcgacacttgtaccgaagcnccactttcctaggtgagaagtcccagaattagtgncacataggtgctgcacgctggcagcatgtgcatacaccacggataacgtgagctattaatgattgctggtgtgttcaagctatgctaggctagccggagtgtcatttacttcaagctacagtctggcaatggtatgagtgccgaatctgtcctctacgagtgcatcgggtactcgcatatcntttcttaggataatcaacattctgtcatacacgatcggcggggaacctggcatgcgcacgcggctcgaacctttgaggcatgcaagtggggaccgctccaagcgatactttgccacacatggtcaacaagggcccgagttgtggcatttacatcccagtagaggctctaatggagtgacgaggctggccccaattgcgtcacatggtagccgggtccacggaggaaatggcgcaccaatatcagcggacgaggaatcgttgccctggtcctggggtagagccccctgggcttcccaagacttttacctaaaacctttgtattggaacaccaaaatgggcgctttttagtagaatcgtgcttgcaggcggaaactttcgtcagcacgaggaggtgaagcatactagagtggcttgcttcacaccgcgtacccacgggaaccacgaantgtgtgccttccttcacttatgcgggggaaccacaaacgttgcgtttgggtggggggtccttccgttcacaaacttcggacttgttcaccgtcggcggggtggacggccaggctgcccccccctggggctttgtgtgggctccttggaattcttgtgtttggctctcagggccaacctgtctcgttggattgccttagggggtggttggttacccccacgtgcgggcttctgtttctcacggacgttattttgtccccccgccagtatccccattggatcccctttttgggggcgaacggttctcggggcggccgccaagagggagaggcgcacctccccacgtggggggtgtggggggcccccccaaaacgaatatgatgaggggctgtttcatgcctggggangacgctttttnttcttgccgtgttacaacacaaacagggtggggagtgcaaacgccgcttataataacgagaagcacactgtggttgataaccatgtcataggggcaacaccaccagacgattgttgtcacactaccctgtcctatacaccaaacaaaaccacgtgttgcagagctgctcgacaaacaaccagtccgtgtgctgggcgcccaacagagaacaacatgtgtgtggtaagaagcggcgaacggcccatacgtgcaaatgatc

SEQ ID NO: 486345 - DNA, 143 bp, Homo sapiens
caccccctttccgtgctctttctctcggtccagctcggccacgatgctgtccctccgactctcgtgggcttaggtagtcagcacacatgcgcacggcctggagctcaggggccgaggagggcttgccatgcgtggattgccag

SEQ ID NO: 486346 - DNA, 614 bp, Homo sapiens
tgcggtggctcacgcctgtaatcccagcacttgggaggccgaggcaggcggatcacgaggtcaggagatcgaggccatcctagctaacacagtgaaactccgtctctactaaaaatacaaaaaactagccgggcatggtggtgggctcctgtagttccagctactcgggaggctgaggcaggagaatcacttgaaccggggaggtggaggttgcagtgagccaagattgggctgttccgtctctccacccttcgctgtgtcccgttaatctcaatacaagaggaaattctgctcttccttcccaaaaacaaaaaaaaaaaaaacacaacaagaaacaacagtgtgtgggcggcgcgccggggcccccgggaggaggctttttaagaaagaccatttggtgtgggagggcgcgggggaccccgagaggatggagtagaaaaaggggcaaaaggggtgtgccaaagggaaagacagggggccagagaaaagggcgaggggaacctgcgcaaaataaaaacgcccgggggcaaacagggggtcatgaccaaattccaaggggcgccgagagcaaaaggggtccataaaagggagccaaaggagactaggaaagtcac

SEQ ID NO: 486347 - DNA, 158 bp, Homo sapiens
tgtatgggcccaatggtagagttctcaaatgttgagatagtgaccacaatccactcccttgagaaaagaatggcatgaacccgggaggtggagctctgcagtgagccgagatagcaccactgcactccagtctgggcgacagagtgagactctgccac

SEQ ID NO: 486348 - DNA, 765 bp, Homo sapiens
ccccaaaaagaaaaaaagttgacccccgcggggggcggccataaaaaaataaggcccccggggggaaagaattcggaaaaaaaaaaggcgggttaattatttttcttggagggccccctctttccaaaaaaaatttaagtttctttccggaaaaaccctattccaaataaccctttaggtcccatggaagaggggagaccaaaatttttttttaaatattggccacaagagagagtcttgtctaaaacaaaacccccaaccaacaaaaaagccccaaaataaaagggttggggggtgtttcacggagcagcaagagagagagttcactaaataatactggtgaaaagaaagagttgaaccctagagataagggtgagcaataccagctttaaccaaaacaggaaatgacctggggtgaagattgtttctttggccagacacagtggctcgcgcctgtgattccagcattttgggaggctgaagcatgaggactgcttgagcccaggagttcaagaccagcctgggcaacacagggagacctggtctctacaaaaaacgttttaaaaattagccggacatggtggcacacagctatggtctcagctattcagggctgagatgggaggatcatctgagctcaggagattgaggctacagtgaaccatgattgcccaattatactccagcctggacaacagagtgagaccctgtctaaaaaaaaaagattgtatctttacatctgtatattaaaacagagcacggcat

SEQ ID NO: 486349 - DNA, 295 bp, Homo sapiens
tgagactctgtctttaaaaaataaaagagtttgtagaacttataagtataatcattgaaattaaaaattcaaaataaacgggtgcaaaaagtcatgcctgtaatcctagcaatttgggaggccaaggcaggcaatcacttgaggtcaggagttcatgaccagcctggccaacatagtgaaaccccatctctactaaaaatacaaaaattagctggaaatcacttgaacccaggaggcggaggttgcagtgagccaagattgtgccactgcacaccagcctgggtgacagagtgag

SEQ ID NO: 486350 - DNA, 163 bp, Homo sapiens
  misc_feature (14)..(14): n is a, c, g, or t
ggtttttttttttncccccccccttttttttaggggggggggggggggtttccttttgggggggttgggccaaaaaaaatccctttcggggggggcgccagccattcccccccctttcctgcaaaggccctttcaagccaaaaaaggtttttggccctttcca

SEQ ID NO: 486351 - DNA, 869 bp, Homo sapiens
gcgcggtctctggcggagtcggggaatcggatcaagggcgagaggatccggcagggaaggagctttggggccggaggttggtccgcacatttacgtgcgcgaacgcgtgattggaccgggagctggtgacgatgtgcggtgccgcaggcccctgggtgctgcaacctggaacagttgttgaacccgagaccaatgcgaggcggaccctgaagtcggaccccgagtgaagaccactgctgccaggtgtgattgtacagcgtttgatgaaggcggacacggatggtgcgaaggtgcaatttcctagtagtgggtagccattatacatgactggtcgtctgcctccctcttggaccacagtggacggagaagggtgttttgccgcgcaaaaaacgacctctagaaaacagccatgggtaactgactgcacgccatttgtgggaagctcgtactcatgccagggcaatctgtcctgaatggcatgcgataagtcatcgtggcattgaacccggagaggagggtccttggccaggcaattgcccagaatttcgaagaagggggacttgaggttgcttgcgcaggtgtacaccttattcgaaaattgtaaggggcaccctgaaccccttggcgaggattggctttgtccttgatgcgcaccacagggggaggattgctggagctggacattactagcgaaggggttacagaaaccccaaggggacatggaagccaaggcaataggcccttagattcctggaagcgcattacgatgtgcatccgggggggcttattctagaggtggttcccaaaccaaggttgattctgacgcttgaacccttttttgaaccgcaaacgcagtttgaaccccgaag

SEQ ID NO: 486352 - DNA, 824 bp, Homo sapiens
caggcggggggacaggcggggggacagccgggtggtgagttgcacacagctgcagccccgactagctgtccccagactattaggctcacaagagccgccagccctcctcatgaacgtcacgtctcgcgcacttgtctccggaaatgcagactgatgacgaacatgtgttggaactgacgtgtccctacagtggcgcttagccgccgggagcgctttcactactatactcaaacgcactgccggtgagcgcgaatcgctcccagtgaccgcgacgaatctcgtcaccattgctcccctgtgcggcactctgacagtagcgcttatctctaagagaaagtagtcctcagttactatagccaagatgaggccagatcacgtaaatgatacagtgtcgagcaggaaagatacgacggacacagtcagcagtttcgccctccagcctctgaaagcgagttagaacaccatttactacttctggcggttcgttcggacctaggaatagacggactgctcacttccatctcgattcaccatggccgcccatatactacgacactgaggcaagtgtctccgaagctgcgccacctaggcgaacgcgtcacacctttctacaatttccttcatctattgtacgacaccacataccactggtgccactggcccactaaattcgagcacgcagataaaaaggaactacagcaataggttgggaccgcccagaactgcgacagcgacaaagtatcaccaccactcgcgacttaagaccaccccaggcatacacgatagcaacgtgcacaccttctctcacgtacaagggcacccta

SEQ ID NO: 486353 - DNA, 330 bp, Homo sapiens
  misc_feature (30)..(30): n is a, c, g, or t
  misc_feature (119)..(119): n is a, c, g, or t
  misc_feature (137)..(137): n is a, c, g, or t
  misc_feature (170)..(170): n is a, c, g, or t
  misc_feature (275)..(275): n is a, c, g, or t
  misc_feature (304)..(304): n is a, c, g, or t
  misc_feature (306)..(306): n is a, c, g, or t
ggcacgagctttagatggtgcaagccccangctttgtggtgttgagcttccatgtggtgttgagcctgcaggtgcacagaagtcaagatttgaggttttggaacctccacctagatttnagaagatgtatggaaatncctggttgcccaggcagaaatttgctgcaaggntggggctctcatggagaacctctgctagggcagtgcagaagggaaatttggggtcggttcccccacacagagtccctactggggcactgtcctccagacccagantggtagatccactgacagcttgcactgtntncctggaaaaagccacagacaatca

SEQ ID NO: 486354 - DNA, 116 bp, Homo sapiens
agatctagagcatcccctctgagtgttcaggcactcagaatggtccagcgttagacataccgacgtaggctatcctacaatagagcctctaacaaaactaggctagtcccgaaccc

SEQ ID NO: 486355 - DNA, 275 bp, Homo sapiens
cctggctatgtcgccgaagcgggcctggagctccagctacttagtcaggctgaggctcctcagactgctggagtgcaggagttctgggctgtagcgcgctatgccgatcggctgtccgcactaagttcggcatcaatatgatgacctactgtgagcgcgggaccaccaggttgcctaaggaggggagaaccggtccagcttgagcacggaacagggcaaaactcacgtgctgatcagtagatgcatcgcgcctgtgaatagccactgcactccag

SEQ ID NO: 486356 - DNA, 166 bp, Homo sapiens
cgatctagaggatcaccgtatgtctgacccaccgtgcttagtttgtactccctgaaatactctagctgctccacctgggcagtgagtttctgcctctcttcctggaaccgtgcctctcctccaggaccttgagcttggcactattcaaggtgggtcagaacataag

SEQ ID NO: 486357 - DNA, 119 bp, Homo sapiens
tttggggatggtagacagaggtgtaatcgagctttatgcccatgttgccgcacaaagttttcacttcatcggctgtgaagtttgagccattatcagtgatgatgatgtgggggacgccg

SEQ ID NO: 486358 - DNA, 206 bp, Homo sapiens
  misc_feature (7)..(7): n is a, c, g, or t
aacatgncaccaaacagcaccgcatgcgacagggaactattctgcgaaaagaagagtcatgtatgcaggaaacttctttcttgttttatttaagaaattgccacagcaccctagccttcagcaaccaacactctgaccgtgcagcacccacccacactaaggacccccacgagccaaagggttacaactccccgaaggctcagatg

SEQ ID NO: 486359 - DNA, 226 bp, Homo sapiens
ctagccgctgctggctgtagcatggatccactatgtaccaccgccgggacaaggaccagaaggagccagccaatgatatcaaggaggatgccattgctccccggaacctgccctggcccaagagctcagacacaatctccaagaattgggacccctttacctctgtacacctccggaagagccctcgcggccaccccattggccccttccaggccctgggtgcatt

SEQ ID NO: 486360 - DNA, 163 bp, Homo sapiens
ctgtccactaacaagcttcacacgcaacacagggtagtcggtttgacttttgtcatgaggagaacttgcccagccctcatcattccccttaaacccaggacagcgtgtgtgtgcgtatctgagtctcacatcctgttgactcacacggcttttgctgatgaca

SEQ ID NO: 486361 - DNA, 242 bp, Homo sapiens
gaggtgaggagaagaatctctgggcccggaaggcggaggtcgcagtgagctgggatcgtgccactgcactccagcctgaggtgacaggagttaagcccgtgtctcatgaaaaaaataaaaacaaaaacccaaatagtacttaacgtttcatttacttagggtagtgagaaatgactgggtactcaaaataatacattgcaagattaatgggggtacaatgagagtcccacctgtattcatgg

SEQ ID NO: 486362 - DNA, 121 bp, Homo sapiens
ggtagaaactaaaccaatgaaaaccttaaaccagtgaaaagtcaaaaaaaacaaaaaaaggttttccggtattatttataaatatttccagaacattaagttccagggtcctgggttcaac

SEQ ID NO: 486363 - DNA, 127 bp, Homo sapiens
taactgcttcagtgtgatggctacatcaagatctatgatgtacaacatgccattttggctggcacgctgagcggccatgcctcctgggtgctgaacgttgcattctgtcctgatttccaccttgcca

SEQ ID NO: 486364 - DNA, 152 bp, Homo sapiens
ctaccttcatccagatctagctgggagctgaagctcactctggcttcgtgcttacttccaggcctgctcttctctctgggatgcgggacaggcagcaccaacacagacacaggcccagacttggaaagatgtaacacccaccatccccatca

SEQ ID NO: 486365 - DNA, 493 bp, Homo sapiens
  misc_feature (14)..(14): n is a, c, g, or t
  misc_feature (63)..(63): n is a, c, g, or t
  misc_feature (80)..(80): n is a, c, g, or t
  misc_feature (124)..(124): n is a, c, g, or t
  misc_feature (144)..(144): n is a, c, g, or t
  misc_feature (190)..(190): n is a, c, g, or t
  misc_feature (446)..(446): n is a, c, g, or t
  misc_feature (472)..(472): n is a, c, g, or t
  misc_feature (487)..(487): n is a, c, g, or t
gcgactctgctgcncctgtcctccgtcggctctgcgggctcccgggcctacagcggcctgcgnagacaatgccctccggntaggagcgacggcgccggcccgctatactcgcaccaacttcccnacctccccgctgcagaaagngcctgttggccgccggtccgccgaatggcgctcctataaccctacngccacgattcctggatccacctaaacgcactgaatctgaatctgaatctgcagtggagggagaaatgggcgtgaaaccgaaagtctgtctttaaactacttgggagaatctgtcatgcagccatattgagaacatctagactaaatagatgattcataagtaccgatcagtttataatatcctactagaaagtcaactccgaggtcgaggaccatgtctgcctcgttccactgcatctgagccttctggatagtgnctggcaatagtaaatgctcaataatngtttgctggatgtgnactgga

SEQ ID NO: 486366 - DNA, 110 bp, Homo sapiens
gaatgtacagtttgaagatatttggcagaagctccacaatgcagccaacgcgaaccagaaagaaaagtatgaggctgacctaaagaaggagattaagaagctacaacggc

SEQ ID NO: 486367 - DNA, 258 bp, Homo sapiens
  misc_feature (132)..(132): n is a, c, g, or t
gtaggtaacactatcagctgatttttctatatagatggaaaaaaaaaatcagccaagtaagggcacatctacagttcattatagaagtaagcatacaaggtacaaagaattctctgtttggacttgacatcnaatcccatacctctgtatactacgcctaaatctacttctcacaagagagtatagttctttcctatccagtagaaaatattactaccattaaagtccaacttagggtacactaatactgaaaaacct

SEQ ID NO: 486368 - DNA, 254 bp, Homo sapiens
tgtggagcgggggtctcagcaataaaagagtgaagtctgggagccgggcgcggtggctcacacctgtaattccagcacttggggaggccgaggcgggcagatcatgaggtcaggagatcgagaccatccgggctaacacggtgagaccccatctctactaaaaatacaaaaacttagtcgggcgtgggggggggcgcttgtagtcccagctactcgggaggctgaggcaggacaagggcatgaaccggggagga

SEQ ID NO: 486369 - DNA, 161 bp, Homo sapiens
ggagatcgaggcgggcagcgtgctggagccactgtggcacacggcccgggttcggcgtgcaccggggagagctcagcgggactcactgaccttcccagtgaagcagcctgtgagggtttcatgcgggctgagaagaagaaccatgcagaactgcgcctaat

SEQ ID NO: 486370 - DNA, 1302 bp, Homo sapiens
ggcaagttataggagcaaagctactaaagaaagagataaactttgaaacaagaagaaatgaagtcactggcttttgacaaacggctaaattaaacaacgacgacacaaacgcagatagccctacgacagcgacagacacacacacacgacaacaagaacgactaacagacgacacaacacgacgggaacgaacttgacacaacaacactggttgacagacacgacgacgacctaaacgaaaacaaccgacacgacaccaaacgacgacggcttaacacgctacgacaacgacgacacacaccggacacacgacgacgacacgttaaccgtgacacgacacacacgcgacaaaggtaactgtgggacactaccttaaacaaccacgttggacgtaacacccttagcgaacgatcatggaactgtgactgacgcttaaaggacacttaccagaaaccaagcacccagtgacaaacgtagaactaccatccgtgaacatcttttgggtagatgctcttgcatggtattacggacgttcccttaatagcattatggaggaaactttttagatacttcacagatgcagtattcctgcatggacagaaacccgtagcaagatattagcaggcaagctacttgtaaggcaaagtgacaagtgaagggcccactagtgtgaattgcttaaaatcattccttgactagcaatctatccagtgcaatcgctgcacgaagaagcaggaagtagacccaaagagcaagtaacgtgatgctgacaccaaaagatttaacagaggctttggcctgacgatgccagatcccaaaaaaattcttggacagattgcaagcatggaatcattggacagctgaatggacacaggtacaaccaggtctgcagttggcaacacgatggatctggaatgctggcacccttcagaaaatcttcagaaatggacattttaaagctccagatgcgcagataacaacgagcaagtcccacgccgaacactcacaacacagaagacatgaagcacaaccgaatgagagtcggacaatgggggccatagcagaggacaaacccagcgtaggcagagaaactgggactaaacccaacgggatagactaaaacagggagagcaaaagagacaccgacaaccgtatggaacacagcgacctgtaccacggagaatgacacaaaacgtagaacaaaacgacacgcgcaagtaaactaacaactcacaggcacagaacctacacagacagacagcaacacaaaaacacgtcgcagagaaataccatacagagtgc

SEQ ID NO: 486371 - DNA, 150 bp, Homo sapiens
agcacctgttctcaccggcgcctatcagcaaagccattcccaaggctatggctacatgaccccagcccagtgcgagatccatgagatcaatcacagcattcaaccaatcatacggtgcgtaccgaggcatcgtgcgacttacaggtgacg

SEQ ID NO: 486372 - DNA, 239 bp, Homo sapiens
tttttttttttaaaggaaacaagctctcaaatcataaagtgaaataaaaacggcatatgccctcaaagctgtgaattcaggtcccaggtgttgtcgcaaaggagtgagtgaaactccccccctccccccttttttatataataaaagtgccctagcatgtgttgcagccgtcccccatacagtaaggtggttttcaaatgttttcccctgagcctcccaataaaaagacccatgtgcta

SEQ ID NO: 486373 - DNA, 112 bp, Homo sapiens
cgatcccttaaatcgacggtttctcctcacccttcaatttttttaaaagtatttctgagaaagaaagtacatttcctgccaggtacggtggctcacacctgtaatcccagca

SEQ ID NO: 486374 - DNA, 586 bp, Homo sapiens
actcatgtaaagctcattgtaatagatgtagtttttctaatctacatttttattgactgtcatctatcaaaatattgacttaaatcctgtaactatttgatttcaagctttaaattgatctggtattccttgcggggctccagttgcatctaaatagatgtgagagttgaaagacctataaggagcttctctcgctttatgatgtcttattttttttttttcctctggttgatgaaatgccagggtaaaagggatagccaaatggactaaagcacaagtgccactctagttattcagcagagtgcccagtaaaggtccaccacaataccaccatacatccactcggggatgaacagaggctgactgattgataagctcttgaaaattcttaagctcactgcatcccttcaggtctccaaggaatgctaaatctcctccctgccatgagagacaagaagtgaacttagtgttgggagacataagttggatggcccttcggggctgacccccaagggacttaggattttgccagaaagaagcttgccatgactttttcacttcaggctgtagaaacctggaaaaaaac

SEQ ID NO: 486375 - DNA, 195 bp, Homo sapiens
acgcatctcgcgcagagcgtgatggaccggcggccggacggtggcgcccggcgagtcggtgccaggttcggtcagggtgccgcggttggcgcggatctcgtcggggctctgcgcgtcgacgtaggcgtggccggcctcgaccagcgcctcggcgaactcatacatatagccgaagtagtcgctggcgaaatacag

SEQ ID NO: 486376 - DNA, 178 bp, Homo sapiens
acgtctgacagagcgagactccatctcaaaaacaaaaaaaatagttaccattagaataattctaaattagattcaatcaccatataatttatatattataccaaatataatgttatatttagttcaaaataattgggtttaaattaacatttttactttataaacaataaccttttta

SEQ ID NO: 486377 - DNA, 977 bp, Homo sapiens
gccggttgggcgtgtgagaggttactcgctctagggagattcttcaagcaatcactatgtcaacagacacaggtgtttcccttccttcatatgagcgcaagactcagggcatcaacaactcattcgaaaagctaaagaggcaccattcgtacccgtgggcaatagcgggctttggcagcaatggtggcatatggcactcatataacactgaacgagcaggggaacatactacccatgtccattcatctgatccacatgcgtgtgcgcagcccaaggcttcgcccgctaggagcaattgacctgtcgggtatggcgctattccagtgtactcggcgacattctggggcaaacacctaatgcccttagacagcacgagcatgctgtcctggggcctctgctcgggacggagcctgggctatcaagctctcacaatgctcctaactcacttcaccgctttaccgtacttcactgggcagggcgccacctcaccccctacactacggcactgccgcgcctcaacagacctgcggctcacccattgggcccattcccggacataattggggcccttcccttttcccttgggcagggcctccgaccccaggcctatgggctgaacccggaacttacctaacgctggacctaagctctaactaaaccctaagggtcatttccagggcaacgctcaaacggttaagcctttagaaccatgtgtcacccctacaatggccccctctgaatcggctggttggcaaactggtcccaaccctttcttttcaacactttcttaaggaatgacacctttaagttccctaacagggaaaggcacctacccaggggcccaaatttcctgacaacgggttcttccccgcggattgggctgacagagacatgtgttccgcaatccattctcgggactgcgttcggcatatacgaaacccctatattgggcccccacattataatccacagctatt

SEQ ID NO: 486378 - DNA, 148 bp, Homo sapiens
accatctggattccttgggatggctctggggctgagcgtctgagtgcttgctctgaattctctcctggggactctggcgcctgtgtctcctggacaggcatgctgtcacttggctccttctctctgcagctgttgtaggggatgctgt

SEQ ID NO: 486379 - DNA, 426 bp, Homo sapiens
gtctacagtatctgtttccttagtgccttcatctcctttacttctctatgatgatggtatataaagtccaattcttacagccttatctctcactagtctgtctttatgacttaacttgccccactacttaacgtacggcagagaaaaagctgttcttccctgacatcatcaactactaaattttctactttaagaaatgcgcacgtaggctgcgtgcagtggcttacgcctgtaatcccagcacttagggaggccgaggcaggcagatcacaaggtcaggagatcgagaccatcctggctaacacggtgaaagcccatctctactacaaatacaaaaaaattagctgagagtggaggtaagtgactgttaatcccagctacctgggtggcagaggcacaagaacccgggcaaagggcaccgcacaa

SEQ ID NO: 486380 - DNA, 244 bp, Homo sapiens
gttttctaactatattgtttactgtttctataaataaaaggacttatgacattgaattccagtgatagctaccaggatttccctttgaaatgctaaaatgtgcattataaagggagtaatttttaatctcttattttaaaactcgcggaaataaatttgatatattaatgaaaagtaaatgggtttgacacactctctgttcctgggcacagctcccaccatctctgtgtacctatgaataggg

SEQ ID NO: 486381 - DNA, 778 bp, Homo sapiens
  misc_feature (626)..(626): n is a, c, g, or t
  misc_feature (629)..(629): n is a, c, g, or t
  misc_feature (639)..(639): n is a, c, g, or t
  misc_feature (642)..(642): n is a, c, g, or t
  misc_feature (654)..(655): n is a, c, g, or t
tccggggaattcctgtggggttcacaagtttctatagccacgccgtggccccgtggggtggagtaggccccgcggcttgttggcccagcgatgtgccggcaagtgtgtgcgcgcgccactcggttggtggggcacccacgtgtgtccctcttttacttccggggggctctactgcatgcgaggaatcttctgtgtgaccccacggagggggtgggggacttccacgtgggtcccaggagtttcacggcgcgcttgcacactgtcacggcgctcccgcgggaaaggcggggaaaccccgtgttccgagaagaagaaagaaagagcgagtagacccaaaatatagaggaccaaggaaaaggcccggcggcaagtggcgtcaactcttgtaaatccccgcactttgggagggccgaaggcacggaggagtcaatgaggtcagggaagttcgagaccaagcctggcccaaacagtgggcagagatgtgtttaagtgctgtggccagaagcggggggaggggggggtttggtggaaattttttgttatgatgtctgtgtggaaagcggctgtgcagacattcaattgttattattatgtcctacaagcattaattaattaacacactttantangtatgttcgnctntaatattggacnnaggggcgattaattataggatgaggcaggaatccaagacagattctgcgacatagggtgtccgggtccagcgtttcgcaatggtattgcgtgcataccccccagacgtaaatacccaatgcca

SEQ ID NO: 486382 - DNA, 406 bp, Homo sapiens
  misc_feature (254)..(254): n is a, c, g, or t
  misc_feature (257)..(257): n is a, c, g, or t
  misc_feature (267)..(267): n is a, c, g, or t
  misc_feature (270)..(270): n is a, c, g, or t
  misc_feature (282)..(283): n is a, c, g, or t
tttgatttaaattgtaaaaaaaaaaaaaaaaagggcggccgctcgcgatctaaaactacggacgcgtgggtggtgttagggttctttgtttttggggtttggcagagatgtgtttaagtgctgtggccagaagcggggggaggggggggtttggtggaaattttttgttatgatgtctgtgtggaaagcggctgtgcagacattcaattgttattattatgtcctacaagcattaattaattaacacactttantangtatgttcgnctntaatattggacnnaggggcgattaattataggatgaggcaggaatccaagacagattctgcgacatagggtgtccgggtccagcgtttcgcaatggtattgcgtgcataccccccagacgtaaatacccaatgcca

SEQ ID NO: 486383 - DNA, 521 bp, Homo sapiens
tttgatttaaattgtaaaaaaaaaaaaaaaaagggcggccgctcgcgatctaaaactacggacgcgtgggtggtgttagggttctttgtttttggggtttggcagagatgtgtttaagtgctgtggccagaagcggggggaggggggggtttggtggaaattttttgttatgatgtctgtgtggaaagcggctgtgcagacattcaattgttattattatgtcctacaagcataaaaaaaaaaaaaaaaaaaaaaaaaaaaaaaaaaaaaaaaaaaaaaaaaaaaaaaaagggggggggggggaaaaaactacccgcgaggcgcgcgcaagttaagcgctacaccaccgtcttgtgggaaaacgggggggccccaaaaggggagggccgactaaaataaacaacgaagcagcgcggcgcgcgcggtataacacaacggcgccggtcggagaacaactgacaagagcgggatccctggaggagagagaccccacacgtggcggggccggggccaacacctat

SEQ ID NO: 486384 - DNA, 501 bp, Homo sapiens
tttgatttaaattgtaaaaaaaaaaaaaaaaagggcggccgctcgcgatctaaaactacggacgcgtgggtggtgttagggttctttgtttttggggtttggcagagatgtgtttaagtgctgtggccagaagcggggggaggggggggtttggtggaaattttttgttatgatgtctgtgtggaaagcggctgtgcagacattcaattgttaaaaaaaaaaaaaaaaaaaaaaaaaaaaaaaaaaaaaaaaaaaaaaaaaaaaaaaaaagggggggggggggaaaaaactacccgcgaggcgcgcgcaagttaagcgctacaccaccgtcttgtgggaaaacgggggggccccaaaaggggagggccgactaaaataaacaacgaagcagcgcggcgcgcgcggtataacacaacggcgccggtcggagaacaactgacaagagcgggatccctggaggagagagaccccacacgtggcggggccggggccaacacctat

SEQ ID NO: 486385 - DNA, 691 bp, Homo sapiens
  misc_feature (423)..(423): n is a, c, g, or t
cgccatccgatgattgtcccgctggggccccgggagttcctcttggtgcgcgaggggaagtgtgccccgccgccaaaaaactgttcggtggtaggcacgaccacctttaataacgacagttttcctccacttcgctcgcggttcccgcgagacactattttcccccgcggatttctgcgcccctcttttccgtccgcgggtgtatattcttctgccctgcgctcacctcccacaatatgtcgttgacaaagtacaacgtgcacacaccttggaaggcttatatgtcccgaatatattatcgttgtgcataataatggatattaagagcaaaatatgtggagcctacgtctcccggctatattttaaagctctctcctggtgaagatttggctacccgctcccttgagtatatctattgggggngagcggggagctcccccgctcgtttttatagccgcgcggagataacatgaacaggctgtcagaaaccctctcccagtgttgggacaaccacaccacacaagtcttttgttccaaaaatagtcctcactccacacgtgtccgttccaaagcttctcttaatagtgctttatgacaccaatcttgttggcacatctgcctccgggtcactcctgtgcaccaacaattacaccccgatttattctccaagaaaacaacaaataacaaacaa

SEQ ID NO: 486386 - DNA, 434 bp, Homo sapiens
acggctcgtttttcctttacttaagaaggacgtggctgttgaggttagcatacgaatcaaggacaggacctaccatgcctcccgaagttatgccaaaacctagcatgcgtggccttctgtccaggcgtgtgcgaaatcatatggttggagcattcgagctatccttggcgtgtgcagctctgtataagatacgtgtggctgatcaaagaaagaaggcatacgctgatttctacagaacctacgatgccatgaaagattttaaggagatgagaaaggctggtatctttcatagcgtagagtaatgttggaatataaagaatttattcaggttgaattacctaaaagataggcactgacttgagttgctgaactatgacacatgactatgtggtctaagatatagttcctcttgttttgttaactattcacttatc

SEQ ID NO: 486387 - DNA, 384 bp, Homo sapiens
ctgtaattacttaggaagaccaaatggcaccagagataagactcccttagatccccacttagatcaccaccctttctcagggggtaataaagtcatcttccttggaatgtagcaatctataaccaatcaaagcactgtaacatatgcactggtcttgtatggaaaatgttgtaatcctgctaaaattcctctctctttgcctgtggaagtgaacccttaacttctccagtttggaatgctcaccccattcctttggagtcaatgcttactgggtggctattctcaaactttgcactcaaagaaactctatacttagtcttattttttgaatctcattatttaaggttgacataataaccaactaatagtaagtaaaaaaaaaaa

SEQ ID NO: 486388 - DNA, 540 bp, Homo sapiens
  misc_feature (411)..(411): n is a, c, g, or t
tggtgtaattcttacttctctgaaaaggaaacctaaatttactgctgaaattgggaatcagagtccggtgaattacttctgctcttgtaaatgatgcaggtccttttcccactccctttgaggggaataatgccattccacctccactgctgcgatgtagtatgccctctctgccaggtcgaaggtggaatcctcacactgccgcctgccttggttcacagtatataattgcttcatgccgcctgtgtaatgatcagctgcaaggcattcaacattaaatgtcctctctgtgtgaggccacatgtggagctgcagactcgtttgaggcaagaggctcgttgtgtctcttcggtctactctccacagatatgtgttctctgaaaagaatattccatggacatcggactcacnagctgcgctgagtaagtaccacacgaccgaatcttctttgcacatagcgagacccggctgattaccatacatgaatgccctcatggagcgcatttcaatagaatcccgaaagtcacagtattcttatca

SEQ ID NO: 486389 - DNA, 101 bp, Homo sapiens
cctggtgtgactccctgctctctgccagcccctttctcacccctaggtcccacggcccctggtctctcccccctgctagaatctcgctgagggatagtgtg

SEQ ID NO: 486390 - DNA, 344 bp, Homo sapiens
  misc_feature (122)..(122): n is a, c, g, or t
  misc_feature (143)..(143): n is a, c, g, or t
  misc_feature (317)..(317): n is a, c, g, or t
  misc_feature (338)..(338): n is a, c, g, or t
atctgggctggtcactgctgggggggcactgcagctcctctgtccagtcctgtgcctagaggccactagctctagcattttctcacaggggcccaggggacatccaagggcttggggcaggntccctgctggtccaggctggntccccccatgccccgtcccatcctgttcctggggaggtattgttcctgtctggcctggccggtggccacacacactaatacacagtcacaaatacacacatacacactcacacagtcacacacatacacatggatgcacacgtcatacacattcacacacacacattcacactnacacacagagtcacacacagncaccgc

SEQ ID NO: 486391 - DNA, 346 bp, Homo sapiens
  misc_feature (99)..(99): n is a, c, g, or t
  misc_feature (264)..(264): n is a, c, g, or t
  misc_feature (324)..(324): n is a, c, g, or t
ctctttagaaagcctgccttggctgggcctggtggctcacctctaatcccagcactttgggaggccaaggtgggaggattgcttgagcccaggaatttnagactagctggggcagtgtagtgagactttgtctctaccagaaaaaccgggcgtggtggcgcatgcctgtagtcccagctacttgggaagctgaggcaggagggtttgcttgagcccgggacgtggaggtggcagtaagctgtaattgtgccactgtactccagnctgggtgatagagtgagaccctgtatcaaaacaaaacaaaaaacaaaaacctgccttctngggattgggcttctgggttttt

SEQ ID NO: 486392 - DNA, 829 bp, Homo sapiens
agcggaaagatggaccgcagcgcgagaccagaggcggaagctgcagccctagaggtcctggctgaggtggcgaggcatcttggaacctgctagtgcctgtccgaagcaggagcgcgagaactgcacaggcgcaagatcctggcttgaggttctcgtgtgatggagctctcgagaagaacagacaagctgctctgcatgccagcttcaggtagcggatttcctgcagaacatcctggctcaggagagaccctggtgtgtccttcaaggctgttggtctacaaactgctggagatgtcaatttgccatgacttccttggtaggacagacagcatggacgaatagatcctataataaggtgctcctgacattcgccgtcagcctcccaaccatcattacaggaaagactgtgaactcctgagttcagcgttgattgctgactacatcccagctaagctctggcatctgtggattaaaatccctggatctctctcagatgtgtattggtccatctgcatatgctggcaggaacaagctattaataccacgatactcagaagccaataagctatgacaggagctgggactggtttagaacacagaggtgtgccagatggggagggggatactggccttgggcctcctatgatgcagacatggtgaatttaattcaaggaggaaggagaatgtttcaggcacggtggttatatgtgggaagataagtgttatggcatggataccaaatgatcgtagagtccttttcttgtgtgcgtaatgttctggcggtgaaccagaatgataacagttgacgtcatcttgactgttaaggatg

SEQ ID NO: 486393 - DNA, 199 bp, Homo sapiens
atagtggcatttgcgggaacatttgatagttggtgatgtgctctatatccactgagttctcactcactactaagccattcatgtatacctatctaataaagggaggtgatattcttagcccgccatgctagtttgcaaaaactaatgtgatatttctggtaatcaatgtgttgcccagttttacgtcaaaatgggtacc

SEQ ID NO: 486394 - DNA, 461 bp, Homo sapiens
  misc_feature (90)..(90): n is a, c, g, or t
  misc_feature (177)..(178): n is a, c, g, or t
cccccccaccccaccgggggggggtgggccctccccccccctcctttcctttttggttttaaaaaaggcagaaaacccctctctccggcnccccccggcgggtggggtggggaggaaaccctattttttccccccctcccggcccccggggggggtaagggccccccctttggtttnnaaccccccccccccttttgggttttccgttttgggggttgggacccccccccgggggggaagccccccccccttggggggaaccaaacctccctgaattaaaccttttacctttttgggggggggggggggggggcccttaaacccccccctcctggggaaaaacccccggggggggtttttttggccccttttttttttttaaaaaaggaccccccggaaggccggaaaaaaaccctttttttttgggttttttcccaaaaaaagggggttttttttgggga

SEQ ID NO: 486395 - DNA, 170 bp, Homo sapiens
  misc_feature (160)..(161): n is a, c, g, or t
gaagaatataagatgtatctgtgaactaattctattttaaaatatttatttagaaaaaaaattcataaaaatgttaacagtgattagcatatctgtattaatgaacagtggttacttgagctttcttttaaagaaaattttccaggtagttctcttatgnnccagcagag

SEQ ID NO: 486396 - DNA, 683 bp, Homo sapiens
  misc_feature (26)..(26): n is a, c, g, or t
  misc_feature (108)..(108): n is a, c, g, or t
  misc_feature (195)..(195): n is a, c, g, or t
  misc_feature (206)..(206): n is a, c, g, or t
  misc_feature (219)..(220): n is a, c, g, or t
  misc_feature (223)..(223): n is a, c, g, or t
  misc_feature (228)..(228): n is a, c, g, or t
  misc_feature (244)..(244): n is a, c, g, or t
  misc_feature (246)..(247): n is a, c, g, or t
  misc_feature (252)..(252): n is a, c, g, or t
  misc_feature (255)..(256): n is a, c, g, or t
  misc_feature (274)..(274): n is a, c, g, or t
  misc_feature (284)..(284): n is a, c, g, or t
  misc_feature (294)..(294): n is a, c, g, or t
  misc_feature (356)..(356): n is a, c, g, or t
  misc_feature (362)..(363): n is a, c, g, or t
  misc_feature (371)..(371): n is a, c, g, or t
  misc_feature (471)..(471): n is a, c, g, or t
  misc_feature (521)..(522): n is a, c, g, or t
  misc_feature (612)..(612): n is a, c, g, or t
  misc_feature (646)..(646): n is a, c, g, or t
  misc_feature (673)..(673): n is a, c, g, or t
ggattcatctgtaatggccttcccanaaaccatcttcatgatgcaagcatggaactgcttattcatgaagcagttgatgatgggattgtagatgcaagcactcttggngaagaatgaaggaatggtgacaagccgtaagtccagcccatggttacggttgttgaccatgttcatggcgaaggccgcgtagggcangtagcagaaanagaaggatcctannatnaaaancaccatgcggctaaantnncgtanagnnttctgggtggtagctgantcctgcggcngaactgcaanagcttttagggccctaagcagctgagtgtaggagaagcagatgagggagagagggacaatgnagcggnngatgaagngggaccacgtataggactcgcggcgggatttggtgcccacggtgtaccagttagggccacaggaacactgcagggcctcaggggtgaaccggctccagcnaaagaagggtgggatggagaggccaattccaatggtccaggtagccaggnncaccgtcagttcatgcttggagctgaagcggaagttgccgaaggcttacagatgaaaatgtagcgctcaaaggccagggaggccagttancatcctgttaccagacctgctacagttcccaggnagccctccaaagcacaaaaatgggggncggagacgaa

SEQ ID NO: 486397 - DNA, 247 bp, Homo sapiens
cagcaccccaaaagcctgtgggttcagtcctgggtttgccccccccaatcaaaagggtcgttttgttttgtttttaaaaaaaggtgagattggcttggttcttcatgagcccatttgaaatagctctttttttgtttttccctgcccctttcgttttggggaaaaaatttggtctgtattgggattgtaaagaacatctttgcccccagccagtttacaaaaataaatgttttttttgtttttcaga

SEQ ID NO: 486398 - DNA, 1012 bp, Homo sapiens
gggatggaacgtcacccgtaaggatgggcatgccagtggaaccgacgctgacttgagagctctggactgcgatcctaccaccaactcgtccaactgacaagtcccttggcgcgcgtgcctactccgaggatgtctacaacgattgcgtggtatcggtactgtatcctgtttggccgagtggagactggtgttctcaaacccggtatggtggtcagccttagcgtccagtcgaaggttacacacggcatgtaaaatctgtctgacaatgcaccatgaagcttggcagtgaagctctacctggggacaactgtgggcttcaaatgtcgaagaatgtgtctgtcaaggatgtatcgtgcgtggcaaactgttgcatggtagacagcagaataatgaaccgagcaatggaacgcgagtctggattctacatgctcaggtgatgtatccgtaaaatgcttgaagtgctggctgatgctggccagtaggtgcgagtactggttcccagggcaaggcaccatgagtgtcggtaggagaagcattcttcaggacttatcagcatcctatgaggagtacaggtaaaggcagtaggacaggtgaattagtggcagaacagaacacgttgggccgtgcaggcgaatgtccatcacatcacggccagaatggcaacaacgacacgggcgtgacttgggaggacaaggagagaaggggtcggcaaatggtactgggcacagaaaagggctcagacaaagggcttagacgggaccatcgtgtactcccgtacataccgcctgggacagccccaaaactccttgaacgcccacgatactggggaacgaaaccggggccatcaagaaaccaggtaagagaacgatacaactggagaccaagtcgcccagcgtctcaaggatacgtacacaaggacactaggtcgcacacggcctgcaccggcgtagcgcgcggtgaaaaaaaccgatgcacgcaaagggaaaaccgacagcaacggcgatggagggac

SEQ ID NO: 486399 - DNA, 959 bp, Homo sapiens
ctatctaatgcgtgtgcccgctgtcgggatagggtgtgcaatgggtgcactacgtggctggaggatcacgagtgggtgtagtgcttatctggatgatctatgatcgaagtgagggatgaatcgaggatgtggagccacggacctgttctgatgaccaaataaataagtagatccactggatgtaatgggacctggaagtgcgaatttatatccagtagagaggaatgtctagttcgtaatgtctcataaatgaaaaaagtactggtagcatcttatggtgacctgagtttcaccttaagtggtgggttgcttggcttaaaagctaaagattgtctggttcgtaaaagaaggatggatgtgtactgatatgactgatctgtggataactttctatggttaggcaaggcttgtggatgcactgggaaaaattctcttcgctaaaaagcagaggggtgcaggatcctcttgactgcaaggagtttcggactctcaattagttggcggatggcccctggttccatactttggaaaggacgacccctcagtggttcccaggcagacatggtaacgggtttcaggggaggatcctggatgccacggatggcaaagccagaatcgacgggaagcattaaggacggcgcgttttacctgtttttggctgtgccctactcgagccactaacggagctgccccgtaccacagcgcaccaaagcaaaaccaactgtgtcgcgccccgccctaaacgctcataccagaatggagcggggccaagtagagagactcgaatacggcccgacgaccggctcccagccaggccccaccaaacccgggcgcgcgcgccaccagggcgggaaggcatcaagcaacgccgatccggcgggaccaaacgcgacgacgccgccgcgagcgcagacgtccacgacacactgcacatcaccaagagcacgccccgccggcgc

SEQ ID NO: 486400 - DNA, 274 bp, Homo sapiens
  misc_feature (154)..(154): n is a, c, g, or t
agcaatgactatttatacagtagtgtgtgtatatatttcccgtccttccaatcccccccaccaccacgacagtgtcccctatggtaagcataagatgggttttgaaatctgagttcgtttctaattttataaactaacgttcttgtagtatcantttttattaagattccgcatataaggagatatcatatgactatttatctctcttctacctagactttcttcggcttagtaggataatctctaggtccatccattgcaacacggtctctca

SEQ ID NO: 486401 - DNA, 447 bp, Homo sapiens
tggagctggaagaatattatgttaaacaaagataagccaggtacagaaagacaaatattgcatgttattactcatatttgagagctaaaaaaaaaacattgaactcatgaagatagagagtagaatgatggttaccagaggctgggaagagtagtgggaagagaggataaaaagtgatggttaatggtagaaatacagttagatacaaggaataagatctaatgttcactagcatgatagggcaactatagttatctctaatttattgtatattttgaaataactgaaagagtggaatttggaatgttcaaaggcttgagctgatggatacctcaattaccctgatatgattatcatacattgtacacatatcaaaatatcacatgtatccaataaataagtacaactattatgtatcaataacaaaattaaaaatgttaaaatcta

SEQ ID NO: 486402 - DNA, 799 bp, Homo sapiens
caacacaaacacacctataattacacatatttctatgacgagccctgtgttaattggcctgagggcccgcgtaccaacatggcgacatctcggccgcgctgccctgaatactcggtgctgggtgccctgggccccgtctgctgctggttgggctttctctggtgaagtgctgaccccccgtgcctgctcgtgcctgagcctgcagtgactgcattgtgaagctgctgactgtgccacttattggtcctgctgatgtctgtgagtgacagcacctgatttcaactgacaatgatttttgaatgagcccctcaagcactctgacttcttcaattgtcaatggaactgttttcctgtgagaatgcctcttcgatgcccgagtccatctgggacacaaatgctgtgctgtctgtgcacatggtttattgtgagccgtacattctttggtgatgcctgcctggaccacgacatcatcgacctggaacagacagccactgcacctccagctggccttgaacttcaccgcccacatggcctaccgcaagggcatcatcttgtttataagcctgcaaccggcagttctctgtacctgatttgagaacatggcccgtgactgtggctgagtactgcccacacatctgctacttcaggggggcgtgcattgctgaccaacgctgcgcctcctctttggccccacggtcctgacttgccggacctcatcatcttcctgcacacgctcaacaacatctttgagccacacgtggcgtgagagacgcaaccaagatgatcatcccacagtggc

SEQ ID NO: 486403 - DNA, 81 bp, Homo sapiens
actgaagacagtgccacttactactgtgccttcgccccccttcctaccttatactggggacccttcaccgataaactcact

SEQ ID NO: 486404 - DNA, 1163 bp, Homo sapiens
ggactgcctaggactaccagtagaagggccaagcgtaggttggagcagatgataccggagtagcctggaagccagacatcgctccgtctacaacggtagggaattacgccgtaccatgaatctcgagaggcccaggccagtcaagggcagacactgtggcaggctgatcgagagcagaacagtagagagcgcggagctactgctcttctgaaggagctctgtctgcgtggaactgtagacacggattgtggcacaagacatactacatgtgaagattgtgtcgagacacagacctagattgtccaacctatatggcatgggggacgttgtcactcattgtcaagcatgcagttcgattggccggacgcagtggttcactttgtgatccatgcgaggattgcggtcacagaagcattggtttcacatacacatgggtcgccaatcagccttaccagcatagggccaagcagtcgcaagttcgctgtacaagactaattggcgcagtggaccgcgaagtaccatttccagatgcttgatgatgcggtcttcggctggtcagggccaggctccttggcctgctgagtgacctttgacacagaaaagtgccatcatgcgtgaaagcgattcaataggtataccgctgatcattgagccctctggacagggcacagaattcattatgaatgaatataaggatcgtaagatcacacggaccaggttcctggatgacgccttcagaaagaacttagagagtgcactgagattcggtaaaccccttctggtacaggatgtggaaagctacgatccaagtttgaacccggtgctgaaacgtgaagtgcgggaacagggggggaaagatgtgaatcaatctcgggggaccagagatagaccgtggggccaacggaggacactcctggcacccggggatcaaggagagatcccacagaatacaggacccggggaaccaaacgtacacatcacagcaccacgaagaaaaggtaacaaagacagagaccagagtcagcagcaaagagaaaaagatgaaagcaagaaaaaagagagaccaaacacacgcgggaacagcaccgataacagcgggaaaacacaacagagcgaaacagaaggcactcgtcacacaaccatcactgcgaacaaaagagaac

SEQ ID NO: 486405 - DNA, 245 bp, Homo sapiens
gaaaagaagaaccagaatatcgagctacatagctggtgcctaccggtcgcgccctgattcgcaataagcgcaagcggcgtctagcgactacgtcgctcatcttacggtcctgtgcggcatcgctggtcatggtcattcgagaccggagctgtcgtggggcgcctactacaatgcgtcgcgtggtcttccttgagcgtctgacaagtgcctgtagtcacgtcgtcgtccgacgcattgcatcctgg

SEQ ID NO: 486406 - DNA, 128 bp, Homo sapiens
ctagaggatccccccgcatcaatccctaccggctggggctggctttgttgaacgacatcgagcgccgctgggatcgtggccagttcggcaaggaatgggaagaatgtgaggactggaaccgcaagaaa

SEQ ID NO: 486407 - DNA, 293 bp, Homo sapiens
gcgcacaaaaccagccgacggaagaatgatggaatgaagacgctttttatatttgaaaatatgcataaaagatggacatacagcagtctcttgatgtcagtatctctcacggtgtttccttgagtggctatctaatgaaaaacaaattaagaaaagagcataggcaataatgacttttaccattgccctaaatgttccaatgtctaaaaataagccatgaaccaaagtcaattttctgtgggcaataatgtcttgtgttagaatataggaagatgcacatgtgtaaacgcacg

SEQ ID NO: 486408 - DNA, 419 bp, Homo sapiens
  misc_feature (25)..(25): n is a, c, g, or t
tgcgaaccccggaaagcacaccctnaagcgcgccgccgccctggcagcggaaattaccggtgtgcgcaagaatgtgttgtatcaggtcgcgctcgataagcagaaggccgaatagttccaggggcaaatctgtatttcgtctgaacgtgatggcaatgccgcacttttaatacttgtcctcaagccgccgtgccgttaacctgcgcggcggagagtcgattggacagtcgctgccctctatgaaaattaggggggggaggaaagtccgggctccatagggcgaagtgccaggtaatgcctgggaggcgtgagcctacggaaagtgccacagaaaataaccgcctaagcacttcggtgccggtaagggtgaaaaggtgtggtaatgagcgcaccgcacgactggcaacagttcgtggcta

SEQ ID NO: 486409 - DNA, 391 bp, Homo sapiens
ggaggctgacccagaggatcctccacactagtcaaagtcagaaacttttccttacattttctttagtagctttataatataaggtctaacgtgtaagtcttaatccagttgagtagattttgtatatggtgtgagataagggtctaatatcattcttctttatgtggatatccagtttttcagacatcatttattgaagagactgttctttctccattgtgtgtaataggcatctttgtcaaatatcaattgaccataaatgcatggtttatttctgggctctctgttgttccactggtctgtctgtttacgtgtcagtaccatgctgtatttattactatagatttgtagtatattttgaagtcaggtagagtgtgacgctaccaggaaa

SEQ ID NO: 486410 - DNA, 396 bp, Homo sapiens
gggcatcatttttaccgccgcgatgtagagggtatacgcacccacaaggtgcatgtctgtgtcggcggccatgagcaggtggggcgcatgctgcgctttcgcgatacgttgcgtcaggacagcgacatccgccagcagtatcaggatctgaagtttcggctcgaggccagcaatcgcgaggggattggcgagtaccttgcgcagaaagccccctttatagatgccctgatgggggctcagtcctagtaactgcaaatgcttggtgttgcctgataggttgctgcgaggctatcaggcccccagttgctcctgcagcaactgggcaaaggcgtccctggcgccgtggtgttgtacatccttgtgccagacaaagcggttatccactggctgcaggtc

SEQ ID NO: 486411 - DNA, 892 bp, Homo sapiens
  misc_feature (25)..(25): n is a, c, g, or t
  misc_feature (67)..(67): n is a, c, g, or t
  misc_feature (164)..(164): n is a, c, g, or t
  misc_feature (179)..(180): n is a, c, g, or t
  misc_feature (214)..(214): n is a, c, g, or t
  misc_feature (224)..(224): n is a, c, g, or t
  misc_feature (265)..(265): n is a, c, g, or t
  misc_feature (297)..(297): n is a, c, g, or t
  misc_feature (300)..(300): n is a, c, g, or t
  misc_feature (352)..(352): n is a, c, g, or t
  misc_feature (354)..(356): n is a, c, g, or t
  misc_feature (541)..(541): n is a, c, g, or t
  misc_feature (595)..(595): n is a, c, g, or t
  misc_feature (733)..(733): n is a, c, g, or t
  misc_feature (757)..(757): n is a, c, g, or t
  misc_feature (846)..(846): n is a, c, g, or t
gcaacaaaacagctatgtgggattncagatattcatcacgccttatcatactatacgactcactgcntcccatcgatcaatagtttagtgtagagcatcaaacagtgtacacagagcacaatagcaacatacagaaaacattgtccctgcacttgaggagcttncattttaaaagatannatacaccttttttaaaatggcattgttgtttggngttttctgcnaagtactgaggaaatattttgtaaaagtgagcatagggtanaaataagccgccatcatctcatttagagaatngcngaggacagacagcaggaaggatgtgtgaaacgagcagacaatgacagaccantnnngaaaggtagggttttaaagggagaaaaacacagtctcatcaactaaggagagaattgctgcagtaaataggatgagggaaatagtctgtgggatgcaagcaaaggaagcagggtgccttagacactgagtggagccagaaagatcatgcggcgctttttccaagtacatggccaccaagtaagantggttggtgacaagacagagggctaaaacaggaaggtaatcttgtgcacctganaaatagaaagaataaaggatcaaaattgaaggcaggctataagagtatcaagaaattcttaaaaaccaaaaagtgatttggaagcacaaaacttacagttaatgctacccaatgtcatgatgggccaagaacattgtngcttcctaagttagaaaatgccanatgccaaaattttaaatggaacacactacatttttttctaatcaatcccccctctcccagaaaaaataggaactcatttttttcagggnggggaggaagaaaggggatcatgggacatggaaacagtagtaatat

SEQ ID NO: 486412 - DNA, 673 bp, Homo sapiens
gactgattacgactgtcggacttctacctatgctctttattcctgtccattgtggtttgtattgatgtcaattctggtgccttagaagttagtagtgtgggaacctatctgtaaaatcagatgttgtttcttggtagagaaggatttcgtggtgcttagcttactaggagaccgatattcttaagttgtattcttgtttaattagccttgagaaatgtttggtttaggcagacagaattctggtctacttttttcttatcccaaaaagtgttcttttaatttctctaccaacagaaatgaatgagcaggtgtagagtaatttacagtgcaccttatatagcactgtagataaaaggaggctgtataatgtgtggcaggaagggactatgggagaatactttagctgtggagtggaaacatgttgagctacagtttgacctggtttgccctgtgtatatccacgtgcatcctttacattggacatcatgaaaactaacacattcctggtatggtagcgcgtcattcagcttgacatagtctaggtcgtctcgcatttgatatttgtacatatatggtatacattggcagaacaactgtggttcagttccattaacgtacattcttgcgtgcaggttatatgacctgattggtaatatttcctttgggttttgag

SEQ ID NO: 486413 - DNA, 151 bp, Homo sapiens
  misc_feature (10)..(10): n is a, c, g, or t
  misc_feature (18)..(18): n is a, c, g, or t
  misc_feature (60)..(60): n is a, c, g, or t
  misc_feature (131)..(131): n is a, c, g, or t
agcccaaggntccaggtntaggtggagcttgtgctggaatcccaggagttggaccctttnggggaccgcaacctggagtcccactggggtatcccatcaaggcccccaagctgcctggtggctatggactnccctacaccacagggaaact

SEQ ID NO: 486414 - DNA, 422 bp, Homo sapiens
  misc_feature (18)..(18): n is a, c, g, or t
  misc_feature (22)..(22): n is a, c, g, or t
  misc_feature (56)..(56): n is a, c, g, or t
  misc_feature (59)..(59): n is a, c, g, or t
  misc_feature (105)..(105): n is a, c, g, or t
  misc_feature (107)..(107): n is a, c, g, or t
  misc_feature (110)..(110): n is a, c, g, or t
  misc_feature (141)..(141): n is a, c, g, or t
  misc_feature (198)..(198): n is a, c, g, or t
  misc_feature (229)..(229): n is a, c, g, or t
agggaaaaataaatttcntaanaaaaggccttaaaatgttaaacaggccccaggcnagngatgatgcaaatcacctaaagcttttgcatatgataagttgcaggnanaancctggtttgctgcaagactcgacccctcccnctctatgcataacttaaggtataaaaactactttgaaaaataaagtgcgggccttgntcaccgaaacttggtctcaccatgtcgttcnttctcttaccttctggctgaattattcagcctcttttctccactgaatttcctcactgagctatcctcattctattactctttatatccttaattaacatttaattaagcagtggtttcctgatcttcgcctacgccgtctctccttcgaataccctggatcagccggggctggtccccggcaccctaccatg

SEQ ID NO: 486415 - DNA, 404 bp, Homo sapiens
  misc_feature (24)..(24): n is a, c, g, or t
  misc_feature (38)..(38): n is a, c, g, or t
  misc_feature (61)..(61): n is a, c, g, or t
  misc_feature (337)..(337): n is a, c, g, or t
aattaataagttccaaataacatnagtttaccaaaagntaaatccaaaaagccatgaaagnactattgatgtggttttggatctgtgtccttcaccgagtctcatgttgaaatgtaagccccctggtgggaggcgatgggattatggggcagagtcctcacaaacggtttagcaccacccgctcagtgctgttctcctgatattgagtcctcatcacatctggttgcttcaaagtgtgtggtgcctcccctctgtctccctcctgctctggccatataagatgtgcctgcttctccttcgccttctaacatgattgtaagtttcctgaggcctcccnagaagcaaaagctgctgtgcttcctgtaccatctactggaccgtgagccaattaaacctcttttctt

SEQ ID NO: 486416 - DNA, 329 bp, Homo sapiens
gctcgacaaaaaataagttctgttaaccttgggtgaaagtttagagttttataatttattagaatctgtaagtcaccagaacattattgccagacctgacttagtgtgccaatagatcaggttaatgggagctgtcgggtcatcagtgttccatagtgacagttgtagttcatgcagaagggaaagtggacatccttttaatattttgagtgattggcagtgttggggagtatggtagacattttctgtcctgaatactgctttggtaccagtgtatgttagtgcccattggtgtcaccaagcagggctatatgtaagcttttattctt

SEQ ID NO: 486417 - DNA, 755 bp, Homo sapiens
tgggttgaccacagggtacttatatggatggtacatgacaaggtgcggttcccctaggcccctcccctcttacaaggggtctactgtggcaaccgtggtcaggaggggcagaattcaggtgttgggtgggggactgagctgctggcacgggattccccagcaaggtgagggttctctcctcttcctctgggtgcctcttgcgtggggcctggtggctccagggggtctctatacctccttgtgtggagcgccatgtgttggcgcccattgaggttcacaccaaccccctgtgttgtgcctgttacgcacaaaaattcggtgtgatcaatacacagggaacatgtgacgctttgaccacaacgctggggttcgtgtagaaggggggcccacagtgtcccacaagtcccccactagagagcttccaaacaagagtgttcagcacgcgaaactctgggcgtcatggattccggcgtgttgttgaaagtctccagagaggcaagacaaccccaccctgtgggtgtgcctcacagtgtgtaatagaccccaaagagaaatgtgccccctcattgatagagggggcgccgcccctccacgacaaacgacctcgtgtccatttacaacccacaacgacttttttgtgagtaaactagctcaacctacaattactttggaggccaagaacggaataatccaacataagaaaggggcgacaaggaggcaaataaatatagtatacgtgagaaaacaaggccccc

SEQ ID NO: 486418 - DNA, 120 bp, Homo sapiens
atcaatgacaaggcaccgctgagctactcccctcccctctcccaatggcccctactgtggtgcttatctgctaagccggggtaggcccaaactacaaactgaaagcatgcaaatgccctc

SEQ ID NO: 486419 - DNA, 941 bp, Homo sapiens
  misc_feature (21)..(21): n is a, c, g, or t
  misc_feature (472)..(472): n is a, c, g, or t
cgcgatggcgctttctcttcnctccgtcgtgccacctctgtatctgtctttacactgcagctctcgggaggcttctttctctcttgtatacgtccctggccggtcgtccacacaacccccttgggggcacatctattcccccggggcccccttctttatgccccaggtctctccggttcttctggaacggttgacgccaaatatttctgttaggcgggttcctactccctgtgtgtaaatgcgccccccgcccttctggatactcccctggtgcccgaacccatgcaaatccgttcttgcgcctctccacatccctccttcctaagaggagcccccccttcgtgatgattgtaattgcccccccccccaaagttccccctcgtgaaaatttgccccaaacgcgtacaatctctttatctttcctcccataggcaatcctccccgaacaatacttccaccgtcgtacatggtntcgacgaccctctcctcgcttctttgcacacgcagtgaggccccccctccatggggggataccaaaaatctccaaggagccaatgttattaacaatatgagagcaacccggtctagcgcggaacaccaagtgtagcaatttcttcttgtccttatgggtcgtcactacttcgaggtggatttgaggacataccccggaagctcacctattaaataggccacagttgtcccctggtaatagtgctcgcacatacacaccacttctgggatagggcggtcattgcccccatgctgttgaaatgtgcaggataacgcccccctgcgcacccaataagtctacagatatcaggaaattcatatgggcctattttccccccacagggcgagtccttctcagatggccaaacatttcttttccaaaaaaatttttgttcaaaaaaacaatcttaaaaaaaaggcgcaacataaca

SEQ ID NO: 486420 - DNA, 457 bp, Homo sapiens
aaaaaaaaaaaaaacttttttaaaacaaccccccagaaaaaaaggggggccccaaagcccaaaaaaagtttttttccccctcaaaaaaaaaaaaaaaaaaggggcccccgggggggtaaaacccccgggggtaaaaaaaaaaagggggctcaaaaattaaaaatgggggggaaaaaaaaaaaaaaaaaaattttttttttaaaaaattccccccggaaaaaaaaccccccggggaaaaaaaaaaaaaaaacggggggggggaaaaaaaaaaattttttgggccccaaagggggggggggggaaaaatttcccggaaaattttttttttggccccgggggggatttaaaggggaaaaaaaaagggggtttttttaaaaacccccaaaaagggggcccttttaaaaaaaaaatttttttttttttctcccgggggggggggaaaaacccttgggggggg

SEQ ID NO: 486421 - DNA, 459 bp, Homo sapiens
  misc_feature (113)..(113): n is a, c, g, or t
cggctcgatggggtctttcccccacccttccagcctccccgtccgggagggaggttgaggggtcagccccccgccctgcctttcttcctgtccgggtgggggttttgtttttntttttcttttttttttcttctttttttctcttttttttcttttttttttctctcttttttttttttttttttttcttttttttttttttttttttttctttttttttttctctctttttttttctttttttctcttttcttctttttttccttttctcttttttttttttttttctttttttttttctttccttttttttttcctttctttttttttttttttttcttttttttctttttttttttgtttcttttttttttttttttttctctttcttttttcttttcttctttttctttctttctctttttcttttttttttctttttttcttttttttttcttt

SEQ ID NO: 486422 - DNA, 90 bp, Homo sapiens
actgacgacactgccgtatattactgtgtgagagaaggggagggcttgaccacggtgactaccaggggcattgaccactggggccaggga

SEQ ID NO: 486423 - DNA, 233 bp, Homo sapiens
cccctccatacatgtgtgatatgctacagaagcacagaaaactaacacacaagtcacatggctcatacatctaaaccatgatctcaaattcaagtttggttgctaaaacggtggcacttgtgtgtgtgtgtgtgttttttttttttttttttttgaaaacgggttcccgcccggcccccaagggggaaccaaaaggggaaaatctagaccaccagaaacccataagatacgat

SEQ ID NO: 486424 - DNA, 393 bp, Homo sapiens
taagttggttctagcgcagtttttttttttcttgtctataaagcatttacccccccggccccaactccctccttttaaagaaaaaaattgaaatgtaaggctgtgtaagatttgtttttaaactggccagggtctttttttgtatagttaacccccccccgaatgtgtctttaaaaagccccgtcctggtggtattttcaatagcccctacccctgcctggtccagtatgggggttgtaaattggcatggaaattttaaaccaggttcttgttggggcccaccccaaattagttaaaaatggggatgggagttttttcatcttcagttgtctctgaaccagcttaaacaaaaaaattgttgttttgttaactgaaaccccctctgtaattcca

SEQ ID NO: 486425 - DNA, 136 bp, Homo sapiens
atgtatccgcgtattacaccttatcacgggatacactcaacgtacattcttggctgacacaccagcactagtgcaacgtattcaaagttcttagtttggaaagccctgcggggactgcgcagccagagcccccacc

SEQ ID NO: 486426 - DNA, 754 bp, Homo sapiens
gcggaatcgactgcatcgtgtttcgggggctgcccggcaggcccggcaggacgcctcgtgaatgccggtccactcctcagccccgcagtgcggcggtggcctggcagcgcggtgcgggctccgagaagaaagagtgtggcccggggcgggcggagtgggaggtgtcgatggcctgtgtgccctggaatgttggtctggggcctgcttgctgtgactgtgaatggggctgcctcgtgcttctgtcctgctctggctggtgtgcccatgccatgtgccccgctgggacctcaggaccccctgtgtggatgctgctgtgctcctgccctttgtggtgccctccctgccgtgtgccgggagacccaatgcccccaactgccagtgccctgcccttggaagctgctctgctggcccgtggcggcctgtgacgggggcgagtttgttgagtgaaacgcggcacgtggtagccggctgatgggtcgggccgtgttcgggcctggtgtcggccgggctgctggagtttcttttgttggggatgccgcggtggacaggtcgcgccgaatccccccttcggaagtcaattaacttcaaacgtgtactccgcagaacgtttccacgtgactcccgtgtgcaattatcggcgctaggccggtggggataacggccactatggaccgaagcacaggtggacgacgctcagttttgatgggttaacccaaaggggctggattacggggaaaggttacaggttttgtgg

SEQ ID NO: 486427 - DNA, 122 bp, Homo sapiens
gttgcatgagaaactctcatgcaactgtcactgatctctacagctagcagtggtcccatgccccagcacgctggacaatccaggatgtctccaggcattccaaatgtcccagtggcagatca

SEQ ID NO: 486428 - DNA, 143 bp, Homo sapiens
  misc_feature (37)..(37): n is a, c, g, or t
  misc_feature (57)..(57): n is a, c, g, or t
  misc_feature (134)..(134): n is a, c, g, or t
ggaatatatctacttttctcaaagtcaacttgttganatgttaattaatcccatctnaaaaaaataccttcacagtacccatctatacgtgatgttttggcccaaacttgcttgggtgtcatattcctagccanagttgacac

SEQ ID NO: 486429 - DNA, 268 bp, Homo sapiens
  misc_feature (2)..(2): n is a, c, g, or t
  misc_feature (6)..(6): n is a, c, g, or t
cngtgnaaattagccgacgcctatctaagcatttctcaccagatcaacgctcgcttccaaaggctaacttcagaatgtgacccgaaaacacatacggactatggactaaaagaccggatgacacacgttcacagtacacgtgtaaagcttcatgtcaccgtatgttaaaaacacgaacctaaaagcagctcatagcaactcggacggtccgcccaaactcctcaggctgcaaagtgcttctcgaccgcgacccccgtcggataatttt

SEQ ID NO: 486430 - DNA, 178 bp, Homo sapiens
atttatcagctgggacttgatagatataatctaaactctctggctgggtgcggtggctcacacctgtaatcctggcacttagagaggctgaggtgggcagatcacacaaggccaggagttcgagaccagcctgaccaacatggaagaaaccctctctctactaaaaacaaaaaaatag

SEQ ID NO: 486431 - DNA, 320 bp, Homo sapiens
  misc_feature (25)..(25): n is a, c, g, or t
  misc_feature (173)..(173): n is a, c, g, or t
tggcctaaacgttagatttgacctncagaattcctagagtttgaaaataaataggcccatataatatgcactctttttgtgtcctgactttttttttgccttaacatgatgtcttttgaaacccatcccatgttgagattcatcccatgttatcatgtgtatcaataataagntcctttttattgctgaatagtattctagtatatagatataccacaatttgtttagctgttcacctattgatggacatttaggttgtttcaagttttgatctattatgaataaagctgtctatatatataaatcacaaaaaaaaaaaa

SEQ ID NO: 486432 - DNA, 366 bp, Homo sapiens
ccagaggcacgaaggagggagttgacaagaagccaagataggcggggcacagtggctcacgcctgtaattccagcacttggggaggctgaggtgggtggaccacctgaggtcaggagttcaagaccagcctggccaacatggcaaaaccccgtctctactaaaaaatacaaaaattagctggggatggtcatgtgctcctgtaatcccagttactcaggaggctgaagcagggagaatggcttgaacccaggagacggaggttgcagtgagccgagactgggccactgcacaccagcctgggcaacagagcaagactccatctcaagaaaaaaagaagccaagagtagagatccttgcactgctgg

SEQ ID NO: 486433 - DNA, 155 bp, Homo sapiens
tcgctttcgtcgtaatgctttccccaaagtgtatcactattataatatctagtttgtatgcttataataagagcgaccgtttctgtcatcaacatctgcgggtcgttttcttagtcctcttccttgtcgacagctaggcactcaatagtaaccca

SEQ ID NO: 486434 - DNA, 203 bp, Homo sapiens
tagttcttcagaatcaccaccaagccgggtaaccatttgtgtccattgtagaccctcgcccgcatgtcgtacatgattcatgattttgtccattttcaaaacacgctctacattagccccggaattgggggttgtgtagaacgagacattgttcactttattttcaataatttgatgcataacacttgtaagttctctaagtc

SEQ ID NO: 486435 - DNA, 347 bp, Homo sapiens
cagcatttttgatagtttatattggctgagtctagtttgtttacatatgaaaataataggccgggtgtggtggctcatgcctgtaatcccagcactctgggaggccagggtgggtggattacctgaggtcaggagttcaagaccagcctgaccaacatggtgaaacatcgtctcaactaaaaatgcaaaaataagccaggcgtggtggcgcatgcctgtaatcccagctactggggaggctgagtcaggagaattgcctgaatcctggaggtggaggttgcattgagccaaagtcgcaccgttgtactccagcctgggcaacaagagcgaaaactctgtctcgagga

SEQ ID NO: 486436 - DNA, 490 bp, Homo sapiens
  misc_feature (119)..(119): n is a, c, g, or t
tccggcgtccgttgctatcattatggttgaataacaatttattatgctttgcagcaaacatgattatcaggggaatccgcccccaatatttcaacgatgttctttctattttccataangtgtggccttctaacgaaataaagagaaagaatacaaagggaggaattttacagctgggctgccgggggtgacatcacatatcggtaggaccatgatgtctgcctgagtctcagaccagcaagtttttattaagggtttcaaaaggggatggggtgtaaagcagggagtaggtacaaagatcacatgcttcaaagggcaaaaagcagaacaaagatcacatgcttctgagggaacaggacgaaaggcaaaacagaactactgataagagtctatgttcagctgtgcacgtattatcttgataaacatcttaaacaacagaaaacaggttcgagagcagagaacttgtctgaccacaaatttaccagggtgg

SEQ ID NO: 486437 - DNA, 546 bp, Homo sapiens
gggtttcaccatgtggccgggctggtctgggactcctggcctcaggcagtccacttgcctcagcctcccaaagtgctgggattataggcctaagccaccgtaaccagccagaattttttttttttttaaagcaccagaacatgggggaaagatggtgtctttaacaaagtgggtgctgagaaaacgtgtataaccacatacaaaagaagtgaagttgggacccttacccttacaccaataatacaaaaacacaaaacttattaaagattaaacataaggaccgtgaaaaaaaacaaaaaaaaaaaccttcgacaacttgagttctctcctccctcttcctcctcaagaattgccggaaggggaagagaggcgccagggggaaagaaggggggctcccgggccccaagcttggctcgtggaagaaacccgagggaggcttaagaaaggggggggattccccgtgcttggaagaacaagggcctaagaaattggggccatgggcacaggaacatccagcccaaaagaagaacccacccgcttggtgaa

SEQ ID NO: 486438 - DNA, 162 bp, Homo sapiens
agcaagaatggcatatcagccaaaatgatacctggatggcttatctgaggccaaatccgccactccagaaatccaggagattgttgattaggttaaaccatcagtcttgcaagaataatacacaatatgagcacttacggacaaattggaacgctgtgcatg

SEQ ID NO: 486439 - DNA, 150 bp, Homo sapiens
agtgaacactcacgtttattcctgcctgctccggccaggactgaaccccttttccacacctgaacagttgggtcaagggccaccagaagcatttttttattattattattttttaacctggacatgcattaaagggtctattagctttca

SEQ ID NO: 486440 - DNA, 150 bp, Homo sapiens
ctttgccggtcttcgactttgaacccaagcccacatcattgctcccctcgtggatactgaccccactataaacttcactggggctacaaccttcctaccctttgtgcctcatgaccaccccctcccttgccccgccatgccctatagtga

SEQ ID NO: 486441 - DNA, 490 bp, Homo sapiens
cgatcgttgacgaacatgacacgatagaccagtgatgactgtccacgccataaagattactgaatgctgtacctagatcgtctagattcaattctgtaagcaatgggacttttacagttttgattcgtgttttgggcatagttgttataggagataatattatagatgtataaagagatggaagaccagtaaaactgaaatatctgttgtaggaatagagaacataatgagtggaaaaggagatgcactggatggaagaagagatcataggagggtggcagtatataaagaggtagtagaatattgcggaggccttattgaatcgttgctgtgctttatgggatcgcagcgcatatcctcttctcaataagtatatcgtaactcccaaaacatagtttgcaatgtattccgaccagttcaactggcgcacgtccagtgctgagcagcgtacaaggggggactccgtctaggagtcgagctgcaaggcatg

SEQ ID NO: 486442 - DNA, 698 bp, Homo sapiens
  misc_feature (2)..(2): n is a, c, g, or t
  misc_feature (72)..(72): n is a, c, g, or t
  misc_feature (113)..(113): n is a, c, g, or t
  misc_feature (162)..(162): n is a, c, g, or t
  misc_feature (173)..(173): n is a, c, g, or t
  misc_feature (189)..(189): n is a, c, g, or t
  misc_feature (192)..(192): n is a, c, g, or t
  misc_feature (218)..(218): n is a, c, g, or t
  misc_feature (220)..(220): n is a, c, g, or t
  misc_feature (242)..(242): n is a, c, g, or t
  misc_feature (247)..(247): n is a, c, g, or t
  misc_feature (254)..(254): n is a, c, g, or t
  misc_feature (273)..(273): n is a, c, g, or t
  misc_feature (279)..(279): n is a, c, g, or t
  misc_feature (296)..(296): n is a, c, g, or t
  misc_feature (308)..(308): n is a, c, g, or t
  misc_feature (314)..(314): n is a, c, g, or t
  misc_feature (418)..(418): n is a, c, g, or t
  misc_feature (635)..(635): n is a, c, g, or t
  misc_feature (691)..(691): n is a, c, g, or t
anggagctgactggggaagacagtggtgtgctgtcaggtccccctgctccccttagagtggggctacctctnggggtagctgaggatgggtgggggtgggctgagcaggtctnacttatcgaagtgatccagtgggtagtgctccccgtaggtttgcaggtngcgggccaganattcctgctgcttgcngantgggcgggcatcttctgatacacgtntnagaagagtaggttggggttggnttttntttttcnctcggtctgctcaaaggtntccatnaccttcctgcgggactncttcctccaggncttctnctgctcctcatcccaccagccttggctcagcagatagtgccgcagccgggagatggggtggtcctgtttattccagtaatttatctcatccaccgagcggtacntgaaactgtcgtcactggtgctgtggtgcccgatcctgtaggtcatggcctcgatgaggaagggctggttctctgccacagcccgccgtcgggcctcctttgtggcgttgtatacggcaaacacatcattaccatccacgcggattgacatgatgccatacccggggcctcgtgctgcaatgccatcgccgcgatactgctcacaggtgggcgtggngatggcgtcctcttgtttccggcagaagaagatgatggggcactcaagtgtggcancgagttg

SEQ ID NO: 486443 - DNA, 1011 bp, Homo sapiens
  misc_feature (940)..(940): n is a, c, g, or t
aataaggctaggtagaggctgggtgtgaatcggccgaggcgtcgtccgcaaagcctgagtcctgtcctttctctctccccggacagcatgagcttcaccactcgctccaccttctccaccaactaccggtccctgggctctgtccaggcgcccagctacggcgcccggccggtcagcagcgcggccagcgtctatgcaggcgctgggggctctggttcccggatctccgtgtcccgctccaccagcttcaggggcggcatggggtccgggggcctggccaccgggatagccgggggtctggcaggaatgggaggcatccagaacgagaaggagaccatgcaaagcctgaacgaccgcctggcctcttacctggacagagtgaggagcctggagaccgagaaccggaggctggagagcaaaatccgggagcacttggagaagaagggaccccaggtcagagactggagccattacttcaagatcatcgaggacctgagggctcagatcttcgcaaatactgtggacaatgcccgcatcgttctgcagattgacaatgcccgtcttgctgctgatgactttagagtcaagtatgagacagagctggccatgcgccagtctgtggagaacgacatccatgggctccgcaaggtcattgatgacaccaatatcacacgactgcagctggagacagagatcgaggctctcaaggaggagctgctcttcatgaagaagaaccacgaagaggaagtaaaaggcctacaagcccagattgccagctctgggttgaccgtggaggtagatgcccccaatctcaggacctcgccaagatcatggcagacatccgggcccatatgacgagctggtcggaagaaccgagaggagctagaccagtactggtctcgcgattgggggagccccggggtccccacggtgtggggtnggctggaaaacccaagggagacccggggaaccggccaaataggcgggaacggggggccgccccaagggcag

SEQ ID NO: 486444 - DNA, 151 bp, Homo sapiens
aaagacattgctagctgcacagaacaactcctgtatctttacctaatatgttaccccaaaataaacatatactcaaagatatacgaaaagtaaaaccctaagactactagacacagagaaagcagagaaagattacaacttcatcacattc

SEQ ID NO: 486445 - DNA, 1031 bp, Homo sapiens
  misc_feature (866)..(866): n is a, c, g, or t
  misc_feature (886)..(886): n is a, c, g, or t
aatttggctaggtacgaggctgggtgttaatcggccgaagctgagtcctgtcctttctctctccccggacagcatgagcttcaccactcgctccaccttctccaccaactaccggtccctgggctctgtccaggcgcccagctacggcgcccggccggtcagcagcgcggccagcgtctatgcaggcgctgggggctctggttcccggatctccgtgtcccgctccaccagcttcaggggcggcatggggtccgggggcctggccaccgggatagccgggggtctggcaggaatgggaggcatccagaacgagaaggagaccatgcaaagcctgaacgaccgcctggcctcttacctggacagagtgaggagcctggagaccgagaaccggaggctggagagcaaaatccgggagcacttggagaagaagggaccccaggtcagagactggagccattacttcaagatcatcgaggacctgagggctcagatcttcgcaaatactgtggacaatgcccgcatcgttctgcagattgacaatgcccgtcttgctgctgatgactttagagtcaagtatgagacagagctggccatgcgccagtctgtggagaacgacatccatgggctccgcaaggtcattgatgacaccaatatcacacgactgcagctggagacagagatcgaggctctcaaggaggagctgctcttcatgaagaagaaccacgaagaggaagtaaaaggcctacaagcccagattgccagctctgggttgaccgtggaggtagatgcccccaatctcaggacctcgccaagatcatggcagacatccgggccaatatgacgagtggtcggaaaacgagagggtnacaagtggtctccgatgggngcccacggtccccccactcgggagggtcgggaaagcacaggagaacacatggaacggaccaaataggctgaaccagggggggccaagaaagagacaacgaccgagaccaaacagaaaaacaccaggaagacacacagaagtagac

SEQ ID NO: 486446 - DNA, 708 bp, Homo sapiens
aatttggctaggtacgaggctgggtgttaatcggccgaaggccagctctgggttgaccgtggaggtagatgcccccaaatctcaggacctcgccaagatcatggcagacatccgggcccaatatgacgagctggctcggaagaaccgagaggagctagacaagtactggtctcagcagattgaggagagcaccacagtggtcaccacacagtctgctgaggttggagctgctgagacgacgctcacagagctgagacgtacagtccagtccttggagatcgacctggactccatgagaaatctgaaggccagcttggagaacagcctgagggaggtggaggcccgctacgccctacagatggagcagctcaacgggatcctgctgcaccttgagtcagagctggcacagacccgggcagagggacagcgccaggcccaggagtatgaggccctgctgaacatcaaggtcaagctggaggctgagatcgccacctaccgccgcctgctggaagatggcgaggactttaatcttggtgatgccttggacagcagcaactccatgcaaaccatccaaaagaccaccacccgccggatagtggatggcaaagtggtgtctgagaccaatgacaccaaagttctgaggcattaagccagcagaagcagggtaccctttggggagcaggaggccaataaaaagttcagagttca

SEQ ID NO: 486447 - DNA, 101 bp, Homo sapiens
tgcttgtagtagtgtgatgtctggggtgtgcatatgcacatggtgtgtgtgcatagtgtgtgtgccgtgtgtgtggcttctgcatgtggggtgtgcatgtg

SEQ ID NO: 486448 - DNA, 267 bp, Homo sapiens
  misc_feature (71)..(71): n is a, c, g, or t
gaggatcctcggcctttgataggtagtgaagataaacacttccaaaaggaagtggtcacactatcatatgntcagagagagcactggatatggcatgtggaagtcattggtggaaatggtgcaatagttttagagtattggaggaaaagattttgcctgagttcctttatctccttgtaattcatgtcagtcctctatgaacattaatatattcacaggttacccctattcaaaagaacgaggggtacccgaggctcgaaattcgta

SEQ ID NO: 486449 - DNA, 109 bp, Homo sapiens
tgactgggcgctctctgacaactctgcttctcaattagctgaacaatttgcttaatgtcttggtctttttcgggtgatctgcatcccagcaagtcttcattatgtcata

SEQ ID NO: 486450 - DNA, 917 bp, Homo sapiens
  misc_feature (800)..(800): n is a, c, g, or t
  misc_feature (826)..(826): n is a, c, g, or t
  misc_feature (837)..(837): n is a, c, g, or t
aataaggctaggtagaggctgggtgtgaatcggccgaggcgtcgtccgcaaagcctgagtcctgtcctttctctctccccggacagcatgagcttcaccactcgctccaccttctccaccaactaccggtccctgggctctgtccaggcgcccagctacggcgcccggccggtcagcagcgcggccagcgtctatgcaggcgctgggggctctggttcccggatctccgtgtcccgctccaccagcttcaggggcggcatggggtccgggggcctggccaccgggatagccgggggtctggcaggaatgggaggcatccagaacgagaaggagaccatgcaaagcctgaacgaccgcctggcctcttacctggacagagtgaggagcctggagaccgagaaccggaggctggagagcaaaatccgggagcacttggagaagaagggaccccaggtcagagactggagccattacttcaagatcatcgaggacctgagggctcagatcttcgcaaatactgtggacaatgcccgcatcgttctgcagattgacaatgcccgtcttgctgctgatgactttagagtcaagtatgagacagagctggccatgcgccagtctgtggagaacgacatccatgggctccgcaaggtcattgatgacaccaatatcacacgactgcagctggagacagagatcgaggctctcaaggaggagctgctcttcatgaagaagaaccacgaagaggagtaaaggctacaagcccaaatgcagtctggttgacgggggtaatgcccaattcngactgcagactgcggatccggcatanaagggtgaaancgagaggtagaagtatggttaggtggggagcccatgtccacggtgtgggtggggtggaaggcaaggtaagagccttggac

SEQ ID NO: 486451 - DNA, 1439 bp, Homo sapiens
aataaggctaggtagaggctgggtgtgaatcggccgaggcgtcgtccgcaaagcctgagtcctgtcctttctctctccccggacagcatgagcttcaccactcgctccaccttctccaccaactaccggtccctgggctctgtccaggcgcccagctacggcgcccggccggtcagcagcgcggccagcgtctatgcaggcgctgggggctctggttcccggatctccgtgtcccgctccaccagcttcaggggcggcatggggtccgggggcctggccaccgggatagccgggggtctggcaggaatgggaggcatccagaacgagaaggagaccatgcaaagcctgaacgaccgcctggcctcttacctggacagagtgaggagcctggagaccgagaaccggaggctggagagcaaaatccgggagcacttggagaagaagggaccccaggtcagagactggagccattacttcaagatcatcgaggacctgagggctcagatcttcgcaaatactgtggacaatgcccgcatcgttctgcagattgacaatgcccgtcttgctgctgatgactttagagtcaagtatgagacagagctggccatgcgccagtctgtggagaacgacatccatgggctccgcaaggtcattgatgacaccaatatcacacgactgcagctggagacagagatcgaggctctcaaggaggagctgctcttcatgaagaagaaccacgaagaggaagtaaaaggcctacaagcccagattgccagctctgggttgaccgtggaggtagatgcccccaaatctcaggacctcgccaagatcatggcagacatccgggcccaatatgacgagctggctcggaagaaccgagaggagctagacaagtactggtctcagcagattgaggagagcaccacagtggtcaccacacagtctgctgaggttggagctgctgagacgacgctcacagagctgagacgtacagtccagtccttggagatcgacctggactccatgagaaatctgaaggccagcttggagaacagcctgagggaggtggaggcccgctacgccctacagatggagcagctcaacgggatcctgctgcaccttgagtcagagctggcacagacccgggcagagggacagcgccaggcccaggagtatgaggccctgctgaacatcaaggtcaagctggaggctgagatcgccacctaccgccgcctgctggaagatggcgaggactttaatcttggtgatgccttggacagcagcaactccatgcaaaccatccaaaagaccaccacccgccggatagtggatggcaaagtggtgtctgagaccaatgacaccaaagttctgaggcattaagccagcagaagcagggtaccctttggggagcaggaggccaataaaaagttcagagttca

SEQ ID NO: 486452 - DNA, 143 bp, Homo sapiens
gctccttgtggggtgacgctctctctgtggggtgaccgctctctctgtggggtgacgctctctctgtggggtgacgctctctctgtggggtgacgctctctctgtggggggaagggggaagacacagacaggagagagagcgt

SEQ ID NO: 486453 - DNA, 990 bp, Homo sapiens
ctgtgtaatgggatggaagctccgcacgcctggacggatggcccaagcatgtgagtgccatttctcgttttgaggattctgtggactagtgtcacgtacctacagaacctcggttgcaatgttgagaaagaactatgcttcctcgcctctcataaggtagttgtctggttcacatgggcgaggtatagttattcgatgcactcgatgtgtgcctcagttggcgcatagctgcttgttcgttcaacccagggatgtggtggtatatcttatgggtccagtcagttgtcaaatgggagagttcaaatcatgtagaacttcgatcgatgtaagcttgtgaagtgatgttgctggccttgggtactatgtgttggtgactaatgtctatgtgttggtgttcttgatcaagaagatttgttcgtctgttgagtgacgttaggttgaatgacatttcaacagattggttgccaccttgttgagaggttgggccgctaggtttcaagtgggataagcgtagattaatgctagtattctgtctagggtcaatataagcagccgggataattggctcgtgttttggcttagtcgaacacattggtcactactttgtctgactttatttgatagggcgaggatgggaaagagttagagtgggccgttggtggtaaggtcgtggtcatagggcactgaagggttcttgtacattatggtgaccgcaggcagcgcaactcgttcagggtaacgcatgcttcgctgggaccctactcgtggaacgaacaccttgggttgcttaggcggtcccgatttgcagacagccgtgggcagtctggccgcaactgggccgaattgctgactgcacaggcccggcccctgtccacgtaagtccgcaggtatgattctcctcattttcgccctctccaatagagcaccggtaccagttacatgagcgctgacacagcactcgcacccacctgagcggttgcacccattcgt

SEQ ID NO: 486454 - DNA, 1425 bp, Homo sapiens
aatttggctaggtacgaggctgggtgttaatcggccgaagctgagtcctgtcctttctctctccccggacagcatgagcttcaccactcgctccaccttctccaccaactaccggtccctgggctctgtccaggcgcccagctacggcgcccggccggtcagcagcgcggccagcgtctatgcaggcgctgggggctctggttcccggatctccgtgtcccgctccaccagcttcaggggcggcatggggtccgggggcctggccaccgggatagccgggggtctggcaggaatgggaggcatccagaacgagaaggagaccatgcaaagcctgaacgaccgcctggcctcttacctggacagagtgaggagcctggagaccgagaaccggaggctggagagcaaaatccgggagcacttggagaagaagggaccccaggtcagagactggagccattacttcaagatcatcgaggacctgagggctcagatcttcgcaaatactgtggacaatgcccgcatcgttctgcagattgacaatgcccgtcttgctgctgatgactttagagtcaagtatgagacagagctggccatgcgccagtctgtggagaacgacatccatgggctccgcaaggtcattgatgacaccaatatcacacgactgcagctggagacagagatcgaggctctcaaggaggagctgctcttcatgaagaagaaccacgaagaggaagtaaaaggcctacaagcccagattgccagctctgggttgaccgtggaggtagatgcccccaaatctcaggacctcgccaagatcatggcagacatccgggcccaatatgacgagctggctcggaagaaccgagaggagctagacaagtactggtctcagcagattgaggagagcaccacagtggtcaccacacagtctgctgaggttggagctgctgagacgacgctcacagagctgagacgtacagtccagtccttggagatcgacctggactccatgagaaatctgaaggccagcttggagaacagcctgagggaggtggaggcccgctacgccctacagatggagcagctcaacgggatcctgctgcaccttgagtcagagctggcacagacccgggcagagggacagcgccaggcccaggagtatgaggccctgctgaacatcaaggtcaagctggaggctgagatcgccacctaccgccgcctgctggaagatggcgaggactttaatcttggtgatgccttggacagcagcaactccatgcaaaccatccaaaagaccaccacccgccggatagtggatggcaaagtggtgtctgagaccaatgacaccaaagttctgaggcattaagccagcagaagcagggtaccctttggggagcaggaggccaataaaaagttcagagttca

SEQ ID NO: 486455 - DNA, 126 bp, Homo sapiens
  misc_feature (95)..(95): n is a, c, g, or t
cggacgagaaaagcatacgaggagaggatatgagtgacatctacggtcaaaggctggattcctggcaatgaagaaaacaaacagaaaacagatgntcattacagatctttggatggtccgagcgga

SEQ ID NO: 486456 - DNA, 1434 bp, Homo sapiens
cgcgtacaactaggctagtacgaggctggtgttaatcggccgaggggacctgagtcctgtcctttctctctccccggacagcatgagcttcaccactcgctccaccttctccaccaactaccggtccctgggctctgtccaggcgcccagctacggcgcccggccggtcagcagcgcggccagcgtctatgcaggcgctgggggctctggttcccggatctccgtgtcccgctccaccagcttcaggggcggcatggggtccgggggcctggccaccgggatagccgggggtctggcaggaatgggaggcatccagaacgagaaggagaccatgcaaagcctgaacgaccgcctggcctcttacctggacagagtgaggagcctggagaccgagaaccggaggctggagagcaaaatccgggagcacttggagaagaagggaccccaggtcagagactggagccattacttcaagatcatcgaggacctgagggctcagatcttcgcaaatactgtggacaatgcccgcatcgttctgcagattgacaatgcccgtcttgctgctgatgactttagagtcaagtatgagacagagctggccatgcgccagtctgtggagaacgacatccatgggctccgcaaggtcattgatgacaccaatatcacacgactgcagctggagacagagatcgaggctctcaaggaggagctgctcttcatgaagaagaaccacgaagaggaagtaaaaggcctacaagcccagattgccagctctgggttgaccgtggaggtagatgcccccaaatctcaggacctcgccaagatcatggcagacatccgggcccaatatgacgagctggctcggaagaaccgagaggagctagacaagtactggtctcagcagattgaggagagcaccacagtggtcaccacacagtctgctgaggttggagctgctgagacgacgctcacagagctgagacgtacagtccagtccttggagatcgacctggactccatgagaaatctgaaggccagcttggagaacagcctgagggaggtggaggcccgctacgccctacagatggagcagctcaacgggatcctgctgcaccttgagtcagagctggcacagacccgggcagagggacagcgccaggcccaggagtatgaggccctgctgaacatcaaggtcaagctggaggctgagatcgccacctaccgccgcctgctggaagatggcgaggactttaatcttggtgatgccttggacagcagcaactccatgcaaaccatccaaaagaccaccacccgccggatagtggatggcaaagtggtgtctgagaccaatgacaccaaagttctgaggcattaagccagcagaagcagggtaccctttggggagcaggaggccaataaaaagttcagagttca

SEQ ID NO: 486457 - DNA, 403 bp, Homo sapiens
  misc_feature (156)..(156): n is a, c, g, or t
  misc_feature (165)..(165): n is a, c, g, or t
  misc_feature (173)..(173): n is a, c, g, or t
  misc_feature (180)..(180): n is a, c, g, or t
  misc_feature (182)..(182): n is a, c, g, or t
  misc_feature (239)..(239): n is a, c, g, or t
  misc_feature (255)..(255): n is a, c, g, or t
  misc_feature (292)..(292): n is a, c, g, or t
  misc_feature (297)..(297): n is a, c, g, or t
  misc_feature (305)..(305): n is a, c, g, or t
  misc_feature (329)..(329): n is a, c, g, or t
  misc_feature (332)..(332): n is a, c, g, or t
ggtcagggtcctgctttgtccctggcaggctgtcagtccagctggagggggtcagtaggctccagggagtgggccctcccctccgattttggagtttttgggggttccttcagcctcagcctcaatgggaccttttgccctttaggggaggctatnagtttgggncaggaggncaaattnanagcccaaagggggaaatggaaaaacctgggctgctgaggaaaaccccgggggttggngtgaactgatgatgtntcatcccacgccccctatggccccattacctaacctntccanatttgggntattcaaggttttggaggccagcncanacccagctagttgttgaagccagtttttttttgttttggtcatgagggaattaaacgttttttttggcaga

SEQ ID NO: 486458 - DNA, 1451 bp, Homo sapiens
agcggctgtacggtcggaatctttaggatcgcggctcgcgcaggccgccaccgtcgtccgcaaagcctgagtcctgtcctttctctctccccggacagcatgagcttcaccactcgctccaccttctccaccaactaccggtccctgggctctgtccaggcgcccagctacggcgcccggccggtcagcagcgcggccagcgtctatgcaggcgctgggggctctggttcccggatctccgtgtcccgctccaccagcttcaggggcggcatggggtccgggggcctggccaccgggatagccgggggtctggcaggaatgggaggcatccagaacgagaaggagaccatgcaaagcctgaacgaccgcctggcctcttacctggacagagtgaggagcctggagaccgagaaccggaggctggagagcaaaatccgggagcacttggagaagaagggaccccaggtcagagactggagccattacttcaagatcatcgaggacctgagggctcagatcttcgcaaatactgtggacaatgcccgcatcgttctgcagattgacaatgcccgtcttgctgctgatgactttagagtcaagtatgagacagagctggccatgcgccagtctgtggagaacgacatccatgggctccgcaaggtcattgatgacaccaatatcacacgactgcagctggagacagagatcgaggctctcaaggaggagctgctcttcatgaagaagaaccacgaagaggaagtaaaaggcctacaagcccagattgccagctctgggttgaccgtggaggtagatgcccccaaatctcaggacctcgccaagatcatggcagacatccgggcccaatatgacgagctggctcggaagaaccgagaggagctagacaagtactggtctcagcagattgaggagagcaccacagtggtcaccacacagtctgctgaggttggagctgctgagacgacgctcacagagctgagacgtacagtccagtccttggagatcgacctggactccatgagaaatctgaaggccagcttggagaacagcctgagggaggtggaggcccgctacgccctacagatggagcagctcaacgggatcctgctgcaccttgagtcagagctggcacagacccgggcagagggacagcgccaggcccaggagtatgaggccctgctgaacatcaaggtcaagctggaggctgagatcgccacctaccgccgcctgctggaagatggcgaggactttaatcttggtgatgccttggacagcagcaactccatgcaaaccatccaaaagaccaccacccgccggatagtggatggcaaagtggtgtctgagaccaatgacaccaaagttctgaggcattaagccagcagaagcagggtaccctttggggagcaggaggccaataaaaagttcagagttca

SEQ ID NO: 486459 - DNA, 218 bp, Homo sapiens
acaaataagcgtggatcttgccaattgtaatactgggtatccatgatgattaacaggtgggcaagacaagatcatgccccagcaaagactccgagaagccaccaccacctggatagccccatgagctgaagagctgctccaccaggcgtcgctccatggggctgagcccctcatgcaggtagcccaccccatttagcagcgtttccttgagcgtgctg

SEQ ID NO: 486460 - DNA, 179 bp, Homo sapiens
gcaaacgtagaggaaaactgagctccaggtctcctccatacccattatagccatccccaaatccacgtgcagtgccatatccatcagatcctcctctaaagttacttcctggtcctggtccgaaatgtccacccactttatgaatctgtatgccatatgccggctgactcgtggaattg

SEQ ID NO: 486461 - DNA, 1424 bp, Homo sapiens
tgagccaagcgactatgtctaggtcgggcctgggtggtgctgagtcctgtcctttctctctccccggacagcatgagcttcaccactcgctccaccttctccaccaactaccggtccctgggctctgtccaggcgcccagctacggcgcccggccggtcagcagcgcggccagcgtctatgcaggcgctgggggctctggttcccggatctccgtgtcccgctccaccagcttcaggggcggcatggggtccgggggcctggccaccgggatagccgggggtctggcaggaatgggaggcatccagaacgagaaggagaccatgcaaagcctgaacgaccgcctggcctcttacctggacagagtgaggagcctggagaccgagaaccggaggctggagagcaaaatccgggagcacttggagaagaagggaccccaggtcagagactggagccattacttcaagatcatcgaggacctgagggctcagatcttcgcaaatactgtggacaatgcccgcatcgttctgcagattgacaatgcccgtcttgctgctgatgactttagagtcaagtatgagacagagctggccatgcgccagtctgtggagaacgacatccatgggctccgcaaggtcattgatgacaccaatatcacacgactgcagctggagacagagatcgaggctctcaaggaggagctgctcttcatgaagaagaaccacgaagaggaagtaaaaggcctacaagcccagattgccagctctgggttgaccgtggaggtagatgcccccaaatctcaggacctcgccaagatcatggcagacatccgggcccaatatgacgagctggctcggaagaaccgagaggagctagacaagtactggtctcagcagattgaggagagcaccacagtggtcaccacacagtctgctgaggttggagctgctgagacgacgctcacagagctgagacgtacagtccagtccttggagatcgacctggactccatgagaaatctgaaggccagcttggagaacagcctgagggaggtggaggcccgctacgccctacagatggagcagctcaacgggatcctgctgcaccttgagtcagagctggcacagacccgggcagagggacagcgccaggcccaggagtatgaggccctgctgaacatcaaggtcaagctggaggctgagatcgccacctaccgccgcctgctggaagatggcgaggactttaatcttggtgatgccttggacagcagcaactccatgcaaaccatccaaaagaccaccacccgccggatagtggatggcaaagtggtgtctgagaccaatgacaccaaagttctgaggcattaagccagcagaagcagggtaccctttggggagcaggaggccaataaaaagttcagagttca

SEQ ID NO: 486462 - DNA, 364 bp, Homo sapiens
aggctaaataaaaattataccaagcatatatatcaaggactaacccctataccttctgcatatgaattaactagaaatatctctgcaacgagagccatagctatgaccccctaaaccatatctagctaccttagaacagctaataagagcacacccgtctatgtcgcagaatagtgggaagatttataggtagaggcgaccaacctaccgagcctgttgatagctggtttgtccatgatagaatcttagttcaactttaaatttgcccacagaaccctttaaatccccttgttaatttgactgttcgtccacaagaggaacagctctttggacactaggaaaaaaccttgtagagagagtaaaa

SEQ ID NO: 486463 - DNA, 321 bp, Homo sapiens
  misc_feature (93)..(93): n is a, c, g, or t
  misc_feature (165)..(165): n is a, c, g, or t
cttccattgcgctccggccagggcaacaagagcaaaactccgtctcaaaaagaaagaataaagctaaagataactgataatacagcttatagnatcgtcctctcttagaggacgattgtttgtgtagaatgtggtttgctacactgcctccaaaagctgattttntttttttgagacagggtctcactctgtcacacaggctggagtgcaatggcacaatcacggttcactgcagcacctcctggcctcaagcgatcctcctgcctctatctcttgagtggctgggactgcaggcacgtgccaccatacccggctaattta

SEQ ID NO: 486464 - DNA, 1417 bp, Homo sapiens
accttttgctagtcgaggctgggtgtagcaagctgagtcctgtcctttctctctccccggacagcatgagcttcaccactcgctccaccttctccaccaactaccggtccctgggctctgtccaggcgcccagctacggcgcccggccggtcagcagcgcggccagcgtctatgcaggcgctgggggctctggttcccggatctccgtgtcccgctccaccagcttcaggggcggcatggggtccgggggcctggccaccgggatagccgggggtctggcaggaatgggaggcatccagaacgagaaggagaccatgcaaagcctgaacgaccgcctggcctcttacctggacagagtgaggagcctggagaccgagaaccggaggctggagagcaaaatccgggagcacttggagaagaagggaccccaggtcagagactggagccattacttcaagatcatcgaggacctgagggctcagatcttcgcaaatactgtggacaatgcccgcatcgttctgcagattgacaatgcccgtcttgctgctgatgactttagagtcaagtatgagacagagctggccatgcgccagtctgtggagaacgacatccatgggctccgcaaggtcattgatgacaccaatatcacacgactgcagctggagacagagatcgaggctctcaaggaggagctgctcttcatgaagaagaaccacgaagaggaagtaaaaggcctacaagcccagattgccagctctgggttgaccgtggaggtagatgcccccaaatctcaggacctcgccaagatcatggcagacatccgggcccaatatgacgagctggctcggaagaaccgagaggagctagacaagtactggtctcagcagattgaggagagcaccacagtggtcaccacacagtctgctgaggttggagctgctgagacgacgctcacagagctgagacgtacagtccagtccttggagatcgacctggactccatgagaaatctgaaggccagcttggagaacagcctgagggaggtggaggcccgctacgccctacagatggagcagctcaacgggatcctgctgcaccttgagtcagagctggcacagacccgggcagagggacagcgccaggcccaggagtatgaggccctgctgaacatcaaggtcaagctggaggctgagatcgccacctaccgccgcctgctggaagatggcgaggactttaatcttggtgatgccttggacagcagcaactccatgcaaaccatccaaaagaccaccacccgccggatagtggatggcaaagtggtgtctgagaccaatgacaccaaagttctgaggcattaagccagcagaagcagggtaccctttggggagcaggaggccaataaaaagttcagagttca

SEQ ID NO: 486465 - DNA, 155 bp, Homo sapiens
ggaggcgttcagaggagtccccggcggagaaggtcaaagatgatagtatgtgatgaaagaaaacggttctgggcatatagtgcataagtacatcaaagcatgactataatccttttttttttttttttttttttttttttttttttttttttttt

SEQ ID NO: 486466 - DNA, 295 bp, Homo sapiens
ggacaatgtggggagatggaatatgtagaagatagtattaattggttaagaatatctatatgatttaatattttaaaaatctaagcagcctatccatatgttatgtggtgggaagttggacgttaataatttatttccaatccctagattggactctgtcatgtgggacaaagagtaagagatacataacccactataaaaataatgtcttgatgacaggagactaggtctagatagcagggtcttcagcaatcccaaaaggtgaacacatgtaggtgggtcacagctcagttgg

SEQ ID NO: 486467 - DNA, 606 bp, Homo sapiens
  misc_feature (240)..(240): n is a, c, g, or t
  misc_feature (273)..(273): n is a, c, g, or t
  misc_feature (299)..(299): n is a, c, g, or t
aaagcttatagtgtagtgtattcaagagaggatttctacaggaaagcagtccctgcccaagcagcacctacaataaacatgtttatgagcaaacagttcagaaaaacatattgtgagtcttagaaacagcatatgcctcatttcatagaggttgctatgttgctaggcattcttttttttttttactgcattttagagaaataactgtaaaacgagggtctataaccagcatataacacnataaacaacagcatcaacttctgtccccttgtngtaaacagtttccctatgctttaatnggaaatgtaaatgttaatgccttgtgtgctttctcaaaatagttttggacaaattatattccaagaaagatctctgtatttgtcacctctatcaaaggtccaaagattatagaattttcttatcgtaaatcaaggactgctcccctcagcccatagaaaaggatgagctacttcctatttttcaagagctttggaatccctttgcagtaagagaggaactatgacaacaaagtccctaaatgcggcaagatagcacagagagggaggtgtggcatgcagcggcagcaagggtggtcacttaagcttt

SEQ ID NO: 486468 - DNA, 398 bp, Homo sapiens
caagcgctctctatcattacccactgacctggggggctagcatccccctaccttctctccgcgactctaccctctctttgctctggacttgcctccttcactataggcaaacttccaccctccattcctccttcttctcctttagcctgtgttctcaagaactcaaaacctcttcaactcacacctgacctaaaacctaaatgccttattttcttctgcaatgctgcttgaccccaatgcaaacttgacaatggttccaaatagccagaaaacggcactttcgatttctccatcctacaaggtctaggtaattcttgtcatgaaatgggcaaatggtctgaggtgctctgacgccaggcattcttttacacatcagtccctccctagtctctggtccc

SEQ ID NO: 486469 - DNA, 490 bp, Homo sapiens
ctgcagtagtaaggttgagcactgccagggcgtagcttagaagcatggcttgagtgtaaggttgtggtaggggatagtgctcgttgattggaatgagaattttcatcaaagtgctgctgtcagcaaaattgagaaactgtttgagcatggacttaagatgcatcttgccatagccgcctacttgtccgtgcagcaccgtcgttctgagaacagcgaaaacacctagcgtggcaatgtatggtgcaactagccttagggcggcagtaagtttttttggtatgctcagaggctctgtgtttgactcgtcaacgcttggtccggtcagtgaaagcacctcagcggcaaatagcaccgctggtagtgttatggctgtctctttagagcctagagctagccaaaaagagattagcgaagctgtaagtagtgaacgggcaccggccttgcgaaagagtagatatagatagaatgaagctaggtaaaaagccgtagg

SEQ ID NO: 486470 - DNA, 331 bp, Homo sapiens
ggggttccccccagggatttcccgggcccctttttttattggggggcccccttttttcttctttttttttggccccccccccccctgggggccccccgggcccggggggggggttttaccccccccccccccccttggtttttttttttagggggcctcccagggggttttttgggggggggccccccccccccccggggggttccccccggtttttttttttcccggggtccccccccccccccccccggggggggcccgggggtttttttccggtgttttcccccccccccccccgggggggggccccttttcccttttttttttttta

SEQ ID NO: 486471 - DNA, 722 bp, Homo sapiens
gcggacctgagagctggaggggcgtgcgcgcgcctcgctctgttgcgcgcgcggtgtcacctatgggcgcgagcggggccgagcgcgcacgggacccggagccgagggccattgatgtggctgattgtgctggcgacagtgcgatgtgccgtgtggcctgtgcgtggatagacgtggaagccccgtacctcccctaagtccgtcaagttcctgttatgggggcctggccgggatgggagctacagtttttgtccagaccctggacctggctgaagaaccggatgcagtcgagcggggacaggggccaagactcgagagtacacaaccagcttccatgccctcaccagtatcctgcaggcagaaggcctgaggggcaatttacaccgggctgtcggcctggcctgctgcgtcaggccagctacaccactacccgacttggacatctataccgtgctgtttagagcgcctgactggggctgatggtactccccactggcctttctgctgaaaggctgtgattggccatgaccgcaggtgccactgggtgccttatgtgggaacaccagccgaagtggcctcttcatccgcatgactgccgatggccggattacagcatgaccagacgccgtggactacccacaatgtgtctaacgccctgattcgaatacacccggggaagagggtgtcctcacactgtgagcggggctgccatccctaccatg

SEQ ID NO: 486472 - DNA, 82 bp, Homo sapiens
ggttgcccttggtctcggggtcgctgtcggcgctgaggctgcagagactcgctgtatcccccaggctggagtgtagtggcgt

SEQ ID NO: 486473 - DNA, 945 bp, Homo sapiens
gggcctggtggtgggccttcttcatcatcaataggaagtgcatctaaatcggatgaaagcagtactgaggagactgataaatcaagggagagatctcagtgtggtgtgaaagctgttaataaagcttctagtaccagtacctaaagggaattcaagcaatggaagatagtggctctaactagtcaacaaagcgtgttaaagaaaatgagaaagaaaatagggaaagagaaagaaaaagagaaacaaagagaagaatccagctacttactccagaggccaggtacttggtaaaagatggtaaagaaaaaccgaaagtgaagagtggcaagtaatgatgataaagcaagagagaccagggaaagaacgccgaagtctgacaaagagacagaaagcgttcaatgaaggaagaaaaagctaaggatgagagaattggagaccagtgtccccaaagcatgaatcaaaatcaattcaagaaagggatagagagaaggagccatccgagaggaacagagatatagcacaggagatgaaaatcgaggaagacctgtccaagaggaggagaaaggcaccccagtgctgcgttccttgaaatcaactgttcgcagatcagattattccagagctgagaggaccaaaacgcggaaagtggtattcaccgtttccatgacattctccccagtgaggaggctcttcgacctaggacttcgcaaggtgaataatgttttctcctacctgtccgagatgggaggaatggccgaaattgggcgtctgggagaaccagaacagaaacaatgatgcggagaaggcaggtgtcccacacagggtagccggttccaactagcgagaaggggtcgaaacagagggtgcttcatgagagaaaaacatcacagcattgagtctgcacatagacacaataactctcatcctcttaactaccgaggagag

SEQ ID NO: 486474 - DNA, 440 bp, Homo sapiens
tatatatgtatttatatatggcgtgctggttggtctgtccaaccagtacagacctgacatcagccctacagagcgcacacataatgtcattgcagacgtcaataagatgctgagcatgagggaggttgtcatccaggaagtagatcaggttgacagaaagagaatgatatggcaggtgcactgcgtacgggatggattgcatctgaactctcacttcgaaaacggaccgatacttagtcggatcgaatgggctgcacgagatgttccatcaggttcggttcatagtggcattactggtactgggtgcattgtctccaaccagaacttaatcattccgtgccagccgttctagatgaccctgaagagactggtctgcaacgaccaatattaggtgatgtgctgcacaggctcactggagtcatgtctacatgacatgccat

SEQ ID NO: 486475 - DNA, 401 bp, Homo sapiens
ccaacagtcgcgcaatgatcgcgcagcgcatctggcttgaataaaaacaccgtcaatgccgtcgaactggccggcagcttcatgatgagttccatccagcgcctacctcacatgcctggctctacaccccgtacggcggactggaaaatttcgacagccctaccaacgtgctcgcagcgttgacccagcgtttgaaaatcccgaccgacgccacgcgactgctgtgcttcctgcccttgcaacaacaggcatcgcaagtgctggacaaccacctggtgctaacaccggaggcgatgctcgatgacgtgtttggtgaacaggagaaaaccctcaagcgctatcaggcggtcaatcgccaggcgctgctggcggagttgaaacagttgccgtcattgggcgcc

SEQ ID NO: 486476 - DNA, 928 bp, Homo sapiens
gttctttctgtcgcttttcaccatcgggcttctgctgggctcagtattccccaaatacacaacaaggacggacatctattgttcactcctgcttctgaactggcgatgggcttgactacttgctcttgaactgtgagcgactactttagctccgaagggactctggacggggttcaggtctctccaccaaatgaaaactgttgcaactttacaacccctttcagacctgtggcgggaacagataccaaccagcttagcctactacaacttatgcacaagatctggcaaactgaagactgaactttacgaaacactgggtgactagatgtaacaactgtcggcggttcgctattctatgtggcctgctgtaacttaactcatatgctgtggtaacgctgtgagctgcaggaacaacgcagtacctgtggaagttacttcaaccctggcaagtagggactttccagcagctcccatattctggatgggatttcaatgatggtaaactgtaaaactggaagtggagatatcgagaaactacaatgatgctactcaggtcagcagaatcgtcgtctggactggtcttcttgatcttgcactgcagaaggatacgtgcgtctaagattgccgactattgaccatctcattgacctgcgtgcaggctcagacttgatgctccagcacatgtggcctgcggacctacgggacctcggacaacggcaaaatctaaccgaactggttcccggaggaacgtaaccttcatcaccagccgcaacgcccgcgcgcgccccccccacagcccgacactggcagggcctgcacccccgctccgcacccgcccctcccagacgccacccgcccccaccggcaagcggcgacacaaccccccaccaccccgaaggacccccaccgccgccccacacacccccac

SEQ ID NO: 486477 - DNA, 155 bp, Homo sapiens
aattgagacagggtttcgctgtgttgcccaggctggcctcgagctcctgggttcaagtgatcctctgcctcaacttcctgagtagctgggattacaggtgcttgcacatccccagcacagtcttggaggattttaaggagctacctccattgaaa

SEQ ID NO: 486478 - DNA, 283 bp, Homo sapiens
ccgtcacctgggcgtactggtagggatgcgggcaggttggtgacctgggtgaaccacctgacttgagcagggcttacgacgtctctctgcaaacgaaacccagagacatgaacagtgctgagacttctcagttggtttcccactgtaggctagctttccaacgggcagcacagcatggtttcatcacatcacccatgtgcttctgacttcacgcacctgtgactgctcggttaacgttttacactgacggtttcacaactttttctcgtactgtaacgacgtc

SEQ ID NO: 486479 - DNA, 278 bp, Homo sapiens
  misc_feature (167)..(167): n is a, c, g, or t
  misc_feature (225)..(225): n is a, c, g, or t
  misc_feature (247)..(247): n is a, c, g, or t
cgggctcatgcaggtggcggtccagagccctgagcgcccgctgaatgagacgccggtcctgtggcgtcatctcgccgggtaaaaaggaaagctgtttcatctgttgctcttcggtcagtcgataatacgcagaatggcgtgagcctctggatgttgcatggcatacntcccaggcggtaatagtgtgcggtcatcgcgtcacattctgtacggcaggcatggtgntatacgcaatcaggcagacagnaatacctgctgcttctgcactcatttgggca

SEQ ID NO: 486480 - DNA, 615 bp, Homo sapiens
  misc_feature (16)..(16): n is a, c, g, or t
  misc_feature (38)..(38): n is a, c, g, or t
  misc_feature (46)..(47): n is a, c, g, or t
  misc_feature (51)..(52): n is a, c, g, or t
  misc_feature (70)..(70): n is a, c, g, or t
  misc_feature (77)..(77): n is a, c, g, or t
  misc_feature (94)..(95): n is a, c, g, or t
  misc_feature (104)..(104): n is a, c, g, or t
  misc_feature (106)..(106): n is a, c, g, or t
  misc_feature (108)..(108): n is a, c, g, or t
  misc_feature (110)..(110): n is a, c, g, or t
  misc_feature (113)..(114): n is a, c, g, or t
  misc_feature (117)..(117): n is a, c, g, or t
  misc_feature (121)..(121): n is a, c, g, or t
  misc_feature (129)..(129): n is a, c, g, or t
  misc_feature (181)..(181): n is a, c, g, or t
  misc_feature (232)..(232): n is a, c, g, or t
  misc_feature (250)..(250): n is a, c, g, or t
  misc_feature (280)..(280): n is a, c, g, or t
  misc_feature (287)..(290): n is a, c, g, or t
  misc_feature (292)..(292): n is a, c, g, or t
  misc_feature (298)..(299): n is a, c, g, or t
  misc_feature (302)..(302): n is a, c, g, or t
  misc_feature (413)..(413): n is a, c, g, or t
  misc_feature (447)..(447): n is a, c, g, or t
  misc_feature (572)..(572): n is a, c, g, or t
  misc_feature (576)..(576): n is a, c, g, or t
  misc_feature (593)..(593): n is a, c, g, or t
  misc_feature (606)..(606): n is a, c, g, or t
tattggtgctgctagnctgtgggtcaaatgtttgccanttccaggnngttnngccctcttatgagtttanaatttgnaaatttctaaacccaannatgtaaaangngncncgnngcnccantggggtantcccccacctaaatatcaagatggctactatgctaaaaagagaaaatatggncaagtcgtaaaatggctaattggcctatgacgctattatcatagactaatnacatttatcttcaaaacnccaaattgtctttagaaaaattaatgtgancacaggnnnngncccccnnggncaaacacttttaaggtacactgcattttgcaaaaaaaaaaaaaaaaagtaatcttttagcaaccccagtattccttcactatttcgcttcctgcattagcaaatttaactnacagtcaaaagtgcagatttatactcctgacgtntctcattcacagctaaataataggccataggacttttggtaggtttaaacttttaattctgtatttcatgattataagtcttgctagaattttttctaatctttagtagatttgattaaataatnattnacagaatttagtaacanaatcacaactaanccatgtata

SEQ ID NO: 486481 - DNA, 237 bp, Homo sapiens
aggtcttttattgcatcatttacatatcacaagtaggtcttacgtgtcatctggcatcttcttttctgtagccaggtaactcttagattcttattccatcagcctggctgaaccagttcccttttcagaagaacattagaatacccatcccaaaaaatttccctgattattccttggtttttaaactggtgtgcgggcttggtttgaaatcaacagcccgcgtggaaattttgtaaa

SEQ ID NO: 486482 - DNA, 341 bp, Homo sapiens
  misc_feature (15)..(15): n is a, c, g, or t
  misc_feature (19)..(19): n is a, c, g, or t
  misc_feature (52)..(52): n is a, c, g, or t
  misc_feature (139)..(139): n is a, c, g, or t
  misc_feature (173)..(173): n is a, c, g, or t
  misc_feature (298)..(298): n is a, c, g, or t
  misc_feature (302)..(302): n is a, c, g, or t
  misc_feature (319)..(319): n is a, c, g, or t
  misc_feature (332)..(332): n is a, c, g, or t
aaggtacaatttganactnatgcttcacctttcctttaataaactattcaanatcaaaaaaaaaaaaaaaaaaaagtaatcttttagcaaccccagtattccttcactatttcgcttcctgcattagcaaatttaactnacagtcaaaagtgcagatttatactcctgacgtntctcattcacagctaaataataggccataggacttttggtaggtttaaacttttaattctgtatttcatgattataagtcttgctagaattttttctaatctttagtagatttgattaaataatnattnacagaatttagtaacanaatcacaactaanccatgtata

SEQ ID NO: 486483 - DNA, 332 bp, Homo sapiens
caaagtgaattggaaaaaacgcccaaaagaccccaaccccatgatgatggtaatgttagaattatctggtaagcattttaaagcagccatcataaatatgctttaggagcagtcataagcatgcttgaaacaaaggaaaaaaatgggtttaaacatagaaagtgctggaaaagaaataaaatcccttttaaaagaccaaaatggaaattgtaaaggtaccaaatcccgtaatccagttaaaaaatcccccccccaatagatgagctcaccagcataatggagaggaaatgaaaatcagtgaaattaaagataaaacaccagaaattgtccca

SEQ ID NO: 486484 - DNA, 290 bp, Homo sapiens
ggacggcgtggaatgaggccggttcattcctggaggcctcctgtccgtatggaccccagcacctcatcatcagcattgctggagccaagggcctctgagcccaagctcatgtcctctgtaacctgcacgtacacatccagatggccggttcctgccttaactgatgacattccaccacaaaagaagtgaaaatggcctgttcctgccttaactgatgacactatcttgtgaaattccttctcctggctcatcctggctcaaaagctcccctactgagcaccttgtgacct

SEQ ID NO: 486485 - DNA, 203 bp, Homo sapiens
ccaaggaaaatggtcaataaacacgtgtaaagatgctcaacatcattagccatcaaagaaatacaaatcaaaatcccaattagatgtgacttcacaccctcaaggatgtctatcatcaaaaagacataatgacaagtggtgctaagaatgtaaaaaattcaaacactcatatattactggtcacagtgtaaattggtatagcc

SEQ ID NO: 486486 - DNA, 254 bp, Homo sapiens
  misc_feature (193)..(193): n is a, c, g, or t
  misc_feature (213)..(213): n is a, c, g, or t
  misc_feature (239)..(239): n is a, c, g, or t
  misc_feature (241)..(241): n is a, c, g, or t
  misc_feature (246)..(246): n is a, c, g, or t
gcccaagcaaggaaatccccaaggcttatgttgtgttaaaagacatccccctgaaaaacttcgaaaagctcaaaaagcccaggggagaaacaaagggaatgttttattgagagccctttttcccattttgtgaagagaacaacaaaacccttcctgttttttattggggactccaaattttccccaaacttgnttttgttgaaatttttcccnccccttgcctttcaggcccaataaananagttntcccccta

SEQ ID NO: 486487 - DNA, 326 bp, Homo sapiens
gggatatcattagggacagtttctacggatccattctttttccgggtatggggccattcgtcctatttcttggcatgtcttacaattcttggggggaaaatgggacatattagataatatggcatctctgaaaattagatacttctcccccatattctcttcagttttttttttttcttttttgggtctggtagtggctggctggctggtggcgggtctggtatccttggtcatatgtgtccactaggtctcttctcagttagtttaggggccagttaaggatggattgggacagagttttccttaaaagcctggaaggtatgtct

SEQ ID NO: 486488 - DNA, 206 bp, Homo sapiens
tccccggggtttaagggttaaggggccccccatcccagtgccaagggggatgtcaagtggtgatgttgttgtgctcccctcccccagaggggggggggggggggtgaatatggttggcctgcatcggggggccttcccttttaggggctttttttggggttgagggccctggtgtgttgggaattaaagagaaagccggcccccta

SEQ ID NO: 486489 - DNA, 525 bp, Homo sapiens
  misc_feature (305)..(305): n is a, c, g, or t
  misc_feature (408)..(408): n is a, c, g, or t
  misc_feature (432)..(432): n is a, c, g, or t
  misc_feature (439)..(439): n is a, c, g, or t
  misc_feature (465)..(465): n is a, c, g, or t
  misc_feature (502)..(502): n is a, c, g, or t
tttatggtcccagatgagcagatcggtgtcatctcaagcacctcgcacatcactaaggccaccttgatcacctagaacctcaagaaggtccagcacagcagcgcccatctcgagcggatgaagatagaacctggtacagacgctgaagcgacctccagcatcgtctggatgacggctgagcagctggccctgaaagggtgggaagaagcagatcccagaaactggaggccagggtacgggagcctggaaggagaggttgagagtgagcaaaaagccgtatgctgaggctgtccaaggtctgcgcnaacatgagaggcgagtgaaggaactcacttaccagacggaagaagatagaaagaatattctcaggcttcaagatttggtagataaacttcaggcaaagtgaantcttataagagacagctgaggagnctgaggnacatccaacaccaatctagctaaatntccgcaagctccagcatgagctggaggaggccgaggnacgggctgcattgctgaatcccg

SEQ ID NO: 486490 - DNA, 528 bp, Homo sapiens
  misc_feature (305)..(305): n is a, c, g, or t
  misc_feature (468)..(468): n is a, c, g, or t
  misc_feature (505)..(505): n is a, c, g, or t
tttatggtcccagatgagcagatcggtgtcatctcaagcacctcgcacatcactaaggccaccttgatcacctagaacctcaagaaggtccagcacagcagcgcccatctcgagcggatgaagatagaacctggtacagacgctgaagcgacctccagcatcgtctggatgacggctgagcagctggccctgaaagggtgggaagaagcagatcccagaaactggaggccagggtacgggagcctggaaggagaggttgagagtgagcaaaaagccgtatgctgaggctgtccaaggtctgcgcnaacatgagaggcgagtgaaggaactcacttaccagacggaagaagatagaaagaatattctcaggcttcaagatttggtacgtgaatgtgtgtcagggggagacttgctggtgggttaatctgccttaggatgtgatcgatccaacaccaatctagctaaatntccgcaagctccagcatgagctggaggaggccgaggnacgggctgcattgctgaatcccg

SEQ ID NO: 486491 - DNA, 152 bp, Homo sapiens
tctgactagccagctatagagtatagttagagcaggctactgtgataaatagttcataatagtactaacccattgcctaccaggaaaacaaatcagtatcttaccctgggctacaagggccctcataatctaggcccctaacatacctactg

SEQ ID NO: 486492 - DNA, 227 bp, Homo sapiens
tccagcgggggtcggagaagacacaggctgggctcacacgaggggcaacattcacacgtgttctctctacaggtcaggtcatttttcttcatgttcgggcgggaaaaggaattcctttctccttttctaaggcaagctgctggtggtgtattcaatctgcttatcatgtaagaacttacatctgcacactggttcactcccccgctgcatgcattcgggggaaatgg

SEQ ID NO: 486493 - DNA, 334 bp, Homo sapiens
ccgacttagaggacccctacgcctggcgcaagccaacatttccgatccccaggtcagtagagcccgagtgtgcagaatctgcagaggggctgctctcgccctgctctggccgggaaacaggcctccaagtacccaaggtagcatttttggtggccctccccaagctcctctttctcctccagcccagctgtgtggtaccaagtgccctggaagtctactgagtggtgtccagggtcccctcagacagcatcccagagacttgaccttcctctgtgtgtccagtctgtcaggcccagcttttaggtactctttgaccatagacgtctttgaagcc

SEQ ID NO: 486494 - DNA, 210 bp, Homo sapiens
actccactcctgagtacagagtgagaaatccagtttcaatataatatatataacaagagaacaaatttgcttgctttaagaagtggtctcctgaggttttaagacttgcctgacagtttcgtgattggttgggagagaggctgctgtctttgcgctgtgcattttcacagatgagaaccacgcctagccaaaatcacttttcctgtttgc

SEQ ID NO: 486495 - DNA, 933 bp, Homo sapiens
gaatactttctgcctttgctcagtgatagttattctacaatctccactaagaaaaatataccttttatccggaaaagtattggtttaaggcaaataacataaaactgtgacttgctctaaagactctgtcactactatagcaaagtttgtccagttcctttattccactcataaccacatgctgttccccaccaggtctaaagatgcttctgtaatcttaaatagggtttttcaactttcattaaggtacacctatatgatcttatggttcctagaggtgcaggtccatatagtcgtacatacttaaatactacttgcgtacactgatgctttagtggctcatgggtttccttggttctttgatttaacacctggcattcctggtatcgtatggctggttaaatatcgtaaacctgcattattagtgcttgacaataataattcccttggactgaagtccagaaatactaaagcacttctttttgattgctgtgaatgcgcttagagcgttatcttcgcgaaataggatacatgcgtttgctatttgcatagtataactgaaatatttgataaactcactgtaatcaaatcttgataaaatctgaatcgaacatgaagaagttgtcaatgcttgaatgaatactaataatcggtaccacaaggatactagataacgtaaatggaccatgaagtgtcccactgtgtcaaagggtaacaaactttaagaacagatagccatggaagtggtggtgtggaacctcaagattctttggggactagggaatttaaaggttggggaggcaggaattcaatgatttgacaagaaatacttaatagaactttgtccaatggtatggctaaggaagacttcctcaaaatttggcaggtcgaaactggatccttatgtttacgaatattaatcatttaataaac

SEQ ID NO: 486496 - DNA, 459 bp, Homo sapiens
  misc_feature (47)..(47): n is a, c, g, or t
  misc_feature (69)..(69): n is a, c, g, or t
  misc_feature (71)..(71): n is a, c, g, or t
  misc_feature (108)..(108): n is a, c, g, or t
  misc_feature (113)..(113): n is a, c, g, or t
  misc_feature (127)..(127): n is a, c, g, or t
  misc_feature (144)..(144): n is a, c, g, or t
  misc_feature (151)..(151): n is a, c, g, or t
  misc_feature (154)..(154): n is a, c, g, or t
  misc_feature (162)..(162): n is a, c, g, or t
  misc_feature (209)..(209): n is a, c, g, or t
  misc_feature (238)..(238): n is a, c, g, or t
  misc_feature (255)..(255): n is a, c, g, or t
  misc_feature (266)..(266): n is a, c, g, or t
  misc_feature (280)..(280): n is a, c, g, or t
  misc_feature (434)..(434): n is a, c, g, or t
ttttattttatttattcatttaaagacaaatttttaaaagtaaagtnaatgaaaccatttgtaattaananacatagacagaacttcaatgtagaaaaaaaaaaaaanttgangggaaaaaaatgangagaaaaaatgtaaaanatttcanagncgcccaanaagctcccattgtaaacaggattaagctgctcttgatttagcccgtnacatcaaggtttcattttgctcagcctgngatctcgctcaatttcnaactgcctgtnatccactcggtcgnggaaggctttccgttcaatgttcccctctttccctcgattatggatggccagttcttcaccaatcccctcttcctccttgaagctctcccagtccagtttggccttctcaggggtgctcattttctgcttcttggcaccaattttccccaaagngctgctcatgccacttgatcttttt

SEQ ID NO: 486497 - DNA, 368 bp, Homo sapiens
  misc_feature (43)..(43): n is a, c, g, or t
aatactgcatgatctcatatatatgtggaatcttagaaattanagtcaaactcatagaaaaaaatcttctcttcggctgggtgcggtggctcacgcctgtaatcccagcactttgggaggttgaggcgggtgtatcacaaggtcaggagatcgagaccatactggctaacacagtgaaaccccgtctctactaaaaatacaaaaaaattaatgggtgtggtggcgggcgcctgtagttcccttagtcccagctactcagaaggctgaggcaggagaatggcatgaataaaaacactagctccacacaagctcccgggaggcggagcttgcagtgagccgagatcgtgccactgcactccagcctgggc

SEQ ID NO: 486498 - DNA, 511 bp, Homo sapiens
tccgtcagaacaaatcgacaatcagaaatgctcgaaaatcgcaaacatttctaataccggaagtaactaattccaccgttgacctcatgtgacagaccacagtcacaatgcaggcacagaacacagtttattccgcgtctccaaggggaacacagacctcccagacccctgcatctgctgctgtttaatagcggttacaggtattccagtaatacaactatgctgcttagttaccctccacgcattattttttaattgtattaatggtacgccatatcccttactgttaaggtacttacatgtgaatcatcgtcagcctctgattgcttattgctagcctataaattcatgtccaggaacaatcagtgatgtctagcaaccgcaagatgtcaacctggatggctgagatggtgacacctttgctttctgatggttcaatgtatacgcacttctttcatatcttcaactattgtataaaattacgttcagactggacgcgccatcgtgcgct

SEQ ID NO: 486499 - DNA, 400 bp, Homo sapiens
tctatcaggcggagagtcacaaccgcctccccaattcatcagctgggctgaaagtccaacttgccagaatatcgtatctgatctctactacctcttccactgccttcccttccagcacttcctccccttctacatctgtgaaatggctcacccttccacattcaagacataactcccaggctctgctccatatcccattccgcacaccttccacagcaacttagctattaattatctcctttcatccttacaacattataccataacactttctccatctctactgacttgccatccttaggatacaaacataattaacttctccaatcttataagatgataagttctttcaaccacagataattcctaccattctttcaccccttatctggggagagaa

SEQ ID NO: 486500 - DNA, 203 bp, Homo sapiens
gggctctgaagtaccatgaagcctgtagaactgagaaggagaagcttacaaaaaaaaaaaaatcctctttctatattgcagtctctctaaaggagggcaaatttggttttacaccctccatgttaattctccttttacttttaggggtttgttaaaagctacctttattagatatagaatggccagatttctctgatttcaaa

SEQ ID NO: 486501 - DNA, 580 bp, Homo sapiens
  misc_feature (99)..(99): n is a, c, g, or t
ttgtcccaaaacgcttaactgtggccgcttagaacgatgcgaaaccatccccctgtgtaaggccgtgccgtgtgacttgaaacctagggccctcccttngaagcatcaaaccccacccagccctggggggagggccaccccttttggaccaacccgggttttggggggcccagcgccaggttaacccttaaacctgccccccttagcccaggaaccgggaggcctgcggggtgacccaaaaaccgatcatgcccctgtcctcaagccaacggctttgggtgggggtggttttaaacccgcccccggcagttttttgttaaaaattttaggggccccccaagtccgggggggtcgccgcccgcagccttttccaaaccctggggccaacgagggtcccagcccaacccgcaaaaacggaggtggggtgcaactggggggggcaagggctttcctttcaaaaattcgggttttaaaaaaaagcaagcccaaaggggttttttttttttcccaagatttggaaaaaaccttttaaggctgggaacttttttgggcaacccccccaaaaacattttgtttttta

SEQ ID NO: 486502 - DNA, 115 bp, Homo sapiens
cagtgagtctcgcgcggacaggcgggcggaagaggagcggcgatggatctacagctacgggataggaaggccttcgtgagcggatcgtcgcaagggatcggctacgcgaccgcgt

SEQ ID NO: 486503 - DNA, 367 bp, Homo sapiens
ttcccatattttttaaaacataaaattgaaatctcgagaatataatacatagaatagagaatatagaaaattaaatcttctaatattgttctgcagatttgatcttttttctctaataataaatcaaggcctccgggtatatttgtttgtatatgtacaggaaaaggtctgtaaggatttactttcagctgttaattgcagtgactctggggaatttccacttctgctttgtacagttccttgtgtgaatttttacatcatgtattacttttgtagttggggaaaaagcaattaaaagtttggaaaaaaagaacctctagccattgttataataagaagttggaatcaataaaaatatccacaaacg

SEQ ID NO: 486504 - DNA, 372 bp, Homo sapiens
ggaacacactgtggggtttcaggggacatatgtgctcaccacacattgcgccccaaccaggcccagacatgagacacggtcccgggagctctctctagccttctcgtatattccagacctgtgctcatgtcacaatttgtaatgaggtgtttggctgggtgacattttatggccatctgtctccctatcccctataatgggggttgcgcggcgaagcccaagactgtgtcgggcatctgtgtcttcaggatcaccccttactgtgcatggagtatgtgtgcaggtaacgcttgctgagtgaatgaatgaatactccatactctgtctggagaattacgcactttagcatattcaagggtctgcgtgctgcgt

SEQ ID NO: 486505 - DNA, 740 bp, Homo sapiens
tctccctctcccggggacgtggtctggcgggcacgcagaaagggcccagcgttggacataccgacgtaggcttccctacaatacagcctctaacaaaatctaggctgccccgaaccccgggtaataagaattggtgtcacctttataccaaagaagggtggggaacacgcaccaaaatctggcttgtggtgttggtggtggcccagggcagactctcagaaggggtctcggtggctgggtaacgaccctaaatgtatctatatagaagattggtccaacaacaagagaaacttggtcacgccgagggccctagtgggtggtcccagtggtggttgctaaagtggtgtctcggttgacgaaggatcaaggcggtgcttcaccattatcggaggagccagaacaatcgtgtgtcgaagggtgtgtgagggcacagagcacagagtcagaaggcctaaataaaaaattgaaccttttgggaagttaattaaaaaaagaaaaaaaaagaagaaagaaaacaaaaataaaagaaaaaaaaaacgaacacaaaaaacccggggggacaacaacgacgggggggcgggggaacaaagaggacgtacgaacgcggccactagccacgcgagagtagcccacgaacaaacagcgaagtacgcacaagagggagaaaaaccacgagcccacaaaagagggcggaaaaactacagaccacgggcacgcgcatatacgccggaagaaacccg

SEQ ID NO: 486506 - DNA, 348 bp, Homo sapiens
  misc_feature (192)..(192): n is a, c, g, or t
  misc_feature (227)..(227): n is a, c, g, or t
  misc_feature (265)..(265): n is a, c, g, or t
  misc_feature (269)..(269): n is a, c, g, or t
  misc_feature (272)..(272): n is a, c, g, or t
  misc_feature (282)..(282): n is a, c, g, or t
  misc_feature (288)..(288): n is a, c, g, or t
  misc_feature (292)..(292): n is a, c, g, or t
  misc_feature (306)..(306): n is a, c, g, or t
  misc_feature (312)..(312): n is a, c, g, or t
  misc_feature (318)..(318): n is a, c, g, or t
tgcagtactggatgtgatgctgtgtgcctcccaagagacagccagacaacaaatctgtcccccactggcccactgatgttcccacatggatcctgcccatcagtctgacacccaaacttgtgtgtagcagcgctccatgtggtgcaaggcaagacgcgggttgatgggtgttgcccacaggaaacacagaanatctgcaggtctgtgtcatcactgtcaccctcgtngctctcctcatcctcgcgcacagactgctgcttggacngtanaangatggcctcnagctcntggnatcggcgtaccatntcctgnaggcgngtgcgggcactctgctgctctcggcgaatg

SEQ ID NO: 486507 - DNA, 286 bp, Homo sapiens
  misc_feature (8)..(8): n is a, c, g, or t
  misc_feature (24)..(24): n is a, c, g, or t
  misc_feature (33)..(33): n is a, c, g, or t
  misc_feature (63)..(63): n is a, c, g, or t
  misc_feature (108)..(108): n is a, c, g, or t
  misc_feature (217)..(217): n is a, c, g, or t
  misc_feature (221)..(221): n is a, c, g, or t
  misc_feature (227)..(227): n is a, c, g, or t
  misc_feature (261)..(261): n is a, c, g, or t
cctcaggntcccgagtagctaggnttaaaagcntgtgccaccacgccctgctaaattttgtanttttagtagagatggggtttcacatgttgctcaggctggtcttgnacttctgacctaaagtgatccgcctgccttggcctcccaaagtgctaggattacaagcatgagccactgtgcccggccagattgttctctcttaatgggctgataagtnaccnagtganacatattgtacttttaccccatgctagaggcagnaagcccaagctgcagaatgcccaat

SEQ ID NO: 486508 - DNA, 616 bp, Homo sapiens
  misc_feature (327)..(327): n is a, c, g, or t
cagctgtgctcctgactttaaataaaatacacatgtataatctgcatgtcattgaaagattattcttagactgggtgcagtgggtcacgcctgtaatctcagcactttgggaggctcaggtgggtggatcacctgaggtcaggagttcaagaccagcctgaccaacatggtgaacacccatctctactaaaaatacaaaattagccgggcatggtgacacatgcctgtaatcccagctacttgggaggctgaggcaggagagttgctcaaacccgggaggccagaggttgtggtgagccaagatcgtaccattgcactccagcctgngcgacagagggagactccgtctcaaaaaagaaaaaaaaagaaaaggattctgagttgagttgggttttataccttaaatagcaagcaacatcccaggagtatcacataccaaggaatagatctgagaataaaaatagccaccatttattgagtgtctgttttgtgctagggctagatactttatatgtcattttattgtgaatcacaatatccccacaaaataatggggaattcttgcatttatacataaagtgaggcaagattgagtcgggatctctagagtgacctg

SEQ ID NO: 486509 - DNA, 1145 bp, Homo sapiens
  misc_feature (1020)..(1020): n is a, c, g, or t
  misc_feature (1117)..(1117): n is a, c, g, or t
  misc_feature (1145)..(1145): n is a, c, g, or t
gacactacttggcccgttcctgggctatggagggcatgagttcgttgcgcgcagggtatcgagataacagaatgtggatagtgtgcgttggtacttgtgcgcgaacacgcgttggaactactgtctctgatgaggggtcctccactcgcctcgatgcgtttccagaggggacgtgatgctcctgtatcgagacagtggtgaacggtgctataagagtatgatgacatcgtgaggtctccttggattatactgaaaaggacgtctgtcaagtaagtatacttgaggattctaatcttgtgggatgagagatagggattgataggtagtctatggagatatactctggtgtactgtctttgtaaggtacaaagcgatactttgtcaggaatttccgagagaagggtatgatccgggaaacattgggagattatttttcagcatccgcatactaatgatgtgatgctccggtcattgctattgattagtcctgaaacggatattgttgctcgagaccatggccgtgcgttccaatcgtttgccttgaggtctgctgacatcacggggtcaggagtcgtgggatggtcgcgacaagattggttgccgtgtgggcagggccatggtttcctggtatttacctgggctgctcggttgacctgcgcatgttccggtccttgctccggaaaggagatcttcgcctttgtgcctttgttttccctcgtctaccccgttttttcctcctctttttgcgccaccgggtacaggcgcacacttctgcggacggggcggcggggcgcacacacacagcctcgggcgaggtctgcgcccaagtagagctcacacatgagagcgctgtgcaattacaaaatgggcgcgcggggcccctaccggttgataggacatacaacaagcactagagcaggcttgcgcgtgctcatatacagtagttgcgtcgtttcgtacctcttatctctcttgttgctttgctattctaccatactattctagtctatctactcgacntcaacattaaatggtatacagacatactatagacaaatactactaacgcatactgctatactagcacacacacactacaacatgagactgacagcancaacagaacagaccacaacgaagcgacn

SEQ ID NO: 486510 - DNA, 103 bp, Homo sapiens
tgtcgccagccaacaggatgtggtagtacatcgggacaacaatagaggcaatcctaaagaggtatcccaaattagggaaaaccagtgacccaaattatacatt

SEQ ID NO: 486511 - DNA, 711 bp, Homo sapiens
  misc_feature (34)..(34): n is a, c, g, or t
  misc_feature (90)..(90): n is a, c, g, or t
  misc_feature (101)..(101): n is a, c, g, or t
  misc_feature (119)..(119): n is a, c, g, or t
  misc_feature (130)..(131): n is a, c, g, or t
  misc_feature (135)..(136): n is a, c, g, or t
  misc_feature (158)..(158): n is a, c, g, or t
  misc_feature (169)..(169): n is a, c, g, or t
  misc_feature (188)..(188): n is a, c, g, or t
  misc_feature (206)..(206): n is a, c, g, or t
  misc_feature (221)..(221): n is a, c, g, or t
  misc_feature (225)..(225): n is a, c, g, or t
  misc_feature (242)..(242): n is a, c, g, or t
  misc_feature (260)..(260): n is a, c, g, or t
  misc_feature (288)..(288): n is a, c, g, or t
  misc_feature (297)..(297): n is a, c, g, or t
  misc_feature (353)..(353): n is a, c, g, or t
  misc_feature (508)..(508): n is a, c, g, or t
  misc_feature (637)..(637): n is a, c, g, or t
  misc_feature (701)..(701): n is a, c, g, or t
ccatggtctggccctgggtggcgatggcgtccangtggggtcccctcattggcctggctccgtgctgcctctggctcctgggggcagtcnttctgatggangcgtctgcacggcctgcnaaaaaatagtnnaatnnaaaaaaaatagaaaaaaaggangaaaataaaanaatgcacccaaaaaaaatnaacggggtgaagctgganatggatgggcacctnaatngcggcttccaccaggangtcttcctaggcaagganctgggtggctttgatgaggaagcggagngcggcggangaaggaagctgatggtcatcttttccaaggtgagatgtgaacactgaccggaagancagtgccaaggagatgcagcgctggatcatggagaagacggccgagcacttccaggaggccatggaggagagcaagacacacttccgcgccgtggaccctgacggggacggtcacgtgtcttgggacgagtataaggtgaagtttttggcgagtnaaggccatagcgagaaggaggttgccgacgccatcaggctcaacgaggaactcaaagtggacgaggaaacacaggaagtcctggagaactgaaggaccgctggtaccaggcggacagccccctgcaganctgctgctgacggaggaggagttctgtcgttctccacccgagcacagcggggaatgctcaggtnatggtgaaga

SEQ ID NO: 486512 - DNA, 345 bp, Homo sapiens
ttttgggggcccagggggaaggggaaaaaacccccccctgggcccggcccccccggtccgggggggggccccccctttttatgggggtttttgtttcccccccccggggttttattccgcccctggggggtttttggggaaggttttcccccccccgttcccgggggggccgggggtcccccccccatttccggggggcccccccctttgggggatttttagccccccttttccaagggggggggccccggttttgaatacccccccggttttcaggggcccccccccccccccttgggtttgggggtttggggggttttggccccctttatttttttttttgga

SEQ ID NO: 486513 - DNA, 603 bp, Homo sapiens
tgtcccgatgttcaagttattggatcatttagtattagtagttcgcttgcctgggtgaagtcttagcatgtactcctcgaaggttagatcctgctcgaggtcgccacaccgaatcttaatgcagattgggtagtttagtacctgtgggtctgttaggtactgtatgcattattacattaaagctccatcactggttaaaagtaatagccagctgatccctcgtggatccattcgtacaggtccctaattaaggaacaagtgattatgcgacctttgctcggttagggtaccctggccgttaaacatgtgtcactgggcagtcggtgcctctattactggtgatgctagaggtaatgtttttggtaagcagacgcggtaagatatcccgagttcctttcacttcatttatcctttccttatgagcatgcctgtgctgggttgccagtcagggtaataatgtcttgttggttcattgtagatattggcctgttaagtgtcagtccagtgttctgatctgacgcaggctcacgcggaggagaatgtatgcacgttacttatactagcatgagttcttctatagggtgatagtctggtccaattgag

SEQ ID NO: 486514 - DNA, 536 bp, Homo sapiens
  misc_feature (47)..(47): n is a, c, g, or t
  misc_feature (85)..(85): n is a, c, g, or t
  misc_feature (299)..(299): n is a, c, g, or t
agcgggtaaacacacacgctcggggaacacacaccggtgtgtccggngacccacaagaaaggagtgggtaacactatacacaacnttggagacaaaaaagtattcccgcaccccttcttggcaagagagcactggtaagtggtacaaacacgagctgccctttttaatgggagattattttaactttcgcccattatcaggagttttccaaagatgccctcccaccccgatcgccaatgcacacacggcgcataatcatagcggattatttaatcatttggtaaaaaaccagacaattnaaattccttcttgggacccaacgtgggatacaatatcatactcgagacccccacatatgggggatttcacccatatccaccgggccaaattggctggagattggggacctgaatgataaataatttttgacgcacccgagccctcgttggcgcaagagaaaacctgtttgccatttttttaaccctttttaaaaactggggcgggtttttccgggtaaaaatttttaagccacccaa

SEQ ID NO: 486515 - DNA, 333 bp, Homo sapiens
  misc_feature (2)..(2): n is a, c, g, or t
  misc_feature (10)..(10): n is a, c, g, or t
  misc_feature (116)..(116): n is a, c, g, or t
  misc_feature (169)..(169): n is a, c, g, or t
  misc_feature (174)..(174): n is a, c, g, or t
tncatttttngagatggagtttcactcttgtcacccaggatggagtgcaatggcacgattctcggctcactgcaacctccacctcctggattcaagcgattctcctgcctcagccncccgagcagctgggattacaggcacgcaccaccacacctggctaattctttanatttncagtagagacagggcttcatcatgctggccaggctggtcccggaactcccgacctcaagtgatccacccgcctcagcctcccaaagtgctgggattacaggcgttgagtcatcatgcccatccctactcaggggtcttttagaaggaaaatgccaccat

SEQ ID NO: 486516 - DNA, 299 bp, Homo sapiens
gagctatagatattcctacagcagtattgaatgatatctacccaaatatatgtacccattatataaatacataaatctgaaaaaaattatgaagtgtttcatgcctgtcctttgaagatctttccttttcactccctaatttacaatatacttgaaacaaaaatgctcaaggattacactgcatgaacatctgtagtaattgtgcatagtagaacatagaccaatattaattcttctagtattgagttgtggtacattgtcagaggaatgtcttatccatgtcaactttcatatgggta

SEQ ID NO: 486517 - DNA, 165 bp, Homo sapiens
aagtgagcactgctattcctcaactgctgcctgcaggaggccatctcttctgggagcttatctgacttaacttcacctacaagttcgctcttacgagacgggggtaagcgtgatctccatgctatccctgcagcgcctgcacggcaggcttgccctatcttatag

SEQ ID NO: 486518 - DNA, 1072 bp, Homo sapiens
  misc_feature (768)..(768): n is a, c, g, or t
gccgggcactgatcccgcctggggccggtgagtggcacttaagcgggccatgccatgcaaccttgggcgctgccaaccgtgggcgagctctgggtgtgcgggcggctggcgcggcgctccgtgtgtcagcgtgttatgatgccgtcccgtaccaacctggctactggaatccccagtagtaacacgtgaaatattcaaggctctccagcacagacgatgggctacatttgaccgctccctcctgctgtgttcaggctacatcagcaaagggggggcagaccgggccgttccagtgctgatcattggcattctggtgttcctacccggattttaccacctgcgcatcgcttactaatgcatccaaaggctaccgtggttactcctatgatgacattccagactttgatgactagcacccaccccatagctgaggaggagtcacagtggaactgtcccagctttaagatatctagcagaaactatagctgaggactaaggaattctgcagcttgcagatgtttaagaaaataatggccagattttttgggtccttcccaaagatgttaagtgaacctacagttagctaattaggacaagctctatttttcatccctgggccctgacaagtttttccacagggaatatgtatcatggaaggaatagagggttatcttgtaatggaaaaagtgttgcctgcaccaccctctgtagagctgagcatttcttttaaatagtcttcattgccaatttgttcttgtagcaaatggnaccaatgggggtattggtaatttcttatttattaagtaggtcattttaccaaatttctgagtatattatcctggtacattaatcccctaccttcatgttccagtggaagaccttaggtaaaatcaaagaccagggagttccaactgtaaatcatttgcacagtgcttcttacggaacagcaacacggaatataatcctggcgagaccagttcacaatggtaactccctcggttaaagactggaccatctgtcacgtacacgagtggcagaaaatggacatattgccagaacaaagtgcggattc

SEQ ID NO: 486519 - DNA, 483 bp, Homo sapiens
  misc_feature (106)..(106): n is a, c, g, or t
  misc_feature (347)..(348): n is a, c, g, or t
  misc_feature (350)..(352): n is a, c, g, or t
  misc_feature (393)..(393): n is a, c, g, or t
  misc_feature (477)..(477): n is a, c, g, or t
caaaaggcccaaaggcctcaggtgctagaattcctcaaataaatgctgcacaaaaattacagacaacccttgactggccacagtctgttttcattaaagctagccnctgcttactaccataaaacagagagagtaaggacaaaggtgttaaacactaccctagctcaaacaagtttctctctgtaggatgccaagaacctgggaaccagtgcatctgctgctttcccttctcggattctagcccagacaaaagaggcaaggggcatttctccagaggccttgagcgtcactacacaatgccccaggctctgcatgcacccgcgttatatatttctaccttggaaaanngnnntatataatattaataatatatggttttatattagaaacacncgtttattttatagatagatatagatatacatagatgaagatctctagtcagccttttttaaggctgggctgattcgcggtgcnttgaaa

SEQ ID NO: 486520 - DNA, 149 bp, Homo sapiens
gccccgggtaactgcctgacttgtagatcaacgtgatcataaagaaatactgcattactaggcttgaaagatagtagtagttgttttcctgctctaactgtactttggaaggagcagaggatagaatctagtttcatacgctcgggggg

SEQ ID NO: 486521 - DNA, 476 bp, Homo sapiens
aggatcccggtggggcatcacggcacctgcgccttcactggggtgacacattagtggacttctgaatagcaaaccaaggtggcactgagggaaaaatccaacttcatgttatatggtactatttagatttggctatattggggttactaatatttggcttaaaatttttcatctaagttggagaaattggcctgtaatttcccattctggtaaagctctggtcaggtttgggaaacatgtttatgtggaccttattaactagttggatggtgttttcttatgttcccaagatgatgtggcaaaagttttctgttatttcttccttatattgggtccattttataagtaaaacttggagttcatagagatttgaaaaaaaatagcttaaataggctgcgtgtggaggctcatgcctgtaatctcagcacttggggaggccgaggcaggtggatcacctaaggccaggagttcgagac

SEQ ID NO: 486522 - DNA, 1195 bp, Homo sapiens
  misc_feature (891)..(891): n is a, c, g, or t
gccgggcactgatcccgcctggggccggtgagtggcacttaagcgggccatgccatgcaaccttgggcgctgccaaccgtgggcgagctctgggtgtgcgggcggctggcgcggcgctccgtgtgtcagcgtgttatgatgccgtcccgtaccaacctggctactggaatccccagtagtaacacgtgaaatattcaaggctctccagcacagacgatgggctacatttgacccttcagtttacgaaaaaccccttcttaagatcccttataaaggccaatcgcactttgccactgtgctgtttatggattgggcgcctttctcaattattataggctccctcctgctgtgttcaggctacatcagcaaagggggggcagaccgggccgttccagtgctgatcattggcattctggtgttcctacccggattttaccacctgcgcatcgcttactaatgcatccaaaggctaccgtggttactcctatgatgacattccagactttgatgactagcacccaccccatagctgaggaggagtcacagtggaactgtcccagctttaagatatctagcagaaactatagctgaggactaaggaattctgcagcttgcagatgtttaagaaaataatggccagattttttgggtccttcccaaagatgttaagtgaacctacagttagctaattaggacaagctctatttttcatccctgggccctgacaagtttttccatgatacatattcctgtggaaaaacttgtcagggcccaggatgaaaaatagaggttatcttgtaatggaaaaagtgttgcctgcaccaccctctgtagagctgagcatttcttttaaatagtcttcattgccaatttgttcttgtagcaaatggnaccaatgggggtattggtaatttcttatttattaagtaggtcattttaccaaatttctgagtatattatcctggtacattaatcccctaccttcatgttccagtggaagaccttaggtaaaatcaaagaccagggagttccaactgtaaatcatttgcacagtgcttcttacggaacagcaacacggaatataatcctggcgagaccagttcacaatggtaactccctcggttaaagactggaccatctgtcacgtacacgagtggcagaaaatggacatattgccagaacaaagtgcggattc

SEQ ID NO: 486523 - DNA, 1174 bp, Homo sapiens
  misc_feature (870)..(870): n is a, c, g, or t
gccgggcactgatcccgcctggggccggtgagtggcacttaagcgggccatgccatgcaaccttgggcgctgccaaccgtgggcgagctctgggtgtgcgggcggctggcgcggcgctccgtgtgtcagcgtgttatgatgccgtcccgtaccaacctggctactggaatccccagtagtaacacgtgaaatattcaaggctctccagcacagacgatgggctacatttgacccttcagtttacgaaaaaccccttcttaagatcccttataaaggccaatcgcactttgccactgtgctgtttatggattgggcgcctttctcaattattataggctccctcctgctgtgttcaggctacatcagcaaagggggggcagaccgggccgttccagtgctgatcattggcattctggtgttcctacccggattttaccacctgcgcatcgcttactaatgcatccaaaggctaccgtggttactcctatgatgacattccagactttgatgactagcacccaccccatagctgaggaggagtcacagtggaactgtcccagctttaagatatctagcagaaactatagctgaggactaaggaattctgcagcttgcagatgtttaagaaaataatggccagattttttgggtccttcccaaagatgttaagtgaacctacagttagctaattaggacaagctctatttttcatccctgggccctgacaagtttttccacagggaatatgtatcatggaaggaatagagggttatcttgtaatggaaaaagtgttgcctgcaccaccctctgtagagctgagcatttcttttaaatagtcttcattgccaatttgttcttgtagcaaatggnaccaatgggggtattggtaatttcttatttattaagtaggtcattttaccaaatttctgagtatattatcctggtacattaatcccctaccttcatgttccagtggaagaccttaggtaaaatcaaagaccagggagttccaactgtaaatcatttgcacagtgcttcttacggaacagcaacacggaatataatcctggcgagaccagttcacaatggtaactccctcggttaaagactggaccatctgtcacgtacacgagtggcagaaaatggacatattgccagaacaaagtgcggattc

SEQ ID NO: 486524 - DNA, 788 bp, Homo sapiens
gtcatgcacccagtgcggcctacacgggctgagccccggcccttcaatgtgttctggtctgcgagaagacctacaatggacccagtccacgctgtggcagcacgatgaagacgcactggctgacacggacttcccctgcaacatctgtggcaaaatagttcacgcagcgcggcaccatgacggcgtcacatgcggagccaacctgggcctgaacgcccttcgcctgcggatgagtgtggcatgcgcttacacccgtcagtaccgcctcatggagcacatgcgtgtgcactcgggcgagaaacccttacgagtgccagactgtgcggggggcaatgtccacccgagcagcgcaaacctcatcagccacctgctgcagtgcacatctcccactccttagaagccaaaagcaccgcgggcggcccatcatgccaacctttgcatccccgggaacccatggaagggagaagcgaggtgatagcagcaggcagggggcaagcaccctgggtccaagttggaaggctcctgggtggcccctcttggccccaagttgcacaacacacaagagcttaacgtggaacagttcccggtatcaatgcaagagccgagaggagggacagccggagtccaagccatgtctagctacgcaaatccacccagggccgcatgctcgacgaggggagccaacatgagagactgtaggcatggtcacgtggattcgcatgggacagggacatattgtagcaaggtgattgcaaaaggttggtactctgtcactggcatggtgagtt

SEQ ID NO: 486525 - DNA, 115 bp, Homo sapiens
tgacatcacctctagcatctaccccgtattagaggcaccgcctgccctgtgacacatgtttaacgggcgcggttaccctaaccgttgcaaaggtagcgaaagtccaacttgtccg

SEQ ID NO: 486526 - DNA, 111 bp, Homo sapiens
ggctcggtaccctaatctgttcgatatgatgatattgaaggggctattacttccagcaagcaaatgagctctcaaagctagtgaaccagcagcttcttgctgacccacttg

SEQ ID NO: 486527 - DNA, 119 bp, Homo sapiens
gggatttgcaaatcataaatctgacaagggacttgtagctagaatatataaagaactcttacaactcaataataaaagacaagccaatttaaaaaataggtaaaggatctaaagacaca

SEQ ID NO: 486528 - DNA, 637 bp, Homo sapiens
gggagaacttgcgttggctgaggctggggcgatcgatacacagacctgcaggccccggggcatcctccatcccccaagccgtagggggagtacgctggaaggtcatgcagacttcctggactcccgcaccggctacaggcgcactgcactgtaagtattacagaacatggtggcgggcagaattttgggaatggagggagaggtgtcgcttgtgcacgctaggcttgtaacatcttgcatctggtccctcgcaggtagggttgcaacttgcacagctcatccagcacgaaggtccagcagtgcgtccctggatgagctgaatagaatgcatagcgttctccgtccaccttgtgcgcaatagcactgtctgactggccatgcaaggcgtgaccgcaactgtgtgacttgggcgtagctgtggaggatggggaagcccaacttgaggaaacagttgtgtagggggacgaagtccggaggttcagatagttcggtccaagaaatccctatggccacaaacttctgtacctcccgacaacatggaacctctatatagagattgccccgggaatcagcgggtccatcagtaaataaccgttgccgcccactcgcactggcggttgtttggcaaccgcgggag

SEQ ID NO: 486529 - DNA, 504 bp, Homo sapiens
tagagaagatggggattttctatggataagggctttctcattctgccatgaagtggtaagggccctagctggggttagggcgtccaagaaatttgcgaggtgaagataagagcactgtactagactgtttggtttctttgcaggccagagatacttttttttttctttgaagaaaaagataaaggcaaaaacagcatttgagcaaataaaaattatccttgaactcacctttacttgatgggctactatgtctgtttttgataacacctaaatctttcttctaggaaatggcacgtgccacctttactcatatttaattcgtcaaagaagtcacatggtcaagcagtgaaggggcagcaaatgatagagacaatgatgtcatctccaatgactacatggagccctagtcgtttgtttctgaagataaaagaccaagaagaggtcaaaaaaaaggaggctcgtaaatgtaactttaagcaggtgaaataaaagattaatcagttg

SEQ ID NO: 486530 - DNA, 261 bp, Homo sapiens
tccctttggcatagtgatgggagggagatgagggggacaggaagacagtcggagcttttgccctaggtgatcattgaaccccatgggatcaagcgatccaacaccttggctcccaaagtactgggattacaagcatgagccattgtttctggccctgacttactttcttactttattacatttttagagaaagggtctcgctcatgtcacccaggttggagtgcactagtgcgatcatagctcactgaagcctcaaatacc

SEQ ID NO: 486531 - DNA, 212 bp, Homo sapiens
cctctacctgcacagcctcaagcttgtgttaccagcagtgcctcctagggtctgccttcagcgaggatgacggtgacttccagggcaagccttccataggccagctgcgcttaacctgctttgcttttagagccaacctgttgaggtttgtcaggggccacaaagagggacaaggcatggtttaacaagctcaaattaggtccttggggggt

SEQ ID NO: 486532 - DNA, 374 bp, Homo sapiens
  misc_feature (45)..(45): n is a, c, g, or t
tgccccaagtcaggtactgcaagtgagagagagtcccgttagaanacaccactagtcagagtgtgggcgcggtggctcacgccctgtaatcccagcaatttgggaggccgaggcgggcggatcaccctgaggtcaggaggttgagactagcccggccaacatggtgaaactcccacctctactaaaactacaaaaattatccgggcgtggtggcgggcacctgtaatctcagctactcaggaggctgaggcaggagaatcacttgaacccaggaggcagaggttgcagtgagccgagatcgtgccactgcccttcagcctgggtgacagagattccatctccaaaacaaaaaacaaacaaacaacaaacaacag

SEQ ID NO: 486533 - DNA, 916 bp, Homo sapiens
  misc_feature (2)..(2): n is a, c, g, or t
  misc_feature (100)..(100): n is a, c, g, or t
  misc_feature (109)..(109): n is a, c, g, or t
  misc_feature (120)..(120): n is a, c, g, or t
  misc_feature (123)..(123): n is a, c, g, or t
  misc_feature (125)..(125): n is a, c, g, or t
  misc_feature (129)..(129): n is a, c, g, or t
  misc_feature (131)..(132): n is a, c, g, or t
  misc_feature (135)..(135): n is a, c, g, or t
  misc_feature (140)..(140): n is a, c, g, or t
  misc_feature (144)..(144): n is a, c, g, or t
  misc_feature (147)..(147): n is a, c, g, or t
  misc_feature (158)..(158): n is a, c, g, or t
  misc_feature (163)..(163): n is a, c, g, or t
  misc_feature (170)..(170): n is a, c, g, or t
  misc_feature (184)..(184): n is a, c, g, or t
  misc_feature (197)..(197): n is a, c, g, or t
  misc_feature (200)..(200): n is a, c, g, or t
  misc_feature (207)..(207): n is a, c, g, or t
  misc_feature (221)..(221): n is a, c, g, or t
  misc_feature (234)..(234): n is a, c, g, or t
  misc_feature (247)..(247): n is a, c, g, or t
  misc_feature (266)..(266): n is a, c, g, or t
  misc_feature (269)..(269): n is a, c, g, or t
  misc_feature (281)..(281): n is a, c, g, or t
  misc_feature (283)..(283): n is a, c, g, or t
  misc_feature (287)..(288): n is a, c, g, or t
  misc_feature (291)..(291): n is a, c, g, or t
  misc_feature (293)..(293): n is a, c, g, or t
  misc_feature (322)..(322): n is a, c, g, or t
  misc_feature (332)..(332): n is a, c, g, or t
  misc_feature (554)..(554): n is a, c, g, or t
  misc_feature (582)..(582): n is a, c, g, or t
  misc_feature (711)..(711): n is a, c, g, or t
  misc_feature (744)..(744): n is a, c, g, or t
  misc_feature (758)..(758): n is a, c, g, or t
  misc_feature (773)..(773): n is a, c, g, or t
  misc_feature (782)..(782): n is a, c, g, or t
  misc_feature (786)..(786): n is a, c, g, or t
  misc_feature (788)..(788): n is a, c, g, or t
  misc_feature (790)..(790): n is a, c, g, or t
  misc_feature (801)..(802): n is a, c, g, or t
  misc_feature (818)..(818): n is a, c, g, or t
  misc_feature (827)..(827): n is a, c, g, or t
  misc_feature (829)..(829): n is a, c, g, or t
  misc_feature (840)..(840): n is a, c, g, or t
  misc_feature (847)..(847): n is a, c, g, or t
  misc_feature (853)..(853): n is a, c, g, or t
cntgtggctctggacaaagcccattgcacgggacttcctgcaccagccgccgtttggggagacgcgtttctccctgctgtccgattctgccttcgactcngggcgcctntggttgctggnggngntgtncnngcngcggntggngtnacccggccccncctgnaggcctncctgtgcctggccnaggcccgggtggngcngctgcgnagggaggctggccncatcgaagcccgngaaatccagcagngggtggtccgagtctactnctntgtgaccgtggngngctnncantncctgacgccgctcatcctcaccctcaacngcacacttcngctcaagaacgctgggaaggctattcctggggcctgggccccgctcctctactatcccccgacccatcctcagccacgcgctgcccccatcggctctggggaggacgaagtccagcagtactgcagcgcggattgccggggccctgggtggcctgcttactcccctcttcctccgtggcgtcctggcctacctcatctggtggacggctgcctgccagctgntcgccagccttttcggcctctacttccnccagaacttggcaggctcctagctgcctgcagaccctcctggggccctgaggtctgttcctggggcagcgggacactagcctgccccctctgtttgcgcccccgtgtcccccactgcaaggtggggccngactccccggcgttcccttcaccacagtgcctnaccccggccccccntggacgccgagtttntgcctcagnactntntntcctgggcccnncagcatgagggtcccnaggccattntntccgaagcgtntgtgccnggtttnagtggcgaagggtgatgctggctgtttttttgaaccaaataaaggagcaccccccgattttta

SEQ ID NO: 486534 - DNA, 987 bp, Homo sapiens
ggctactacggctcgctgactcaggcgggcaccgtgagcctgggcctggacgccgagggccaggaggtgttcgtagcccttcagcgcggtgctgcccatggtggtgcccaacgagctcgtgttcgatggctgggacatctcgtcgctgaacggtggtccgaggtgatgacggccgcgccgagagggtgctggaagctgggggctgcctatggagcaactgtgagcctgcatcgatggaaggccctgtcgggccccggccttctgtttacatccccgaattcatcgcggtcaaccagaggcgcgcgcgcggagtaagctcatccccaggctcgcgtgcgcagcagctggagcagatccgcaggggacatccgagacttccggtctagcgcggggctggaccaaagtcatacgtgctgtggaccggcgaacatcggacgctgcttgctgttgagagtagatctccatgggcctcatggaccacatggccgagaagcttggtgcgtacacattggagactcgcgtgcgggaggtgtccgccctccacgctcttcgccggtggccacgacactccctggatggggctgtggcttcctcaagtggggtctccgcagaacaccctggtgcccggagctcttgagcctcgcgtgacagcacccgggtttttgttgggcggagatgacttcaacgtcagggcaagaacaagagtccacgatcgtgctagtggactgcctcatggctccggacgtacagaaccatgtccatcggtgagtatacaaccaccgggacaccagcgctggggaagaacctgctggaccacaatgcaggtccgctcaaggagggtcccacaaccaccgcgggctggcgcaacatgtttgcagagcaccccaagcctaataagcacgggaaaagctgtacccctggtggccacagtttggcccgacgtgtggtaaaaacccccgagagaacctccagaatcaggggacacac

SEQ ID NO: 486535 - DNA, 230 bp, Homo sapiens
  misc_feature (224)..(224): n is a, c, g, or t
aaccgagggagcgagtcacagtcctaacctcatttgacaggtgcagtctaaacaatcaaaatttgtttcatatactaaattatttaaaatattgtataaaattgggccaggcgcagtggctcatgcctgtaaacccagcattttgggaaggtgaggtagatggattgcctgagcccagaagttcgaaaccagcctgggcaatgtagcaagacttcatccctatnaaaaat

SEQ ID NO: 486536 - DNA, 814 bp, Homo sapiens
agtcagggacggttgttatgttacatttatttcaccagaactattttactatatcaaaggggtttactatgccaaacaaaattctagggaaaaatactgctaaaaatggatgcctcatcagaacatgctgttgagtccaatgtgccataacgacattttagcatgttaaatagcacttataatagcaaaaaaaggcacatcaactgcgaagttctccttagttgcaaatgctttttctagattcattgatttttcaatcattagggtacctagactccatcagcctaaagtggcatctggaactggacatggctctactgataatgatcagtctttagtcttcccattgtgttatatgactttataggttatgattgatcacatttagtttactacatggtacgggtgagggtcatagggcaggtttggatttctagtactgttgaaaaattgcaagtatggctatgtgtatacttaagccataattggttaaaaaaaaacctgagcatgtctatgtatcaatgcgtgggacaagaaagcttggtgtgtggtaggttgtgggcacatgggctcaaggatattcattattaaaaataaagcatgtttgtaagaggacacagaagggcaaatctgtagcttaagtctatacacaaggtgtggaacctcaaaggggggtttctggataccttaaacttggggaacagtagggcgcaggagggtaagggacttacagggaattataattggaaacggatggataatgacttggcaaacagttttactaatgaatgctttacataacactcgaatgcat

SEQ ID NO: 486537 - DNA, 175 bp, Homo sapiens
ttaaagtgctaacatctgggggaggaggagagtgcgtcagtgtttgatggccccgcgcccccttgggtgcctcttttgcctctgccgcacctgtaagccctgcgactgcccacagtcactgttttgtgacaggacatgtggtaaaacagcaggtgaggaaaaggccaggagggca

SEQ ID NO: 486538 - DNA, 958 bp, Homo sapiens
  misc_feature (205)..(205): n is a, c, g, or t
  misc_feature (251)..(251): n is a, c, g, or t
  misc_feature (735)..(735): n is a, c, g, or t
gagtgtgtcgggcgagctaccgagagctcaactatgcctcgagtatgcgcatctggtcatgtgtgtcccgtcgggcagctgagaaaagcatctactgatgccaccatggatccaggcattgctgaatgaccctcaaaccggttcttgtcccaaggtcgtcgaaccctgagcatccgagccggttttcaactacttccaacttcantcctgcggcatgtgtttttttcgtccgggagaaaaaaagatggganacctagcagcgcaggcatgcggatcatgcttcgcgatcgctaggtccctctgtgcgcagactaactatgttcgaactaggtctgggaggacatctggtgctggtggggccagggatacgaaggaaccgacgtaatagtacctatgtgatgactatagtccctatcgtccacgacttggacgtctctgtggcatcttcacctctaggccgtgatgattagagacgcagggcttgagtaccacggcagggcttcggagggcacagtgggagaggatatcccggaagcgtcatgatggggagcgtggttgtcatgtgatgcgaactgcgggcgaggtctcagtggggtggtacgatcactgtcaacggttatactttccgtggaccgtgcttgcggcaggcccgatgcagatgcgcaagtagtcctcctcgtaagaaactttccgcgaagttcccacagtccctggacgacaaaatggcctcttgcntgctgatcgtccaacgcccgatccaagcagatcgcataaactctacaagggtccacgaccaaggtgctcctcaaaggcacacagcgatctaacccaacggaccaaacgaccgcgccagcacttttcagaaaccaggcccggcacatggtggacagtgcgtgacactggacaccagggcacagcggtacacctgcaaccgctcaacaagacctcacctatagcc

SEQ ID NO: 486539 - DNA, 1749 bp, Homo sapiens
tggttcttcgagtttgccgattgtctagctatgtctctgtttgtgtaggtgtgtctttgggtttcgtagaattggatcgccgtcatgagacggcgtattgcgcctgttggtgtggtagtggatgagttgtgccgcccatcgtggacctccctaagggttgtatgtaaatgaaagtgtgtcgttgctctgtaggaagaatggttttgtatataatgcacggcgaggaacggggttgtatatatgtgaagtcggtgagcgtttgtcgtatgaaggggttggaagttagaataagtggttgtccgtgcaagagattgtgtgtactgttgtggagagctgattgtgctcctgcttgccttgctcgctttgtgtgctgtgcacggcgagcatgtttgttatgcgtgatgggatccaccggtcgttagtttctgtgtgttggagacaccacaacgttggtgggttggtagaaaaataaagtaggtggtgtgtgcaaacacaggcactttgtgtttggataacacctccgtctacgtgtggggagatacatagaaggggctcttttgtatcgaaatgataccatcgttgtttcttgaatggttgtacctgaagtgtgtgatcgtgtttgatgaaaaggggggtggaagcccccccccctttgtcctccgcagattcctctgtggtgagaccgttctgtcaagtacttggtgtgtttgtgttaagtcgccacaatagatgttgcgccctccggtaggagggccacctccgtcgtgtgtgattgagacacccctttttatgatgtgttgaccaccgcttgttctctaaaattgtggtcttgtgaacacaacaacactcgtgtttgttaaaatgctgccacctctttgggagatgctctggtaatatataaaggttgtgttatagacgcctcgtgtagaaaacacaacacgtgggagaaatatttgctccacctcgggagttcttcacacgttggatatgcccacataatggttgtttatatctcccacgcggggggaggagataaaagttttaaaaaggggatgatgccccacatattggagaatttgtccttttctcggggttcacacaaataccactcatgggccacacacctccacatatacgcccctttttactccttggagaggtgatatttttataggggagaaatatgttgcgcccttaaaagatcgtggcgtctttatatatattttgggtgtgtgttttgtgtgttgtttgcatcttctttgttgtgggcgctttttttggagagtaaattatgtgtgtatattttatatgacacccaatatatgcctctggccccacaggtagaacactcgcgtgtgttttatatgtgccactcttggcttttttgagaaagccactattgggggggggtataaaatatttccactctggatataaaatataatgagtattgagttaatatgtggaagtggtgtttttgtttgtgttaatcccccttacgcccaatttgtccctcggccacgcccttgcttgaggtggtgaattttgggaaacactttggctttcacggaattaataccgaggttctaactggggagtaaacacatgtctcacacttgggaaagctatgtacttttaaaatgggtggcccaaaggtcacaactgtaaatgagagagtaaatatccctcgcctgtgtccaagtcagactttgagctgatcctgaataatataagaccttttacccttta

SEQ ID NO: 486540 - DNA, 250 bp, Homo sapiens
  misc_feature (5)..(5): n is a, c, g, or t
tcgantcggtacctcataggtcgcaggaataaaatatgaagagtttgctttcacgacatcacacaattggcccaggcatggcggctcatgcctataatccctgcactctggaggctgaggcaggaggatcacttgaagccaggagttcaagaccagactgggtaacatagggagattcccagattcccgtctctacaaaaaatttataaaaatgagctggacatagtggcacatgcctgcgaacctatga

SEQ ID NO: 486541 - DNA, 790 bp, Homo sapiens
ggctgacgcaggagtatcacttacatctgggagtcggaggttgcagtgagctgggatcgcgccaccgtacttcagcgtgggtaacaaagcgagactgtctcaaaaaaaaaaaatacacgtgtagatgactctttgatggcaccttggctggggagagatagagctgggtggggctggacgtgggccttacaagggactttaaaatatatatatattttttctcttgagtcagggtctcactgttgcccaggttggagtgcagtggcgcaatcatagctcattgcagcctcaaactcctgggctcaagctatcctctcgcttctggcccccaagtagctgggattacaagtgcctaacaccattgccgtggcttaaatttaggtactattggggtaagagaactaggggttaacacacatgcttagaccacaggatagaactcaacaacactcatgactcaccaggaacgcctagcaactgatacacgaacacaccaaagcagctgcagactcacaaggtgatacgccaggaaacaggagcgcgaagagaaccagagaaaacacgggaacagagaaaagaaagcagaacccgagagagcaagaacagaaacaagaaaccagcaacccaaacacaaaacgaacaaagcacgaggaaaaagggagagacaaccaaaggacgacaaagaagaacgaaacaccccaagcaaacacaaggaaaaagaccgacaagcaccaaaaagaaagaaccaaagaaccgcggaagacaacagaccaaaaaaaacaagaggaaa

SEQ ID NO: 486542 - DNA, 1001 bp, Homo sapiens
gcgtgccggggcctgggtgcccccctgactgaggaccagcataagcggcttagtgaggagatcgagaagaatgtggcagggagctggagaagctgaccctgcgtggtagaataagcgggtgctccctcactgccctgctcaaccaaagccggcggagagcgccgagggcccccaagtgacggcacgaggcattggagaaaggaggttcaggctcttcgggcccagctggaggcgtggcgtctccaaggggaggctcctcattagttgcatctgatgatcccagtgaggatggctcatcatccccccgtggctaccatctcacaggtaggcatgtgaagctgcagcctggcagagatggagtcctcgcaccagcaggtgatggaggagctgcagcggcaaccacgagcgggagctgcagtgcactgcaagcaggaggaaggaggtggctcctggctgaaggagacggcaagcctacgtgcctctatgctcattgataggtccagtgatctaaggcctaccagggacagagcgtgagccagaggagcgtgatcaacacacaccggttgtcgtccagcagggtcccggatgggccctccgagaacgcaagcaccagttcacgattgtggaggcacctgaagcggagagcttggagagtgggtattgggagccgtcctcgcatgaaagtgctggagattggggcactcatgcggcaaagcttgaggagcgtgagcacaccgctgcgccgtgccagcagggaagggccaggagctgtgtgcacaccaggagttgatggccgctgtcggagaggataaccagcttgcacgggtcattgcttcgaggcttgccattggtgcggcgccgcacgagcggggtctgcaactaagtttgtttcggtaaaaaagacccgcctaaagaggggggccgggaggccatatgaaggaggccccgaaacagttttagcgcccaagtgaggacaagaacgctatgcgcaagagaaagtg

SEQ ID NO: 486543 - DNA, 245 bp, Homo sapiens
cccggcttaggtgggtgggatggaggcgaccttgggaatagcacttggaagacacaatgaagaatccctccattgttggagtcctgtgcacagattcacaacgagccacgccaagtgccccaccatgagcacgccacgagccaccccactgggcgccttgctgagcccgacgagctccgcggttccccccgggtcttcctaccctccatgctgcgatccccttgcatcttgggcagatgcaggat

SEQ ID NO: 486544 - DNA, 149 bp, Homo sapiens
gaatcacctcccattccgataaaatcaccttccaccgttactacacaattcaaagacgccctcgcttacttctcttcctgctctcctgaatgacattaacactgttctcaccatacctcctaggcgcccagacattattaccgtagcca

SEQ ID NO: 486545 - DNA, 101 bp, Homo sapiens
ttcacatagtcaaaatttcaccactaaaacccagcacttagctaaaacctcatttttaaacattaacaacaaaaaataaattgtaaaaaaatatttctata

SEQ ID NO: 486546 - DNA, 314 bp, Homo sapiens
cagaggattacaaacgcagagaggagcatagccctctgtatctccaggactgttggttctttctcctgactcctgtggttttgctacatggtactttacagactccatggagatgtcaggtggaccatcttctagggcccagcaggagtagggaatgtgccaaaagactgcccaggttgccgtggccttccccaccccccagatctcctgagtcatcatgctgtgctaatgaaagggatcatatcatcctctctgcgtttgcaaacgcagagagggaccataatctaatagtaacaacgaccctgcacctaaat

SEQ ID NO: 486547 - DNA, 321 bp, Homo sapiens
aaaaacccccaattccctttttttttttggtccggggccccggggcccaggttttttttttttaaaatgggtttaaaccccccaaatttaagggggtttttttaaggttgggggcccccccccccccccccccccaagggggggggttccggggttgaagggttacctttttttttttttaaattttggaccaaaaaattttttggggttttaacccgccccctttgggacccaacccgcccttttatttttgcccggccccattttgtttttggggggcctggtttttaaaaaaaaaaagggtttccccctcccctttta

SEQ ID NO: 486548 - DNA, 1070 bp, Homo sapiens
gccagaggcttggcctcgctgtgacccttgtaggcggtacacagcgcgcagatgcctgccgatgcagctcgccgcgcaggccaggccgtacagcgtatcggtggggactggccaccatcggcgccggctgcgcagcatcggccactggctggcccgaagcgccctcgtgtcacagccgtgcagctgctccgtggctcgcaggcctgcacggacccgtgtccccgggagccgcaacatgccgtggcgccgggggccgccggagcgggactcggctgaggcggaaagaggcagacctgatccgggagccagcaggcccctcgactcaaccccacgctggctagccaccgtcggccctcatcccacctgtcaccgacagcgccggagacatccgcccaggcccgccttccgggcaggcaagtgacgctcccagccagctatccgggtaccagcgcagactcggccccgcctcttccgccggggccagcttcacaagggaccaagacccccaggaggatctgaagggagcaccgagcagggcatggccgcgccgctgcgacccgccgggcaccggcgccggcctgcggagcaatcggcaggcgcaggcccaccccccacagccgccccctgggaaggacgcgccgacccaagcagcctgcctggaccgcagagtggatgcaacagcgacgccgggcaccatccactggaccaccaattcgcgagcccctgcgaagggcagactcgctcacgcgcaccctgaggccgcccggaacacatgagaggccccgcctaggacgcccggcgaccgccctcagcccaaaacctgacagacgcccccccaacccggcgggctccgaccacaaagaccggcatcacccaacagggaatccctgccccagtcgatgcttccggcgtcccctgtccactatcccgcaagcagaaattacccgtaggttgttttccctcaccactgaccgttgcttctactctcaaccactccctacctaaatgggcaccacctacatggactgatcgacagtctatcccagccgatgggccacttcctcacgagg

SEQ ID NO: 486549 - DNA, 230 bp, Homo sapiens
gctgtcacatgtgccatttgcactgattcgccttcctctaattgattcgaatgggattcccaatctcattccttccactggccgttctcattgatatacactttcatatcggaacggagccgatgataatataatacgctccgcgggcgtcgatctcggccagtgcggcaacggagaaaaagcccaaatcccgaatacataggtcattcgggaaaatcgtgtgctgggca

SEQ ID NO: 486550 - DNA, 112 bp, Homo sapiens
cgtggctggacacgtttgcccagaagtgacgcatgccctctatgcccgaatcttcttcagtcgctccaggtcttcacggagcttacgtgtccggccactacgtgtccggcca

SEQ ID NO: 486551 - DNA, 819 bp, Homo sapiens
tgcctttgatcctcacacatcctgtattatggacacagtagccatgcttcacgggaggtcagagctgctaccagaggtcttgcccttaatgagcttagtgtcatcttgggatgctgtcatatgctgcttgtgagtgaaccagagaaacagccattgtgcagcatgagaaagccccaaaagctctgggatttacctccactttagtaataatgaatattcttagcatagaatgtgttatgtcattggaattaatttgtgactacacttgggctgtgggagaggaattattttaaatagacattgatggtacttttggaactgtgatagctaaagattctaaaatgcatgttttatactaagttttaaccagtcaggaaaattttatgtacctagtgatagttcattttggtatgactttggtttaggctgcaagtgtttagcttgtgtaaactcctcactctgtgctgtcttaagttcattactatgtttaatggctacttgcaagatatttaagcattgttacaacagcccagggtttctgtttaccaccacaacacaccgggtccatattgacggtgagacttaccatacccccgttgtgtgccaagccggaatggggggtctagatggcagatccttcgtacttggtcctgtctcccccaacacaccacaccaacacacacactgttgggggcggcccgaaaatttcaaaacccttttgggggcggcccatgatcaaactgcacggtgccaagagcctgggtcaggggggtgtccccaaaaacgcggagcggtgcacccagcggtggttggtacagc

SEQ ID NO: 486552 - DNA, 333 bp, Homo sapiens
  misc_feature (27)..(27): n is a, c, g, or t
  misc_feature (232)..(232): n is a, c, g, or t
cctgtatatatatattcattctgcagngttgctgaattaaaattctgctggactttataacatagcaaatccgatgtttataaactggtaatcaaaaaggttttttcttttaggtgagtgggaaagtattacccttgttttaaatatctaagcaatgcctatcaacccttttttgtgttatgattacgtgggccatatttatgaaaaaaggcttgtgttctactcttgctgnggagaaaaggggacaaaatttacttttgaaaaaaaatgctttattgcacctaattatttatttttttaaaaagccttaaatgcatctattttggaaaacct

SEQ ID NO: 486553 - DNA, 539 bp, Homo sapiens
  misc_feature (11)..(11): n is a, c, g, or t
  misc_feature (135)..(135): n is a, c, g, or t
  misc_feature (144)..(144): n is a, c, g, or t
  misc_feature (271)..(271): n is a, c, g, or t
  misc_feature (326)..(326): n is a, c, g, or t
  misc_feature (337)..(337): n is a, c, g, or t
  misc_feature (366)..(366): n is a, c, g, or t
  misc_feature (383)..(383): n is a, c, g, or t
  misc_feature (388)..(388): n is a, c, g, or t
  misc_feature (392)..(392): n is a, c, g, or t
  misc_feature (419)..(419): n is a, c, g, or t
  misc_feature (458)..(458): n is a, c, g, or t
  misc_feature (475)..(475): n is a, c, g, or t
  misc_feature (489)..(489): n is a, c, g, or t
cgccggcgcgntcgcagtctccacggcgcaggcccacggtagcgcacgcgctctgagtagaacttcatggaggaacacggaggaccccaaaccgaacatatggctaccatagacgcacatgccgtgcgcccagcnagtgcagcnggtccatgtggctacttacaccgagcatagtatgctgagtgctgatgaagactcgccttcttctcccgaggacacctcttacgatgactcagatatactcaactccccagccgctgatgaggtgacngctcatctggccgctgccggtcctgtggggatggccgctgctgctgctgtggcancaggacagacncggaaccggcctcctgtctttgcgtctcntccctctctccggccgnggccncacncccgtttgcttcggccccttcgggccncgttcggtgcctctcctcctcgtgtggggcggcccgctnttgtcctctgtctctcnccctcccctcctcnccctgtctttcacgtgtttggtgccgcgcctttggcgactgtggtgcgtc

SEQ ID NO: 486554 - DNA, 108 bp, Homo sapiens
tgcgcgcagccattagagcagaggatgagaaagaaggagcttattgtttgtttttggtttaatcacaagattagttaagagaaggcaaaggcatgcacatttcacttt

SEQ ID NO: 486555 - DNA, 179 bp, Homo sapiens
atgaaagtcaaaaatgggggtcatttatgtcagtggcagtttgtgtagttccagtagtgactgatacacactcttttcgccaaatgtaatgcacactccattgcattcagcccgctctcccagtcatcacagtctggtttcttgtgcatgataggaggggggtgcatgataggaggggg

SEQ ID NO: 486556 - DNA, 117 bp, Homo sapiens
accgtgtcgtggctcatggccctaataggggtgtgtctgcaggaactgcactgcatggggcccacagccctgccccacaagcagctttggtctcgtttgctgagaccgcttgctgtg

SEQ ID NO: 486557 - DNA, 151 bp, Homo sapiens
tggggggggggcccccccccccccccctccagggggtggggggggggggggggggccccctttttttttttaaagggggccccggggttttcctttttttccccctcccccccccccctttttttgggggggccttttttttttgggggga

SEQ ID NO: 486558 - DNA, 332 bp, Homo sapiens
ctcatcgcttggtgttaggagctcctcctttgtcttatagcaatctgcgctaccccatcatcatcacagttactgtattagaactgattttataacggttactttcttgaggaaaaagggattttctttttcagttttacctcttgtgcctagtccagtaaccggtacctggtaagtcctcaatgtttattgaggtaataaactcaaatacttgcctttctggtcatctcttggagtaagagatcagaagatggtggagatgttgataatgacacaaagtaccttgctatattccaaagaggcatagccacaaacatgtacttttaaaaatt

SEQ ID NO: 486559 - DNA, 413 bp, Homo sapiens
aaagtactagaaaatacatacttgccaaaaagcttccatctggaatgacacatcactttcactcactctccctctctctccacactggaagtctgaactgggtgcctgttacctgtcgaggttactggcagatcaccgtggacagcatcatcatgaacggagaggccatcgcttgcctagagggctgccagcgcatttgttaacacacggcacctactctgcttgacctggcccaatccagcccctattgccaacaatccatgagcgacaatcggagcccagcggagaactcatgatggcgacattggtggtcagcttgctcagaccatcaagcagcctgccccgaccatcgtcattcacccatcaaatgggagtcccagtacccctgtgccacccaagtgccctacatccct

SEQ ID NO: 486560 - DNA, 192 bp, Homo sapiens
acgattgggggcatcaattgaagttacagattcgttcatttggtctcagggtttgtcaataatatttatattaatgggctttggtgagggaggtaggtgttagtttgtgttaaatattttaagctgagtgatgaggaatagtgttaaggagtatgggggtaattatggtgggccatgccgaccagcgatcga

SEQ ID NO: 486561 - DNA, 262 bp, Homo sapiens
acaggatctcatacatgtggtctagctaacggttattagcctgacaaaaacaaaggctcgtacatcattatacttgcaaagttttctccagtattaattaatggtatgtcttacaaggctttaatgctaactgaacactctgccacattaattacatgtgtaagatttctttccggcatgaaatctctgatgacgtacaagatatgaattgtcgcggaagagtttgccacattcattacatttgaaatgtttctctccagtg

SEQ ID NO: 486562 - DNA, 266 bp, Homo sapiens
  misc_feature (251)..(251): n is a, c, g, or t
accgcatactcggcttcaagacttaaactttagattcatgctattttaaataatatttaaaactgttaactctggagttcccatcgtggctcagtggttaacgattctgactaggaaccatgaggtagcaggtttgatccttggccttgctcagtggattaaggatccggccttgccgtgagctgtggtgtaggttgcagacgcagctcggatcccgcatggctacaactccaatgggacccccgagtatngcggtcgggtaccga

SEQ ID NO: 486563 - DNA, 304 bp, Homo sapiens
cccttaaaatccctgcattctttcggagaaatacgacagcaggcaaggtgaattgtgggaccttacaggtcttcatctataggtaaatagggcatgttggagggaggtaaccaggtaagacttcactgtcagcaccgacttgtagaatatcagataaccatttatttcggagcaagagcttcctatagccccgggaacacgcacttgctcaaagtcttgaggtgggttctttttgagacctttcagctccatatatccaaatggtttgtgcggcttgagtaccatgatttctagggtggaacag

SEQ ID NO: 486564 - DNA, 747 bp, Homo sapiens
agcggtaagcgggaagcgagggcgaggggtaggggctggggaagggcgagcgggaggcgcgggctctctctagcagggggctgcagccatgaagaggctcttagctgccgctggcaagggcgtgcggggcccggagcccccgaaccccttcagcgaacgggtctacactgagaaggactacgggaccatctacttcggggatctagggaagatccatacagctgcctcccggggccaagtccagaagctggagaagatgacagtagggaagaagcccgtcaacctgaacaaaagagatatgaagaagaggactgctctacactgggcctgtgtcaatggccatgcagaagtagtaacatttctggtagacagaaagtgccagcttaatgtccttgatggcgaagggaggacacctctgatgaaggctctacaatgcgagagggaggcttgtgcaaatattctcatagatgctggtgctgatctaaattatgtagatgtgtatggcaacacggctctccattatgccgtttatagtgagaattcgttaatggtggcaacactgctgtcctatggtgcagtcatcgaggtgcaaaacaaggctagcctcagaccccttttactggccatacagaaaagaagcaagcaaactgtggaatttttactaacaaaaaatgcaaatggaaacgcattaatgagtctaaatgcacagccctcatgcttgcatatgtgaaggctcatcagagatag

SEQ ID NO: 486565 - DNA, 81 bp, Homo sapiens
agcggggggttggcggcccgagcggctgcagttgcaggggcgggggaggcggcggcggggcccgggagaggggtggcgtgg

SEQ ID NO: 486566 - DNA, 129 bp, Homo sapiens
agcacgaatgtggtatggaagcgtagatgaggggcgatacacaagcgaacccaatcccgtactaacgacgctgacgggctgcgttattcagacttacatgccatggtgtgccgataaaaaaattactcg

SEQ ID NO: 486567 - DNA, 103 bp, Homo sapiens
tatagttataaatttctctgtgtgatgatcagtttatttaggtctatgtagcgataatgttcttgcacttagcatctaaagagacatattttcatattaaaag

SEQ ID NO: 486568 - DNA, 147 bp, Homo sapiens
atttgggagccggtggcagtacattctgtcaccgtctggctgagctggaaaactggagacagagcttctaccacctgatttacagcttggcgtggtttgagacacaaatcacccgagagagcggctcagttgtagtctgcagatgcg

SEQ ID NO: 486569 - DNA, 630 bp, Homo sapiens
agggactgtgttgccatatttacatgtgtaccccacagcaaacaatgtgattagatattatggttgctgttcgagtaagtgtctggtgagtgagggctatgtggcttctactgtgatcatcagattaagcctcccgtctatggtacgcactatttttgcttcccaattccctacgatcttgtctcctaaagatgcactggccgccgtttacaatgaggtggatgacttctgatgacatcaacgcacagcacatttcactgtgctgagactgcttcccctggctgctggcagaggcagaggtgaaagacactttaggacttgaaaacacacggtccatagtaaagaagagaaaaacaagaaaacagccacaaggaagcctgaaaacaaaaaatgtaccgaagcgtaaagctgttcatgtttccagccagttcatgggacagttactcagggtaacaggccacctccacggcttcccccacataccacctagtttcactagagaagacaactaaatcattatgggctggttgggttccctctgccattaggagaaaacacttttgtttcattcattcttggcaaaatacttcctctgagtaatctttcacttgctgatgggagcaagacttg

SEQ ID NO: 486570 - DNA, 275 bp, Homo sapiens
tacatctggcgagaatacgtgataaagtctcctctctgcttggttcggtggggatctcggggcggcgggaatccagcaaagccttaggaagggaaagattggctccagaaggtagtccattcagcaggtgtcggctggtgatgcccggttctgtgatggtggcctccagggcactgatggaggaggggaagatataggacggctgggaggacctgggggcagctgggggcgtgccagggagctgaaggcggtggcgttgtatggctcagcgctgg

SEQ ID NO: 486571 - DNA, 608 bp, Homo sapiens
  misc_feature (3)..(3): n is a, c, g, or t
  misc_feature (91)..(91): n is a, c, g, or t
  misc_feature (100)..(100): n is a, c, g, or t
  misc_feature (112)..(112): n is a, c, g, or t
  misc_feature (161)..(161): n is a, c, g, or t
  misc_feature (163)..(163): n is a, c, g, or t
  misc_feature (170)..(170): n is a, c, g, or t
  misc_feature (183)..(183): n is a, c, g, or t
  misc_feature (200)..(200): n is a, c, g, or t
  misc_feature (202)..(202): n is a, c, g, or t
  misc_feature (208)..(209): n is a, c, g, or t
  misc_feature (219)..(219): n is a, c, g, or t
  misc_feature (232)..(232): n is a, c, g, or t
  misc_feature (242)..(242): n is a, c, g, or t
  misc_feature (315)..(315): n is a, c, g, or t
  misc_feature (378)..(378): n is a, c, g, or t
  misc_feature (524)..(524): n is a, c, g, or t
  misc_feature (565)..(565): n is a, c, g, or t
acnttgtaaaattgatttaactggtttttacagaaccatagcagccaattatttagaaacaccacctgtcctttatattagagtacctgcnccagttgtntttgttatagtntgaagcaacacactgttcatggtaaacactctattttagtagataaatntntgaggtntattcgaaaagtntcttcaagaagaaaatntnttagtnntttgtttatnaaatcagattctnataggtatanttatatacattattttcaaatatacaaattatgtgctaaagtaaaagggataaaatgtcctttagttcaagcnaatcttctgttggtgttattcagtgtgcacgtgtgctaggagatgggtcctccatgccgagantcaatcctgccggcttctagcaatgccgtattttctcctgcatctcctttaaagctgggatcacactgtggctcagattcagcaggggaggctgatggtggactgctctcatcacttccgtcatcatctggtaaagctagactcanaatttgcagctggatcccttccaggaggagattctggagcnggcatctcctgtacatccccaggctctccccaatatcctaggg

SEQ ID NO: 486572 - DNA, 106 bp, Homo sapiens
gcggccgactactactactactgctcgaattcaagcttctaacgatgtacggggacatgccactgcactccaccccaggtgacagagtgagaccctgtctcaaaaa

SEQ ID NO: 486573 - DNA, 195 bp, Homo sapiens
gcgcacgccaagtgcagaatgagcccttcgctggtggagaggacggcaccactctgtctcatgcgggccagagcctacagcccggtccacctggctgcgtgaggcgcaggcgtacaccaccacatggacctgcagcccccggtctaggaggcccagggtcgctgctcacagatgcaggccatgtgcctcaatgcc

SEQ ID NO: 486574 - DNA, 914 bp, Homo sapiens
ggagagaactagtctgagtttttttttttgggattaaggttcgaggggaaatgctggaaatggtaaggggtttggagccttttcatataaggtaatgctagggtgagtggtaggaagtttcttccataggaggtgtatgagtgggccgtagcggaatcgggggtatgcggtccgaattcataaaaacagggaggttagaagtagggtctgggtgacaaaactatgttgtggacaaagtccagggggcaaagctcgcgcacaaagagtgtggtgccctaaggacagcatcggtcagcgggcacgagggtcgtcacatccatcacacaaatggtcgggggtaatcccgagactcatcagccacagaacacagcggcacacaggggggaccacaagcgaagacgaacatacccagcaagagtgtgaaaaaacaccacgtgcaacaacaccactaaactctcgacgggaagcacacctcaccacgcactcatgcaggacaagagaggctcacacaacgagggagcatataccacgaagaaagacggagacacaaccagagaaaacaacagtacggtgcagaacgcattaccaaactccacataataaaaagtgagcgcaaaaagggggctcaacgagaactatgcgcgacaaagcagcaacgaactacaactccccacgagaagggcgcgcaaacaccactatcggagaagcatacaaggagcgaaaaacacaaagaggagtattgaagacaaacaacgaacgcattatcacatcgagatacacagcacgccacaccaactcaactcatccccgacccaacacggctggccacagacagaacacaccaagagaacacacagcagacagctcgaggcacgccagagggaagcgcagcacacccccaccacgacacaata

SEQ ID NO: 486575 - DNA, 485 bp, Homo sapiens
gaagttatcttgctgtattctctgagcttattggatctctggtttagtgaatggaaattctcagtcattattgtttcaaatatttcttctgttcctttctctatttcttctacttctgggattctaattatgtgtatgttataccttttacaattataccacagtaattggatattctatttcatgtttttcagtattttttctcttcacttttcagttttggaggtttctattgaaatgccctcaagctcagaaattctttcctcagccatgaccagcctactaatgagccctttaaacgcattcttcatttctgtttcagtgattttgatttctagcattgcttttggttctttcttagaatttccatctctctgcttacaatcccttctgttcttgcattctgtctactttatccattagggcccttatcctattaattgttttaaatcatagtatgataattccaacatccctgccttatc

SEQ ID NO: 486576 - DNA, 129 bp, Homo sapiens
tgggggggggggaaaaagggggggggaaaaattggggttggaaattaaaaaaaggggggggggcttttttaacacagcccgcggggggattacaatagggagtggaacttgaaaaaaatcgttttacaa

SEQ ID NO: 486577 - DNA, 122 bp, Homo sapiens
gtctgatagtcaaacagtaagtgtataagtttcgggttagatggcggtcctggtgcagtaggtctcatgcctgtcatcccagcatcttgggtaaggtgggaggatcgcttgaagccagagtt

SEQ ID NO: 486578 - DNA, 275 bp, Homo sapiens
  misc_feature (14)..(14): n is a, c, g, or t
  misc_feature (22)..(22): n is a, c, g, or t
  misc_feature (74)..(74): n is a, c, g, or t
gacggaccaacacngacaacgngctagtacaaacccaaaaggctctgcttagagctcagaggcagcacgagatngggagagctggatgacggttgctaagagaattcaagctgtcaggtcctcctgtgtatccttgggattctgttatgctgttgcttgtagagggaaaaagttcatgcgtcatttatatacaagtgcccatttgacattgagtgggtcacatttattttaccctatatgaacacaaaatctctgttttaaaatcagattctaga

SEQ ID NO: 486579 - DNA, 795 bp, Homo sapiens
tggggacggagtctcgctctgtcgcccaggcgggattgcggactgtgcaggtgggcgcagtctcggctcacttgcaagcctccgctttcccggggttcacgccattctccgtgccgtgtagttcccagcttgctcgggaggctgaagcaggagaattggcttaaaactcagaagggtggaggttgcagtgagctgagactcgtgtcatgtgcacctccagccgtgggcgaaagagcgaaacctccatctcaaataaacaaacaaattaattaaacaaaaaaacaaaaaattggtcggcttttaacaacaaaaaaaaaaaaaaaccctcggagggctttctatagtgctcggggggcggcgcagacaaaagaggtgtaatggcaatgggcgcccagtgggccaataggtgtggttctccgggaacccaggtttttctgggcccaagggggggaagactcgggcgcggcgtccccccaaatgggggaggccggcataaattccagaataaccgccagggtaagcccctggcttgatgacatcgcggggaaaaaacctcatcagcgccatggccaacgccgaccccaccaccacacaccaccaccccgagccgccacccacgctcgtcctcccaacccccatcgcgtatccgaccaaccgaacgacccatcacacacacgactcacccaccactgccccccacacgctaccacaaccccgcctctctagcaccctcactccccccagccgccgccgccatcgccagagacatcaaacccgaccgctgcctgacacaca

SEQ ID NO: 486580 - DNA, 106 bp, Homo sapiens
  misc_feature (102)..(102): n is a, c, g, or t
ccaatatcacttgtgccaactgtatatccgcaaatatatccacttttccacttcaattttgcactttccggaggaaatgatcacctcaccaccgaacaagcntttt

SEQ ID NO: 486581 - DNA, 853 bp, Homo sapiens
gcgcccgggccatggcggcggcggtggcgggagctgctgtctgagtcagtctgtgttgcggaccgacgcgacacttggcccagtgagcccgggcctagtggatgatggcgctggcgtgcgtgcgggacgcgcgacacggctggagctggccttcttcgccttctcctcgtgctgtggagccctgggtggggggtctgcgcccggtacaccatgtactgactgccgtgcagaatgcccagtaatgccagcgaaacgtgggtaactgagtctgtatgagctgcaccggtaccccgtcgagtgaaagaccataatggtatggtcacatgcagcattgctgtttccccgtcgtggtcacatgccattcagaagctcagtgtgccctatctgcctggacatgctgaagaatacgatgaccactcaaggagttgcctccacagagtgctggtctgactgcatttgtcacagccctacggagcggggcccagcgtgtgaggcgggcgaataccaagggtcagattcagaccacaaacgatgagggggacggggaaggacgagcccggggagggaagaaggggatggacgaacgatgtgagctcagactccgaccctgactctgcccaggccctgcacccaagcgaacccgtggacggggcgcagcggggaggcagtgtagggacagggggagcgcgggactggtgagggcgggtgcggcatgccggatcggaaaaactctggtgacccgggccgggactcctgggagcgggacggctgagcacaccaaaggcctcctcgggagcacgcagacccctggatccagaagctgaagttgacgcacaggaacgggcccacccct

SEQ ID NO: 486582 - DNA, 528 bp, Homo sapiens
cagtctatccaccttgtgtgccttttagtggagtatatttaacaatagtattctgaagaccgaagaacgggaataatgattctgtaactaaagaaagggagagatttaatcaatttcagtaagaggaggaaagtagctgaaatgacggaagaaattcagcagtatcagaatcagccttactgtttacggatagaaccagatatgaggagattctttgaaaaccttaaccccatgggaagtgcatctgaaaaagagtttacagattatttgttcaacaagtcactagaaattgaacctcgaaactgcaaacagccacctcgatttcctaggaaatcaactttttccttaaaatctcctggaataaggcctaacacaggccgacatggctctacctcaggtactttacgaggtcacccaacaccattagaaagagaaccatgtaaaataagctttagtcggattgctgaaactgagctggaatcaacagtgtcagcaccaacctctccaaatacaccatctactccacca

SEQ ID NO: 486583 - DNA, 650 bp, Homo sapiens
atattttcttattatctaaactttaacaagaaattattaaaattactttaaagcaagaatagtaagaatgtacgcgtggcaacccgctacacaaactgctacgcacgctaccaacctatcaacactcacgctaccacgctaccacaccctacctcgccactctgtcccaccacatactcacaacactactaccactgcctgcactaactcgactactcacacgacacttgctactcccacactcctaccactactgcactaacctctctaactatcgtcactatcctcactgccctctacctacacatccatgtatcaccaatatcaactccatatatcaacttatcaccacaccaccatatctattctataccagaaatacaatcactcatcaatctttctactactcttacactattcaaaatcacatacatctcttactaacaacagcctacccatactcgtcatcactttcattctcaaaacagcacatgactactaacaaacaagcatccgacaacagaacacaccttgcagaactcaaaaacaaaaattaacttaccttctgtccaactctataaccttcagtccatcatacaacatcacgacatcaaaattagcaaacaaacacatactccccaccaccaagt

SEQ ID NO: 486584 - DNA, 1125 bp, Homo sapiens
gctgcatccagacttcctcaggctgtggctgttacgctgcgcatctggtggctttaaacatacaaagggattgccaggacctgctggcggcgggcggcggcggcggagggctgggtctgcaggcggccaggaccatgagcctgctgagccggggcaaaacccctaggccacctgatgccagcggaccctcgcgagactgcagccctgcgccgcggagcaggctccaaccgagtgcggccgaggcggccacacgcaccgagctcagctgactccccgggcgaccgcgcgtgggcccacgtggacgcgctactggattggatttgcgctatttggcccttgttgggcgcttcagcgggttccccttggagtgtgctgctctgttctccccttgggggctggtcttgcttgagtggccatctgccgcctgtcttgcgcttgtatcgttcgcattcaatttctaaggttttctcccgcgagtcgcacttgatcggcgcacccgcaaaaaagcggtgacgcaaaacgtaagattgggggcaaggctggaacattaactcttgaacccaacgcattattcgtaattgcgtgcttgccacccataaaggtgacgaaggccttgcgaagacccttgctcactgtggcttttgagcggttggaaccggcgacagctacgtcataggaaggggcattggcgctgacaaaggttaccttcaattggcgagactttgaccccccatcatgctaccaaatcgggtttgaactcccttttggacgctccgctaaaagtttacccacattcggtgacgcgaccccaattgctgtggagcagtggcctaagcgtgccgtatgaatcgggatagacaaacccgcagtgcagcttcgttgggtcctcaaatttaacaccaacaggtttctttattcccccgttcgggtcgagagtccccccgacgtgcttggggcaccccacggtgagctccaaggaatatcgtaagatcatccaggcggatttccaatctgtggcgctaagcagccatccgatggagattctggcggaacccccgagacacgaaccagggcgtggtccttttacatggcccctataggcctccgtctgcgccgtttccagac

SEQ ID NO: 486585 - DNA, 169 bp, Homo sapiens
ggaggggtgactcatgtggaaagagagtcagctgccaactcaaaacaaacgtgggaagaagagggcgcagccaggcccaaggcttagggcaagacactgctttttacaatagagggacatagtggacactctctgagttgcctgctgcgtcagaaccggtgtgggatgc

SEQ ID NO: 486586 - DNA, 814 bp, Homo sapiens
gggaaatggctgcgagatcctagaggcctgcggcctgcggagcttactccacgggaacagcctctaataatctgagttgttcgaaaatacgaagcctgttactcgtgaacagtggctgacaacagtgttgttgtgagcctggctgtctgcttggacccagaggtttcgtctgccaggtttttggttgtatttacggatttcagggcaaaagtgtccaagctttcagtgttggagcaggtatggacgacaaaggcgaccctaggcaatgaggaggcacctaaggacatcaaatccacccagctaagagttcaggaaaacatggggttgcgaaggacactatcgcaagcgagagggcgcatggggacgcggaggtctgaccactggagccgcaccccacaaggagtagctgggcctgttccctgcgggcattgggaggcagcccaagcgcaactgagcgcgtggagcagttcctgtacccattgcgcggcgccgccggctaggagggatgcactgcctgtctccctggagagattctggtgagcccacgtcctggccctgccacagactcgccgaagtacagcctcctgattgggcaggttgcgaaagtcgctttctgaccaccagaagcggccccagtcttgttccccacagcctgtgaatgaaaacgacccagctcttctgaaccaggtgaaaaggggccgggatgaaccacgcatgaaacctccggatagttgacattacgcatgcgccttgaaccttggaaggagcctatcagaaatcgccttcgccgtgaagctgggaacagggatcccag

SEQ ID NO: 486587 - DNA, 646 bp, Homo sapiens
taaggtttgagggggaatgctggaaatgtgtaatggggtatggagacatgtcatataagtaatgctaagggtgaggggtaggaagttttttcataggaggtgtatgagtgggccgtagcggaactcgggggtatgctgtctcgaattcataaaaacagggaggttaaaagctagggtctgggtgacaaaatatgtggtgtaagagtctcaggggagagtgcgtcatatgtggtccctaggaagatggtaggggtgagggtgtttattataataaggttggtgtatccggctatagaagaatatgggcgaatggggcctgcggagtattcgatgttgaacgcctgaaactagttcggacatccccttcggcaaggtcgaagggggtcacggtagggcactcggcaaggggggagataaatcatattagggcccagggtcatgaatggcacggagttaatcagagggtgttacaggagtcagagaacaaagcgggcggaaaaggtataacagggagccccactcaatagagttaccgggtgcaacgcacacaggcgtggcctcggggtggcctccatattgaaaatggacggggcaacctgccacaatggccgaaacaggcgaactgaacttgtgcccccggaaagag

SEQ ID NO: 486588 - DNA, 240 bp, Homo sapiens
tactacatttcatcgttccacaaatttggcagagtttgtgctgacatctcggatgttttcaccaacatcgtcgacattaatatggcaatcctcatcaaccttgatgaaatcgaccgcgggcttggcttctactttatgaaatgaccatgccagatccttttcgaaccatcttcttaggcatattccacttatttgcctaccaggctgtccacaacttctaaggattaaagagggagaatc

SEQ ID NO: 486589 - DNA, 121 bp, Homo sapiens
tatttgtggctagcgaactgaatccaggagtctgagaggcatctgacttgattcatatgaagccagatacattctccagatcagagtcacagggggtccattgggaggttgcatacacagt

SEQ ID NO: 486590 - DNA, 463 bp, Homo sapiens
gccctggtgtgattccgtcctgcgcggttgttctcgtggagcagcgtttcttttatctcctgtccgccttctcatcctaccctaagctgcgtgcctgcaacccgaatggaaagattcggatggaccattggacatgagccccctgtaggccccagaactatcttttacggttgtgaactaaaggccgacgaagattatccactttaaggtggactcaatgatgaacatgagcaccagttatctcttcaagaacccggtcacacggtttcacgggcgcttggtgttgcccacaacgcgacttgaagtttagccaccaatttgcttggaaaccgccaatgaagggccacaattgcaacatttaaccgacaggtgacaagtttccccaaacttccaaaacggttacaccacttggtgcccaaacctttctgaccacaccactcgttctttggtaaacaatggccca

SEQ ID NO: 486591 - DNA, 367 bp, Homo sapiens
gaggaaacttgcaaacactgaggaattgcaattctacttaacaggaatcattccatgactggacaataattaacccccctcccattgtcctgcctcgactgatctcaagaccggaccagtgggtaaatccccagtactgggtagtatctgcgctcactcgaagaaaagtcgggcaccctccaaacaagaaggccacacggaggttgtgccggagcacacaaagggcagccgccaacaagagcgggccaccgacaaacaacagggggacagaccgcccgccagaaacaataggcgaccgaaggagaagccagccaagcgaggcccacgccaacaaggccgcagtcgcgcccacccaacaaagctcaaa

SEQ ID NO: 486592 - DNA, 195 bp, Homo sapiens
gatctataggatcctgatgttcgccgaccgtttgactattctctacaaaccacaaagaacacttggaacactatacctattattcgtgtgcattagctgtgagttcctagtgcacagctctaaacctccttattcgagccgagctgggccagccaggcaaccttctaggtaacgaccacatctacaatcgttatc

SEQ ID NO: 486593 - DNA, 300 bp, Homo sapiens
  misc_feature (14)..(14): n is a, c, g, or t
  misc_feature (51)..(51): n is a, c, g, or t
  misc_feature (61)..(61): n is a, c, g, or t
  misc_feature (95)..(95): n is a, c, g, or t
  misc_feature (220)..(220): n is a, c, g, or t
  misc_feature (270)..(270): n is a, c, g, or t
gcgaagaggatttnatctgtgccttcaagaattccagaaagcacgcatgtntccatttaanttaggactgggtccccacagactgcctgcccctntttcagcagcaggggcaagctgggcagtgggatccacttgcattgctgtgcatccagagatgaaatgccatcagttagtgtagtcagtcacggcatgtttgtcctgcagtgcttctgtgaataantgcctatcctagcttagtagacattgagtagagcaccagcaatacaaatnttaatggtaccatctaagcaattcccttat

SEQ ID NO: 486594 - DNA, 358 bp, Homo sapiens
  misc_feature (318)..(318): n is a, c, g, or t
aaaataacaaaaaagaaaatcaaaattcaccttcgtcatgctgcgtccagtgccccaaccctgtggtcactctccccattttgtaacactgtaccaggtggtgactgtttaactctttggtgtctgtgctcaaaaaaatgccttataccagtgtccagtgtataagtgtgtaccctgaacccttgaccctcactccccacatgttgtatgtagccctattcctagcaccctagggagggacccatccatatccctagctatcatgggaaaccctaaaccacaatactgttaatgtacaaaatgcagtcaaaaatattnacgaaaaataaaacgttaaactaatcctcaaaatacaaaa

SEQ ID NO: 486595 - DNA, 718 bp, Homo sapiens
  misc_feature (29)..(31): n is a, c, g, or t
  misc_feature (42)..(42): n is a, c, g, or t
  misc_feature (45)..(45): n is a, c, g, or t
aaacttacggctaggtacgaggctgggtnnncgagttctggncgnataaaaaactcttccttctttaatccggtgtcgaggagttttgtgtgcgactcgtcctgctacatttcttggttacaaaaacctcttccttctttaatccggtgtccgaggagttttgtctgcgactcgtcctgctacatttcttggttacaaaaacctcttccttctttaatccggtgtctgaggagttttgtttgcgactcgtcctgctacatttcttggttccgtgaccgggaagcgaggtgattgaaggacggtcgaggcagccccttaggctgcttaggcctgccctgtggagcgtccctgcaagggactctggccagcttgagcgacgggcatcctgagagcgctcccgggtaggcaattgccctggtggaacacctcgtcagagcagtgtgtggcaggcccccgcggaggatcaacgtggtggctgaacaccgggaaggaactggcactagaagtctggacgtctgaaacttgccaacaaaaataacagcaatggggcttaaacagagcatacgcccacaaggacaaagaacacatgatggaggagacaagaacaacacagtcctggaaagctggagggaggaaggacacaattcagctgactttgcagatccaaaatgcggacctctctcagctggtacagtgggacgtgacaagcaactttttc

SEQ ID NO: 486596 - DNA, 545 bp, Homo sapiens
ccacatcctgggggaaagttcaaccaccctccatgcgcggggaaccccctgtgcccgcacaacccccgcggagaagtcgtttcttgccccaaacctcccccttggcagcccctccacagttgaacctgctgcgataccccggtgaacacacctttagtgagccccgccccgttgcccccacgaacccctctgggggcaccaccacaaccccgcggtgcggcaggaaccccgcagtgggaaaaaatcatctgcggaaggacggtcaatacccgccagggcttcgggcaccaggtgtgcacatcccccacggcgcgcctcccgagaactcgtgcgacacaaccaggggcgcgccgaacatcttgccccccacatactgtgttgggcacacccatgggacaccccaccgcgtggtccgtaagacaaggacccgagcaccccacagaggctgcgcggtgctgtcccccacccctgggaaggagaaacgcccgatctgttttttttccctgggagaaaaaattaaaattggggcccaccccccacaaaac

SEQ ID NO: 486597 - DNA, 246 bp, Homo sapiens
gactcgtgaccgctgaccttcctgaccgtgtctagcctcacacgactccccaccctcctaccctcgtactcctgcccgcctacgcctccccaactgtgcttgtgtgtgttaccactgtgcactgactgccaccctgttgcctgtgctgcaacacaccctcactttccacgcaccacacacaacacacaacaaaacaaaacacacaaacacacacacacacacaaacacacacacaacacacacaca

SEQ ID NO: 486598 - DNA, 340 bp, Homo sapiens
  misc_feature (128)..(128): n is a, c, g, or t
  misc_feature (146)..(146): n is a, c, g, or t
tcgtgccgaattcggcacgaggtgaaacatagcaagaccccatctctacaaaaaatataaagatcagccaggcatggtgtgtgcatctgtggtcatagctccttggggggctggggtggaaggatcgnatgagccctggagggcanggctgcagcgagtcatcattgcagcactgcattctagtcagggtgaaagagcgagaccctgcttcatacacaaattctataccacacacaaaaactctcacagctatgaatagtttatcttaattctctttcagaagcgtcaaattttcataaaacttagcccatttatacctctcttcctattgtctctacgg

SEQ ID NO: 486599 - DNA, 882 bp, Homo sapiens
  misc_feature (9)..(9): n is a, c, g, or t
  misc_feature (76)..(76): n is a, c, g, or t
  misc_feature (275)..(275): n is a, c, g, or t
  misc_feature (281)..(281): n is a, c, g, or t
  misc_feature (323)..(323): n is a, c, g, or t
  misc_feature (332)..(332): n is a, c, g, or t
  misc_feature (350)..(350): n is a, c, g, or t
  misc_feature (358)..(358): n is a, c, g, or t
  misc_feature (362)..(362): n is a, c, g, or t
  misc_feature (387)..(387): n is a, c, g, or t
  misc_feature (406)..(406): n is a, c, g, or t
  misc_feature (451)..(451): n is a, c, g, or t
  misc_feature (463)..(463): n is a, c, g, or t
  misc_feature (507)..(507): n is a, c, g, or t
  misc_feature (534)..(534): n is a, c, g, or t
  misc_feature (541)..(541): n is a, c, g, or t
  misc_feature (546)..(546): n is a, c, g, or t
  misc_feature (551)..(551): n is a, c, g, or t
  misc_feature (571)..(571): n is a, c, g, or t
  misc_feature (603)..(603): n is a, c, g, or t
  misc_feature (643)..(643): n is a, c, g, or t
  misc_feature (681)..(681): n is a, c, g, or t
  misc_feature (702)..(703): n is a, c, g, or t
  misc_feature (717)..(717): n is a, c, g, or t
  misc_feature (755)..(755): n is a, c, g, or t
  misc_feature (804)..(804): n is a, c, g, or t
  misc_feature (829)..(829): n is a, c, g, or t
agcgggctnctcctgcacacctccctcgctctcccacaccactggcaccaggccccggacacccgctctgctgcanggagaatggctactcatcacacgctgtggatgggactggccctgctgggggtgctgggcgacctgacaggcagcaccggaggcccaggtctccgtgtcagcccaatcttccagtcaggacaagttcctggggcgctggttcagcgcgggtcctcgcctccaatctcgagctggctccgggagaagaaggcggcgttgtnccatgntgcaagtctgtggtggcccctgccacggatggtggcctcaancctgacctnccaccttcctcaggaaanagaccagntgtngagacccgaagccatgctgctgcangcccgcggggtccctcggnctcctacagctaccggagtccccactggggcagcacctactccgntgtcagtggtgngagaccgactacgaccagtacgcgctgctgtacagctcagggcnagcaagggccctgtgcgaggacttccngcatggncaccnctctnacagccgaacccagaccccncagggctgagttaaaggagaaattcaccgtcnttctgcaaggcccagggcttcacagaggataccattgtcnttcctggcccaaaccgataagtgcattgacggaacaantaggactccccaggggctganngctgggatcccggncagccaggtgacccccgacgctctgcgatgtcttcttncttcttgtttcctttccccctgatgcccccttgcccccgtgctcccccngcccaaaagcacccccttgcccacntctgggctttcattccttgcacaaataaaactcccggaatgcaaagttaagcc

SEQ ID NO: 486600 - DNA, 393 bp, Homo sapiens
gtcacttgtattaaactacgatattttggatgacacagctataaatcttcggggtatgctagaatatgacacagaacagaatgtcgcgaatcaggacttgatatcagaaaacaataaatctatagagaaggtgaaggatggcatttcaatgaatgcctcagaattttcagagggtcagattgcacttatagaagcttagcttagtgaatagaaagcgaagtctgaatgccatcgggttcatgaagaatatgctaagcttatgaagaaccatgatgaggtgcagctggaaatcgaagactggagtcaagtacctgctgaggtcagtgtggaaatcaaatcattttgagaaaaaacccctttcccaaagggggcgccaaaaaaggaggggggggc

SEQ ID NO: 486601 - DNA, 762 bp, Homo sapiens
agcggagaaagtccgttggaaccgtcggctgctctctggtctctggagatgaggcgggaggacttgtggtgacagctgtggggacactggcccagatgctctgtgtcccagcagaagtgactggcgtgggaccagtgatgctggactggtcatgctcgatggcctggggatgcccaatggatgggcacccacaccagaagaccctgtgccctgggatgctgggtgctgccgatggcagaagacaccctgcatgcagcctgagtgtccctcagggacggacgagcagatgcctggtggacgatgcctgtcagttacatgcacgcatgatcaccatgccgtccaccaagacgctcgcgtgagacatgcagtctgctgctgggctcgatattccacagaagaactccgagagtcatataggatgccttgcaggaacgcagacaccgggagctcgcgagaacgagctgcacaggcctgcagcaggcagcagtgcgcgaagccgggaagaaacccgcagcgtccccacacgcggggcgacgaatcacacactctggcattggaacctgctagtggaacacaatttcacctctgtcagctgatgaagagacaacacccaaatacgctggccgcaagagtcagagtgccactctcctgggacaaagatgctcatctaaccacttagctcctccacaggtgaccctccgtgcttatcgtctgtccaggagcagcagagcttctgtacccaaacacacacatcccatcaga

SEQ ID NO: 486602 - DNA, 372 bp, Homo sapiens
tgtgagctccttggtgaaggaaggtcagcatttaccacattacctagagtttatacataatgaccaaaacctaagtttccttgggaaggtgatatgtttttattaatgctttattcaatttatgaagtatgcacatattcatataagtgtttctaaagcatagtttctcagccgggcgcggtggctcacacctgttatcccagaactttgggaggccgaggtgggtggatcacgaggtcaggagatggagatcatcctgggtaacatggtaaaaccccgtctctactaaaaatacaaaaaattagccgggcgcagtggcgggcgcctcagtcccagctactgaggaggctgacgcaggagaatggcgtgaac

SEQ ID NO: 486603 - DNA, 453 bp, Homo sapiens
gcggcctgtgtacagagctgggacatcggattagtctgtgtgacttggttgcacaggtcgttcctctatcagggcgcacagatgttcactcgggtagaatgaagaacagagtccgatctagaaaaaaatccaacatcttctcttatgcgcccctccccccccccacgtatctcacaccaccaagcagtcgacggtttgggagggggtagtgcagagatccaacttcatgctggaccattatgtctagagacatgtgaatgtctgaaaaactgccctggaaaatgccactattccaatgtgtgagtgtatttcaagtttttattctgtctagccccgaaagtgagcttaatggctggctggggaaaggtatgcattgtcagcagctctttaaccccaaggacctcaagatgaggttaagtttagtttgttcattgttgtgttttcctttttaac

SEQ ID NO: 486604 - DNA, 338 bp, Homo sapiens
aggccgcgcatacatgttgatgacacaaaagattagaatattctaaaccacgctgataaagcagaggcagggttagagaggaccaacttcaatttagaaagaagtatactgggggttaactgctatcaaatggcatggcatgctatggagaactctttcatgaaaggaatattcagacatgaccctgcacgggcaaaaagactatgactcgttgaaggctcagatgatcattaggatttattttatttcttgggagacggagtcccgctccgtttcccaggctagagtgcagtgacacgatctgggctcactgcaaactccgcttcctgggttcgggc

SEQ ID NO: 486605 - DNA, 398 bp, Homo sapiens
  misc_feature (362)..(362): n is a, c, g, or t
cacgagggcacgtccacgtagaaggccttgttgtaggacgagcccttgaataccgacggcagcgcggccaccgtcgccttgatcgcagccatgccgttgccggccacgaagccaccgatcatcagaccgaagatggcgacgtactcggcgggcacccacagcgcggccagactgccgtgcagtgcgtaggtgccgaccgaagcggcaaggatgatcacgtagccgatgatcagaaacatggaatttccctgtgtatgacggatgttcggggcatcaatcactgcgtgcctgctggtctaacggcaccacctcaggaaacttgaccaagtctgctgcgcaggtgaacagcacccgacgcacanaaaaatgccgctgcgggttgccccgcagcggcgagc

SEQ ID NO: 486606 - DNA, 103 bp, Homo sapiens
cgcgtgcgctatggccggcaagtaggcggacaggcccattcacgaatggtcggcgttgtccgctgcagcttcaggtagcggccagcgaacgagggcgaaacag

SEQ ID NO: 486607 - DNA, 899 bp, Homo sapiens
  misc_feature (899)..(899): n is a, c, g, or t
tgattctgtttcctctgctggcctgtaatggcaggaactcggatcgttctggttcttcagaccaggaggactcccaggagagaacggagagccagtgtgctgtgtgtgacggtccctggatgaacgttgtggatctggattgaattaaacaagacgtgcaaagcaagtggttcaccgagggtcttgctccgtcgcccattctggagtgcagtggcaagatctctgctcagtgcagccttgaactctcaggctcaagaaatcttcccgcctcagtcctcccaaagtgctgggattacaggtgtgagccactgtgcccggctatagctaacatttgattttttacaaagccaagaaaaaggaaacacttaacaaagcgcgcaacagattaacacggcgcacatgagcaagagtaacgtttggccagtggtttaactggttttggggccttaaaggccccaggggaggggtttaaggcggtatggggaacagggacaactacccttgtttgaaaggtggccccaatccgaatgggggtttggcctatatctcgcacccgctaaggcggtacggcgggcggaatttttcggaacgcccggagggtgtcccctgggccaagggacaaattggaaggcgtggccacggcgtcatccaggggtgacaaatcgggtggcaagtgccgaccttgtgtaaccttgagtcattcccaggctccgacttggggggaaagggcccggatggttcaagtggacggcgcaattgttgttcccccagctggaaaacgcggcccgttacacttttggacggagaggtgggtgaccaacaattagccatatgagtaagtgggtcccaacaagaagaaccgacttccctttgttggcgagaccgctatggggagctan

SEQ ID NO: 486608 - DNA, 149 bp, Homo sapiens
ccatcacgcgggactggccccatggaaaaaacaaaattctaggaactaagacacgactggggcaggaggctgggaaacttactaggaaggatcaaggtttgactttgccaccatgaacctagccatgaacctgatgggagcaagactcg

SEQ ID NO: 486609 - DNA, 377 bp, Homo sapiens
acatttctctcactacttagtgcaccacagctgatcttatggatacatcatgggctctcgtgcctcagttggttctgggcaatgagagacccaagggcaagagagatgatccccttaacatcgctactgtacccaagctctggtcatctctctatgcccttaactccttcctcttgtagcttacttataccttattggtctcttccttgtccaccgttattaaatttttctcagcttctctgaaggagtgtggaacctgttacatgtgggactccagctaatacaccactgataagcctataggaaggtcaggggtaattcagtgagctctgacattgcacacagagtttcatagtacaatgtctactactaaatat

SEQ ID NO: 486610 - DNA, 421 bp, Homo sapiens
  misc_feature (113)..(113): n is a, c, g, or t
cagtcgtaaaaaacagtaaaacacactttttacgcagccattttcaggagtcatttgaaactgggtacaccagtcctttgcctgccctccttccctccctttgccaagccctngaggtccatcccagtatcatttccttggtggggccctccctttttgtatcccagcctgcagcctttttttttttgaacagcaaccaaagtgcacgcctcaggactgactggtgctgttgcatcagctccttattttcccctccctggctgggagttttgagggcaggaactgtgttttgtgcctggaaagcacgagttcaacagctgctcactggatgggcctgcacggggccttttttacaaatacaaaaacccttgcaaggctggccgggtagcacccaaatgctattaaccctgctggtgataca

SEQ ID NO: 486611 - DNA, 1348 bp, Homo sapiens
tacccctggagccaccccggggcttatatttaaagggatgccaaaagcccccttcccaaaaccgcccaaaaggcgggcgcccagaaggcagcaggaccatatacagctctccttatccttctgggggcaaaaaggagggttgccgtggaacagtccgaggagcgtgcagggggggacgcgaaagaggctcccagacaacaatggctcaatggagcgaggccagcggcaagaagagggccaaggcagtaggcgcaagctccagagagatccacgtagaaggcgggcggacagactctcacactgtgaagcgcggcgaaaacaagacaccccttttgcacgacgcgacaacagcagaagcggcatgggaactctacgacacggacacccagcaacaccatatgcacgccatgacacgacacccttatgggggacaatagaggcgggtcgccaccaggagagcataataaacatacgcaactagagcgacaaacgctcccctgtgcaaacagactgcgccctgggcacacacagaaccaccgtgaggaagccccaaagtgcgagacaagagcgagcagcatagaaaaccaggcatcaccagaaaagcgcggacacaacaaactacccccgaggatcccataccatgaaaagtggctagaaagacccccacacaccacctgtgaaagagaggaacacgcaaaaacaaagggaggaaaactcccaacacgatgaacacactctggcgacaacacgccagagaggaggaccacccacgccaaaattcgtgccctcagtgagaggccaaaaaggggactagagagacataaaacaccatagcgaaaaaggccccaacccaaaaaaatggacgacaacaaagggggccaccacccagacagcaccaacaccagagaaaaggcgagaaaagacagcaacacagcaggaccaacatagacgccaccacgaagcaagaagcgagccccaaaccggaaacaaatacatgataaacggaaccacaaagaataacctcatgacaccacacgaccagaaaagcgggggagacacaaaccaaacaatgggagaagaagggcacaagaaagactctactcaagagtggcccacaggacaaaacactccgccaccaccacaagagcaacggcgacaggtgaacaacaagcagacaccacgcaccacagacgcaaccacaccgcatgaggccagacagaaaaaaaccacctaccaccacaagacggcacacccgatgaagaacaacaaactgcaaggccaaccaaccacacaaaaggaacgccgacacaaccacagtgatccaccccccacaacgcaacaaccacag

SEQ ID NO: 486612 - DNA, 136 bp, Homo sapiens
  misc_feature (56)..(56): n is a, c, g, or t
tcagctcggtaccgcttcttcatgcagtgtcaccagaaacaagcaccacccacctnttctaaaatagctcgtggtgaaagagaagaaaatgagaaagctggctgacgtgactaacacactgggttaagtaagcagt

SEQ ID NO: 486613 - DNA, 352 bp, Homo sapiens
ccgctactgacccggctactcgaatcgctgaggtgggagtatggctcgcgcctgatacgccctctatgaagccagcgctgactgcaccacggcactctgtctaacgagccccacagagagacagcctagacgacagatacatggaaccatgatcaggatcacccaagcttggacaggatcagactcgaacgggatgagtgcgacatgagcctatacagacaggtggcacactagtccaacagaaccaatatcatgcactcaccaatgagcatcggtacaggcgttgcaacgctatccctgatgaccaaggctgatactcacgatgatgacggcttccaagcttctccgtccg

SEQ ID NO: 486614 - DNA, 326 bp, Homo sapiens
ttccatatgattgaattttagaaatataataaagttcttttatgggccgggcacaatggctcacgcctgcaatcccagaaccctaagaggccgaggtgtgcagataacctgaggtcaggagttcgagacccacctggccaacacggtgaaacttcgtccctaccgaaatacaaaaattagccgggcgtggcggcgggcacctgcaatcccagccactcgggaggctaaggcaggagaatcgcctgaacccaggaagcagaggttgcactgagccgagattgcaccattgcactccagcctaggtgacagagccagactctatctca

SEQ ID NO: 486615 - DNA, 239 bp, Homo sapiens
tagcgggtctaagcccagctcctgtggacaatatctacccactgctcacatatacagggactgatgctgaggtagctactgtgtataactcgcaacggtgattagcttttgtcacggaacaaaacgcacccaggtgacatagcctgctgtgtccctttgagttacacctaggacgggtcacaaagttaaaggacttctgacacacgggctctattatgcgtggaacaaattctctctaa

SEQ ID NO: 486616 - DNA, 152 bp, Homo sapiens
ttttcccccccccccccccctttgggggggttttttttaaaaaatttgtgggggcctaaggggttttttaaccggtcccccccccttttttaggggggggttttttggggttttagaaaaaaaaccttttaaaaccctgggggttttcccca

SEQ ID NO: 486617 - DNA, 91 bp, Homo sapiens
gaattctgtgaccgccgcggacacggctgtttattactgtgtaagtggttattatttctggggccaaggaaccctggtcaccgtctcctca

SEQ ID NO: 486618 - DNA, 388 bp, Homo sapiens
ccggatcctttctagcctgccagtggaagcggtgcgactctgcggaaagcctccttgtggtgtgagttcctggccgtctcatacacgtattcgatcttaacgtcgggtttgtagccgtcctttctccttgaagttctgtgtgaagcctcgggatttcctccctcgggctgtactttgtcatcggatggccatcttatcctctgatgcagtacacggcttgagggcagctgaactatgtttggggtgccttcaccccggggcccacctatctgcacgtgttggtcttccaagcaagccccttttgtatcttgaacaacagggagcaaggggcaggatagccatgcccccctatttcaacgaatcgggtttccctctgtccaaggattgg

SEQ ID NO: 486619 - DNA, 236 bp, Homo sapiens
ttttttcagggttttgccccaaggccttttttgtcctcagggtttggacttggtcagtggcctttcccccgtggagctgccttcccagggaaaaggaaccctgcccccgggcagggcccgtgccttttacttttcccccccccccaagcgctggttccccggttttggcccccccccgtgcttttgaaattttccgttaattttttttttttaacccaaaaatttccaggtttcca

SEQ ID NO: 486620 - DNA, 170 bp, Homo sapiens
acccaaggggggttttttttgggttggttttttttttggggccaaaccgggtcaaaaaagggaaggggggggggggggggggggggccggccctgggccaagggggcggggccccccctttttttctttttcccttcccgggggggggtttgttttttttttttgggtta

SEQ ID NO: 486621 - DNA, 165 bp, Homo sapiens
  misc_feature (165)..(165): n is a, c, g, or t
gacatcacctttacatcactgcccgaccttagctttcaccatcgctcttcactatgaccgccctccatacccaaccccgtgtgtcaacctcaacctcaggtcttctttttttttctagccacctctagtctagccgtttactctattctctttatcagggtgagn

SEQ ID NO: 486622 - DNA, 909 bp, Homo sapiens
ataggaccaatatcggtggaatataattatgaaagagaagaccttcatagctgacgctcataagcaattggagtgaatgaagtgccatgcccagcaacagagtgggagcctgcccacatggagcaaaaggaggcggacaccatattcacccacggtgcaatcccagtgacagaagcagtgtgagcatgcatgcagtggtcactctggggaagggagaaagaatgatggtaaaaggggcacatagggcctccagggagacggtgctatctggcctcttagttatgggtggatggacactgaatggaacgtgtgagaaaacttaactgaatatcatttttattacatgaatatttatgaacatattttgaatgcttatagtataaaaaaaacgttggtaagaataaatatttttgtgatattatacttggtggcttctttttataaaggttaatatgtgatcataaaacactgacatattagtcataagtggataatatggtgtcatctctgctatatttatttgcgttcggattttcggttcacaataagtataaagttgttaatacaacttaagattttatgttttaaataataattaccacgcttatttgtacttatatatgtatatcctaatttcagttcccagtaaattatattacatattatgtgactagcaatatatttttttatatatagtgactgtaagatgaactttgctaattaggaatagaaatttatagtaaccgattggttatagatggtgcagaactatattaactcactaccatatattattaaatgatggttatgtcccttgatgccaattttcagtcctgtgtcaatataatattatgaactctaataggattggtcggataaaaatttatatacgtatattttataagtttg

SEQ ID NO: 486623 - DNA, 471 bp, Homo sapiens
gatacagaaaatgatagcttaaccatcacctaaattttatttatttttatttattttatttttatttttttgagacggagtctcactcttttgcccaggctggagtgcagtggcgcgatctcagctcactgcaaactctgcctcccaggttcacgccattctcctgtctctacagaaaatttaaaaattaactggcactgtggcccgtgcctgtaggaggctgaagtgggaggatcacttgaacccaggagtttgaagctgcagtgagccaagatcacactactgcacaccagcctgggtgacaaagcaagaccttgtctcaaaaacaaaacaaaaaacaaaaaaggccaggcatggtggctcatgttgtaatcccagcactttgagaggctgaggcagtaggattgcttgagcccaggagttcaagaccagcatgggcaacatagcaagaccttgtatctacaaaaaaaa

SEQ ID NO: 486624 - DNA, 258 bp, Homo sapiens
ctgtgtaagtgtagcctaactccatctgtacaaaagggtgaatgttatgataggcgagggccgacattctaagcctaaggtatggagggcacagggaatgctgacaggccataatacctgggcaggggagctgccctgaatgatgtcatcagaaccatgaccacagggctacatgtccccccacaggcatggcgcagcaccagggaagcacagagggtccaggtcatcagggcataggtcggataaaaccaaagagtc

SEQ ID NO: 486625 - DNA, 353 bp, Homo sapiens
gcaagagaggggataggacatcgccatctacacaaatggacctacagaacagacttaagatggcttactattgccgccttcctcccagagtacctgaccagctgtgatggtatggatgccaaccagaaaagtgtgctggggcggaatttcaagatggatcgggacctgccctcattcacccagaatgtgcacaggctggtcaacgacctgcgctactacagactctgcaacgacagcctgccccctggcactgtgaagctctaggcctgctactgcctggggacacggacttctgctgctgccacctgcgccagccctaccttccaccacagatgtcccccagatgggccttg

SEQ ID NO: 486626 - DNA, 368 bp, Homo sapiens
  misc_feature (3)..(3): n is a, c, g, or t
ccnggacattccacgagtcacagagagataactcgagtaggtgatcggcggcacatgcgtgtatctgcatcgtggacctggtggatatagcgctggtggctatgggtatcgatggtgatctcggagactcggcgagatctcacaaaggtgtcttccgtgtttctctgactctccagccggtagctagtcatgtgcttcgtggtcatgttcacgtggtagcgagctcgagtggctagtcgatgggcatagtcatgtctccggttctgcctctgattagccgcacagccttgaacaaatcacatttcatctttgaacttacctctactgttagactaggtgactcgtggaaatgtccacgggtaccgagc

SEQ ID NO: 486627 - DNA, 868 bp, Homo sapiens
gaactcgggagccagaggttgcagtgagcggagatcttgccgctacactccagcctgggcgacagagactccaactcaaaaaaaaaaaaaaaaaaaattccccggttggttcccccaggtaggtttctcagaccgtgccaatcatccatactatacgggtgattcgaatacaggagaaaagtgggctctctgaattacagcttccctcattctgcttggcagcagaaactctctctctgcagggctacctcctaaagggggcagcgggggaagggaggagaggggaactggccaaaccctcgctaacatatcgaatgggggttgtcggtgtactgggccccaagctggttcgcttgggacaccttttctcctcgggatgggtaggtatgtgggcccatcatgaattttcacatgttggtgacctggcgaaagctctcctggggatccctcctaaccctgaagaagttcttccattctgtttgcctgaatgggtctctccccctttcaacccttttaggcattcacatctcctccttccagtggcccctttattgaccctttcacattccggctgggatttggacaagatccccatattccccggtcctccttctggtacccggggggttgccccgggagccgttgcggtcgcattgggtgaacacctttggcgccctcgcaccggacttttggtgggccccggaatatatttattaccgtcactgtatattctcaccgtgcagcgtttctcggcgggctcttcgcgtcccacccctccggttcttcacacgtatcttggcgtgccgtcttggtttccccgaggcttcggggggtgaacccctttgtagcttgtcggtggcacctccgc

SEQ ID NO: 486628 - DNA, 326 bp, Homo sapiens
  misc_feature (77)..(77): n is a, c, g, or t
  misc_feature (104)..(104): n is a, c, g, or t
  misc_feature (239)..(239): n is a, c, g, or t
  misc_feature (282)..(282): n is a, c, g, or t
ccagcaaaagttagttaaagcctagtttccttgaatattgataatatattcaacatggtacagtcctacatacaaanaggccgagatgggcagatcacttgagnccccaggagttctgagactagccctaggtaatgtggtgaaaccctgtctctctaaaacattaaaaaaaattagctgggtgtggtggcacatgcctgtggttccagctacttgacaggctgaagatgggaggatcncctgagcccagggaggttaaggttgcagtgagctttgattacnccactgcactccaccctggccaacagaagtgagactttgtctca

SEQ ID NO: 486629 - DNA, 332 bp, Homo sapiens
gggtctgggtacatccagtaagtcaaagggtaggtaaaagtatatttctaaatacaatcaccaaaataaacagaatatatcctacagggacgttactatggtccactaactaagtacaggagaatctctgagctttttacaatagacaaatgaattacgaagctgggtgcagtggcagtggctcatgcctgtaattccagtacttcgggaggcaaggcaggtggatcacctgaggtcgggagttcagagcagtcgaccaacatggagaaaccacatctcttctaaaaatacaaaattagccgggtgtggtggcgcatgcctgtaataccagc

SEQ ID NO: 486630 - DNA, 150 bp, Homo sapiens
tgctgttgatgttagttatgaccctgagcatcttcggctggctgttcctcatgcagcacagatggattgctccttttcaaatacttcaggcattgtgtgccttgtcaacttaaccaacactgtaactaaggatcctactgtgatgttgtt

SEQ ID NO: 486631 - DNA, 166 bp, Homo sapiens
  misc_feature (65)..(65): n is a, c, g, or t
  misc_feature (117)..(117): n is a, c, g, or t
  misc_feature (123)..(123): n is a, c, g, or t
gcttatgtgtcctgtcctgagcccgtttcctctcttgtaaaatggggcaatgctgcttgatgaanccagtcaagttgtggtagaaataattgttgattctttattgcacattgtgcncatatnccctaaaacttaaagtatgataaaaataaaaaaaattgttgca

SEQ ID NO: 486632 - DNA, 301 bp, Homo sapiens
acgactgtcgacagagtgggctatatgtatatatattttaaagtattggtaaggatgtggagaaatcggaaccctcctatgttgctgatgggaatggaaaatggcacactcattgtggaaaataatttgggagctcctcaaaaagttaaacatgaagcccccatatgacccagcaattccactcctaggtatttatccaagagaaagaaaaacgtgctcccacataaaaacgtgtatatgaatcttcacagcagcattatttgtaacagccaaaaggtgaacacaacctggtcgaccgtct

SEQ ID NO: 486633 - DNA, 625 bp, Homo sapiens
atgcggagctcggccggtgtcgccgcaatgagcgcgagaggcgcggcgggaggatccggcggcgcgcgcctccctgggcccggactcggccgcctccccgccggcctcccgcgctggacagtggactgagccgccgacggccaggtactgcggggatgtgggccgccgttcccgactgctgctgcttgctactgctgctgctgccgaccactgcgtcctgcctgccgacccttcgtacgtcccccgcggtctggcatgctccctggggcgtctggactggagtgttatggacacggtgccacaatggttcccggcaatggagctttaaagccgctacaaagtgtcgcccagtggaaccatgacagcgcactgcgcgatggcgcttgcaacaagcttagccgggacaggttttcacggtggcaggactgactaatactcacgctactgttgaatggacccacggaaacatttgaccgaaacatccccgaagaaccatagcctgagggaggtacttgaagcgatccagacacagcacaaggttgatgaccgcattcatacagagaagcatactggccctatgatggagcaaaagtttgcgatgactacccttcacgggacccggacc

SEQ ID NO: 486634 - DNA, 656 bp, Homo sapiens
  misc_feature (205)..(205): n is a, c, g, or t
tgggagacgccatgagagggacgcagagagggatcgtacttcgctttgcctccggtgcctgacgtggtgagctggggccctttcattctctctgcctcagcctcccgtagtagctgggagtatagagcgcgcaccggattgaggcccggttaatatggtgtattgagaggcctatgagcacgggtcttatcaccacggttatccnaggagtggtctcaggattctcctgaccgttgtgatccgtgccgcctcgggctcccaaagtgctgggattacaggcgttgaagcaaccggtgcccgggctacaaagtgttaacaaagcacattaccaatggccctttttacatattttttctttacatgaggaataatactgcatgtacgaaaagacctacttaaagtcttcatttatattctttcaaatcaaatctttatttaactaaccttactatatgtggctggaatggttaccattttgtgcagcccttgtgtatccgtgggtagtcgaaattgtatcacttctaaacagcaaacgtgttaggtcaagttaagcagatatctgaagtactatttctgcagggtttgcacaggccgtaactgtctactactttgatatactctgtatacatcctgtttgctgagtggtaaaatacatg

SEQ ID NO: 486635 - DNA, 746 bp, Homo sapiens
ccgtggtaacatcgtcacactccgccgttggggcccccccaccacaataaaaccgtaacagtggtcgtcgtatctgcacataaagttggttaaccccactcctttctttcttcaaagcagaagactgtgtcctcccccgcgaaaggtattgtcggtacccaacacgacggcgccccccccaccctcacttgtactctacacacagggtgtcgataggacgcgcacacatatttctgtgagacaagcaagcggtgacctctattgtctacacacactccacagactatagatctaccttccactgtgttacgacacacacgaccacactcgcaggtacatgagagtagacactgcgcgggcgagagaacactcttctcactcgcccttaagtgtatgtctctctccgcgcgcgcgtgacaagatgtactttgactccttctcctcggcgtgttcgagagagaggcgtgttgacacacttgactctattccgcacatctctgtctgatcagaagtgtctgactctctcactcggagatacctctactcgcagctactccagacgaggtcccgcacgcgctcctgtttactttatgttcagcacgacgtctcctaggcgctttgtgtcgcttcccagagagtacgggacgcacgaatctagactgcgacgactagtcaaggcccggccccctccattcatggtgtccccgcgtattttgtaccccgcgggcccatcattgatacaaaaa

SEQ ID NO: 486636 - DNA, 365 bp, Homo sapiens
atgcgccggtgaagagctgaagcaggacagcatggtccccggacgaccttcctggccgaggccaacctcatgaagcagctgcacatcagcgattgattcggctctacgctagtgtcacccaggagcccatctacatcatcactgaatacatggagaatgggagtctagtggattttctcaagaccccttcaggcatcaatgttgaccatcaacaaactcctggacatggcatgcccagagttgcagaagggcttggattcatttgaatgatgcggtaattatattcatcgtgaccttcggattgcctaacattcttggtggctgactacccctgtagctgctaaatagcagactttgtcctaacc

SEQ ID NO: 486637 - DNA, 225 bp, Homo sapiens
ttatcccccggctccacggcacagccgtgggcacaggaagacgaccttggtgtccttgtggaacacgtagtctgtacccaccaccatcatcgcgctgcagggattcagcctcccgcggcggctgcctatgactgcaggggctccgcgatgaccaccattgcccacctctgtcagggtaccgcacggctcgaacttcgctaatcttcgatcgtagcgtcttttcct

SEQ ID NO: 486638 - DNA, 166 bp, Homo sapiens
ctctgaggatccccacaaatgtggactcatgtatccacccgccttggcctcccagagtgttgggattataggcttgagccagtgcaccctgcctccaggaaagatttaggaagagagaagtgacacatacccagtgagatttctcaaagtaataaacatcactggg

SEQ ID NO: 486639 - DNA, 806 bp, Homo sapiens
taaacaaacagtacagcggttctacaaaaatttaaaaaggacccgggggcggggacccaccccggtattcccagcatttgggggggccaaaccgagggggatcaggaggccgggagaatcaagcaccatccgggcgcgggtcaaaagtggtgtgtcccccacgtgggaacaatcccagaagccccatccgataatcgtgtcccaaccaggtggaggggggtgagagtccacccctggctaagaacatagacccattacgttccccattatgagcgagcgtcggcgtgatccacaagcgggtgaatttttccccattagtgtggattcaaaagatactcaaacatccgtggagtgctcttctcagcattcccatataaattgtttactcatagcgggcagcccatgggctgggtggccaagaatagtagctcaataacgggtgggacgaccaggaagccggtctaaatatttcgttggtgggggaaccctgttgcaagtgtgagacaaggattccagaactttcacgtttcccagcgctcttcgtgtctgggggggtcccctcttatgttccccccgctgggttgcccacccccatgtccttggcgtgggcctcgtgcgcgcccctttttgatcgcctcatcacttggttcccttccccaattaactcacttcctagccgtctggcaaatggctttgggtctccccatactcccaaaagtttcacccaatcgcgctcggcttctcaccattccgtggtcacgcgcgtccccctgtgactctccccctgcttttgtacccccgaggca

SEQ ID NO: 486640 - DNA, 1083 bp, Homo sapiens
  misc_feature (31)..(31): n is a, c, g, or t
  misc_feature (69)..(70): n is a, c, g, or t
  misc_feature (78)..(78): n is a, c, g, or t
  misc_feature (85)..(85): n is a, c, g, or t
  misc_feature (92)..(92): n is a, c, g, or t
  misc_feature (110)..(110): n is a, c, g, or t
  misc_feature (112)..(113): n is a, c, g, or t
  misc_feature (130)..(130): n is a, c, g, or t
  misc_feature (153)..(153): n is a, c, g, or t
  misc_feature (1030)..(1031): n is a, c, g, or t
  misc_feature (1034)..(1034): n is a, c, g, or t
  misc_feature (1036)..(1037): n is a, c, g, or t
  misc_feature (1041)..(1041): n is a, c, g, or t
  misc_feature (1058)..(1058): n is a, c, g, or t
  misc_feature (1064)..(1064): n is a, c, g, or t
  misc_feature (1067)..(1067): n is a, c, g, or t
aagagctccacagcgtggccagctgcactcnaccccagcctgtgcccaccttccagctgacccttcgtnngcgcctgnactcacnactctgncccaagatcagggctgtntnnctccgcaactctccctncctccctggcttcagccagtccntgacgctgagcactggcttccgagtcatcaagaagaagctgtacagctcggaacagctgctcattgaggagtgttgaacttcaacctgagggggccgacagtgccctccaagacagagacgactgaacttttggggtggagactagaggcaggagctgagggactgattccagtggttggaaaactgaggcagccacctaaggtggaggtgggggaatagtgtttcccaggaagctcattgagttgtgtgcgggtggctgtgcattggggacacatacccctcagtactgtagcatgaaacaaaggcttaggggccaacaaggcttccagctggatgtgtgtgtagcatgtaccttattatttttgttactgacagttaacagtggtgtgacatccagagagcagctgggctgctcccgccccagccgggcccagggtgaaggaagaggcacgtgctcctcagagcagccggagggaggggggaggtcggaggtcgtggaggtggtttgtgtatcttactggtctgaagggaccaagtgtgtttgttgtttgttttgtatcttgtttttctgatcggagcatcactactgacctgttgtaggcagctatcttacagacgcatgaatgtaagagtaggaaggggtgggtgtcagggatcacttgggatctttgacacttgaaaaattacacctggcagctgcgtttaagccttcccccatcgtgtactgcagagttgagctggcaggggaggggctgagagggtgggggctggaacccctccccgggaggagtgccatctgggtcttccatctagaactgtttacatgaagataagatactcactgttcatgaaaacccttgaggttcaagtattaannccnanncaanattttttcctttttaanaaacangtntgtttaaacaaaaaaa

SEQ ID NO: 486641 - DNA, 685 bp, Homo sapiens
  misc_feature (485)..(485): n is a, c, g, or t
  misc_feature (511)..(511): n is a, c, g, or t
cggcacgagtgagattgcaccactgcagtctagcctgggtgacacagcaagactccatctcaaaaaaaaaaaaagagagatacttctttccattttctgtgaggtcatctgcagtttcacatggtagacagacttaggtgagattcttagcaacatagaatgaagagtaaagaggtttgtttatttcacaagggtttattgaaggcctacgatgtgttaaatgctgtaggaaatacccactgatttctcttttcatggaggtttcccgccttctcttaacgagtgatcaattaaactgtttactgggaacttgctaagttaatgaacacacgggatacattctttggatgagcagacattggttgggcagaggggcaagaggagagcagtttagacagagacctgcttatacactgtagtgtctaagagagcttgtgatgttcaggaaacagttgttcactgtgctgcaatataggggacggccngttgcggtggctcacacctgtaatcntagtgctttggaggccaaggcgggcggatcacctgaggtcaggagttggagacaggctgggcaacatggtgaggcccgtctctactaaaatctaaaattggctgggcgtgctggcgggctggtatctagctattgggaggtgaagcggtgtggaaccaagccgttcattgctgt

SEQ ID NO: 486642 - DNA, 987 bp, Homo sapiens
  misc_feature (476)..(476): n is a, c, g, or t
  misc_feature (502)..(502): n is a, c, g, or t
  misc_feature (531)..(531): n is a, c, g, or t
  misc_feature (968)..(968): n is a, c, g, or t
  misc_feature (977)..(977): n is a, c, g, or t
aaaaaaagaaaaaaaatcagaagtgaacctgtagcctgtagtgtgttgccaaataaacttatttttagagatacttctttccattttctgtgaggtcatctgcagtttcacatggtagacagacttaggtgagattcttagcaacatagaatgaagagtaaagaggtttgtttatttcacaagggtttattgaaggcctacgatgtgttaaatgctgtaggaaatacccactgatttctcttttcatggaggtttcccgccttctcttaacgagtgatcaattaaactgtttactgggaacttgctaagttaatgaacacacgggatacattctttggatgagcagacattggttgggcagaggggcaagaggagagcagtttagacagagacctgcttatacactgtagtgtctaagagagcttgtgatgttcaggaaacagttgttcactgtgctgcaatataggggacggccngttgcggtggctcacacctgtaatcntagtgctttggagggccaggctggtctcnaactcctgatctcaagtgatccgcctgcctctgtgtcccaaattgctgggattacaggcgtgagccaccgcaccggccatgctttcagttttcaagaaagaagacaccattattgccaaagattttggtaatttgagagatacaatgtatgttttctccatgtgaatactaggtagtaaggatctgttgaatttgaagtgtctatccagaagtattttgggtacttgtttaaggattgtaaaacaatgttttcatttctggatataataaatgtatttgttaatataataaatgaatagattagacccgtaaactatttgcagtgttgagtcatttcccacagttaaaatcaggatgaaaatatatagctgaatacttgctttgtttcttgtaactgatttctgtagtacagacctgctaaggccatcaaacctatngatcaggcnactccgccct

SEQ ID NO: 486643 - DNA, 918 bp, Homo sapiens
  misc_feature (407)..(407): n is a, c, g, or t
  misc_feature (433)..(433): n is a, c, g, or t
  misc_feature (462)..(462): n is a, c, g, or t
  misc_feature (899)..(899): n is a, c, g, or t
  misc_feature (908)..(908): n is a, c, g, or t
acacgtagttctaacattattattattattattattattattattattattattattattgacagagtctcaccctgtcacctgggctagagtgcaatggcatgatctcggctcactgcattgaaggcctacgatgtgttaaatgctgtaggaaatacccactgatttctcttttcatggaggtttcccgccttctcttaacgagtgatcaattaaactgtttactgggaacttgctaagttaatgaacacacgggatacattctttggatgagcagacattggttgggcagaggggcaagaggagagcagtttagacagagacctgcttatacactgtagtgtctaagagagcttgtgatgttcaggaaacagttgttcactgtgctgcaatataggggacggccngttgcggtggctcacacctgtaatcntagtgctttggagggccaggctggtctcnaactcctgatctcaagtgatccgcctgcctctgtgtcccaaattgctgggattacaggcgtgagccaccgcaccggccatgctttcagttttcaagaaagaagacaccattattgccaaagattttggtaatttgagagatacaatgtatgttttctccatgtgaatactaggtagtaaggatctgttgaatttgaagtgtctatccagaagtattttgggtacttgtttaaggattgtaaaacaatgttttcatttctggatataataaatgtatttgttaatataataaatgaatagattagacccgtaaactatttgcagtgttgagtcatttcccacagttaaaatcaggatgaaaatatatagctgaatacttgctttgtttcttgtaactgatttctgtagtacagacctgctaaggccatcaaacctatngatcaggcnactccgccct

SEQ ID NO: 486644 - DNA, 2571 bp, Homo sapiens
gtgcaatgagatctaaatagaaacagcaaaaagtttaaaagcaggggcatgatattaaggcatagagtttttcttagttttctttttccttgtttgttggtttatgtagagttaagttgttatcaggttaaaataatgggttataagatagtattcgcaagcctcatggtaacctcaagccaaaaacaaacaaacaaacaacaacaaaaaaacacatagtggatacacaaaaaataaaaagcaagaaactaaatcatatccccagagaaaatcaccttcactagtggaggataggaaagaaagaaggaagagaagatcacaaaacaaccagaaaacaaataacaaaatggcaggagtaagtccttacttatcaataataacattgaatgtaaatggactaaactctcccgtcaaaagacagagactggctggatgaaaaaacaagacccattgattgttgcctacaagaaacacacttcacctatatagacacacacaggctgaaaataaagggatggaaaaaaatattccatgccagtggaaaccaaaaaagagcgggagtagttatatttacattacatacaatagatttcaagacaaaatctgtaagaggagccaaagaaggtcactacataatgataaaggagtcagttcagcaaggtgatgtaacaatgtaaaatatatatgtacccaacactggagcacctagatatataaagggaatattattagacctaaagagagaggccttgatacaataatggctggagacttcaaaccccattttcagcattggacggatctcccagacagaaaatcaacaaagaagcatcagacttaatcttcactatagacaaaaaggatctaatatttacagaacatttcatccaagggctgcagaatgcacattctttttctcagacatgaattattctcaaggttagaccacattttagatcacaaaacaagtcttaaaaaattcaaaaaattgaaataatatcaagcctcttttctgaccactatggattaaaactagaaattaataagaattttagaaactttacaaatacatggaaagtaaacaatatgctcctgaatagtgggtcagtgaagaaattaagaaggaatttgggggccagaggtagtggctcatgcctgtaaccccagcactttgggatgccgaggtgggtggatcataaggtcaggagttcgagagcagcctgaccaacatggtgaaaccctgtttctactaaaaaaaaaaaaaaaaaaaaaaaattagccaggcatggtggcgtgcacctgtaatcctagctactggggaggccaaggcaggagaattgcttgaacctgggaggtggaggttgcagtgagctgagattgtgccactgcactccagcctgggtgaaagagtgagactctgtctaaaaaacaaacaaaacaaacaaaaaagaaggaatttgggaaatgaagcggtggggcagaggctggcagctcaggcagtgaccatgcatattatggcctcatggtgcctttcgctgtgatgagcatgttctggggcttcgttggcttcttggtgccttggtttatccctaagggtccttactgggaagttatcattaccatattggtgacctgtccaggtttctgctatctcttttggctgatttcaattctggcccaactcaaccctctctttggaccacagttgacaaatgaagccgtctggtatctgaagcatcattggccttgaggaggaagatgtgctctacagtgctcagtctttgaggtcacgaggagagaatgccttctagatgcaaaatcacctccaaaccagaccacctttcttgacttgcccattttggtcattagttgccttaaacatcagcaccacatttaaatgtcttattctacaatgaagtgttttttccttcacttttttacactttaacgaattatgtccctacttaaactgaactgtgctgactccagaaaatgattatgtactcttctgagatagaagattgtcttcttctgagagatatgttactgcctccttggaatctgtgcatttgaagatggctcctgccttctcacatgggaaccaatgaagtgtttagaaactgctgcaagacaagtaatactccagtggggcagtcagtaggagagcattttcagagggaagagctgtctcaacagaattacaccttactgtattttcaggatgaatttattatttctgccgtctttcggaataaattatttttctgctttctatgggggggaaaaaagaatttgggccaggaactgtggctcatgcctataatcccgacactttgggagactgaggtaggcagatcacctgaggccaggagttccagaccatcctgggcagcatggtgaaaccttgtctctacaaaaaaaaaaaaaaaatcacacaaaaattagccaagcatggtggcacgtgcctgtggttcctgttacttgggaggctgaggtgggaggattgcttgagtccaggaagtggaggttgcagtgagctgagatcatgccactgcactccagcctggtttc

SEQ ID NO: 486645 - DNA, 1290 bp, Homo sapiens
  misc_feature (476)..(476): n is a, c, g, or t
  misc_feature (502)..(502): n is a, c, g, or t
  misc_feature (531)..(531): n is a, c, g, or t
  misc_feature (841)..(841): n is a, c, g, or t
aaaaaaagaaaaaaaatcagaagtgaacctgtagcctgtagtgtgttgccaaataaacttatttttagagatacttctttccattttctgtgaggtcatctgcagtttcacatggtagacagacttaggtgagattcttagcaacatagaatgaagagtaaagaggtttgtttatttcacaagggtttattgaaggcctacgatgtgttaaatgctgtaggaaatacccactgatttctcttttcatggaggtttcccgccttctcttaacgagtgatcaattaaactgtttactgggaacttgctaagttaatgaacacacgggatacattctttggatgagcagacattggttgggcagaggggcaagaggagagcagtttagacagagacctgcttatacactgtagtgtctaagagagcttgtgatgttcaggaaacagttgttcactgtgctgcaatataggggacggccngttgcggtggctcacacctgtaatcntagtgctttggagggccaggctggtctcnaactcctgatctcaagtgatccgcctgcctctgtgtcccaaattgctgggattacaggcgtgagccaccgcaccggccatgctttcagttttcaagaaagaagacaccattattgccaaagattttggtaatttgagagatacaatgtatgttttctccatgtgaatactaggtagtaaggatctgttgaatttgaagtgtctatccagaagtattttgggtacttgtttaaggattgtaaaacaatgttttcatttctggatataataaatgtatttgttaatataataaatgaatagattagacccanaaaaaaaaaaaaaaaaaaaaaaaaaaaaaaaacaaaaaaaaaaaaaaaaaaaaaaaaaaaaacaaaacaacaaaaaaaaaaaaaaaaaaaaaaacacaaaaaaaaaacacacccacacacaaaaaaaaaaaaaaagggggggcgccaccacaaaaccccccggggggggccacaaaagacagcacacccgagtatcacaacaggggcgccccatggggggcccatatacacgagccggcagggagccggcataccacccaggcggagggaaaacacgccgcacgcagcaaaacagaagagagccccaaacggggggggccacaaagggcgacaccaccccccccgcgacacaaaccccgggggcataaaacaacacgagggagaaacggggaaaaccacggcaaaagccacggacgaaaaccgcgcacgagaacttggaggcactttcc

SEQ ID NO: 486646 - DNA, 748 bp, Homo sapiens
  misc_feature (238)..(238): n is a, c, g, or t
  misc_feature (344)..(344): n is a, c, g, or t
tggaaaatgaaatgttcccccatcatagtggattcttaagcccgttcgccacgatatgcggcgtgctagctggatgtctttgggcttaattgttacactttgggcatgaatagcacacaggttggtgtcttcaaaaaggccaaccaaataggccctcatgttgccctccgtggcaaagcaccgattagctgcgcctcgtggaagcgcaaactctgtgttttaaaagctccgtgagcanatttcctcgcaccagaacgctggaagggaagtttgtgcgaatctcagaagtttcaggtggactttcgtgataccgttctaattttcacggaagcgccacagtaccnaggcctgtaacagataagtgtttcttacacccctccagtaaagggcgcactcttgcagagcggtcttttgtacccagtgagctccctgggtgcttataccaccggtcaatttagcgggcagtctgctttgtacagagccatggtacagagacctccttatgttacccccctttactccttcggctggagcctcgggagcgaaagcgcggccgctgtgctgtatggaaagcacacggaggcgcctgagaggcaggcccacatgtgggatagaccccggtgccaccggggggccccgggggcccctggtggccctgggatggggacccgggtggtcacccggaagtttcggcatagcatccgggcaggtcacgcttaaagggccgggccaagacggaaccccgaaa

SEQ ID NO: 486647 - DNA, 425 bp, Homo sapiens
agcttttagacctttggcaaatgaatttaccatgaggaacagttcttttcatttataaaatgggggtaaaagctcatacgatgcttgtgaatgttaaacaaacttgtttatgcaaattacttaggcattgcctagtacaaaacagaacttaataagtagtaggaattctatcatttccattagtcattattaattttgttctaaagtacctgcctctccaggtagctaaattgcttgttatcttatgttgtagcgttttaattaatccaatctctgagtaaatttactatgtagggatctagggaaatattaatttcagttaaacatactttcctttttaaattgaaaaccaaatacggtaactttagaaaagtttaagtatatattcaattcaccagaattattttcttgtaaatattttcatc

SEQ ID NO: 486648 - DNA, 879 bp, Homo sapiens
atgccccaactaaatactaccgtatggcccaccataatgacccccatagtccttacatctatgcctcatcacccaataaaaatattaagagcagcaaactatcactagctccctcaccaaagcccagtaaaaagtaaaaaatgataagcaaaccctgagaaccagagattgaagcgaaaatctgttcgcttcattcattgcccctcatttgcataaagtatgatactagcatttaccatctcacttctaggaatactagtatatcgctcacacctcatatcctccctactatgcctagaaggaataatacaatcgctgtcagtatagctacgtcctcataaccctcaaaaccatccctcttagaccaatattgtgcctatggccatactagtctttgccggctgagaagaaggggtgggctagcccgtactagtcgcaatctccaacacatatggctagaatacgtaataacctaaacctactccaatgctaaaactaatcgtcccacaattatattactaccagtgaatgacttccaaaaaacacatatttgatttacaccaacacccaatatctataaactagcatggcattccctttagggggggcgaggatataggttcgtctaagattaaaatgcctagccatttcttaccaaggggaactacacccttatccatatagtatatcgaccgggattattaacaaaggctggcggagcgtaaggtaaatatggggactatatggattgggggggaaagaaaaaaagaggctaagtaatataaatttgaggacaaagggggcacaggtgttgagccgcagaaaaaaaaaaaggggggaaatggggggtttgttagtgttcccttcgctgtaggaggg

SEQ ID NO: 486649 - DNA, 328 bp, Homo sapiens
tacctgggcatagagctcctgagcatagtgatctcccacctcagcctcctaagtagctgggactacaggtacgcgtcacagcccccagctagttgcatactttttttttttttttaaaaaaagggggtctcactctgttgctgggaaggaaaagccgtggtgcagccacggttcactgcagtcttgacctctgtggcctcaagtgatcctcccacccaagcatccgtgagatagctgggactagcgggtgtgcgcgaccatgcctggctaattttttcatagagacagggtttggccatatggcccaggtgggtctcaaactcctgag

SEQ ID NO: 486650 - DNA, 154 bp, Homo sapiens
  misc_feature (113)..(113): n is a, c, g, or t
tgcggcagtgcgagctgaggcagtcgcccctgaagttgcagttcgcccctagagttgcagctatgcccctgagttagcatcgcctattaactcagggcgagctgctgggagtntattttccgcttggtgccaggtgcaccagttccaggtgtca

SEQ ID NO: 486651 - DNA, 675 bp, Homo sapiens
taaaaatgagaagattgataaagtctaagaaagatatttaatcgggaacgccagaaatctctatcattaacacccagcccgctcagactccggtgaaggattccttcagctccctcatcaagacagtcaagatagtacttcagtaggtacaaactcttaagaaagatggccagacgttggggacaagaaaagcagcaccatgaatgagctggtgcagtccatggtcctagcaggacggtggacaggtagtactgagaatgtggaggttcctgatgatatttcagcgggtaaaaggagaaaagaattgggagctatggcctcctctactacagccaacaattttacagctgtccaactcttctgcaggctacagatccaagcaggaggttaataataaagatactacatcctttgaagacataagtccacgaaggtgttagtgatgatgctagtgacgggatcaagagttcatgcttcaagaccagccaggcttgatggtgggagaacatccactagcaataacaataataatgcttactaaatgaagtcaagcggtgcgtaataaacaaggcggccaaaagcgcaggatggaaattagctgttctgaccagaggtggccaggggtagcgccagccttctgaaggacacatcggcgggccagaaatatgagcggga

SEQ ID NO: 486652 - DNA, 502 bp, Homo sapiens
ccgggtggggcgtagggagggatgtctatggggtcagaggattcaaagagaaaaatttgggttggaacttgagttcctttcctgaacttgctgtaacaaatttatacaaattgggtggtttacaacaatacaaatatgttctctcatagttctggaaggcagaagtctcagatcaaggtgttgggaagcatggttcgttatgagggttgcaagagaggaatctgtctcatggctatatcctggcttctagtggccccaggtattccttggtgatatggtttggctgtgtccccatccaaatctcatcttgaatttccacgtgttgtgggagggatttggtgagaggtaactgaaccatgggggcaggtcttttctatgctgttctcatgatagtgaataagtctcatgagatctgatagttttataaggtggtgtttccctgcacaagctctctctttgcctgttgccatccatgtaagatgtgacttgcttctccttgtct

SEQ ID NO: 486653 - DNA, 215 bp, Homo sapiens
  misc_feature (92)..(92): n is a, c, g, or t
  misc_feature (144)..(144): n is a, c, g, or t
  misc_feature (155)..(155): n is a, c, g, or t
  misc_feature (160)..(160): n is a, c, g, or t
  misc_feature (166)..(166): n is a, c, g, or t
  misc_feature (192)..(192): n is a, c, g, or t
  misc_feature (199)..(199): n is a, c, g, or t
  misc_feature (206)..(206): n is a, c, g, or t
ttagcttttgtgggtttgctctccccatcccatttcctgtactacacagttcatggcagggtggggaagggtggggttggttcgggtgggtnagggtctttttcctctgtgtgcgatgttgttatttgacagttttccgtcccnactggcctttntcctngttttnatatttgtacgggacaagcaataaanaccctcntttcagnccaggaaaa

SEQ ID NO: 486654 - DNA, 438 bp, Homo sapiens
actacatataaaaacacattgtaatgatatatcatgtggaaagatctcccccactgctctcatgtagatacctgactgttttttggattgtctgttcatgtggcaatctttttcctcttctctgttaaactttttacttcatataaataaatctaaaactctacaggctgctctacttctctcttcagaacttgcattgctcctgataataatgctcctggaccttacacctacatcaactgttaaaaaaggatgggagagggaattttgagtggtgattttaacacggggggtgtaggccctgtgggaaaccagattcttcattcccaaaaatttcctcccactagcagcgagtgtttgagaaaatatctactaagggatagatgctgagtgcccacctgccttaatccccctgttgtaaaacccccaatcaattgg

SEQ ID NO: 486655 - DNA, 927 bp, Homo sapiens
  misc_feature (95)..(95): n is a, c, g, or t
  misc_feature (195)..(195): n is a, c, g, or t
  misc_feature (217)..(217): n is a, c, g, or t
  misc_feature (291)..(291): n is a, c, g, or t
  misc_feature (325)..(326): n is a, c, g, or t
  misc_feature (338)..(338): n is a, c, g, or t
  misc_feature (342)..(342): n is a, c, g, or t
  misc_feature (355)..(355): n is a, c, g, or t
  misc_feature (358)..(358): n is a, c, g, or t
  misc_feature (369)..(369): n is a, c, g, or t
  misc_feature (372)..(372): n is a, c, g, or t
  misc_feature (378)..(379): n is a, c, g, or t
  misc_feature (383)..(383): n is a, c, g, or t
  misc_feature (401)..(401): n is a, c, g, or t
  misc_feature (458)..(458): n is a, c, g, or t
  misc_feature (471)..(471): n is a, c, g, or t
  misc_feature (562)..(562): n is a, c, g, or t
ggaggccacaggaggtgggctcctgtgctggcctgagtgctggcggaggggaaggggctagcaggtgtgtaaacagagggttccatcaggctggnggcagggtggccgccttccgcacacttgaggaaccctcccctctccctcggtgacatcttgcccgcccctcagcaccctgccttgtctccaggaggtccngaagctctgtgggacctcttgnggggcaaggtggggtgaggccggggagtagggaggtcaggcgggtctgagcccacagagcaggagagctgccanggtctgcccatcgaccaggttgcttgtggccccnnggagcccacggngtcntgtgtgattgccnatnagcatgcgcanacncaccgnngggngcctacggggctgcggcnagggactcggcctctgggaggtttacctcgcccccacttgtgcccccagctcagccnccctgcacgcagnccgactagcagtctagaggcctgaggcttctgggtcctggtgacggggctggcatgaccccgggggtcgtccatgccagtccgctcagtcngcagagggtccctcggctagtcgcccctgtgagtgggcattcggaaacattggacagaagccacacgagtcaaattgtcacaatttgtggaaccatatgggctgagatcagaacgcttgaggcaccctaaattacatgcacattcgtaaggacagccacctaccagtgtatatactgctctcccggacgtggatgttcccggggcattgtcaccaggcccttgcgttccagtgttgagtctcacctgggcataacatctggccggctgctgttggaatcggctagtcggccctcatctgtttctccggtccatgctcggggggcccttgggtctccttgttataaacctcgaactatgtctgctg

SEQ ID NO: 486656 - DNA, 375 bp, Homo sapiens
  misc_feature (44)..(44): n is a, c, g, or t
  misc_feature (153)..(153): n is a, c, g, or t
  misc_feature (203)..(203): n is a, c, g, or t
  misc_feature (316)..(316): n is a, c, g, or t
  misc_feature (368)..(368): n is a, c, g, or t
aagaaaagccatcatatcccctgtgacctgcatgtatacatccnagatggcctgaagcaagtgaagaatcacaaaagaagtgaaaagggccggttcctgccttaactgatgacattccaccattgtgatttgttcctgccccaccttaactgngcgattaacctgtgaacttccttctcctggctcagaagcttccccactgngcaccttgtgacccccgcccctgcctgccatagaacaaccccctttgattgtaattttcctttacctacccaaatcctataaaacggccccacccctatctcccttcgctganactctctttggactcagcctgcctgcacctaggtgattaaaaagctttaatntcacgca

SEQ ID NO: 486657 - DNA, 516 bp, Homo sapiens
tactttcacagggaagtatttgaaagtttcaaatattaggacaggtgccgtggctcacgcctgtaatcccaaagctttaggagactgaggcaggaggattactcgaggtcagaagtttgagatcagcctacgcaacatagtgagagctcatctctacaaaaaaataaaattttaattagccaggtatggtggtacttgccttagtcccagctacttgggaggctgaggtgggaggattgcttgagctgaggagttcaagtccagcctgggtaacatggggaaaccctgtctctacaaaacatacaaacaaattagctgggcatggtggtgcacccctataatcccagctactgtgggggctgaagcaggaggatcacttgaacctgggaggttgaggctgcagtgagccaagatggcgccactgcactccagcctgggcaacaaagtgagaccctgtctcaagtaagtaaataaataaatgagagagagagagagagattgtgtaccggggcaaaa

SEQ ID NO: 486658 - DNA, 325 bp, Homo sapiens
actcgttgacctcgtctgtatgtaacggctgcgtagggatgggagggcgctgaggactacgtatgatggcgggcaggatagtccagacggtttctctttcctgcgcgtctgagcatgttcagtcatcagtaagttttgtcgtgagtgtcaggaaaagggccatccaggataggacgccgataaggcacaaatgcattatcagggcgtcatcatcaaaggtgatcagctcttctcatcccaggggaagtcagcgtcttgtcgcactactatgcgctgcattgtcccatgtgggtcgcttttgaaagggtaccggagctccgaattc

SEQ ID NO: 486659 - DNA, 180 bp, Homo sapiens
  misc_feature (37)..(37): n is a, c, g, or t
  misc_feature (144)..(144): n is a, c, g, or t
  misc_feature (155)..(155): n is a, c, g, or t
gcgagtgatggtctcccgcgaatctgcagcttctgangacagggttgctccgtcgtgctccgcctcccatgacttcctacagctatctgcagtcgtcggccacgtcgtcccttcggaggcctgggcggcgcgctccgtgcgtanttgggcccggnggtctgcttttccgcgcgccccagc

SEQ ID NO: 486660 - DNA, 135 bp, Homo sapiens
aggccagtgtccggtgctgctcgagtccgcagcactcagactacgtgcacctctgcagcggtgtgcaggccctctttgtcaccccttctagcatgatctgcccatgttattctggcaggtattgagctctccaga

SEQ ID NO: 486661 - DNA, 297 bp, Homo sapiens
gttggcaccatataatgtatgctaaatgggatggcaatatcagataacttcttctggcacaccgtggtgtcaacaatctagatagcaaatatgataatctgtcccattggtgacatggtatgcctggatgaagcattccaaccagggatatgcataaatttttcatcccgggcaggcacaacacacatcatccatgatcatatcccacactttcctggaaggtcatcatccaatcagcaacttctgcatgctgggcaatctgggaagcaattggcccagcaatccatgcagcatagg

SEQ ID NO: 486662 - DNA, 806 bp, Homo sapiens
taaaaacccacagagtctttatcgggtctaatactcagcgggccggaaaaataaggccccccgggaggggggcaaaatctaggtccgggggcagccgggaggggtatccgcgaggagggggcccccccagccggcccaccctcaggaacatcataagcccatactcggtccaggccctcgccaaccggggtcacaggctggccagggggggagtggggaagcgcccagacaccacgcgggccccagcaggcagctcggtccgcagctggtcctccagcagggggagcacgctaggggccaggaacacagacacgtggcgggagtccctcaggctcaccggccgggaagagaatgtcgccccagccgggggagaggcctgggtggggcccggggtcatccgcagcttccggagtcccgggcccccaagccctcgcaggtgtcagccggcacctggggctggtcaggggggggccgggaatccccagtgttaccttccagaagatcctgggggcgatagcagacgctgccggggaagcgggccctccaaggggtgaagccggccaggccaccagccggggtgttcatggctcgtagccatggccgtggggggggctcgccttgtgggcggcacaaagaatcttgcccggtgcaaaacccagatccccggttccggggggtgcccgcgagggaaactgtgcccactggcgggggcgcccaataggcactgaccgtgggggatcggggttggaatggcaacagccaatccggaaaaagggtcgtgactgccatggggccaccgcaagagg

SEQ ID NO: 486663 - DNA, 363 bp, Homo sapiens
  misc_feature (8)..(8): n is a, c, g, or t
  misc_feature (253)..(253): n is a, c, g, or t
  misc_feature (282)..(282): n is a, c, g, or t
  misc_feature (340)..(340): n is a, c, g, or t
  misc_feature (346)..(346): n is a, c, g, or t
ccctgggntgcatgtaagacaaaagtggtttctggtgaatatacggtgagcagcacaatgactgctgacctgactgccgaaatcgctgaaggttacgtactggcctgctcctgccatccgcagggggatttggttctcgcataatcgccttatgcccgatgatattcctttcatcgggctatttaaccgttagtgcctcctttctctcccatccctttccccctccgtcagatgaactaaacttgttaccgtntatcacattcaggagatggagaaccatgnaacaaacggttgcagctttatatcgccaaaacactcggaatcggcagggggggcccgngtaccnaatttcggccctttagt

SEQ ID NO: 486664 - DNA, 186 bp, Homo sapiens
gatcctccatcataagtaacaggcatcatgtggttgaccactgaagggcctgctagtcgcgcgtgaccaccattagcgcaaggagcaacttccaccggagctcggacgggttccttgtgacaacgtgaaacagcgccgggttacagcgttagtattgaataatcaggcatagtattacatattgtg

SEQ ID NO: 486665 - DNA, 405 bp, Homo sapiens
aagactaaacatgaaattcatttatgcttcatatacaccttatatacatagcctaaaggtaatttgatacaatattttaaataattttgtgcatgaaacaaagtttcgactgcattttgactgtgatttctggcatgagatcagttatggaattttccacttctagcgtcatgttggcattcagaaattttgaaattttggagcattttggattttcagattagggatgctcaacctgtatatatattttttaatcgacgtgaaattcacgtaacatagaattaaccattttgaagtgaacaatttggttgcattcactgatgttgagcaaccaccacctttaactatttccaaaacattttcatcactccaaaataaatgcctgtacacacttggccggtcact

SEQ ID NO: 486666 - DNA, 472 bp, Homo sapiens
gtgactctccaggatcttacacactgggttcgagttccccactgggtcgagtcaagacagcctggccaacatggtgaaacccggtctccactaaaaatgcaaaaattagcctggcatggtggtgcaggcctgtgatgacagctacttggggggctgaggcaggagaatcgcttgaacccaggaggcggaggttgtggtgacccaagatcacgccattgcactccagcctgggcgacagagcgagacaccatctcaaaaaaaaggatcttgttaggaagtacatgaccccgagtgagtgcctctcctggccaggtgtccccttgtgtatgtcatccttgaatcttcctagcagccttccaaagtaggcttcgggattcagttttacagatagggaaacttaggcacagagagacttttggtggctctataggcagtaaagggcaaaatggaaagcaaacctggcctcttgtac

SEQ ID NO: 486667 - DNA, 665 bp, Homo sapiens
  misc_feature (248)..(248): n is a, c, g, or t
atcccagcatttgggaggctgaggcgagtggatcatgaggtcaggagatagagaccatcctggctaacacagtgaaaccccatctctactaaaaatacagaaaattagctgggcgtggtagcagatgcctgtagtcccagctactcgggaggctgaggcaggagaatggtgtgaacccgggaggcggggcttgcaatgagccgagatcacgccactgcactccagcctggggcgagcagaggcaaganctccggttctcaaagaaaaagaacaacaaaaagaaaacaaaaaaaacgtgtgtgtgcggcgcgcgccctggcggccccttcgaagaagagttttaaaaaaccccattgtggttgggggcgcgcgcgcgggcaccccagagtgggtttaggtggagaccgtgggcccaaaaggtggttcccccaagagggagacacccgggggacaagagacacaagtgcgggcgctgggagattctcttcaccccatattaaaaaaacaagcgcgcccggggggggtgcaaaccggagagggtgttttcttagaaaacaaacttcccaaatgggggagtatccaaggaggcgccaaataccgggggtcttaattctaaacaggggagtccaaaagggagcctccgagattttataaattatacgcgg

SEQ ID NO: 486668 - DNA, 92 bp, Homo sapiens
  misc_feature (34)..(34): n is a, c, g, or t
cgagacttaacctcctagaattcccatgacgagntaatgcatgtccgtggttgggtgcacctgtaggtctgtttattggtcagtggaaatga

SEQ ID NO: 486669 - DNA, 161 bp, Homo sapiens
cgaggcagtatagctgttcgtgagtgtaacacgacggcagtcatagctgattcctgattgtaacaggacggccagtcattagctgtttcctgattgtaacaggacggccagtcgatagctgttgcctgattgtaaccggagggcgacgtgttaccggttgc

SEQ ID NO: 486670 - DNA, 783 bp, Homo sapiens
gttagcaggtgagcctgcgatgcgcgggaagatgttccgctatgaaactgcagcgggatttggtgagttacccgcgtgtctccagtcggttgtgggtgaagctgagtgatctgcggggttccagactgctgaggaactcctagaggtgaaaccctccgagcttagcagaagaagttgggatatctaaagcagaagccttataaactctgcgagaattaatcacgaagcaggaatgtcgtcacaaatagaagccaagaatatgctggtctacactctgagctcacacaagagagtgtcacagtccacttggagaccttcttgcagacaggcagcgataccccaggggcttgcataactcgacccttgctgttccaggcactcagatgatattcttggggggtggcagtgcccttgaatgaaacacaagagaaattttgtggtgcaccaggtgtctggaaaaacacaattatgtatgcatgtgggcagtagatgtgcagataccaagaatgtttcggaggagtggcaggtgaatgcagttcctattgatacagaagggacagttgtatggttgatagagtggtagaccttgcgactgcctgcagttcagcggccttcagcttatacgcagtacaaagccaagggagaggaacaccgaaaagcttggggaggctgtcacctcttgattatattctttctcatattgcttatgttcgctgtcgtgactaccacagagctcactggtcccaagttatcctgcctccagaattcctttcagaacgctca

SEQ ID NO: 486671 - DNA, 432 bp, Homo sapiens
aacattcggtattacccggaccgtccatgaaataacgaggatagcgtctttccccatgcacctgattaactgcactaaccacaatatctcagctgatatgctaggatgtctctcccaacatatggaggcaacaggttttaagaatagtgtcaggggcattatttaatcagtgttagttctgacaggtgaacaaactgagtaggtctctgcagatagtacctatgaaacattaaggtcagattgattcagctacctggtgtgtaagataatgcccaatttatagtttcctttttattttttctggtacttctacaaatataaccctgagcatagaaataccctcattattttaatgggacatcctatttctaccatgcaatttgagcttgatctgagacatttctgtgaagtgtgaaagtacagttaatcatt

SEQ ID NO: 486672 - DNA, 397 bp, Homo sapiens
ctcgggcaataaaatggacaatcgaaggaagattcactcttgcagctatgccgatagtatggacaatatccatgacatctacacttaatctataaccatatagatctatgtacacccataaatcccggctggccgaatcagatggaccatatattcgagatatatagtaattgtaggtctgtatacctcctcgatctgagtgttatagtcctgcccatacatccagcagcaggtctgtgaagctacagggaacaggagacgtctggacgacgcatatgctcggtacgatagtctaccgccttgagaaagtccaagtaacttataccacctgtgactgtacgcgtgtaaaatcaaattccacctcctcctctgtgtgagggaaggcctgagtaactcc

SEQ ID NO: 486673 - DNA, 317 bp, Homo sapiens
agctccaaggcgcgggagctccagggcatttggtcaagtcacatccctggtcactgctctcactgcaaattttttgctctccaaaattgccctggccacagagccaccttgagctcctgcagggtcaagagaagaagaaacacaggaaggatcaggaagaatgttcactgaaagaaggtcagaaatctcataattcagagtagagctgctgcagtacctactgcagggggtgctacatggcccttcacatatccccatggctttcaaactaagttctttgtggcctcttcagaggcatttttgcagaggacatggga

SEQ ID NO: 486674 - DNA, 263 bp, Homo sapiens
tgggatcttttttatttttatacacattacaagattttacattatagaatagtcaggtaaatagtacaaatttacatttatgaggaatgttaaaaaaaattcaactataaaacccacttttttctgtgacccataatcccacattttacagtgcaagggataaggggattatggggcattcaaaacaagttttttccataaagaaatgatgtaaattttacattcccttttcacacaggatccaaatggtgaaagttttattt

SEQ ID NO: 486675 - DNA, 1380 bp, Homo sapiens
  misc_feature (289)..(289): n is a, c, g, or t
ggtgatgctgatgaatccatggctgattgatgatccacgtcttcccgcaatactgagcacatccgaaagttgacccagagcctacaaaagcgaaattcagaagacagaccctgggagaagagtgccattacgtaagcgacagcatgcgatggtgcaacttgttccgaagacgggcttccatctaagtactctactcattcatcagagtaacaagcagtcgatgaaaggctacaacatctgtggcacatagtctacgtcgcctcaagagcagatgcaccgaggacgcctngtatgcgcgccgagggagaacttcgtcgtgggtagagcagagcgacttctcagacggtacagaatgcgggtttcgtagtagacgtactcccaggagcacggtgcctcactctcgggtaggcaagatccaagcgaagtagagttgaccatgatgaatgagcatggccgggaaccattcgacgagagagcatctagccggggagcatgtcctggggacctgggcacgggaagcgccattgtcgttggccgttggctgaacataggtctccagacgaaatacgcccaagaaccttacattttgcgcgaagaagtgctcatactagagtggcccattgaagcggcggagggctatgggaaaaccaaaaagcgactcgtggactccctgaattcaggcgaatacaagtagagatagttcttctgcaaagtgaagaaccatgaaacatccgtgggtaccattcaggaatcaagaaagtatagaagcgagattgtacgtgcaaagtcagcatgttaccagagaatacatctcggggaagattacgttcagggggggaattaccggggaaggatttcatggtgaaagaatcttgtggttggcgcaatggacttgaacagttggaacgtggtagggggtacaaccttccttggccaaccagtggcacgggaaaagcaaccaagtggacaagagaaaaacggggcaaaaaagaacatggtacggagggccataaacagaaatcccagcgacagataagccccgaagaaattcacccagggtacctaaagaaagccgtgagggcccatggttcttagcaaagacgagcgtacttggaaaccggataataagattggtgtaccacaagggaaactaggggattagaggactatagaaaactcacacatcaagggaatggccgtatgtgtataagcaccagaaataccattcagaaaggaactaactaggtaagggattaaaaaaatacgaattggatagtcaagagatgatttgacaatacatgaaaaatacattaccccagtatggcctgtctgcataaagaatattgggaacaaataaagagaaggttaactgggataatg

SEQ ID NO: 486676 - DNA, 430 bp, Homo sapiens
aaagagaagacaacattacaatagcaccaaaaataataaaataattagaaacaaatgtaattaaaaggcacaaggccgggaagggtggctcacacctgttaatcccagaactttaggaggccaaggtgggtggattgcttgagctcaggaattcaagtccagccggggcaacatggcaaaacctagtctttacaaaaaaggcaaaaaattagccaggcatggtgtgcacctgtaccaggtatgcacctgtactcccagctactcggtaggctgaggtgggagaatcacctgagcccagtaagtcgaggccgcagtgaaccaagatcgcaccactgcactctagcattgaagacatagcgggaccctgtctcaacaacaacaaaaaaggcacaaacacaagacttgtatgctgaaaagtacaacctgccgg

SEQ ID NO: 486677 - DNA, 174 bp, Homo sapiens
cagaaggctggagatgtaagtagagctgcaacagtgccgtcagtgaatgtcattggttctgtagaagttctaaggaagcggtactgaactccacgtgtggtggggtgctaacatagacaggggagccgcactgagaagatgttggtcgggggactcgagctgactgagctgaca

SEQ ID NO: 486678 - DNA, 105 bp, Homo sapiens
cccgagaaggagtaagaccgaaaggcgatgtgaaataaacctgacaaagacgagatgcacaagcgccccgcgagaaggagagcccggaacctgcgacggcggaac

SEQ ID NO: 486679 - DNA, 102 bp, Homo sapiens
atgaaacatatttgggaccacagtatgtcgcaggcattactaatctgaaaaagtgctcaacctcccccctactggaaggctgtgaattcctcaggaagtaaa

SEQ ID NO: 486680 - DNA, 102 bp, Homo sapiens
tggaaataaaattttggctctgtcccccaaatggaattgcgggggcaaattctcggttcactcaaacctccaccttcctaggtctcaagttgattctatgcc

SEQ ID NO: 486681 - DNA, 610 bp, Homo sapiens
  misc_feature (142)..(142): n is a, c, g, or t
  misc_feature (388)..(388): n is a, c, g, or t
  misc_feature (519)..(519): n is a, c, g, or t
acataacgttagctggcctagggataggggtcagtctgggcacagagcccagagggagtgggaagcccagcagggggaggggagtgggatcctctggggattattctggaatggctctcccatttctggacctggaacccantcctactggctaagaaaatggcgacaaagaggggtagttttggcagctgtgtaacgtatctaaagctcagatcagctgggggtggcactccagcatctgggaggctccagtagtctcaagtgcaaggcagtagggggggcagtgccctaggttataacgccagctcagccatggactatctgagacctcagggcatgacactcccactccggcctcagttcccttctcggcagtctccggggcggnacaggatggtatgtaaggcctatggagctctcatacccgggtttaattcagactccagggaaaccagtattggtaagagctcagctgctcccacagcaggaccgagtagactaagatggatgaagctcggncctgggcccactggagaggggaacgggcctcaaagaaggacgggataaggctgactcacactccatagaacatacagttaacctttcccca

SEQ ID NO: 486682 - DNA, 394 bp, Homo sapiens
gccaattttggccctttttaattttgcaaaatgcgttgggtgacattgtttcacccaatccctggagcaaggatacaaagggttttcttttttgggtgcccccggaaattgaaaatggggcccgtggcagaggtgcactttcggtcctgtttccatcctgtttgtgtctttttgccgttttcggccattagaagttggaggtttgctgtccttctggccaattttggggcctcagcaggtttccaaatcaatcattaccccctaccccatttccaggcctttaataaagtttgctgcctgcttaggggctttgaaggggaaacccgtgggccgggtcaccataagttgttaacattggggaagcatttggcccataaagtttttggaactttta

SEQ ID NO: 486683 - DNA, 843 bp, Homo sapiens
  misc_feature (10)..(10): n is a, c, g, or t
  misc_feature (71)..(71): n is a, c, g, or t
  misc_feature (82)..(82): n is a, c, g, or t
  misc_feature (89)..(89): n is a, c, g, or t
  misc_feature (96)..(98): n is a, c, g, or t
  misc_feature (103)..(103): n is a, c, g, or t
  misc_feature (113)..(114): n is a, c, g, or t
  misc_feature (131)..(131): n is a, c, g, or t
  misc_feature (138)..(138): n is a, c, g, or t
  misc_feature (154)..(154): n is a, c, g, or t
  misc_feature (159)..(159): n is a, c, g, or t
  misc_feature (161)..(161): n is a, c, g, or t
  misc_feature (198)..(198): n is a, c, g, or t
  misc_feature (228)..(228): n is a, c, g, or t
  misc_feature (231)..(231): n is a, c, g, or t
  misc_feature (238)..(238): n is a, c, g, or t
  misc_feature (242)..(242): n is a, c, g, or t
  misc_feature (254)..(254): n is a, c, g, or t
  misc_feature (260)..(260): n is a, c, g, or t
  misc_feature (264)..(264): n is a, c, g, or t
  misc_feature (268)..(268): n is a, c, g, or t
  misc_feature (276)..(276): n is a, c, g, or t
  misc_feature (280)..(280): n is a, c, g, or t
  misc_feature (294)..(297): n is a, c, g, or t
  misc_feature (299)..(299): n is a, c, g, or t
  misc_feature (303)..(303): n is a, c, g, or t
  misc_feature (305)..(305): n is a, c, g, or t
  misc_feature (307)..(308): n is a, c, g, or t
  misc_feature (310)..(312): n is a, c, g, or t
  misc_feature (314)..(314): n is a, c, g, or t
  misc_feature (316)..(316): n is a, c, g, or t
  misc_feature (319)..(319): n is a, c, g, or t
  misc_feature (722)..(722): n is a, c, g, or t
  misc_feature (825)..(825): n is a, c, g, or t
tgggcggggnggctcacgcctgtaatcccagcactgttggggggccggggcaggcgggtcagttgagcccnggtgttcgggnccagccnggccggnnnggcgngatcctgttnntacaaaagatacgaaanacaaggnatttgccggggatggngttgngngcgcgtagggggcacaagctacttggggggctggggngggggggtcacttgggcccgggttggggcngcngtgggcngtgntgtcgtcactgnactccncctngggngacagggngggnccttgtctcaaaannnngnaaangngnngnnncncngcnccagacaacctactgtaatttcagactagcagaatattccagaaagttcatgcttgtatcagcacagggagacattactccaccattgctaaatctttcaggctatggcttttttgtctcttggccttatatcctggacgcaggaactctatctttctcttctttgcttcacttttatttttgtgtttcttcatttttttcttggcagcaatatcaggattagttacaaactccagggccttcctctttttccggagtgcccttttctcattagcctgtttctgtacagaggcaaaggctaatgagaagctctcaagcccaaccagctttttgagtaattctatgatttcctgggatagattcttcagcaaaggatcttgctctgaataggtgctgttgagtnccgaaacaaaggagctatgatcattgggagatacggctttaccttgtctatcccaagatccattgctacggcgccgaggaacttaaagatgcatgttctcttnaaggggtttctcggcgaa

SEQ ID NO: 486684 - DNA, 156 bp, Homo sapiens
gggggttttgggcccccttaaaaaaaaaaaaatttgtaccttggggcttttttattaattcccaacgggccccccaaaaggagaaatttttttttccgttttttttaaaaaggtctggtttaaaatttggagcccccctttttttttttttttgta

SEQ ID NO: 486685 - DNA, 387 bp, Homo sapiens
  misc_feature (12)..(12): n is a, c, g, or t
  misc_feature (206)..(206): n is a, c, g, or t
  misc_feature (357)..(357): n is a, c, g, or t
  misc_feature (369)..(369): n is a, c, g, or t
ctgaagcttcangccatactttctccgacaaccggcgccggggcttctaggagcagtgttacggtcctcggctgcgagagtaaggccccaccctggacatgccggtttcttccaccttcaacgacattggccaggactggtggccgcagcttttttcggccagatgtggtacgaacaggaagttaccctgccagagcgatggaccnaggacctgcacacaagagtggtgctgaggattggcagtgccactcctatgccatcatggtcaaatttgtattcaggcagaagtcttctgcaggggcagagcttcatggagaacctgcgctagggcaattgcagaagggaaatgtggggttnggagctctcatngcagagtccccactgaag

SEQ ID NO: 486686 - DNA, 845 bp, Homo sapiens
ccactctgagagtggggttaatcttcgcgtgtgtgtggtctctgctccttcgtcccctgtttatccattgttcccaacgggccgttttggtgaccgcaatttccacctcagttctccgccgaaattccggtgccctctccgggaagcccaccaatcaaatgcgccccaggtccttttaggcttaaaatcgcaattggggtgaacttcgttacacccgcgtgggtgaactattttttgcccctgccaagctttttggtcccgcccaccccccacattataagaggggcttctaatctgcatccactttccgcgggtcccctctacgccccgggagtctcctttttgccaaggtgttttcacccacatcgtcgaaagggcaggtgctttctcccagtatattgtgcgccgcaacctgggagcccccgccccgacccggccccagttatcccctcgcgtcatgagcaccggggaagtgacccccccggcctgggcgaacccctttgggctgtaccctaactgtcaaactacttcttaggcccgtcaaattttcttataagatgcttaagagttttccaaaaaaatattcgggaaaacccgaacctgtggacacttaaaagttccccccgattggttccccaccaatgtgacaccaagaaaccccctgccagttccattttacacaacccccgcaacgccacagactctgtgggaaattacaaccgtccctaccccccttggcggttctggcctttctgcgcccaactacataacactttttaaccattttttaaaccaaaaggtttaggtacccttaaaaaaagatttaaaaatttaaaagtttttta

SEQ ID NO: 486687 - DNA, 97 bp, Homo sapiens
ggggagccccccccccccccccccccccgggggctttggtttggttttttaccccggattgggggggtttttttttaaaaaattttttttaggggga

SEQ ID NO: 486688 - DNA, 208 bp, Homo sapiens
aacacaggacacatggcagcaacatactagttatgaagagaagcatggccagtctcccgaactgactcttagactcttaggccgactggcctctccacacctagtgtgcgtgcactagatttgaatttgtatgcaacattcaccattgcatcttaagttttcctaataccatttccattacgatcatgtaagtgaaaaaggtccatta

SEQ ID NO: 486689 - DNA, 614 bp, Homo sapiens
cgcagtctctgtgctgttgaagcctggagacctgcggcggcctcagctgaggaccctccgccccggagccgcctggcctggagcctgcagcctctgcctgcagctgccccaggcactgtcccctcccacctccgcttccgcctggatcgctcgtgcatctgggtatgtgcctgtcaattgtgtactccacatctgtgacacacgcgacaatcgtgagtcggcatgatatgcttgcgagtgggtcaaagagtccctgcacctcagactataccaagatagaacagcttagtccacgggcgcaggccatactgccagtgcagtggacagtgcttcgtacccacgtgctgctgtgcacgtagaggagaaaatgtgatccggtttcgcgaagtggcccaaagagcgtatggacgcgattgcaagattaacacaatcgcatgcgaagtatccgcgacggataggcatgcgaaggtcgaatgacggtaagcgaaggggaagaggaattgcgcgttggtagagacgcagaagttagggattacggtgacggcactcagtgacgggcgtgcgccccgtggaagggaagcagggctagtgagcgcgcatggggcgaaagtaac

SEQ ID NO: 486690 - DNA, 594 bp, Homo sapiens
caaacgcacccacacgggggaaaggcccttcagttgcgagttctgtgaacagcgcttcacttagaaggggcccctccttaggcacgtgccaaccgccatcaggagggccggccccccttctgccaaatattcggcaaaaccttcaaaaccgtggagcaactgcgtgtgcacgtcaaacggcccaaaggggttaggaagttttagtgcccccagtgtgggttcaagttttccccacaggccccccttcggaggcacatggagatccccggccgggtaaagaacttcaacccccggcagggcaagctccgcaaccttattattgaggacgaaaaaatggtggtggtggcccttcaacccccttcaaaactggaggtgggctcggcggaggtcattttggagtccctggcccagggcggcctggcctcccagctccccggccaaaaactgtgtgcaaaggaaagctttcccggcccaggtgttctggaggccgccctcatcattccaactgctgttccccagggctgtgacacatagccccttttggcccccaaaggccccttggccccccccctcaataaaccgggtgggtttgga

SEQ ID NO: 486691 - DNA, 365 bp, Homo sapiens
cgatctagaggatccgcgacgctctctctgtggggactgtcggatgagcccaaggaagagtgtgatgaacgcacctgtagccataccagttccgctgcaagaacaacctgttgcgtgcccgtccgctggcagtgcgactacgacaacgattgcggtgacaactccgatgaagagagctgcacccctcggccctctgtggggaggcctggcaggctctggttcgagggctgaggcagtggctctcggggggtagagaggggtcttctggctgctctggagggatctggagactctgtagcaggcaggctaggggactagaatcctctgagaggggtggatgagctccccccccaaagagatagcgt

SEQ ID NO: 486692 - DNA, 110 bp, Homo sapiens
tagatcacatcatagcctcaagtcacgtcccaagcccccgtccttgatctgtgcatcctgggggcatgctctggagggggtttgcgtggggaactggacgccatcgccgt

SEQ ID NO: 486693 - DNA, 387 bp, Homo sapiens
  misc_feature (8)..(8): n is a, c, g, or t
  misc_feature (12)..(12): n is a, c, g, or t
  misc_feature (20)..(22): n is a, c, g, or t
  misc_feature (76)..(79): n is a, c, g, or t
  misc_feature (89)..(89): n is a, c, g, or t
  misc_feature (118)..(118): n is a, c, g, or t
  misc_feature (130)..(130): n is a, c, g, or t
  misc_feature (158)..(158): n is a, c, g, or t
  misc_feature (169)..(169): n is a, c, g, or t
  misc_feature (185)..(185): n is a, c, g, or t
  misc_feature (221)..(221): n is a, c, g, or t
  misc_feature (246)..(246): n is a, c, g, or t
  misc_feature (248)..(248): n is a, c, g, or t
  misc_feature (280)..(280): n is a, c, g, or t
  misc_feature (300)..(300): n is a, c, g, or t
  misc_feature (317)..(318): n is a, c, g, or t
  misc_feature (352)..(352): n is a, c, g, or t
  misc_feature (369)..(370): n is a, c, g, or t
  misc_feature (374)..(375): n is a, c, g, or t
gggatacntcantatattannntggtcagaatatagcctacagatagccagaacactatgccatgataaagctcannnntctagcagtnccaaagaacaaatcatatcatggcctggntatcaggttganagagctcatacttatgacaaatggtccnttcacagcaantttcatagaaacaganttttattggatgtcacaagatgcttttatatgtgancactccttagcagagaagatataancntctttagaattgatgaaaagaaaatataaaantctgcatttatttcaatcgnagaagccagcatcctcnngaggtataagagtagtctattacataaacaccgntcacatctctcccatgnntatnntactgaagcaag

SEQ ID NO: 486694 - DNA, 859 bp, Homo sapiens
tgagtgaatgataaggtccgcacgctctgctcctgactcaccgctgttcgctctcgccgaaggaacaagtcggtcaggcagcccggcgcaacagccatggcttttcaaaggataccggacaaaccacccgtggagccggaggtggcaattcaccgcacattcgaatcaccctaacaagccgccaacgtaccacatccttggccaccaggtgtgtgcattgacttgctacagaggctgcacaacagaacaagaactgctcacacgtgaaacggacccacgtttcgaactgcctaccaagaccattggagaactcacctaccgacgacaaaagcgtccttgatggtgacaggtctctaagaccgtgggactcgtaatccacgactgacgaacttcacaaagcagactcactaagagcttgcaaccagatcccttctagagacatagtaaaggcagcattactttaccatcaggatatagacgccaagggagttagagggtggaagatcaaggcaatagacagatgcgtaaagatacaagtactaaaaataaaattgatgcaccaacgatcgtcaaaccacaaaaaacaaacaacaacaaacaaaacacacgcgaggggacaacacaacaccaaagagaacgaagacaaacaaaaacggacaacaacaacagagacacacaacagagaaaccaaaaaccaaagagaacaccacacacacaacgaacaaaaacagtaaaccaaagcaggaaaacaacacatgcacccggaaaccacaaaacaaaaagagaacaaactaagaaaaataaaaaaacagaaacagcacaacagaacaccacgacaaaaacacgaacgacgcccaat

SEQ ID NO: 486695 - DNA, 141 bp, Homo sapiens
tagcatgatgaaggtcagcctggcagtcagagaagtggtgcagatcactgctctgggtttcaggcgcctgtgtctcatcaccagtgaagctgggatccaccataaaccaatttctgctattgaaacttctaatgactaggg

SEQ ID NO: 486696 - DNA, 490 bp, Homo sapiens
agatccgttgagccagggcaaactatgtaccgcacctatatggcagacctgccgatggatgcaggactcttagctgcttggagttgtctcttgacataaggtgtaagactccaacacttccaacaatacattgtaaccaaactagtgcaagctgtggatcactttcaaagccaagcacacaacctacaacaacaacaccaccactaccactggctgcacctgtcccaccaaggattcagtgtcctggcacaaccctactttaaccaagtgcagcagctctctgatcacgacttagggcacggactatatatcctccacgttgccccgaaaccgctcacgcacctcttttgcagtgaagtcctcccagggatccgtgcacgttatcgattactaggactatgcagacaacctgcctctcccgtgttcttctttttcttttttctctttgctggcgctgcgcgcccgtcgcgctctgtggcgggcggcgcgg

SEQ ID NO: 486697 - DNA, 116 bp, Homo sapiens
ccagaaatgtctctctgcagctctgggtagtagtcggtgctgcagagagacatttctgaaatgtttttggcagacttataaacaagggggtttgctgggcctctccaatattaagt

SEQ ID NO: 486698 - DNA, 117 bp, Homo sapiens
ttttattcacactggtctcacagttagtgtacaggtaagccctggtgcctcacccactccgcaggagacaaaagccttcatacatctcaagttgggggacaaaaaaagggcggcgct

SEQ ID NO: 486699 - DNA, 136 bp, Homo sapiens
ctgatcctcgtgtctatgcggaactcatgcttagaatggttctaacgtactcggctatcaaaacttactgtctgcctcttcaaacttcacacctcacgaaaatgttaaacatgcccagcacggacacgaattttca

SEQ ID NO: 486700 - DNA, 1990 bp, Homo sapiens
actagatgagggacgtacttctgtgccatcatactgtcattgaaagtgagtagtgtacagtgcgtgtagctctatgagcgaaccatgacactatgtgtgtgctctactggtctagctcatgccgctcagcgcactagtgcaatgtgtgcagtgagaagcgtaccgactgccttcgcatcgcatcataggatgtgataaggtgctgagcctaggctatacatctagtactcacctgtgcccacgaacctccattgacacccgtgcacatggtccctatgggatgatgcttcatacacaactgggtgaagcacaggagaaggagttacccagctaacctccggaaacggggccaacgccacgggctgcgacgaccaactcagtagggggcacaccatacgagaacgccttggcagatcatagagacggtgaactgcaccaggacagggcggcccacaagagtagaaacagtgggccagcacaaatgagcacgcaacagagcgcatggcaaccacacgttgacacacgaaatagaacttggtggaacgcccaacatgagaaggcatgaacagtcatagtggccattgggtctgtgaaaagctggtccacttccaattttcccacagtgaggagcaggtactcctacaaagattcgcctggtaaaggcttaacactagggatatggtgtgccaaacaggcacacatctcgcccgtgtatagtttgggtcgacataggagtgtaaaagatgtccttggccagaacaccaagattatgaatgacacacacacgagagactccgccacatagtgggaacacgatcaacgagcggatcacaaagcgtaactatggtatgtgggcgcgccacctcaagaatatttcgtggtgcataagaacaacaccgcagtttgggagcattttatcaggcaatgtgacacatccaagaacgttatagatatcagaatgacacttccatatggaaaagacaccacattgtcactagcgtaaggctcacaatatacacgtataaaggttgtgaccgcctgtatattgatgtgaccccgccgcgtagtatgcgattagggagcaacatctacggcgccgttcacgctcgtgtccgattcccacaggttaagtcgctattacccaatcaggcatacagcgcactcaggtagacgctaggagaaacttggaacagcacgacagtcgggcaatgcgagcccagagtagcccgcgcgattcaaaaaagggacatggggaaagaaaaagaggtccacctaacatctacacaacgacgaggtcacgagcatgcaaaaaacagaccaaaaatggtacgaacacaggacagactaacccaacagagacgaacgaccacccagtgagacatcatgtgtgacgcacaggcgacaccacagagatgagatagcccccagcgacgtgggtaacaccgaaaggggcagtcgacaaaggtatcaacacacacgcaagtaacgtagcacacggaagcaaggatcgcacccagcaagacagagatgctaccaacgggaggacgaacagcggttagaatagtacaccatgattcgcacccagaagcacaacaagcagacggaagacaacagcaacgaccgcgaaccggagagccacacacaaacatatacaccagcaaggcaacagcagcagcaacacaggatgaggacaaagagacgactcagaccgcagcaacacagctgaaaacgaagcgagcactcaacgaagacgaaagagcaacgcggcagacaaacgagtcggtgccacatacaacacagtcacacgcaaggacaaggagaaaaacaaacaactgagacacaagaagcaagacctccgaacagcaccacaacaaacacaaacacgtacgacagcaaggatgcgtgagaaaacgcagaccgagaagtgcaagccagcgacacgcacacggaacgaaagagcgtgccacacaaagaatcaagaagcagccat

SEQ ID NO: 486701 - DNA, 426 bp, Homo sapiens
ctcgccaagagaccctcaagaaagcattcagctttatgataccatggctcaagtctgggaaactttttccagggctcaggaatccgcgtccagaggaattcattctttttaagaataaaatagtcattaagaagttggatgctagaaaatatgaagaaaacttaaaggcagaattgacaaattggattaaaaatggccaagtgaagaaggtcaaaagagtactgaagaaccttagtccggattcattgtctagttcaaaagatatggtgaaaatgtttcctcttcttgttgaaaagttaagacaaatggataagttgcctgcaatattttttttgtttaagaatgatgatgtgggaaagagagctggaagtgtgtgcacttttctggagaagacagagacaaaaagccatccccacactgaatgtc

SEQ ID NO: 486702 - DNA, 169 bp, Homo sapiens
acatcagaaaaagtcgtatgaacttcactgacccatatcctattacagcatatgagggatacctgcacgaagtatacaaaaagtatactagcatactacactaagctagaagtccagacatcctaaagaaaccaggctatgatggagtgtacccgataatgtcagacta

SEQ ID NO: 486703 - DNA, 493 bp, Homo sapiens
  misc_feature (1)..(1): n is a, c, g, or t
  misc_feature (239)..(239): n is a, c, g, or t
naggggtggaggaaccagatgtgtgtacagtgctacccaaggcggctgtgatcggtctcaccaagtccgtggctgcagacttcatccaacagggcatcagatgcaactgtgtgtgtccaggaacggttgacaccccatctctgcaagaaagaatacaagccagagacaatcccaaagaggcactgaaaactttcctaaacagacaaaagacgggaaggtttgcgtcggccgaagaggtngctctgctctgcgtatacctggcctcggacgagtcagcctatgtaactggcaaccctgtcatcattgatggggctggagcctgtgaccgcgaggatccctgctgggaagacaggcccttcctagccacggagcaaagcaagctgcctgggtgatcatctcttctgagagtgacattcatgaaaataagccctttagtgattgttcccgagagtgtgactctttaatagtctctcgtctcttctgaagctgtggt

SEQ ID NO: 486704 - DNA, 880 bp, Homo sapiens
  misc_feature (375)..(375): n is a, c, g, or t
tggggtttattattcaaagtttagtggacctccccagcaaggaaggcaaacccttccgaccgggggaaatgtccatctagtcggccctctgtggggttgcgcctatgccatgaaaggtgtactggacaccagggagggagcccgggcatgagggcaggccattaaagcgcaagagggaacgtgtgagccaggagaatcggcacactcaaccccattggatgatcgctttcgtcctcctcaggtcagggccagcggtgtggggtgacatagaacgggtcgccaaaaggtccggtggcgcagtctgccgagaggggtgaagacgcgggcctttctcaaagaactcagtggggatgccgcaacgatgaggtggaactnacaggtccctccccgggcaatggggaaagctcactcatctcgggggggcgcaggataacaccgacaggccaggctcccaggtcggggagaacagtgacaggcagtgacggggggacaccaaggggctggggggggccaccttctcctcctggcaggaggatgtaacgcgtggcggccttccaccttcggggggggctgtgaggggaacccgggttggacacatgcaccagggccccgccgaaaagtgcataccgggtataaaggcctggagaccacggggccccggagggtataattcgcgggccatcgggccctcctccaaaggggccggggtgggaaagatctcaaaggggccgtggcacccacagtgcgaggatgcactggataggtcccaaggaagtcaaaacgtcggtttcccttcctaaaaagtgcccgcctaagttgactctgtacccagggtgccacggcacgggacagagatacacgcgcccaaaggagaggaaag

SEQ ID NO: 486705 - DNA, 101 bp, Homo sapiens
gatacttggtggagaatatccgcttccccgatgatgctccctgaggagctctttgagctgcagtacaacctgtccctgtagtcggagccacagaggccctg

SEQ ID NO: 486706 - DNA, 108 bp, Homo sapiens
gaacgggaggcggagcagagtcgactgggagcgaccgagcgggcccgccgccgccgccatgaaccccgaatatgactacctgtttaagctgcttttgattggcgactc

SEQ ID NO: 486707 - DNA, 303 bp, Homo sapiens
gatctctccacccacccctcagactctccagtatacacacacgtgtacaccctaaacatttttcctttcccctgcacgatcctcacatgtatttggcacagagacagcttacatctggaactgccatcatttttcttgggttgacaaatgttgtcccagaaatggaaagaaaaacgccactttggtcatcatccatccagcaaggggttgatagctttctctaaagcgaagctaatttgtcttctttctctttgagtttttcatcacagagatccagcatggattggggtgggtggagagcgg

SEQ ID NO: 486708 - DNA, 1296 bp, Homo sapiens
gggacccggctgcgcgggtggtgcgggcgctgtggcctggtggtgtgcgccttggcctggaggctgggaggccgccccagccgctgctacccacgcagagcctggtcgctggcttcgctgggggtgcggcgggctggccgagcccctgtggctgcagctcgtactggtgggatgcccgcgtgtgctggtgatgctgccggctgctggccctgtgggggagccctggggctgtaccacactggtgcggtggcacctgcgcgcccatggacctccacgcagagcgctcagccggcgcaggatcataccctgtcgcagggccgccttgcaagggttgagcctcttgtaccatgtacaaggactgttgtcccttcttgcagcaaaggtccgcgagcgcttacctacgaggttcccattgcgcccttgcgccttacacgaggttggtggaggttgaacccttgtgccgcaagggggcattgaggatcgacaggtatctccttcctaggagagagggttgcccccagtccctgtgtggcccaggcacagggaagcaaaggctcgcaaggaattagattgactcgctctgtcatcatcaggccgccctcaaaggacctagcctgggtagtcgaggggcgagaccccttgggaaggagaatcattcagcttacttacccaagcccaattgaatggctgttgaagctacgcaaggggcgacaggcaggttgacccgaggttccggcaataaggtacgtgggttcattgctcaagggaggacggagggcccagacacagttggtaattggggatggagaccaggcgaaggggccccaaagggaccgggcgacggggacgagtatgccaaggatgggccggacaacaagtgcgccgggcaagggacacttggcgcatggggtgggcggaccctgagattctatccacccacaaggagtgatggaacgcgggagacggcgacacgaccggagaggcaccgtgggcgggtacccttatagcacataaccatatgtccccgggagagggggacaagttacgggaagcccgggcagagggtgcccgagggcgcaccaagaaacatctggctgcacaggggagcacagcaagcgcgaaagtagagcaacagcgagcagcccagaagcgagggggacgccgcaccccacgggggacagagcggtgcgaggaaggggacccgcatagggagggatgcaacggacgacgagacgcgtgagctgcgacggacggcaatggggaaaggggggcccctataccgcgagaggaggccca

SEQ ID NO: 486709 - DNA, 386 bp, Homo sapiens
ctgagcttcctacccaagttgtgggatattactccaaaacaactcaagaacccaaattatcttactgcctgattaaatgtaaccactctagctttttaaagacacattcctgttactcacattaatccatctccctcacgtttcaggtttgctggaaggaaaagtacaaaaataatggagtagagaaatgggagaatccagaggaccatctgaaatcactttcctgaaaatacaacggacatgacccaaaaaacggaagctactagtttccttcaggataaaacccaggaattttattggacaaaaatttcaatggatttcaaatgaagcatttgggacagcaaacctgaaggggccaaagggaccaaaactctaaaaatagtttt

SEQ ID NO: 486710 - DNA, 163 bp, Homo sapiens
caattctggccctttgaacgaggaaatgaagggtatgccgctgttactgatatacctttacggtcacgttcacttgagaagctttaagaaataaagagagtaattaaattctttgacaagtttccatggcggtgtgatctccatacagcaaagtgcacaactg

SEQ ID NO: 486711 - DNA, 155 bp, Homo sapiens
taggaaattgtacatctaaaatacatttgtgagaggtataacttgtaaaaatgggcttctttcactagggttctaatttttataggcaatgctacagaaataaagataattgtaggctgaagagtgcattcaaagggtcagtaactttgaaggat

SEQ ID NO: 486712 - DNA, 199 bp, Homo sapiens
  misc_feature (90)..(90): n is a, c, g, or t
gtgtgacgactcacgtgactcttgagtgccatcaacgcacacgcacactgtctaacacttatgttttcattttttaaagacatctaaatnactgagagatacaatttcagcaggttaatctacagacgtgaatcccagcacttgaacacaattcctaactctaagctcagttattgcacatcacacagtttaagcaggc

SEQ ID NO: 486713 - DNA, 341 bp, Homo sapiens
aaggtaactatttctcttgtctttcgtacagggaggaatttgacagtagatagaaaccgacctggagttactccggtctgaactcagatcacgtaggcctttaatcgttgaacaaacgaacctttaatagcgggtgcaccatagggatgtcctgatccaacatcgaggacgtaaaccctatttgttgatctggactctagaataggatagcgctggttatccctagggtacacctctgtaccgttgagtcaagttaatatggtcacttgagtatagtaattcgctttgactggtgaagtcttagcatgtactgctcggaggtagggttctgctccgaggtc

SEQ ID NO: 486714 - DNA, 410 bp, Homo sapiens
  misc_feature (46)..(46): n is a, c, g, or t
  misc_feature (172)..(172): n is a, c, g, or t
acctttctgagtcttacttggttctggaaggctctctggagctggncctcaagctccatcttagatttcatcttctggaactctcctctctccctcatccagcttcagtcactctggtgtctcctcaaacacaccaaatacactctccctctcctcgacccccgggggaatntgtacacaggtcctgggtctaaaaagttccctccacaagggggccaaatggctcctaactgtactcaggtccctactcaaacataaacaaataaaattcttcttttccaccatctctttctaccaccttctcctgcttgattctcccttataggcacgtaacgccaaccaaaatatatttatttgttctgggattaaatttggaatataagctttcatggataggcagaggacttggg

SEQ ID NO: 486715 - DNA, 193 bp, Homo sapiens
gtagtactatgcacaatcgtcgtccggcacaccttacacctggctaaatagtgaacttttttgcagataagggcttttgctactgttgctcggactggtctgaattcctgggctcaagccatctgcctgcctgcaactcccaagagtgatgggattacaggcctgggcccactgtgcctggccccaaacatct

SEQ ID NO: 486716 - DNA, 927 bp, Homo sapiens
ttggtgtgcagcccggtatctagttgtgtgactcactagatgtggatcggtggcggatcgagatctgtaggaggattttcactttatgccagttcagattgtggcataaatacgactggtcatagtagggctttgttgcgtgccgtattacacgcatggtgttgcttacgtcgagtatctcaggtggaagacactgtgacgaagcgtgtccttcagtgcaccgatggctcttctgcaagtctaggtatagctttcacgtgcctcgtgaccaagatgatatctgttgccacaaatatcgcctttttcacgctttcgcaaaggagagatgggttattacctcctaggcaggatatttcaatgatgacatttaagaaagtctgtcgtgtagtaaaggtacagctatgttgcgtttgaatgctagaagggtctttgaatagcatttgttgggttagagataagaagtgcactgtgaggagtgaagtagctatcacgaaggggcggtatgaatgatgatcaacatatttttacgtgaaaaattggtagattgattaaaactgaagtcataaggtatgcgaagttaatgaaaaagatgacagcgaagagtcacatatggttctggccagtacttggaacgttgggcgacgagaaaggataagcacctttggagggaacgtgcgggaaaggaaccaaagaatccaaaagaaccttgctgatgaggaactgaaggctgactaattttgttctggcgaaactgactttcttccccatcaccttcctaaattatccaagactgtctggggcagtgccacatataatttttcccttctggcaatatttagagggcaatgctggactggttggtaagtcccaatcggcctgtcaacattggtcagggcaagggaaaaatgcggcggcgacatcacttaa

SEQ ID NO: 486717 - DNA, 119 bp, Homo sapiens
tcaaactagagtggagctttaacatagaccagaccaaccagaagaaagaatttagagctttagaccagtctttgaattacttagttaaggcaacaaagtctctcataaatatagagtta

SEQ ID NO: 486718 - DNA, 581 bp, Homo sapiens
  misc_feature (246)..(246): n is a, c, g, or t
ggattgagataagcacggtgcatggtcggggctgagataagaatatcgcttgacgccaggaggctgaggctgcagtgagcctagattgcaccactgcactccagcctggtcgacagagtgagtctcaaagaaaaaaaaaaagcaaacagatagatttttttaggcagggtaataccagagttaattggcctattctaccaaaggtttttattgaattcttcaaagaaattcatgcccctgaaaggnttaagagccaggattttagacaggaaggaataagagctgtgaggaactctgggtgataacctactgtgtgctctgttacattgccatttgtttgttgccttggtatagtgaccctgtaattggatcatccaagtcagggaacttgaagagtgaaagagggggcattatgataatatttatactgggataggaggacttacttgtcctggagaaactgagatacttgaacttcttaaccctaacatagcgccatcatcacctttcacatgggttactgcaacagcctccttgctgtccttgtgttaactctaatccggtcccaatctaatttccac

SEQ ID NO: 486719 - DNA, 335 bp, Homo sapiens
ggagctcggtaccagatcccctttcatccaacaggcacacaaaagtttgcagaagaaggcagtggaaatatgcccaggccctggtctgggggctccaccagggcttgatcctcgtcattctgcccattcttccctccatgcctggaacatgtacacccaaacccaaatcccatcttttcccccagacccagctctcctatgtagcccatgcatgttgatggtgcttcatctggattccatacattccaacccacagggggctcgcctctacccttgcctctcatggccaaattatgtctgaggtctttggagaggtctccattcttattgttttc

SEQ ID NO: 486720 - DNA, 409 bp, Homo sapiens
cggtccggtcatgcatgctgagatgcttttgcggagctatcacctaccagccagccgacagcaccaaaatgtgcgatgcaggcgctgggcatagggttgcggagcggactcgaagaagaagcggccgccgcagaccccccgaggaatcgcagccacctcagtcccagtcgcaagtgcccccggcggtccctcactcaacatcaccaccattcgcactcggggccggtatgatctcgcggtattatcgtcgagccccacgactgggaagcgctactgccggggcgaagtgctgggaaagggtggctgtgcaaattgttacgatatgacagatttgacaatataacaaagtctacgccgcagagattattcctcacagcagagtagctgagcctcatcaacgggaatggat

SEQ ID NO: 486721 - DNA, 595 bp, Homo sapiens
gagcgggcccgcggggccggcgtcctgtcagagggaggtggcgatgagtgcgcccggtggcggtggcggcggaggttgcggaggcttccttggtcgtgattgcaacgatggcagacgatgactgaccaaccgactggctgactgaatgaatggccgtgcagccgagacgctgccgatgaggagcctgcctgagcctgggcgacagagcaaagactctgtcttcaataggaattgaatagaaacatttttcatgtctaggaattccgggccaactagagggcccataacacgctctcgagagcgcggccgcccccgcggggtcgagaggaaattaaggagcgaccgtgtataacgccaagagagtaaaaacacgcaaagaaatgggggcgtacaaacaagggggcaaacacacggaggacaaccacgggaggtgcacaaaattggggtcaaacaagcacacagggaagctccgagggagcaatatttgcaagacccaaagggcggaaacgggaccgcacaaaagccaacgagtagcgaaagagcaggaacaggacagcgacaacaacacgacaacacacaggccgaccaagaggag

SEQ ID NO: 486722 - DNA, 385 bp, Homo sapiens
agccatggtaggataggaaacggaggcgagagaggtcgggtaaccggccaggggatacacggctggcaggaggaagagccaggatcagagcagggttcaggatcagggccgtggtctccacaggccaagcactcagctagtttctgctccccacctgttcagtgaatggaggcctacaaaaggccgcaataactcaatgcacatgggcagcagcccaatggtctgcccagttcaagaataatttctagagcatctagcaaagtccagagaacagatagaatttatcatcattataaaaaagaagaggaagcccatgttgagggtggggagagagcaaaatctatcatttatggattactgtgtaatgtactaggcaatcaagctt

SEQ ID NO: 486723 - DNA, 443 bp, Homo sapiens
acgaggacacatgcatcttgtagtcagagtctaggaaccgaagtcatgcctcagcagcgagatgtgtcgcttgctaaagtacatgaagatcacgcacctgtagatgaacaatctcgtcaccctgcccattcaggaggcagaggcaattgaatggtttctgatcaactcactcaagcgagagttaatggggaccataccaccgcagaagcagactcttgcgggccagcgccatatgattatggtacaggttgtttgagcgagagtacacgtacacgatatcccggattcacatagcgcttaacggcacagagcactgcaatgccggtggcccagactcgtgcgctctacctcgacctcgccgcatagtatacgtgttgcaccacaccgctgcatatactggccatgattgtcgacagtccgccaccgctatctgtgcccgcccg

SEQ ID NO: 486724 - DNA, 170 bp, Homo sapiens
gcctgattagacatccattcccttaagaaatatttttaaatacttattaggtgccagttactactttaggtactttagggtactagagatatatccagggaaaatacatagaaaaatctccgcctccattattatgtaattactaaggcttatgacagcttaaccgccat

SEQ ID NO: 486725 - DNA, 152 bp, Homo sapiens
gatcatggattatctattagtggtgagttgtgtatgaagtccttgagataggattatgatgcgagtgtgagtgcgtcgtagtttgagttttgctaggcagaatagtaatgaggatgtaagtccttgggcgattatgagaatgactgcgccat

SEQ ID NO: 486726 - DNA, 402 bp, Homo sapiens
gctgccgcctactactactaaataagcggccggtcgaccccaagtgtccatcagctgataaatggataaacaaaatgtggtccatcaatacaatggaatattgttcagccattaaaaaaaaaagaatggggctgggtgctgggtgcagtggctcacgcctgtaatcccagcgctttgggaggccgaggcaggcggatcacgaggttgggagatcgagaccatcctggctaacacagtgaaactccatctctactaaaaatacaaaaaaattagccgggcgtggtggcacgtgcctgttagtcccagttactcgggaggctgaggcagaagaatcatttgaactggggaggcagaggttgcagtgagccaagataacgccactgcactccagcctgggtgaca

SEQ ID NO: 486727 - DNA, 135 bp, Homo sapiens
cttgcggtcgtctctagacggatccccctgatttcccggggagaacgagcctcttggatgatctggcatcctggacccggacgatcaggagcctggccaagtacaagcgggtgctgctggggcccctgccaccgg

SEQ ID NO: 486728 - DNA, 825 bp, Homo sapiens
cgagccatagctatccaaagtggtctgcatttctactgtaaaatgcaattggaaaaaaataaaagcaaaaaaagaaactgtaaagggaaaccaagagatttggtttaattttttgggccattttttcttcatcaattttttttcggtctcaacttttaaactgggtttaagcatttgatttgtaaaacagtaaataatgtatctttccatagcttttcaaatgtgaaatcattttggaagctgggatctcattaaacttcatgtctctattccattgtgtgccacacacttaaaagttagtgtactgaatggaagaagaagcattcctagttctacacttcttttatcccccctcatgtgtcaaacatgaccagaaaaactaaatttgtgccctaatacccaaggcgctacgttaatggcctcgtccttatcactgaccttgtgtaattgatacacagcgaatttcttctggacaaacgagaaatgcagtgtagtatgcagagctgctgtttaatgcctatgcatttactcttcctgattaaggcagacggtgccatttctttatgcattctcttattttttaagtgtacccctaccttcagtattactcttgtgtaacgttaggtgactggcatcttgtggccttgaatattttattcatcacatgtgggctaccagtttccccacttttagtccttcatttctttttatttggggcatttcctggtaggttcccaatggtggttcgcgtggttcccccacccgttattgtgttttaggcgaggttccccgttgcggggggtactctgccaataccgcgtgtca

SEQ ID NO: 486729 - DNA, 1212 bp, Homo sapiens
  misc_feature (122)..(122): n is a, c, g, or t
  misc_feature (262)..(262): n is a, c, g, or t
gtgagtgtgtgttgtttgtgtttttatttgtgttgattatatttggtgtgttttggtattgtgtgtgtgtagtgtagtattgtgcgtcgtgctgttgtaggttgttgttgtgttgtctatanaaagaaggagatgaagtatggggacagcggttgacagcgacaggaccaaaggagacaagcaaagccccacaccgctcagtagttgcgatcagctccgtgggttttggttgcccgcacagaatttgttcacacgcagcacncaacaccccacccgtgttggagggggcctgcacaatatcaaacagaacatcgagcggcccccatttctgcgcgggtgttttccagtggggagaacacacaccccgccgcgcgcggtgtttgggtgagtgcaccccgggggcaccacaaggaggacccccacattttgctggggcggcagaacacaattctcgccccacacggggggcagtccgtggaaccccactgggggagtttttttttttcggcgcgaaatttgcattgtttctcgcgcccccccccccgtggttgcgacctgaggggcccccgccattttgtctgcacccgggccccttgtgcgacgacgagaattgggtgctcccccccgcctgggggtgtatattctcgggagtagcgcgcctcttttgtcggaggtggcaccccaccccgggagtgcacccgggccgggagaagagatacccccgggcagcacccggtgatcatgggtctgaaagaagaccctctctggggggccgacacaaccaacgaccatactgtgtcgcccgaaacgggtggttggtgcgccctttaagaggacacttggaggagatgaaagaggcacccacaaggaaagcatcgtcaaaattttaaaaaaaggtgtgtagataaaacaccgcaagcaacacccgaggagggcttatttgtttatggaccccggcggtgactccacgagaaatgatgtggggagaagtgtttcctcaaccctcgtaaaggtgataggattgtggtgggaagttcccccaccaggaagttctcttggggcccccgagttttgattgacgaccccaacaccccgggttttttgggggacaaagagggtagaggccccctggggggcccgcttggtgccctgggccccccgttgttttccccaattaaacggggttttttcccccaccccaaaaaaaaaaaa

SEQ ID NO: 486730 - DNA, 500 bp, Homo sapiens
  misc_feature (17)..(17): n is a, c, g, or t
agaggtaggtggatagngcggtgagttggagcatggtgggatgggtggcgcgcgccgccctttgttgtatccaggtgttttttgcatcggaagatatttggcctctttctgaacaatgaccagctgggtcccagccttacagagaagctatgtccggaattagcaaacacaagcgattccgaatctgtctctgagtaacagctcagctgtccaccaccagccatacaactctcttgcgactccagcccccccagcccactcacctcgcgctttcctaccacccacctacctgtggatagtcgacgtactgccccgcccccgcctctcttcgttcagctcgtcgcgtttttctccctctaccttcccgcgcgcttatcgcatttatctccccgacccgcgtggcggtccccccgggaccaactgcgtttaccacccccccctccgctatttaacccccatcaccctcaccccaatttaacacgcctttccccccccccccc

SEQ ID NO: 486731 - DNA, 880 bp, Homo sapiens
  misc_feature (230)..(230): n is a, c, g, or t
  misc_feature (498)..(498): n is a, c, g, or t
agcggagctggtccaagtgtccctggcctgaggtgtcgggccggatccctccttctcccggcgcctcaagcggacgaccgactcctctaagaatttcgtatccgaaggctcgcaacaagtttgttgaggccacatatgatcgagatgcgtgtaccatggcatgcgacgcttgatcgcgtgaacaatcacagtgggaacctggccggaacaccagagcagaggacttcatncacgtcaagctgttggcaactccaaagcagcgacacttgacacggatctcgtcgtgcaacagatagatgcgagtcttaaggaacgcatagaatcttgatagccttacagaatcggaaaacccagttcttggaccaatatcatagaagatctcaatgtcatgctttctagatgttgtatacaaaactaatctgacatacacaagagctaacatagagaaggtgacgggattgacacccttctgttactgtactggaacactctgtctgnctgagatgcgattttatatctgttacagaactcgggagtgagaattgccaataagcttagacatgctgagcctttaggtgagctctgtgcattcgaattattctatgcaaggagtaatgttcagtatgatagaccaagagatgttaagcacaattaagcatggaggaacttccattaatgttttggtggttactcaagtgggttaatgtcctagttgagaacaacggtgtgcaaaagtggtactttggctaggaagtagcttttactggagttaagaaattttgccgttatatattcacttgaaatctttataatgattgactttgttggaaagttgaacttttggaaggcatttaggacaacctgtatgtcttattactag

SEQ ID NO: 486732 - DNA, 955 bp, Homo sapiens
cagagatggcgacgttgtggacggttcaccagcgggagttcctggcgctgtacgatcggttgtacgtcagctgagcaggagagcctcaagcgctccaaggagctcaacctggtgctggacgagatcaagagggtgcgtgtcagaaaggctggcgctggagagggagacggcaatcgcacctggggccgctaacagaggacccccgattgaagccgtggaacggctcacaccggcacgtgctgacacctgcccaccgtcttccatcagctgccacacctggtggccaaggagaggcagtctgcagcccgcggtgcgcgtgggccagggccgcaccggaagtgtcggtggtgatgggcatcccgagcgtgcggcgcgaggtgctctcgtacctgactgacaatctgcactcgctcatcctccgagctgagacccgccaaggacgatagggacggagctcggtcatcgtggtgctgatcgccgagactgactcagcagtagcacttcgggcagttgacagagaaatcaaggccttgttccccacggagatcaattctggtcctggaggtcatctaacctcccccagttgtaccctgacttctccgcatcgagagtcggtttgggacccacgacgagagtcaggggggagagacccaagagaagaacctcgatgtgctgcgtccctcaatgatcgtccgcagcacgtgccaacggcattacctaacgtgcagtggagggattgccatccggggcaagacgaatacgagagcgcacatgaagaacttgcactgggcgcgccttcaaagactggatggaaccggcaatccccagaggggttacgggaaaagcagggctggctgacacgaacgaagagctaagtaaagggaacacacggcgagacaactgggggaaagagacccagaggagacagcagaaaaaacgggcaccctcaagaaaa

SEQ ID NO: 486733 - DNA, 449 bp, Homo sapiens
aggacgagctctaatagagtccagggccatccctccccgacctctgatcgtaaagcccatgactgccctcgctgctcgaggagtgccgccacctttagcagccagaacccgaggagtacaccttcggcccagatggaaggcttcctcaatcggaaacacgagtgggaggcccacatataagtaaagcctcaagcaggtcctggcagcaatgttgtatcgtgtcatacataaccaagaaaggggttactacgaagatgcaaagactgctgcttctggaattccctaccacagcgaggtccctgtgagtttgaaagaagctgtctgcgaagtggcccttgattacaaaaagaagaaacacgtattcaagctaagactaaatgatggcaatgagcacctcttccaagccaaagacgatgaggaaatgaacacatggatccaggctatctctt

SEQ ID NO: 486734 - DNA, 374 bp, Homo sapiens
acggttattaaggcgcgtatctgcgtagggggcttgatggggcgaccactactctctacgcatcagggggaagccgtgctgacttgggcttcaagactcccaggagggatagctggagaaccaggagccaagatggctagtaggtgtaggggtggtagtatctgctttccgctattacgccttttttcttggcaaggggctgagctggaggagctgcagtaacagcaaggagcgggggtccaagcagagtgcaatgtgacttgagaagtggagaggaaatgacttgatgggtggggaatgttgaggacagtggtaggtatctcaggtggaggcgtatacaggggctgtgtgtgacacaaaagagacggcaggca

SEQ ID NO: 486735 - DNA, 210 bp, Homo sapiens
aagtgggatctgaccgtgtactgggtctggtcctccccatcccgctgccaggtcagtgtgatctccgcagggtagaagctcaggtccagcacctcaggatggcctcatggtcagagacagcgtggtgagtcatatgcgtcctgggggggtccgtgcgccgcagcgtctccttcccgttctccaggtgtctgcggagcatttccacttagg

SEQ ID NO: 486736 - DNA, 437 bp, Homo sapiens
  misc_feature (22)..(22): n is a, c, g, or t
  misc_feature (140)..(140): n is a, c, g, or t
  misc_feature (344)..(344): n is a, c, g, or t
caacggaggccctggagcgaangtcgaattacatgagtctttggcgtcgattcttgcgcttattcgttctacgaagacagacgatcagacgccaaagctgcgatggagaacatcgtccatcgtatgtacctgtctatgtnttcggacatgattacggttcagaacaagaaacacgccaaaaacgtgtttggatatatccactcgtacttgccgcattcggttagccgatatatccgggaaaccgccaactatgtggcggcgatgaaatacaacgcaaccatcgaagaactcgttgcgcgcctacaagaagaagccaaacgcccgttcccgatcctcgacgacanagaccgtgagcttgccgcggcctacgttaacaccatcgtcaaacggtggaaccaactgcggtcgcgggaagaagttcagcctgtcgttgaagg

SEQ ID NO: 486737 - DNA, 191 bp, Homo sapiens
tgtaatacacacagacactttgggagtgctgatggccttgtgcatcacttgaatgtcagaagatacgagaacagcactggtagtgaaaccccatctctactaaaaatataaaattagccgggcctggtggcacatgccttgtaaatccccagctactctgtgcaggcttgatgcagtgaggatctctatga

SEQ ID NO: 486738 - DNA, 1019 bp, Homo sapiens
tgtatgtactttcgatttcttgtattgagagttccactcgtggttatctgcttggttcttttgtattttgtttcctgtgtgggtgtttccttttttgtttatattttactttccctgcgtatttgtttcacacctagttttggtctgtagtctacttgtcttagtattttatgttacttcctcaccttcgtcataacttttcattgatgtggtacctctttgtttgttgtatgtatgggtcatttattggttatgagcccttttctcagcttttgttctcatgtagtaatagctttaatatcattttcttttttcttgttttttagtgctctttttgtgttagctttttgttgtgtcttatggttatgttttttacccccattttttacgctatactatggggtgttacttctggaatatatttcttctgggtttttgatttgtcttgtttattattatgtttcttgcttttatgcgtctgttttatccgtttttttcttttgttaattctccctgtttctctttgtttttttcccgttatggaagacgagagttctctgcatcttgtcacccagactagagtgcagtggcacggtctcacctcacatgcaacctccacctcctaggttcaagcaatgtactcactgctatcagcactcactgagtagctgggactacaggcatgcaccaccacacccggctaatttttgtatttttagtagccatggtgtttcaccatgttaggccaggtttggtctcaaactcttgacctgcaggcgatccacctgcctcggcctcccacagtgcttgggatttacaggcactgagccaccgtgcctggcacccttaatgcatgctgaagaaagaagaatagaagtaaatcaacctgagtaaaagcagcactggtattgagttttctaagctcagggtcttcagtcaccccctgtggaaaacactaaggatgatgggggtagataatccattcatccagacacacgtggcttatcataggattagaa

SEQ ID NO: 486739 - DNA, 131 bp, Homo sapiens
ttctctgtgctcttgaggatcccagctgagagttgtcccggtgacagcgtgtggttcgtacaacctcttgcggagcggggaaggtgactaccgaacaagacatgctgcctgccctgtgcaggtgggctacg

SEQ ID NO: 486740 - DNA, 282 bp, Homo sapiens
  misc_feature (138)..(138): n is a, c, g, or t
atattcggtgcggactgatgtgccagcacctacttggcagccagcttgaatactttgtggcaatcaagcgaggttttccatttcagccccatggtgcatggtggtggccgatgaatgtgtcagtctgctcggatgaangaccaaaaggcacttattttcaaatctgtgttcactgttcgggtctgtgtatggctctgcatgtttgtgtttcagtctctgtctacgtagaggtatccacatcttactccgactgtaaggttgtcttacttcatctcttccccc

SEQ ID NO: 486741 - DNA, 456 bp, Homo sapiens
ctaattagttgtatgttccctaagattttccatacacaaaatcatgtcatctgcaaacagctttctttctaatctggatttcatctatgactcttacctaattgctctggctagtacctccaggacaatgttgaatagatgtggtgagaacagacatcctcgtcttactcttgatcttagcgggaagctttcggtctctcaccattgaatgtgatgctaacaatgcagttctgtgtagatgcttctatcaggttgaaaaagttaccttctcctcctagtttgttgagtgtttttgtcataaagtattgaattttgtcagatgctttttctctatctgtcgagatgatagtatgattcttgtcctttattatagtgatacagtatattacattgtttctcatatattgaaccgaccttgcattcatggggcaaattctacttgttcatggtgtataa

SEQ ID NO: 486742 - DNA, 975 bp, Homo sapiens
atttactttaaaaaaaaaaaaaagaataaaagggcaaaaataagaccactctaaaagaacaccaaaaaaccccagcacaaaaccgacgatggagtttggtttcttatgatttctttgccagagtggccagaagatgcaaatgcccatcagcactgaggaattctttggccccctttgttggtgcccgcttgcccccaacctttcaggcttgccgagatgctccccttgattcgaacaccgaggctacaggacgccagactgccagggcctgcccggcctccgtgttcctgcccccaacctcactcactccgtgcccgtggacgagcgaaccgggttcgggtcccgggtgttcggagaaaccgttgccgggttcccagaagtccaaagtccggccctcaagcattcatcacgggggagcctggcgtgatagccacgtttgaaggcagtttccccaccgcgaggtttttcccggaagcgcttcgagaaactcccagcggaggcaatatcggcgacaggtcccccgagccccaaacctctttgaaggatgcaccaggtgcgccttgaacttgtccgcgtgtgccctggggccgttttgccccatttgtggtcccccccctgtgtggcccttcccaggaggctctcccttttcaccattcgttgcgcgccttctctcactagtgtgcacgtgtgcgcgtgttgggcgcacacgcgcgttgtgttgtgtggatgggccccttgggtggtattcccccccgagagcagtgtaccttgcgatgactggctggtcgtatatgcatcgcatgaattcgatgtggtagacgcaacattcgcaaggttgtgcacacctcggtgaggtgtttattccccgccaatacgtctatcctggctcatgtgtgggtcgtcacatatgtggggtgccctcctgtcccccccgggcggtggtgcgccccagcgcccacggaaaatattctcccc

SEQ ID NO: 486743 - DNA, 157 bp, Homo sapiens
ctctgattgctgatcgggtatgttgcgggttttggcatacatcgcagccaggtaaacctggttggcatcgtatttcaccgcggtggtccatgcggtggcgctgtcgcctttaccgtactgcagcgctttctgagcgctggtgcggttggagtcggag

SEQ ID NO: 486744 - DNA, 160 bp, Homo sapiens
  misc_feature (65)..(65): n is a, c, g, or t
  misc_feature (89)..(89): n is a, c, g, or t
  misc_feature (99)..(99): n is a, c, g, or t
  misc_feature (130)..(130): n is a, c, g, or t
  misc_feature (144)..(144): n is a, c, g, or t
  misc_feature (158)..(158): n is a, c, g, or t
gtcgcgggcgatctcgccatcttcgccgcttcctctcaagggccgcttcctcctgagccgcccanccccggggccgccgcactgcgccnaccgccaccnccgccgccgccatgaacattttccggctgantggggaatgtcccncctggcggccatcntc

SEQ ID NO: 486745 - DNA, 341 bp, Homo sapiens
cccagccaagaattggacaggagctcaatttggttaaataaatagcaaattaacctgccaaaaagttggtatcagacaacaatattgcagtttaatttcaaagatttgttgagaaacaatcatcacagacatgcctcattctgtctctcagctgaagatcccaaagtagagcaattgctggccggcttatcctgggaccaaagcctaagagcttggttcattaacacatataatatatgttgaataactaaatgaataaaacccgttttcaagctccctaacccttccactcttccatgcacttattttatacccattgtctcttaccgtatggtcctgga

SEQ ID NO: 486746 - DNA, 381 bp, Homo sapiens
tttttggtggagacggggtctcttatgttgcccaggctggtctcttaagtgatcctcctgccttggtctcccaaagtgccacagcagctggccctgaacattattttagtttagttgtttgagatggagtctcgctttgtcacctgggctggaatgcagtggcttgatctcaattcgctgcaacctccacttcccgggtttagacaattctcatgcctcggcctcccagggtggctgggattgcgggcatgcaccaccacatctggctactttttgtctttttggtgggagatgggggtttcgccatgttggcccagggcgggtctgggaatcctgaccttcaagtgatctacctgcctcggccttcccaaagtgctgggt

SEQ ID NO: 486747 - DNA, 168 bp, Homo sapiens
actctgccccgcgcacgcaagccccggacaactagtgggcgacccgaaagggaacaccctggcgtaccaacaaaatgcaaaacttggccagccattgagaacccctgaccagccatctcggccatgcgatcggtgttgaacacggcggtgtccaccattccaatgata

SEQ ID NO: 486748 - DNA, 384 bp, Homo sapiens
gacaccccagccatgtgaaccgtgagtccatcaaacccctctactttatacactactccactatcgggatatgtatatattagctgcatgcgaacaggctactacacccagccaaaaaactgcactcatcgtcccttctttacctaaccaagaaatacacctagaggagcatcgcattgtaatcggtaccactactatttacacagtacatctgggaaagcaagtcagatcgagtcactcccctgatcaagtcctctaagggtttcttatctcactaagagtaaaagccatgaccctataatgacttgaggccttacataatttgccccccatctattgcatctcacctaaactactcttcttccttgaacatgtgcctgctcc

SEQ ID NO: 486749 - DNA, 143 bp, Homo sapiens
gggggctgggcaatgtatttttgcaaaggcgcctctcaatttctgtctgtcgtagtgcatcttacgggtgccccctaattgatctctcgcgatgtcagggtttatagtcagagtttttaattccataagggtaaaacgataaa

SEQ ID NO: 486750 - DNA, 240 bp, Homo sapiens
ggtaccaatctccatgcgttcagtcgaaaggcacatatatacacacatgcacacacagcacacacacaaacgcacagcacacacaaacgcacagcacacacgcacacacagcacacacacgagcacacagcacacaaacgcacagcacacgcacacacatgcacacacagcacacacactagcacacagcacacacacaaagacacagtacacatggaatgcacacacacgactggtagg

SEQ ID NO: 486751 - DNA, 183 bp, Homo sapiens
atgcatgcagcgcgtgaggagcgctccaggccagaagggaggagatcatcaggaatttaatccagggaggaggagaccagaaaataaaacctcccatttggtctgtccttacgggcctctgtgataacttagatcagccataaaaataaaacaggcttaatctggggggaacggagctcgaat

SEQ ID NO: 486752 - DNA, 646 bp, Homo sapiens
  misc_feature (96)..(96): n is a, c, g, or t
gtttactgagtgcttggacatggattttctaacttaaatcctcttgaggtagatactcccattttacccaaagagcattttaccaaaagatcttgncccaagatcttttttccttttttttttttctttttttttttttttttgtggaagaagcggagagtgtgtgtgtgctttgttgtcccccgagggtgggaagtgtgccgaggggtgtggcagctcccgcggatcaccgtgtgaaaacctctcacaacctctcccgcgtgtgttctacagagacatattccgccgctgtgcctttaagcctctccaaaatatgacccggggatatcttaatgcgggtggcatgtgccaccacacacgtgtgaaaatataatttatgtccgcgtgtctatttctcttatttcaaaacaggagggttttcacacctatatttgttggcgccgcgacatgtggttttactaaaactctccctgagaacctctggggggaaaaactcccccgccacaaaattttgagcgtctctccacggggggtcgtcctggggagaactaccagggggctattaagcccccacacagcgcccaaacgcctgtgccccaaagaatttttcacggagcacaattaacgtggggaaaaaactccttgg

SEQ ID NO: 486753 - DNA, 203 bp, Homo sapiens
gttgatctagaggatcccggctcaaacaggcacagggaaggtatatcagtattccaatgaggtctgggaataataagcactccaacatttataggtcaggtctctaaggtaaagaagtagattggtagttagtctggtaccttggtaccttatcaagacatctgcattccttatttttttttttttttttttttctttttttt

SEQ ID NO: 486754 - DNA, 233 bp, Homo sapiens
tcgagtcgacctggcccgattcctatacgggtgtcattcgtgtgaatactttttctaacaatagtaacacgttgtttgcttttgcgcttcattcgctccctaacgtacagtgttttctagtcatcacatgacgtatggagacacaattgcaatgatggctaacgtgtttgtatagtgttgtgcatttaaaaaaaaaaatctcaattttagttctgagtaaatattaatagtta

SEQ ID NO: 486755 - DNA, 118 bp, Homo sapiens
caaatttagtagacatcctggcagcaggccaggcgcatagggcattgtctcagtctggacgagttggtggtaggatgcagtccagcagcctcaagcagcgttgagcactacgcgactg

SEQ ID NO: 486756 - DNA, 457 bp, Homo sapiens
ctcaaaggactattttaaaagtcaacaagaatatcttggggctattgttcggaattaacatgattttagtgctgcagataaactgaagatgctgtcagctgtgctctttaaggagactcattgggtttttcaatgcagaagaattgaagaacactgaatgccaaaaattctataaaaatccattaatcactcagttcagatcgtgtcaatgctgcaataagaagacaattgcttccgtgtctgtagcaaagggatcagctatcgttttcacagtgtcgtggtcttcgggccggggagccccacttcccacagcgctgtgcttcacttcagccttgaataaacgtcgtctgcacctttacgcatgcatccatcaaaatctgtatttgtgttatttctgccaaaagcaatacaacttttctcattgactcctaactcatcaatagagaatctctgagaa

SEQ ID NO: 486757 - DNA, 1124 bp, Homo sapiens
  misc_feature (319)..(319): n is a, c, g, or t
gtccgctcgggctcgcgaacgagactgcacggcattgtctttaacgaaaactggcagcacaaaccacgcacatggcgggaaactcgccagcttcgcataacggccaagcctgacagaaaacggacacgcaggaccaagaacaccctgccgaccaaagcagcaccattgacgcagcgcagaacgcggacgctgcaaactttccctaacgactccctgcgacggcatttcccttacccccgctccctccttcgcagcacccccagcctcgcctgcactgcctggcagcgaaacgcagccaaccctgccaacgcactgcgcnccaccgcagccccaccacagccctgcaacctgctgcacacccctgggcccaccctcacgccgcccggcacctgcccaccccggccccctgctgcgcgctcctcatgaacaggcgacccccaccgcccaaactcgcgaccgtgccacacactctcctcccgcgctatagtgcccccccgcgcgcaatactctactacccacacacactctacctctctgctactgcacacttacactgaaaacagtacacaaagcaaccaacctttcgggatgggcaagttgtgcaacacaaaaaaacaaacacaaacgagacagacagaacgacaaaacacaacgagcgggggagcgacaggggactctctaatagaaaagtgatatctcacccatcgaaagagagcggccccccaagtgactcattataggggcggatttaccccgcagagggcgtatctactaccttgtggctacaacaacaaacgtgggaccccccccatcataataaagcagggcacggtaccccagaaataattaatcatcaaggccctcataatgagccacagtggtgggccagcgtgtcgccagagttattcaaacacccacgagcggtgtctcacccagacagaaaaccttgctggtggaccaaacacaccatgcctgttggcagaaacaaccctgtctggtcggaggagcaaaatctcactctgtggggacagaacaagcggtgagcaccccctgttctaatccatatctcagaggaggtccatagtttatcaccccatcttcactagttgtgtggacaaacagat

SEQ ID NO: 486758 - DNA, 2008 bp, Homo sapiens
  misc_feature (1223)..(1223): n is a, c, g, or t
  misc_feature (1696)..(1696): n is a, c, g, or t
tagtattcgttgttgtggagacgacctgttgggtagtttcgtgtagttggtgacggacatctgtgtgtggtgggattcaaactgaccatattaatcaaattgtgctgtgctgtgttgagttctgtgtctgccacttctggtgggagctagttctaatgaagtgggggctttggtttggtatcatacgagtgggtagttgattgtgtccactacgtgtgttgtctgcacatcgtgtggcgtcctaacttgatcgtgttcgctactgggttgaacgagctgtcttgacaacacgtggtttcgttgagaggagcgcttcttcctcacatgttggctgctcgctgtctgtctgtgtgtgtcgtacgcgcttgagtcctgcccgtttgtgttgtgtgacgacctcctgcggtttgtattgttctgctggttgaaagacacccgatgtggcgcgttttttgttccgttcttcgtgaaaatgtgggagggtggtgggtgaggacaccaccgatggtggtgttccagtcggcctgcgagcctagacatattgggtgggggggcatcttttgttgctactggagacagatgtgatggattattcgctctaccaacggggggaggcttccccccgccgtgccgtcgagggtagaccgccctgtgccgcctgctgtgttgcgcaagggggtcatttgttttgaaggagttttgtggtgcgccacgacgtacgcttgtgtccccctccgaaggtctgtttctgtctttctaacgacgcggtatgttggatcccgcggttggggggaaataattgttgttggggtgtggtcgtcgtcctcccacaggcggtgaagggttgtttttgttgccaccggcgcgcggagagattggtgtggcaatagtatgagaccgtcggtttcgtggtaggggggcgtgtatgaccaacacaacaggtgtacgacaacaccacaacatggtggtgtctgtgtgggtgcagttggtggcgcccagcaggagtgacacacgcacagccgtttgtgggtccacaccagattcccctccacacaatcttttctcgtcgtctacacatcgttgtcgtttttgagaataatgatgttggtggttaggatatttattatgaataaaagaagtgtatgtatgtttgttgtgttatcctcctggcataaatgaatataatacacgaacaacgtgctccgcgtttcaacaaggataantagatgttacaacacatctcctgcttcactctccacatcatttggtgttgcccaacgtggtgtcactgcagagcgcgcgtcatatatcgttgtctgggcggccaaaagaggcacaaatatgtctcatgaggagagggggcgcgttatgtggtgttggagccccaacacgccgcaccaccacaggtaaaatacagtttatgatatgacacgtctcaaaagagggttgtggtgtgtaaaaaatgtgggcccagtgtgggtgcaccaagtgtgttgctacccacagctgcaagagagtctcacacaagtggggcctgtgtgtcctccacacacagagtgtgtgtgatacacgtctcagtgggacacgtgtgagggtgtataagacagtgtgtgtatatagagagatcacccacacagtgtaaagtgtttgtgtctcagagagagcccagagggcgtgatagagacactgtgtcgcnagagacaggtgtgatacaagagagacttatgccatataggaggacacttcacacacggagacacccacagtctaaggcccaatgtctattgtgcccactgtggacaccacacgccaatataaatgtgagaaaccggaggtgtaatgtgttgccgtaagagtctcccaggacacaattgtgaagaaaatatgaagtcacactaattacctgtagtattgtggtgtaccctgtagagtccacaccaacacaaacctgcccactatgtaagattataagaaaaatgtaataagagtttaaaaaaggcaccagata

SEQ ID NO: 486759 - DNA, 170 bp, Homo sapiens
cgattatctagaggatcccacgatggtctcagactgtttttacacggtggctatctctggaatgatggaagttgtcgccagtgtggcccggccgtgggggcctgtgcccctagatggtggacttggagaaggagacccgcaggtggtggttctcccctgaggtctgtggt

SEQ ID NO: 486760 - DNA, 591 bp, Homo sapiens
  misc_feature (14)..(14): n is a, c, g, or t
tctagaggatcccntattcttgcccgatgatcgtgaagaaagaggaagggtccaggatagagatagtcatgatctcctgctataaagtctgggtggggatgctgttaccgcgtgcgaaagcactggtagccctgagtacagctgaagcccaggctagtgggatctacatgccagggctcaacaaactccaagacaaacatagaacttcacaaaacagccctgtgtcccaagaccctcaacatgtgtgacaggcgctaggctccttaacataacagactccaggacacggcaatcgagttgggaagaactaactattttagtaccaagcaagagccatatctgggcatcgcagaacacgcagtgagagacagtgacgagtgagtctgtctcctggttgtcaggaggtggcatactgccaatggggtaggctctgaaccgagcatagagtatcaatctccgtagcaaggaacttccttctgagaacggtttgccaaatccctccaagagaagagacaaagattataaggctgagtcttccagaacggtggtcgcggggcaacctacatcacaagcgctggtgcagaacctgat

SEQ ID NO: 486761 - DNA, 228 bp, Homo sapiens
cgagggtactgagcctcgaagttgaagacatactgatcttggctaaagagcagtggacccaatatcaagaggaaacatttctaccttggaccgtatctcacaagaggttattcgggaaacgacaagccagcgaagaatggggcaagaagtaatcatgtagttgacagtctgtggatgcagctgttatgaagatggttcaacttgaaacaaatcattcaagcactgctt

SEQ ID NO: 486762 - DNA, 263 bp, Homo sapiens
ttcggcagcgtcggggggcagcaccaggtcccgtggagagggattgagccaagaggtgagggtgcacgtcttccctcctgtcccagctccccagcctggcgtagagcacccctcccctccgttccacccccctggagtgctgccctctggggacatacgctgtcgggttcttatccctgtactgagagttgatgacaacttggatgacgcttttcatgggagggggaagccttcctctcaatttgttgtcagtgaaattccaa

SEQ ID NO: 486763 - DNA, 141 bp, Homo sapiens
cgctcacctcgcaatcttacattcaattcccatcctaaaaagcactcatactttatgcctccccgcagtagacacacacaacacacagcacacgcatgaacacagcacacacacgagcacagcacacacacaactcacaga

SEQ ID NO: 486764 - DNA, 212 bp, Homo sapiens
taaggatttccgcgtacagttgcggacaccctatgtacgtgaccacagtattccaacccttaaacctccctgtgctgacgggcacttcatggccctcagagccaccgggtgtggtcgtccacctcaagcactgtgtctgagggcagtggcaacagcaacaatccggtctcggagtcgcacacgcaggcgttccccgcaactggtacggccgg

SEQ ID NO: 486765 - DNA, 523 bp, Homo sapiens
  misc_feature (334)..(334): n is a, c, g, or t
  misc_feature (363)..(363): n is a, c, g, or t
  misc_feature (380)..(380): n is a, c, g, or t
  misc_feature (394)..(394): n is a, c, g, or t
  misc_feature (500)..(500): n is a, c, g, or t
  misc_feature (503)..(505): n is a, c, g, or t
  misc_feature (508)..(510): n is a, c, g, or t
  misc_feature (512)..(513): n is a, c, g, or t
  misc_feature (519)..(519): n is a, c, g, or t
gccactgtttgtagcgagcacatttctaccccagccaggcctatctataagcaaataaagatgggatttcatgtcctcccatcagcttttctgcaccctcccttctaccttccagtggcacagtgcttaatgacagctgctgacaatacagtgtcacaggccttgcgccaaaattacccccaactccttccctcactcccaaatcacaactcttattatctaagtgagcaaccccagttgcaaaacacaaaggagtaataagtcctgtagaaattctcagctccaccccagcccctggttgccaatgaccctgtgaagaagctaaaactccttngctcggacattctgtcacagagagacctncagcatgtgccagatgnacttgcatcaactnaaaaccaaggtcacctctggagaccagaaatggaagtgacagtcccaggcctattcataaagcttcagttttttacaaggagattgtaatcatgcaaaactgcgtnttnnnaannntnntaaacngaaa

SEQ ID NO: 486766 - DNA, 706 bp, Homo sapiens
ggttcataataactttgcctgatgttctagcagaaactttatctaagtgaaagacatgagtttgtgatggcacaatagtgtgaatgaagtttcagggtaatgatgctacctgttgatacaagaaattgaacatgtgctataaacttactttgagaagtgctcgagagtagagtgtgcgattacaaactatgtccatgatattgcttgcgagagaatgattttgaatcactgtttccagaagtagctaatggctaaactagatgattcgtgactgttatacagcatagagaaagctagaagaagtgatgatgactgttatggagtgaagaagtagaagattgacagagacagtgctcttagaaaagttcatcaatggtgctgaaggaaattggctatgctcttcgagctgagggttattggggctgactttattgacccatcgatctggtctggcatattacttggaccatatacgaactaagcactcttttggaaactgtatgcacagcgctaccgacatttaggattctctgttgatgaccttggatgctgtaaaagtgattcgtcattagtcgtctggtggtacccatgtagtagtagggagtatcttcacataatgcaacagcagacgagcagtattatgaggaaattaagtgtgaattagcagaaatatccattcatttgctgtactattttgtatgtaata

SEQ ID NO: 486767 - DNA, 755 bp, Homo sapiens
  misc_feature (67)..(67): n is a, c, g, or t
  misc_feature (76)..(76): n is a, c, g, or t
  misc_feature (84)..(84): n is a, c, g, or t
  misc_feature (92)..(92): n is a, c, g, or t
  misc_feature (97)..(97): n is a, c, g, or t
  misc_feature (106)..(106): n is a, c, g, or t
  misc_feature (109)..(110): n is a, c, g, or t
  misc_feature (118)..(118): n is a, c, g, or t
  misc_feature (139)..(139): n is a, c, g, or t
  misc_feature (661)..(661): n is a, c, g, or t
gttgctcgccacttatgtgttgggtgaagagaacctcgattccttgaagaagttgattacagtgcanaaagtaatnataagtanaggggggngtaanctaaaaatntannaaattatnaaccttctgctcaaaaaaaantactttctgactctgaattatcaagaacatacctaccttgggcccggtggcatctcttgttaactggaaagaataaatgaaatatcttgggttttatgggcgaggaacttggagaatgagtatacaactactcaaaagacaaaagtacttgggccaggttgggttcaggataataaatggggtattaattaatggtaaaatgggcgcttggtttattttcgatattcaatgcactttatggagcattggatgatcaaatattgggtttacctttaaaaaaaaacctgggtatcattggatggatttttatctccctatggggatatcctggatcaagggggtaattttgaagggggggcagaatataaaattgggattttagagggggggaaaatcctggcttggtgaaactaatatatgggtacatgggtttctatagatgggtttggttagaaggggggagatattgcggataagactgggcttcagaatcatgggactatgggggtgggactgaagtgntccagggggtggcttggaccattacattctacatgtaccaattaaacaaggaaaacttgggctcggggggctcaggggtggagctctgcgggct

SEQ ID NO: 486768 - DNA, 154 bp, Homo sapiens
tgggcatggagacgaaaagttgccagacggcagcattgccactgccaagtgaatcctgcccaggcaggaatcatgtggacgcccatggtgcatgacggaggccccgagcctgtcagcgtgcagcccccgtccagtacgacatacccaggctcgc

SEQ ID NO: 486769 - DNA, 216 bp, Homo sapiens
aaaaaaaaaaaaaaaaccccccgaatgggggggggggggggccccctttggccttttggttttaggggaataaaaacccccccaggggtttccccttttttttaaaagggggggggggggggtacttttttttccccttaaaattttgggtcccccctggtttttgttttttgtcccgcccaagccttttttttataaagtttggccttccgttta

SEQ ID NO: 486770 - DNA, 157 bp, Homo sapiens
ataggattgacaacattgcaaatccatatgggggcatgcacagtctgcagcattgttgttacctgatttcttgcttctactagaaaaagttacatcgtcttaagtgtaacaatagcagttcttttgtgcttttacgatttcatttgtttattttttt

SEQ ID NO: 486771 - DNA, 714 bp, Homo sapiens
  misc_feature (27)..(27): n is a, c, g, or t
  misc_feature (32)..(32): n is a, c, g, or t
  misc_feature (176)..(176): n is a, c, g, or t
  misc_feature (443)..(443): n is a, c, g, or t
  misc_feature (516)..(517): n is a, c, g, or t
  misc_feature (565)..(565): n is a, c, g, or t
  misc_feature (678)..(678): n is a, c, g, or t
gacgcgggagccatgcgccccctccgncctgncactcactaggcccccacttgcctcttccttgaagaactgcaggccctggcctcccctgccaccaggccacctccccagcattccagcccctctggtcgctcctgcccacggagtcctggggtgtgctgggagctccactctgnttctctgacttctgcctggagacttagggcaccaggggtttctcgcataggacctttccaccacagccagcacctggcatcgcaccattctgactcggtttctccaaactgaagcagcctctccccaggtccagctctggaggggagggggatccgactgctttggacctaaatggcctcaggtggctggaagatcctgcggttggagccttgggcgctcacacacctgtagcacttactggtaggaccaagcatcttgggggtggntggccgctgagtggcaggggacaggagtccactttgtttcgtggggaggtctaatctagatatcgacttgttnntgcacatgtttcctctagttctttgttcatagcccagtagaccttgtnacttctgaggtaagttaagtaagttgattcggtatccccccatcttgcttccctaatctatggtcgggagaaagcatcagggttaagaagactttttttttttttttaaactnaggggggggaaccaaaaatttcttggggaaaaggcc

SEQ ID NO: 486772 - DNA, 670 bp, Homo sapiens
  misc_feature (27)..(27): n is a, c, g, or t
  misc_feature (32)..(32): n is a, c, g, or t
  misc_feature (176)..(176): n is a, c, g, or t
  misc_feature (443)..(443): n is a, c, g, or t
  misc_feature (658)..(658): n is a, c, g, or t
gacgcgggagccatgcgccccctccgncctgncactcactaggcccccacttgcctcttccttgaagaactgcaggccctggcctcccctgccaccaggccacctccccagcattccagcccctctggtcgctcctgcccacggagtcctggggtgtgctgggagctccactctgnttctctgacttctgcctggagacttagggcaccaggggtttctcgcataggacctttccaccacagccagcacctggcatcgcaccattctgactcggtttctccaaactgaagcagcctctccccaggtccagctctggaggggagggggatccgactgctttggacctaaatggcctcaggtggctggaagatcctgcggttggagccttgggcgctcacacacctgtagcacttactggtaggaccaagcatcttgggggtggntggccgctgagtggcaggggacaggagtccactttgtttcgtggggaggcttgatctgatagacactgtgatgctggcatgtgtccactgagtcttcgggcctagcctagtctttggaacttatggagtaacttgagacacttgatgaatgatgtccccgacgtgcttccctcaagtatggtcaggagacggcctatcgggtattaacactattnatgtgtattggc

SEQ ID NO: 486773 - DNA, 219 bp, Homo sapiens
acaggttgtgatattccggcttgatgccggcccaagtggtcatttgacatatctctggccagtcgcctaaatgataggtctctccttatctttctgtacctgtccacagtaggaaatgtgacatatctctgggcccagcacctatgtgatgtgaccctcctgtcatgccaaggccttgcctactgtagtgattgtgccatatagctgggcctctgctct

SEQ ID NO: 486774 - DNA, 260 bp, Homo sapiens
acaacaacaaacaaaaaatgagagaaaggctaaaaaaaaaagggtagggggtgagcagtaaatgggtatacatcccacatacaatatctggtgtaaacacggatctcctggtagaaagtacgctcaaaggggttatgggctctagaaataccggtgggtctatcctatagagcactcacgccaggcttatctccccgcgggtttaaacacttcaaataacttccagaaaatgggcagagcaaaaatttgggctggtccac

SEQ ID NO: 486775 - DNA, 529 bp, Homo sapiens
gtcatcagcgatcctacgacggtttcatgatgccttatcagatatgtggatcgctttcatgtatatatagcttagaaacaagaaatccacctaatattaaaacaaaccataaaaagtcataaaagcgagctaatgaacaaaaaaccctaggttggtggtgcttttctttcacatttcctacagggagatttgtatatctcagatactttcaaaatctaataggtaagtaaaattagtgccttaaccaaacagtaagataccaaagaatcctccatcagcaagttactgaatcaaacttctcatgacattggcggtatattcagatttgaagattttttaaatttagaatttaaaacaaactttagactgctgattttccatatttcaaagactgtagttgtctgcagcatataaatggacagagtagtgcaaaacgcatcaagtgttatatgataaatatatactttcaaccaagagtgtcgcgcgacactcttggatgcaaggaactgacacaccgttagaacaactg

SEQ ID NO: 486776 - DNA, 198 bp, Homo sapiens
taaacgattatccagatcaaaaatagcagcattaaaaatataacgctccactggtaactcatactgctcacaataagcatttaagtcagcaatgcccaatgctaacggtgtgccttgctcatatctgcgtgagcgtgaaatgacgttgtaggctttaattaaggcattggctgtatagctatactcaggctttttcac

SEQ ID NO: 486777 - DNA, 329 bp, Homo sapiens
caactatctggctaaatggctttacacctgcaaaactgaccctaggttgttgctacccgatatggttggctgcgtccccacccaaatttcatcttgaattgtagttcccataatccccatgtgtcgtgggagggacccggtaggaggtaatcgaatcatgggggcaggtttttcccatactgttctcgtgatagtgaatacatctcactaaatctgatggttttataaagggcagtttccctgcacgtgctctcttgcctgctgccatggaagacatacctttttgctccttctttgccttccaccatgattctgaggcctctccagcc

SEQ ID NO: 486778 - DNA, 199 bp, Homo sapiens
ccacatcattatctccatcctaatacatggctagattatctaatgataacatagcctgtgtccaatgcttatttgattctaagcttttttattctgttactgagatatttaaatagctttgcaacaatatgctgaccagtttaaggaaagtactgattcttctagcaagcaacagactttatggccaccttcttccaat

SEQ ID NO: 486779 - DNA, 379 bp, Homo sapiens
aaacatgcccaagcagtcatgtagatgtgactttcaagcccagcacgccgggcccaagattgatgagaagctggtctcactgaagtatattatcaagtctccagacgggcatatagttggcaaaggcagaccagcaccaacggtctcacctctgccagctaaaacttgcaacggatgccgatacgagttcgccatcatcgaacctagcagaaccaggacgcagactgggatgtcacagaaagttgaaggtcccaattgagcaaggactaagaatggtgagcccacgctgggggaggggtggggatgatgtgtgtaccagaactcaactccagctgatagagccctctcagtgcagagggctctacaataaccctaacag

SEQ ID NO: 486780 - DNA, 496 bp, Homo sapiens
  misc_feature (296)..(296): n is a, c, g, or t
  misc_feature (384)..(384): n is a, c, g, or t
ggtgatggtgcgctgtttaatactttagaggcctcaaaataagtagaggcttttcctacagggtctgagaaggcaccgaagtcatttcttctgttctgtcagacataattcctcagtttagccttcccacctcaatacagtctgataacagacgagcctttattagtcatatcagccaagcagttcttcaggctcttagtattcagtgaaacctttatatcccttatggtcctccatcttcaagaaaagtagagtggactaaaggtcttttaaaaacacacctcaccaagctcagncagcaacttaaaaaggactggacaatactttttaccactttcccttctcagaattcaggcctgtcctcagaatgctacagggtacagnccatttaaggtcctgtatagacgctcctttttatctaaggcccagtctcattccagacaccagaacaacttagactgtgctcaaaaaaacaacaaaccccaaaaactgggaa

SEQ ID NO: 486781 - DNA, 160 bp, Homo sapiens
tacctcaaatcacttggccacccatggtactgaagctacgagtacaccgcctacggcggactcactcttcaactcctacatacttcccccattatacctcagaaccaggcgagctgcgactccttgacgttgacaatcgcgtagtactcccgattgaagc

SEQ ID NO: 486782 - DNA, 1289 bp, Homo sapiens
  misc_feature (856)..(856): n is a, c, g, or t
agcggatcagacgtttcggggaccgggggacacgggctcggagctagcgatttccaggggacccaagaacattgacgtggtccgtacgatgtggaacatgtacggggcttgatatgacgatcacggtaactaaagtgatagattttacgctcgaggtcctaactaatcatgggggtcctaggtcgggtccgccggactgactccgtgctgggcgatgcactgacgtgccagaattgacataattggagatagcaacataacttgaggcagctggtgcaggaaactaccgcatataggatattccgcatgaactggtgaggagtagagggtctatatatgggtggtaaggggggcaacatgaatgaggtcacattaagaggctgtgcattatagcgctaggaataagtaggtaaagggaaaagagagcagatattcagcatgcaccgtgggcagacgacttgtcgtgagaattaaaggtggctaaggtatccatgggtagctttgtacagaagacctgccgtggaggagtggattagaactattgctggaggctaaatatgcacaccaaatttacaaggtaatctttggccaaaatattttagacggcgttgactgacagagtgaatgaaacgaagagaatgcgttggggggagcaatattgggaccattatggggtatttcatgtgggtggacagcctattaatccaataaggatggaggttggaaacttagcgctgaacatgtgactaagacatttgacaatgtgtaacacgaagaaagtgtgtggggtttactcccaatagtgccattagaaggagccgaacaatgtgtaaggccacctaagtacttcgcctangggtacgcgagtgaacatacatgacgaagagacccacctttggatccatgtgctgacagagaggggggtacgtttggttcacggtactcgacactaaccccgtggaattgcagagttacaagaggcgctcaagccaagacaaagggccacagtgtgggtgcccatttacaaggccgaggggggcacaggagggagaccaagtgacgaacagttaaattacgccggtgcatcaccatggagtcgccttaacacagtccacaacggagggagttacagtaaggatccaaagaaattgttcactgcgctggaggcacccctctatgagccgagcaagagagcagaaacgactgtacaaatatgccgcggcaaacagaccaacacccccatgtgcgagatcgacgatttataacgccgcttaaggtacatgagggca

SEQ ID NO: 486783 - DNA, 679 bp, Homo sapiens
ctacagacataggagacactcccgtaaaatctagcttggccagtcgggatgtaccctggaaaagtcttagcagagaatttttgcattcccacccaaaagccctctcagccactcaaatgcctatcttctccagtctacaagtaacgtgtacccacccagcattacagttcttgaacatgtcatgtcctcccttactggtctacgttggactaactcactggataagtattataatagagctacttagctgtggtttaaatacccttctgttaacaatgagcaggcaaaataatggtcttttctaacatagttcaacccaccacagacctcgacaccatcgttacctttaaaccgattatggatcatgcccacaaggatccaagctactggccgtctcaagataaggggttgagggtctgtgctagatcaaaaggcacgggaaggcgatgtggcagaaaagttgctagtggggagacctggcctttaacaggcttctggaaaagctagggaaaagtggtagcccgctttccccctttccctccccttcaagcaccgcttgagatctgggctaattattaagagctgcttataaaaccagtgcttaatgttagagagccagggtcttcagcatcctcgatctcctcaaaagagggtgagcgtcccatataaaaatcggagt

SEQ ID NO: 486784 - DNA, 316 bp, Homo sapiens
ctttcagtcaaggttccttaatcagtccagtttacatcaggactatgacttggggggcggggctaatcctttttgctgttttgagctactattgtcaaccgctgttggacaacctgttatgggtaaggggggaaaaatatttattatgttggtaaaattcattgcagaccaaggttgcttttctgtgaaaaatgggaaattatgttttaaagcccctcttggaaaccaattagagaacttagtattttgatggactaagccctattttaagtttaaaattttcctttgcaaaaactttaattaaagatgtttttta

SEQ ID NO: 486785 - DNA, 477 bp, Homo sapiens
cgtcaggaagtaacacagctgggccagtacacacagcttcatcaggtagatatttttgtcctaggaaactttccaaatgcactgtggcaggcattctgaggaaagtcccttgggtcactgagcacccagtagtcctccttgtcccagtgagaactctgctcagggttctttgatgttgctttggtgtgctgattataattagtacacttaacaattgtggcttgccaagaatggtaaatttagtatgattaggagcgatcattccacgctaggctggttggcgaatgcttcttagtagagcttgaccagcgtcctgaagcctttgtcagtgaacagtgaaagaaacgtgtgttgcaagtctttacagagcacagcacagactgtgaataggaggagaatgggggctctcagatcggtgtgttcctgttgtagcacagagcaagagtccttgacaacagtttccagagaggtcgacgc

SEQ ID NO: 486786 - DNA, 659 bp, Homo sapiens
  misc_feature (7)..(7): n is a, c, g, or t
  misc_feature (40)..(40): n is a, c, g, or t
  misc_feature (45)..(45): n is a, c, g, or t
  misc_feature (54)..(54): n is a, c, g, or t
  misc_feature (66)..(66): n is a, c, g, or t
  misc_feature (76)..(76): n is a, c, g, or t
  misc_feature (83)..(83): n is a, c, g, or t
  misc_feature (86)..(86): n is a, c, g, or t
  misc_feature (106)..(107): n is a, c, g, or t
  misc_feature (109)..(109): n is a, c, g, or t
  misc_feature (119)..(119): n is a, c, g, or t
  misc_feature (130)..(130): n is a, c, g, or t
  misc_feature (138)..(138): n is a, c, g, or t
  misc_feature (152)..(153): n is a, c, g, or t
  misc_feature (171)..(171): n is a, c, g, or t
  misc_feature (180)..(180): n is a, c, g, or t
  misc_feature (188)..(188): n is a, c, g, or t
  misc_feature (192)..(192): n is a, c, g, or t
  misc_feature (199)..(199): n is a, c, g, or t
  misc_feature (209)..(209): n is a, c, g, or t
  misc_feature (215)..(215): n is a, c, g, or t
  misc_feature (240)..(240): n is a, c, g, or t
  misc_feature (245)..(245): n is a, c, g, or t
  misc_feature (258)..(258): n is a, c, g, or t
  misc_feature (271)..(271): n is a, c, g, or t
  misc_feature (287)..(287): n is a, c, g, or t
  misc_feature (294)..(294): n is a, c, g, or t
  misc_feature (309)..(309): n is a, c, g, or t
  misc_feature (317)..(317): n is a, c, g, or t
  misc_feature (341)..(341): n is a, c, g, or t
  misc_feature (349)..(349): n is a, c, g, or t
  misc_feature (367)..(367): n is a, c, g, or t
  misc_feature (371)..(371): n is a, c, g, or t
  misc_feature (389)..(389): n is a, c, g, or t
  misc_feature (399)..(399): n is a, c, g, or t
  misc_feature (404)..(404): n is a, c, g, or t
  misc_feature (408)..(408): n is a, c, g, or t
  misc_feature (427)..(428): n is a, c, g, or t
  misc_feature (430)..(430): n is a, c, g, or t
  misc_feature (440)..(441): n is a, c, g, or t
  misc_feature (449)..(449): n is a, c, g, or t
  misc_feature (454)..(455): n is a, c, g, or t
  misc_feature (516)..(516): n is a, c, g, or t
  misc_feature (595)..(595): n is a, c, g, or t
  misc_feature (597)..(597): n is a, c, g, or t
  misc_feature (640)..(640): n is a, c, g, or t
tgtttcncactgcctgtaaaaacagggctttattcaaaanaagcngtccaaaangatttgaccttnatggaaaaancaaattnaanagtttatgcagcaggcttcnncncccctgtagnaggtttcttcnctgcaggnttcttttcaggggnnggtttcttgggagccgcngcctttttncccaccanaggnttctccngcttctaaanaccaanagcagccttctttcctttcttaccnaccanaggcttcttgccngcaaccgccgccntcccaactgaatgggnttgtagngccgcggcggcagcngcggcctnaaccacccggagcttgtaaatccnggccgggngaagaagggggtcccggngcangggctttgcaaaagggtnaagcttcaanaagantttnaagtttttcagtgggttcnncnttaggacccnncgaagganccccnngcggggggcccgaagggctctttggatccctgggcttttcaagaatctgcaaagaactgtnttaatcatcttgtgcatgggaagattgttgttactcttgagggaagcggctttacgccaagtgccgtacaattcatctnanttccggaaagcactttcagttcaaatgcagaaacgtcccaaangcccaccaggagcaagctt

SEQ ID NO: 486787 - DNA, 383 bp, Homo sapiens
cttcaagatttttgcgaagttttcttcatgggggggtcagccccttggctcccatttgaacccctttgcctctgaaacttaattccatccagaaagaaggccccttgtatgctagtctatggtccgttgaggaatatgcctgtttttatatgcccctgtaaccccaatgtcccatataaattggcttattttttaaaataattttaaaagttgggaaaagtgtttttttttggcctgcttaaatattgaataagttttcttcctccgcctttaattaatgtataggccgatgtaaggtaatttctgtgttttttgagataatgtccaaatcctgaatttttccaaattaactggggggttttaaaaatccccctagagattta

SEQ ID NO: 486788 - DNA, 388 bp, Homo sapiens
  misc_feature (322)..(322): n is a, c, g, or t
  misc_feature (384)..(384): n is a, c, g, or t
  misc_feature (387)..(387): n is a, c, g, or t
aaaacccaaaattacttggaaagtctacaaggtaaacatccgtgacttctttttttttcttgaagatggagtttcccctcttgttgcccaagctggagtgcagtggtgaaatctcggctcactgcaacctccgctcccgggttcaagtaattctcctgcctcatcctcccaagtagctgggattacaggcatcggtcaccacacctggctaattttttgtatttttaaaagaaacggggtttcatcatgttagcaggctggcctggaactcctaacctcaggtgatccgcccacctcggcctcccaaagtgctgggattacngatgcatgagccaccgtgcctggccccatgtacttttcaacaatgaataatgacaataggtnttng

SEQ ID NO: 486789 - DNA, 88 bp, Homo sapiens
gatcaccaacatgaacaacaattatgagccccgcagtggcaagttcaactgcaaagtgccccgggtctctacttactttaacttacca

SEQ ID NO: 486790 - DNA, 803 bp, Homo sapiens
cctggaatccgagcgggtgccgctgtgtatgaaagaagctatagcacttccagagcctgtccggagctcagaggttcggaagacttatcgaccatgtgagcgcgcgtcctgcttgttgctgctgctgctgccgctggtgcatcgtctctgcgagcactcctagaaccttgtgagtctggacgatgaagatttccgcgtgcgtctgcacacttctccgatacctcagcccgactggtccgaagccttccagtgtgtgtctgcagtagaggtggagatccatgccggcggtctctagacctagagccgtttctaaagcgctgtcgatgcggacgccgacccgtcgtgcagtatgctgaccactggtcaatgtgctctcctgcgtgcggtggctcacagtgggagccgcacaggttcctgctcatgctacttggttaggcgccctgctgttgtgctagcgtactccctggctcaaggaactgattgctcgaggacctaaagataaccggctaccatgcctccggtgcctctggaaaggccacaggagttgcactttccagcttgcgcctacgcaactgtgtcgtgggcgacagggcgtacttggctcgccgagcttgcagcagtggctcaagccaggcctcaaggtactgagccattgcccaagcacactcggctgccttttcctgcgaacaggttcgccgccttcccgggccttaccagcctagacctgtctggacaatcctggacttgggcgaacggcggactgatggcgggtctctggtcccaacaaggttcccgggcatcca

SEQ ID NO: 486791 - DNA, 102 bp, Homo sapiens
aggagtggggtgcggctcttgtcaggcaaccttcctgcacatgtcctcctggagctaggaggaggttcaatctgacttagggcagatgcaatccatcccttc

SEQ ID NO: 486792 - DNA, 304 bp, Homo sapiens
ggggggaaaaaaaaaaaaatttttttaaaaaagggcccccccgggtttttttaaccccctttttaaaaaagggcttttccgggaaaaatatttttgttttaaaaggggaaaaacccaggtttaaaagggggaaaaattttttttaaaatttaaaacccaggccccccctttttgtttaaaacccgaaaaaaaagcttttattttttttatttttatttatttgggaaaaaaaaccccttaatccctttaattggcggggaattaaaattgggcaaaaaaaccccaatttttggggggaaaggga

SEQ ID NO: 486793 - DNA, 451 bp, Homo sapiens
agtttctgctatattagccagaaaatagaaagcctgttggggacagggaaatgcctataaggactccagagcagtcacagataatgacatttctgagtagctgggattacaggcgcccaccaccatgcccggctaattttcgtatttctcggtagagatggggttgcagcatgttggccgggctggtctccaactcttgacttcaggtgatccacccaccttgggctcccaaagtgttgggattacaggcatgagccactgcgtccagccatgacatttattaatttacaacgtgacccataatgccatttgcctttgccaactagacttttgatatgtgactatgcctgaggggaccacacaaggaagggtgtcagaacttcgacaactcataacgtgacagaaatttacacgtaaacagctaaaataatcgtatcagctcataaaacgg

SEQ ID NO: 486794 - DNA, 650 bp, Homo sapiens
atacacaccactcctctctcgtcgaggtgtgactcgcgcgccccgcgcagaacacctgtttttccccccgcacgatctacagagggtgtctctcttagtagagcctctcctctcgtcgtgagggagcactctttttctctctcccgacgagatatatctactcatttttgttgttgctctctctctgacgcgcgagcgggcgcccccccctcagagagagaaagagaggcgaccactctctgtgtgggcaccacactcgtgcggggggtgggggggggcccccccgtctcgtatatcccctcgcgtcgagagagatagaacacgcgcgcgccccatctcatctctgtgtgaggtgagagataacacactccgtgtgtcctatcgcggccgctccgctctcgagaaagataaaagaagagggtgacgacatctcctctcacgagggggcgcaacacacaccgagaagaagaaaaaaagaagaaaaacaccggtcggggggaaacgcgcgagggtacactggaccaccccgggcctgtttgaaacaccttgggggcccccccttgtgacaaaaaaagagggccccaaccccctttttaattttttttaatttgtgggtttttttaaaaaaaaaccccctttggttttttcca

SEQ ID NO: 486795 - DNA, 172 bp, Homo sapiens
  misc_feature (123)..(123): n is a, c, g, or t
  misc_feature (144)..(144): n is a, c, g, or t
  misc_feature (153)..(153): n is a, c, g, or t
agcggtcagaggcgtctggatgatgtttggacagggatagctgtttgggtctcaagttccaagagatcccattttcaggctctaaatcctcctcaatagctacactcactattggcctcctgngcaagcaacctagctcatcgnacttcatcntgacttccacgttcaggtg

SEQ ID NO: 486796 - DNA, 172 bp, Homo sapiens
tattttaggacgtgtactctgaacattctggagccgtcaaaggagctgcagcaaagtcacatatgttcgacgtgcgaaatgcttgtggtatgtgttttccaaactgccccctatatgtaaagttcagtttagaccagtgattaccgtgttattactaggtcctttgagatta

SEQ ID NO: 486797 - DNA, 1102 bp, Homo sapiens
ggagtcccagctcagagccgcaacctgtacagccatgccacggggcgaagacacttcaggacagcttgaatggctcatctagatgctccatggtgtcgcttaggtgctctcagtggttgtcgtatgggggcgccctgtctctggccgatggcgagcccgtgcaagtttcccgggatccctcaagagtttacactccgaagtactcctgattccgatagcttgctggaaaggctcacgaggactctgcttaattcaaggctgcagggtccaagcagagctgggaggattcgatacgatacgagctcggtcccaggtcctccgtgcaagttccgggagtacatcgacgctaagtaaagtgctggactaggtgcatcccgtgcagaggcccaccttgacaacactggacagtatactcttcgagcgccctgtccctttgctctgtagtggcgctactccacggggtcctactcactgaactatcgctcgggtcttcgtgtttccggagctggtcaccccgcatcggcagttcgaatggttcggggtgaactgcttgtacaacgtgaagcggcatgatgaggcggctctacgtttcgaatgacttatggcaaattactccctagcgagaccccgcggtcgggaagactctttgaccgcaagcgtggtcaggccgatctgctcgattcgactacgtccgggaagcgaaactttgcttgtgcaggcaatttctcttccggtttcccggaactgggccccaagtcttggaacgtatcgcaacttgtggcgtgcccgggtacggccgtccatgggtgggctgcctcggtcaagagggcgctgttcgcgccgtcataacgtgggcacctaattgtgcctggtcgggaggcgccgtgtgctgtttgcattggccctggcgcttggaacatgtcggtgcttgagacgcggtccggcttgagttaggaacctagggggtgggggaccgccttcgggtgggttggttggcgccacaggtacgtggcgtggaattctggactcattggggccttccggaggcattgggcagatcccaggttccggggggggaggacatttgaatggcgcagattga

SEQ ID NO: 486798 - DNA, 504 bp, Homo sapiens
cgagaaggaggtaaggaccaagcaacagtaagtagaccacagccaaggccgggtagataacattggccttttgagtgggaaattaggctataacaggagagtggctaagatagggcacagagctccggcatctctcgccggcattcccaaatgctatctcacatgagcaggcacagggagcaagacgtgcacgaccacgggcacaggcggtccgctaaaccacagacttctcagcgctcgccagtgcttcggcttcggtgtccactccagatcccagatggcacttagtggtcaaatcttttcagtccatttctaacctatattagctccggtgtcttgcctggtcttgcagggccttgacacttacaaaaggggggggtcaggtacttggcacactggtctaaccaggtcggtccagcgggggtaacctcaggatgcaatggaggttatgcccatctaatcacagggaccagagagacttttaagcaccactcttcaagaatt

SEQ ID NO: 486799 - DNA, 202 bp, Homo sapiens
tcatatccctctagaggagctgttctgtactcgatagacccgataactcgacactcttggtcagctatataccgacatcttcagccaatcctgatgccggctaccaccagtaagcgcaagtacccacgtacacaggacgtataggtctacctgtggggttaccctgggttaggtctacctggggggtacggacctcgcattt

SEQ ID NO: 486800 - DNA, 325 bp, Homo sapiens
  misc_feature (128)..(128): n is a, c, g, or t
  misc_feature (200)..(200): n is a, c, g, or t
  misc_feature (218)..(218): n is a, c, g, or t
  misc_feature (280)..(280): n is a, c, g, or t
  misc_feature (302)..(302): n is a, c, g, or t
  misc_feature (314)..(314): n is a, c, g, or t
caagagggtagcccactcccctgaagagtaagtcccaggcctggcagcattcaccacaaactgactggagagtccttgggccttagctgaacatcagcagtagcctggcggcactctccatgggcctntggtagtagtggccatgagcagcggctcctccgcatgtggaaagcagatggaagaggaggaaggactttttnttgtggcttgaaggccancttagctgcaggagtttagagcataaggtagacttctaaggtttttaactccagctcttagntcccagacagcatcttttgganccgacccagggnctgggggggga

SEQ ID NO: 486801 - DNA, 133 bp, Homo sapiens
gtgtgcacctgtagttgcagctacttagggaggctgaggtgggaggattgattgcaacttttaggtttaggctttagttagcttttatttttccaattcccttccagcttggttacaaaaacaagcccaccct

SEQ ID NO: 486802 - DNA, 783 bp, Homo sapiens
  misc_feature (30)..(30): n is a, c, g, or t
  misc_feature (521)..(521): n is a, c, g, or t
  misc_feature (776)..(776): n is a, c, g, or t
cggacgcgtggggtttttataggtggtttntattcacagaaagttacaactaatccaaaccttaggatcatcagtctaaacacaaacttgtactacggcccaaatataatgacactgaacaagactgacccagccaaccagtttgaatggctagaaagtacattgaacaactctcagcagaataaggagaaggtagatcccatagaccaaaaccatctgggaataaacggaaggcaaaatttgtatgtttattaaactcggggtagactccagtatcaataaaagtattataatttgaagattttttttgcataaacactttacaactcatggattttctttctttttttttttttttaaatttcgagatggagtcttactctgttgcccaggctggagtgcaatggcgtggtctcggctcactgcaacctctacctcctaggctgaagcgattctcctgcctctgcctccccagttgctgggattacaggcacccaccaccacgcctggctaatttttgnatttttagcagagacggggttttaccatgttggccaggttggtcttgaactactgacctaggtgatccacccacctcggccttccaaagtgctgggattacaggtgtgagccactatgcctggccaactcattttagttttaaatttttttttttttcagagacaggggtctcactctgttgcccaggctagagtgcagtggtgtgatcatggctcactgcagcttcagcctcctgggctcaagtgattctcccncctcaaa

SEQ ID NO: 486803 - DNA, 439 bp, Homo sapiens
gtctatagaatatccgcggcgatgtggtctgtgcacggactgacctcgaactcctgcgctcaagcgatcctgctgcttcagcctggtgtgcagctgggattacagtcacctgccaccgtacccggctaattcttgtatttttagcgcagacgggatttcgctatgttgaccaggctgatctctaactcctgacctcaggcaggtgatctgcccgcctcagcctcccaatgtgttgggattacagggtaagccaccgcgcccggcattaaacatttattgagtacctgtcatgagcctatatggaaaaactttgttgctttgctgtcacaccacagcagtagtcagcacagaagacttctgtgaccaaagcatgcaagcaagcagttctgcagcgaccactgtctggatgctctctaattaaattacgacctgtctactt

SEQ ID NO: 486804 - DNA, 709 bp, Homo sapiens
gagagagagagagagagagagagagagagagagagagagagagagagcagagagacttcatagaccaatacactgacagagagtcagctcgcgtgtggcatctgtctatgggagacacccgtatccgcaccgtcgcctacagtgcatggctgctcgggctgctggggcggcgcgggtgccggcgggtgctgggcgtggcctgtgacactggggtgggctccattgtggctgtggaagacgtcttgggtgtgacggctgtggatggcggtggcctgatgctgcagtatgcgcttggggtgctctggaaccgggggcacggggggcgcgtgcgctgggggcggggggggggggcggctgcatggcgtctgggcacgatgtggcccggtcatgagatgggggctttgatgctggggtctgccggtggagcggggtgggtcacttgcggggcgggagaggggggcggggtgagcgcgggctgtggctgggggacattggcagcgtagtccgtgcgggggggctgctgggcggtggtcgtgggacctgcgagcgcgtccgtcgtgcagggtgggggcctgcgggaaggagatgtcggtaggagtgctggccggacggcctgggtgcgggcggatggtgagcaggcgggcccgcgtggtggccctggggtcgcgggtcgacggtgcgggtcctggccgggtgggtgtcggggtgg

SEQ ID NO: 486805 - DNA, 91 bp, Homo sapiens
taatcccagctactttggaggatgaggcaggagaattgcttgaactgagaggaggttcataaaataaaaataaaggctgtgtttgtatcca

SEQ ID NO: 486806 - DNA, 996 bp, Homo sapiens
agccagcccagactgggaagaagtatctctaaaaagcctatactcccaatttatgggatggcaatgccctgcatccatccacgcatgtattcattcttctttgcaaatgtagagtgatgacagacatgaggagagaaggtatgctactcaacgaatgccatattacatccacacatattttgtgtgcatagcctaatgcgcccacagtccataccacccaagttacttcatttctcctatgacaaagtagggtgacgatgaacatcttctacatctgttgacttacataagtccacactttttatacagttgttagtaccaattgttactacaatacacagtgtattgaccccactgcgacgcatatcacgtcacagaaattgcgatgtgacttcactggtcgccacgatcgcgacagtttcacttagtttcatactaccgtcacttttgtggcgcttgaaaaagttgtggagagcaactcattgctagtctctgtgacaaccacaacatcactcactcatgtgttccgatcctctgccatggttggttcgctacgagcgagtatcattggcacacacagcattgtggatgcggacgctacttccaacagttgcgcctacttaccggcgtgggacagagaagtgacaagagcccttggcgacactgaacttcttgaaccttcagtaccccaaactctcattctcatccgggcatatcctgggtacatcttggcacggacatgacagcagccaggcatggcaaacatgtcccgtggaaacggcaggccccgcttggggcatacacccggtaatccctggtgcacgcatcacgggtgaatgtactccagacataccccggctgcctcggtcccatacccgtgtcccatctagcagcgaaggcctcccaaacggcaactgtgacccccagtggtcccaactacaaactacgcggccacactatgaaggcccacgtgatcagccctagcacaccccgccc

SEQ ID NO: 486807 - DNA, 877 bp, Homo sapiens
aggtacaaacgcttctcacagtcgcatgataatcctctctcagggatcttcaaagcatctactcccgagctaatagcttgttagatcgactgctatgccacgccctcgtataagcaactacgcactgtatccctcacactattatccttacttgacgtagaaattcatcttgatgctgacgtattaaccatcaattactctcatgaatcgaaaaataatctaattctcgctagtctacaggtattcaaaatacttactctacaagctccatatactcccatctacgatttttattcaacaatgactaatgaggctacatcattccactcacataaaccaatgataataaatcctcgattcactacgtataaaaatatcctctagtgttcatacaccttattcctgatatcatcctccgattccttcgagaccggacttcattgcctggattcactccatatataacaacggattttctatatgcaaggaggtgtcctacaacaactaggttcttgctgacgtacataaaaaatatttgggtggtcagagctcgatagttcacaaactttctcaggaggcctgagggtgcccagaaatcagcttcgagacctggacccaagctctgagtctgtaacaacataaaaaaagaaccccagtctcttaaccacaaactcctgtggacagaaaacggatgcccgggacagcgatcctaatcgcagctcacaccgcacgggtcactggacctcattgttaaccccacgccagattaatcagtacttatggaccgactatgcagcctactcacagactcaggtctgtaacagcacaacaatgacgccgtctaatcgcacaacttgacatcacaggcaacacaaaa

SEQ ID NO: 486808 - DNA, 366 bp, Homo sapiens
aatgtgctcctcatgacaccttgctacacagccaactttgtggcgcgtgaggcgctgcagcgccaggtcctcgatgacggctgctacatctggagcctgggcattctgctgtacatcatgctggcaggatttactccatttgccaacggtcccagtgacacaccagaggaaatcctaacgcggatcggcagtgggacgtttaccctcagtgggggttattggcacacactttctgcgaaagccaaggacctggtgtccaagatgctacacgtggatccccaccagcgcctcacagctaaggcggttctgcagcatccatgggtcacccagaaagagagcttcccaaaggcagctgtcccacctgcc

SEQ ID NO: 486809 - DNA, 389 bp, Homo sapiens
gatctcatggggataagtggcggaaggggaaaatatagtactgctactggacacgagattcttttggggtgaggaaaatgttctaaaattatatattgtggtgccaggcgcagtggctcatgcctgtaatcccagcagttgggaaggctgaggcaggtggatcgcttgaggtcaggagttctagaccagcctggctaacatggtgaaatcccgtctgtactgaaaatacaaaattagctgggcatgatggcacacgcctgtaatcccagctatttgggggggtgaggcaggagaatcacttgaacctgggagacggaggttgcaggcggagtggagcagagatcgcaccactgcactccagcctgatcaacagagggagactccatctc

SEQ ID NO: 486810 - DNA, 245 bp, Homo sapiens
ccctttttttttcccttttgggcccaggggcagggtttgccccaaaagtttttccctttccccccaacagggaaattgggcccccccgggggggaaataacccccctttgggaaaggggttggttggccccaaccccccttttgggaaaaaggccggggggggccaaaaaaccggggcacccccccggggtggtcccccaacccccaaaccccgtttaaaaaggggctttggcccttttttttta

SEQ ID NO: 486811 - DNA, 125 bp, Homo sapiens
ctctagacggatccccttatcacttggtcctggtgatacggtattggccgccgaaaccttgggagtactctctcggggagtcgggcttctcggtctggcccggaagggagcccaaggggtaccgg

SEQ ID NO: 486812 - DNA, 305 bp, Homo sapiens
ccccccccttttccccaattggggggtggggggttccgggggggggtttttttaaccaggctttttttttttgccccccggtttccctggggccccccccccccttttttttcccccctttaaaacccccggggccgttcccccccccggctttttccttgggcccggggggggtttccctttttccccggggaccccttttgccctttgggccttttttggggccctttttaaccagttttgtccaaaaaaccggggggggccgggccggggttttccgggtttttttccccccccgggcccca

SEQ ID NO: 486813 - DNA, 1716 bp, Homo sapiens
taaaaaaactgatgttaatttcccatcaaccattatttccatggctgcttaaaaagccatatgtgcaagaaacagctttaagaaccagatcaggtgggtgtgctctccttacccatttcaggtggccgtgagcaggtgggagcgtgcaaaccagtctttccggtggggaggcgtgagcgcctccagttctttcgagaatgagggaaatgtgcggtgacatatgaggcgacgagagagggcacacctgtgtgtacaccccttctcgagacacacgagtctctgtgcaaacactctcgagggcgtgaagaataccagagagtgcaactcctcgaggagagactgggagagacgagctcacagtatatcacaccctgtgaacatatctctcctcactgtgtgtgtgtcacactagtgcgctctctctctctgagacgagaggcacgaccactgtgtcgactctatctcttattatctcacacactctctctatctcatgagagagatactatctgtgtgtaaagaaagaggtcacagagaaactcaagaggacgatgtagatctctctctcacatgtgagccgtgtgtattatcacagggggagatacagctgtgtgtgtgccccaccagcctattgtgtcgcgcagcagacacaccttttctcacacgagagagagcacacgtacatatcaccacacacacacactctcacacacacgcccacactgttgagggtgtgaagaggaccctccccgacattgtgatcttgtggtgttgtgccaccattgttgtgcgacaattgttgtggcagcaaacaaagttgcgttcttctaccccaacattattactgtgccgcacaacactatggcggtaacaaaaaatcttctggtggggtgatatacataacaacaccaacggcgtgcgccccacatgtcgtggtagtacgccgcgcatcacggcggggctataaaccccccatactacctacatgcgtactgtgctcacacccctgcgtcccgacgatgaaaacagaacgcggccgctggagccgatgactgacatacaaagagcaccccctgtggagaggagtaaatccaaggacaacaaaccacaacacacaagacaaccacggcccaggactgagacactcacccgggaggagacacgagggactaaggcacccgtggagaaaaaataccgtggggatcaacagcagagcaaacggcggctgccacccacgcgaacgtactcgaaacacagcggagcaccaacgaccaacaaatgagtcgggaacaagtgcagcgccacccaccaacggagcggcagtgacaggcgaacgacaacaccagatcatatcaacacaggacaacaacagccgcccccttacagtgtggcaccacaagcacaactcaccccccgagcagacagaaggacacacatatatcaccacaagatggagacaactcatccccagaacaagggcggataacatcacacagccagtgcgaaacacacaaaacaagtgaggactcaacaccacagtagaccaatgacacatacacagactgctacctccaccaaggcggcccactatctcgagaaggccgcacatcctacggtaccacacaatcagacgagcctgccagcacgcagctcagatcagccccaacaaacacaagagcaagacaagccgcacccccacatcagtacaagactaac

SEQ ID NO: 486814 - DNA, 473 bp, Homo sapiens
  misc_feature (103)..(103): n is a, c, g, or t
ggagagccctggtttgaagaacataagaatcgataaaggatatggcgaaggccaccctagctgctgaaggagcgccgtagtgaagaatttctggtacctgtcnagcatctcacaagccactacatcttgcctgactctcatgggggcacctcgctatagtagagtatacgattgcgtacaaggtctcagaatggtgctaagatcgactggatccttctgagaacggcaatgtatcctgattagctcttgctcaagagagacagtggaacgataactatggagggaaagttgggaaagagagattaacgcagttcgtaggagaaatcgcaactggtggtcctgtaaactgaagctgtccctcctgcgcgaaaggaaagtgctgatattgcacatactgtggtggtatattgtgacaagaccctgagagcggccactgtagaaagagagagacattatcgcttatgcttgcaagg

SEQ ID NO: 486815 - DNA, 473 bp, Homo sapiens
aactatacaattgagctcggtcctccatggagatcgtagataacgtatgctcatactaaatgtctgtcgtctctgtaatagaattctagtccgtacttcattttttactcccttcttatgacccaagattgctttgacaagaatgcatgacttagtgctgactcatcactcaagataccactttctttatggaacctctaccaaattttgaggggagatcgtggcttttgccctttttaactttttttccgtcaaaatcaatgacactggcccattatctgtccagcagaacccgttgtgaaatagtacaaggtgaacaggccttcactgattacaggcgagtgttacagtagcctagccataaggaaggggagttacatcatagtacaaaatacagtataaaagcgttatttaacattccagactgaagattactctgatgccttcaaacagtcgtttggatgttagccact

SEQ ID NO: 486816 - DNA, 151 bp, Homo sapiens
ggcatccaaaaaatgttcccttggggggtgggggtgccagaaagtgggaacagggaggtgggaggtggattttgtttatttttttagcccctttccaggggggggaatttttttttaaaatgggtcataaaaaaagttgtttttgaaaaaa

SEQ ID NO: 486817 - DNA, 703 bp, Homo sapiens
  misc_feature (17)..(17): n is a, c, g, or t
  misc_feature (25)..(25): n is a, c, g, or t
  misc_feature (28)..(28): n is a, c, g, or t
  misc_feature (53)..(53): n is a, c, g, or t
  misc_feature (58)..(58): n is a, c, g, or t
gggctaattttagtggngtacaacnatnatgaaaaccacgctggtgggttcanagaanagcaggtgtcgccgataccggatgtggacattgaagctgctaggacaataagcaggagagatgtcataagaccatgcaaaacttagtatgcatatagtatcggtatgtcggggggcagctcattaaaaaatatgtgaatgaatctgtgaagctgcagtagcgagaagagcgacaggtcttcttaatgaaccgctacctgtgacagtaattgtacactgtatagtttgttaagaatttttaattaaatcccatgttgtaaagctaacttttaacaattataatggaactatatgtgtttccattttttaaagtaaacaagaatattccttgtttagagactggacttgaggttaaaactctccagtctcttaaggttatgtattaaaaagaaaatttgtccatgttaggagttatttcacagattcctgtgcttgaaaagcataggatactaatcctttaaaaaagtgtaaatggagaaaagttatatttatgaaggttattggtgtatttagtattggaaaagttggtttcccgagcatttcagaatgtcgaagcaccactgtcttttattagtatatacggctttgcaaaagtttgtgattgttacgtgatggtattaaggttaagtttccagagcattcagga

SEQ ID NO: 486818 - DNA, 2053 bp, Homo sapiens
  misc_feature (1941)..(1941): n is a, c, g, or t
gcacacgtgggtagccagagcccggccgagagccctggccgggagcccgcgggggccccgtccgagtgtcaccggcaccccatgggcatgacgaccatgaccaggatactggcttttattttgacctttcagtggtagtaccttgccactggcgtagtcgaagggagcccaatatatatttagcgagtccctgtgcgagctaacagagcgctactgtaccgtcaggaaacagccgtgcgtcttgcatgtgcgaggatcgtcggcacagctctgcgacttaccgagggaggagagagcactcggccgacctaggagcaacatacacgtatgaaactgcctatttgcaatctctaaagaggggtaggaaaacatcactgcgacgacacgcggagcgcgcattcgagcaccattgctgagttgccctccacacaacgcgacaccgagtcattactctcgagaccccggcctaacatttggaagagacgagaacatactaaagtgaccagagaccaaagcgcagggcgcaattcaccagcaactggtaaggcctacagatggcaaaacacagacaggacaacacacaccactacagagccggaatcacgagcagcaaccccaggcgatgtagaccaggacacacttgggagacagaccagcgagacagcccacgccgctctttgtacggcgccgtccactaacccaggaccgcccgtgctggcagcatcaacactcgaatagtcgcggcacacacattccgcaccccgtcccagggaccgacggactaggagagcagaaccagacagagacgaggccagcaagacagagcaaggagacccaagatcgtggacccaccagcacacacacggagcaggcagcccaccgacgcgcagaaggaagacacgactccacggaaaataggcacgagaacagcgcagcggcacacgcacacatttagagactcgtacggccgctcatagccacaccgacgaaagcagagtgagcattagagtatacaaaaacataaggcagcgtacctattatgtagacggcacccccaccattttttgggcgaccaacgtagagcaactcatgacgctcgctactgtagcagtcacaaatttcagactcagctaccaccaaactgtcgctgtatacgtatctacgtagacaaattaccgtcacgacacctactcatgaggataagtatacaacagatttcaccacactagacaagataatgaagttatgcatgactgtctcccaagagtttgctctatcagtgttggtagtagcagctgtctatccaggcgacatgtctcttagcacacacagctacagatttgtacgcacgatgactcaaacagtgcaggctagcacgacccatgagacccacgacagagatagcaatccaatttttcagagcagcaattgttgcactacgtgtactttggtgacaccagacagtattaatactaacgtaacagagcggtgtgagccaaatatctttgcactgcgcacataggagaacgatctcacaggagccgcatgggaagcgcccacttctcaacgacgacaagaaactggctctcccttaggacgaataattacagctaggcggcgcaaaagcagatcgtagcagcgccgcacgtatagattacgacatccggaacaacacacaaccactgcacaacatcacaacctctagaaggatcttttgaggctgagcatagtcgatccacggtaggaaactatgacggcatgacgataattcaagcaacagattttgacgacttctgcgccacagcagaaggatgatatcgaggtatggcacgtataacagccaagtgacactccacacgacacatgtctaccacacgagcataatagcaagacaagcgtcaagaggttaaagtgtatcaaaggatgcagaccagcagctgnctgacagctaatacagcaaggatgtacgtcgagaagagcaatcatcccacaagccactgaatgattcgtctctcttaacggtcaatgcatactacaccgcgtgtcctacgcg

SEQ ID NO: 486819 - DNA, 3107 bp, Homo sapiens
gatgggagtgacgggggaaatgttaccgctctccttgaagggggtttaaaagagagagagaaccccttttgggggaaaagagttttgaggccaaaatgtgtttcgttaacgagggagaagaaaggctggcaaatttggggtgaaaaaagggggttggggctcacaacttgggacctttcatgagggatgccaaaacgtaaaggtctaagttgataaaacaaattggcacattttttgccaaatgattctggagatcctcaggatttgtgcaactctcaatattttttctggagcgctccttagaagcgtatcgtactgttgaagagctttacaaacgtccagatgaagaatataatgaaggcacaagtagtgttcaaaatcgtgttcgttttgaattgcttccaattttgaaaaagggattgttttttgaccctgaattttggaacttcgtaatgattaagaaaaactgtgtagcattattgagtgataaatcagcagttagatttctaaatgaaagcacactggaaaataatgcaggtaatctaaaaaggacggaggaacagcaaggtttggatgaagggtttgactctcttacagatcagagcactggagagactgatcctgatgatgtatctggagtgcagcctaaaggtcatattaatacgaagaaaaatcttacagctctcaatacttccaaagtagatcacaatgtcccaaggcatcgttgtatgttatgtaacaaggaatttttaggtggtcacattgtaaggcatgcccaggctcatcagaaaaaaggcagttttgcatgtgtaatatgtggtaggaaatttagaaacagaggacttatgcagaagcatttgaagaatcatgttaagaagatacagaggcagcaaattgctgcagctcaacaggatgatcaggaagtcactgctttggaagaaataaattgttctagttcttccatttcatttgaaaatgggaattctgatagtaaggatttggaagtggagacacttactgcttctagtgaaggaaacaaagaagtcatccctgagcatgtggctgaattcattgaaattcccataagtgtaccagaagatgttattgaaaatgttattgaaaatggcagtcctaataattctttaaataatgttttcaagcctttaactgaatgtggggatgattatgaggaggaagaggatgaagaaggtgattatgaagaagatgattatgacctgaatcaagaaacttcagtaattcataaaatcaatggaactgtgtgccatccaaaagacatatatgccacagatcaagaaggaaactttaagtgtcctgctcttggttgtgtccggatatttaaaagaattgggtttctaaataaacatgcaatgaccgtacatccaaccgatttaaatgtgcgacaaacagtaatgaagtggagcaaaggaaaatgcaaattttgtcaaaggcaatttgaagattctcaacattttatagaccaacttaatagacatagctatccaaatgtgtatttttgtttgcattttaattgcaacgagtcgtttaagctgccgttccagcttgcccagcacacaaaaagtcacaggacatttcaggctcagtgtagttttccagaatgccatgagctttttgaagatcttcctctgctgtatgaacatgaagctcaacactatttaagtaaaacaccagagtcatctgcacaaccaagtgaaacaattctttgggatgttcagacagactcaaatcctaatcaggaaaaagactcatctagtaatgagaaacaaactattagtctgccagtttctactagcaaatcaaggaaagagtctacagaaccaaggacatgtatagaaagtatggaaaagaaaacagacagtttagttcagaatggaaacgaacgttctgatgacactgtttcaaatataagcttgatagaccaaaagatgcctgacatagagccaaattctgaaaataattgtagtagtagtgatatagtcaatggacacagtgaaatagagcaaacacctttagtttcatcagatcctgctttgaaaattgatacaaacagaatcaggacagaaaatggttccattttgcccagtgttgtaccacaagaacacaacaccttgccagtatctcaggcaccttccaaaccaaatctgacaagtgaacatacttcatatggcttaattttaacaaaaccatacgtcagaccattgcctcccagttaccttgatgaacggtatcttagtatgccaaaacgcagaaaatttctgactgatagagtagatgcctgttctgatcaagataacgtgtataaaaaatcagtgaaaagattaagatgtggcaaatgcctgaccacctactgtaatgcagaagcacttgaggctcatcttgcacaaaagaaatgtcagacactctttggatttgattcagatgatgaaagtgcctgatgaaaatggttcagaaagatctgtcaatcaagcagtagtgtgaaaaaagcactataagaaaatgcatcatcagtttgctatttccctgatggccttaattttagagtggtcttggattactaaagataaagacaaagcacattttctagaatgaactcacagagatgtgctggcttagactccaaaaggattataaaactcccaaagtaccagttttccagaaaaccacattttacagtttatgatgattaatagcagcagcatgttcagtttcgcttatatgagaaacatgtttaggcaactagtcagaaaaccagctatggccttacagaaagggaaaagtttaacccattattaaaaagtgtgtgtgggaggggggctggtttacaatattaaaccatttaaagtattttattctacaaatggggtttgttttcttgtcatgcataatcagattatgtcccctcccttctggttaaacatggtttaaggaaccgctgctgtttggtttgtgattgatttagaaacttatacattaacttaccacagtgctatcaattaaagattgtaacaggtttccagatgattaattaggtcaaagttcaatgaatggcacgccagcattgaaaatta

SEQ ID NO: 486820 - DNA, 5493 bp, Homo sapiens
  misc_feature (3680)..(3680): n is a, c, g, or t
  misc_feature (4640)..(4640): n is a, c, g, or t
gatgggagtgacgggggaaatgttaccgctctccttgaagggggtttaaaagagagagagaaccccttttgggggaaaagagttttgaggccaaaatgtgtttcgttaacgagggagaagaaaggctggcaaatttggggtgaaaaaagggggttggggctcacaacttgggacctttcatgagggatgccaaaacgtaaaggtctaagttgataaaacaaattggcacattttttgccaaatgattctggagatcctcaggatttgtgcaactctcaatattttttctggagcgctccttagaagcgtatcgtactgttgaagagctttacaaacgtccagatgaagaatataatgaaggcacaagtagtgttcaaaatcgtgttcgttttgaattgcttccaattttgaaaaagggattgttttttgaccctgaattttggaacttcgtaatgattaagaaaaactgtgtagcattattgagtgataaatcagcagttagatttctaaatgaaagcacactggaaaataatgcaggtaatctaaaaaggacggaggaacagcaaggtttggatgaagggtttgactctcttacagatcagagcactggagagactgatcctgatgatgtatctggagtgcagcctaaaggtcatattaatacgaagaaaaatcttacagctctcaatacttccaaagtagatcacaatgtcccaaggcatcgttgtatgttatgtaacaaggaatttttaggtggtcacattgtaaggcatgcccaggctcatcagaaaaaaggcagttttgcatgtgtaatatgtggtaggaaatttagaaacagaggacttatgcagaagcatttgaagaatcatgttaagaagatacagaggcagcaaattgctgcagctcaacaggatgatcaggaagtcactgctttggaagaaataaattgttctagttcttccatttcatttgaaaatgggaattctgatagtaaggatttggaagtggagacacttactgcttctagtgaaggaaacaaagaagtcatccctgagcatgtggctgaattcattgaaattcccataagtgtaccagaagatgttattgaaaatgttattgaaaatggcagtcctaataattctttaaataatgttttcaagcctttaactgaatgtggggatgattatgaggaggaagaggatgaagaaggtgattatgaagaagatgattatgacctgaatcaagaaacttcagtaattcataaaatcaatggaactgtgtgccatccaaaagacatatatgccacagatcaagaaggaaactttaagtgtcctgctcttggttgtgtccggatatttaaaagaattgggtttctaaataaacatgcaatgaccgtacatccaaccgatttaaatgtgcgacaaacagtaatgaagtggagcaaaggaaaatgcaaattttgtcaaaggcaatttgaagattctcaacattttatagaccaacttaatagacatagctatccaaatgtgtatttttgtttgcattttaattgcaacgagtcgtttaagctgccgttccagcttgcccagcacacaaaaagtcacaggacatttcaggctcagtgtagttttccagaatgccatgagctttttgaagatcttcctctgctgtatgaacatgaagctcaacactatttaagtaaaacaccagagtcatctgcacaaccaagtgaaacaattctttgggatgttcagacagactcaaatcctaatcaggaaaaagactcatctagtaatgagaaacaaactattagtctgccagtttctactagcaaatcaaggaaagagtctacagaaccaaggacatgtatagaaagtatggaaaagaaaacagacagtttagttcagaatggaaacgaacgttctgatgacactgtttcaaatataagcttgatagaccaaaagatgcctgacatagagccaaattctgaaaataattgtagtagtagtgatatagtcaatggacacagtgaaatagagcaaacacctttagtttcatcagatcctgctttgaaaattgatacaaacagaatcaggacagaaaatggttccattttgcccagtgttgtaccacaagaacacaacaccttgccagtatctcaggcaccttccaaaccaaatctgacaagtgaacatacttcatatggcttaattttaacaaaaccatacgtcagaccattgcctcccagttaccttgatgaacggtatcttagtatgccaaaacgcagaaaatttctgactgatagagtagatgcctgttctgatcaagataacgtgtataaaaaatcagtgaaaagattaagatgtggcaaatgcctgaccacctactgtaatgcagaagcacttgaggctcatcttgcacaaaagaaatgtcagacactctttggatttgattcagatgatgaaagtgcctgatgaaaatggttcagaaagatctgtcaatcaagcagtagtgtgaaaaaagcactataagaaaatgcatcatcagtttgctatttccctgatggccttaattttagagtggtcttggattactaaagataaagacaaagcacattttctagaatgaactcacagagatgtgctggcttagactccaaaaggattataaaactcccaaagtaccagttttccagaaaaccacattttacagtttatgatgattaatagcagcagcatgttcagtttcgcttatatgagaaacatgtttaggcaactagtcagaaaaccagctatggccttacagaaagggaaaagtttaacccattattaaaaagtgtgtgtgggaggggggctggtttacaatattaaaccatttaaagtattttattctacaaatggggtttgttttcttgtcatgcataatcagattatgtcccctcccttctggttaaacatggtttaaggaaccgctgctgtttggtttgtgattgatttagaaacttatacattaacttaccacagtgctatcaattaaagattgtaacaggtttccagatgattaattaggtcaaagttcaatgaatggcacgccagcattgaaaattaaaaaacaaaacaaaaaaaaaaccacagtgctttgctaataagctcttgatagaacctcccactaaccacttttgtggtacaaattagttaacatttaaagggcagcagtgtcaataaaatagaaaaaaaccgatcagtactctggggagagatgaaaggaatctaagactttacaggctttgtagttgaaggaaaacactgaattgcaaattattcaatgtgaataatggtaaaagcacactgggatacttctgtttgtgtatatgttgggacattgcttgatgattcatagtaaggtcctttagacattaatgtgagttatctaagtacagtcctattaaaataactggctcaaaaaatcagctaagaatcaggttgagaaatcattcattttattctattaggagaggtaattccaaaataagccatactattcctgtttttttaattcattagtgatgactctggtctgaacaggtaatttttatatgtaaaaggaagtatttacacaaaacatttgcacaagaacacagtaagagatacattcaagcatgttttccttagtgatgttantttcctaagaagattttaacttaataaagtgttaaaacaataaatatttttaaaaataccctctcagatgttttccatttgtccattattgaaaggaagatgcttaaagacttccttttactaatagtgtgtaaatctaaaacagggattaaaataacaaaaaggcagtgtttcaaaacagatctcctaatgtcccaatgtcaaatattccagttattctaaataataaaatctttgttcaaggcagataatctcatcagaccctattagagcttcttgaatgaggctattacggaagtggggaatttcttccaggtagcatccatattttattaaattaggatttccagatcatgatagatcagatgatttttttttaatttcccggttttattggtttatcatcagcattcactgctatgcaatgatggtcataagtccattccaaatttaaatttgtttctgttatgtagcctacattaggctgtggaatttacatttaggtaactaaacacagctcataattaaaatcttttctttaaggtcagctaaaaaaaatgtttcctgtatttcttgatactaaaaatgtaatgatttttattttagttcattctaaaagtatgtcttgtaataaaaagtctgtttggaaactggttcatttggacagtgaagtcttttgaaatatttctgctttgtacattttccagaagtttaatattttatcacattttccacaagttgtaacaattgatataaatccatgcccacaaagtattccattttcattacttttactgttcatgccaagatgtttcaaatatattccatttgtaatctgtctttaacttgaggtttatttctacttttgtgttgctaaaattatttctgcaagactgagatcaaactggtttatatataactaaatcaaggaatgttttataaaattctatttgaccacantgtcttaacctcggtttatatacttctcaaatagctattgaaagaatgtgttcattttattacatctgcttttaaaacataaacctacatcattttgcttttatagggtgcataaacttccaacagttctaatttgagcgcttcagaagaaaaggaagcttgcttcttattcctcagattcttctttttttctgttttgaggatgtattcatcctacatggaccaagtttcaaatctttgtttttaaataaaaatttccttcaaaaaattaaatgttaaatttctgctgtgtgtcagtaaggtgaagaaaatagcaaatctgaatttttgctgctcagatattatggaggaggtaaaaaggggaatctccgtggacaaggacactggtactttgggctttagccatattcatttttttgaaaccaccaattatataatacttaaataatttatatcattgaacttgtgattcttttcaaatcacactgaaggttcagccgtactcctttcatgtttggtttaatactgttgtatggatgaaaaacctaaaagggatgatagtgtttattttttaatttatttggtactgtaaaacaccttttcagaatgagtaaatgctgcatatgcattttggagttgttaatatgtgaaagatattacagattcagcaagaaaggaaatttgtgcttccttgttgaatgttaaattattttactttgcattttataagagtacaaattaaaactgagccattgaactgcaataaatcaacaatagtgtctcatttcaagaaattttttgtactgtacatagatttgttcaataaaacgtccttgttggtaaaaaaaaaaaa

SEQ ID NO: 486821 - DNA, 274 bp, Homo sapiens
gccctgtgtagcacacctaggtcagttttgcagtgtgtaagcatttaccaagatagttgtaggtaagaagggcagatttattagagaaattgtgaaaatatgttgcagtgggcagctcagcagagaaggggctacctgcaaaggaggcaagggctggaggaaagttttatagggtcctgctgaagggtgctacgtgtggaatgaggtcattgtgcccgcaggttgtttgtgattagctgtctctaacaattgttcatacaataattgttcatta

SEQ ID NO: 486822 - DNA, 1041 bp, Homo sapiens
  misc_feature (252)..(252): n is a, c, g, or t
  misc_feature (490)..(490): n is a, c, g, or t
  misc_feature (552)..(552): n is a, c, g, or t
  misc_feature (704)..(704): n is a, c, g, or t
ggcgccgcgcggcggaggcggcggcggaggcggcgcgggcgagcccgggggcgccgagcgggcggccgggacaagccgccggcgcgggctccgggcgtgcgacgaggagttcgcttgcccagagctggaggcgctgttccgcggctacacgctgcggctggagcaggcggccacgctgaaggcgctggccgttctcagcctgctggcgggcgcgctggcgctggccgagctgctgggcgcgccggggcccgngcccggcctggccaagggctcacacccggtgcactgcgtcctcttcctggcgctgctcgtggtaaccaacgtccggtccctgcaggtgccccagctgcagcaggtcggccagctggcgctgctcttcagcctcaccttcgcgctgctctgctgtcctttcgcgctgggcggcccgcccggggttccgccggggccgctggggggccagcgaccgccgaacaaggggtttggcagctcnttttggtcaccttcgtgtcctatgccttgctgcccgtgcgcagcctgctggccataggcttngggctcgtggtggctgcgtcgcacttgctggtcacagccaccttggtccccgccaagcgcccacgtctctggaggacgctcggtgccaatgccttgctcttcggcggtgtgaccatgtatgggggtcttggtgcggattctgactgagcgtncacagaggaaggggtcattgcaggcccggagctgcattgagggaccgatgaggctggaggatgagaacgagaagcaggagcggcgtcctcatgaggcctcctgcccgggacgtttgcctggggacttacgggggacgtcctgaagcccctggggaggatctccccgcgattttacttccgaggcggcacctgttggagctccggtgggggacacgacggggttacggcggtgggatcccacgtgcgagcccgcagagggtgggaagagctccaggacgatatgcgagagagagtggataataccggcgacaacaaggggcaccaaacatgagggagc

SEQ ID NO: 486823 - DNA, 5439 bp, Homo sapiens
  misc_feature (3680)..(3680): n is a, c, g, or t
  misc_feature (4586)..(4586): n is a, c, g, or t
gatgggagtgacgggggaaatgttaccgctctccttgaagggggtttaaaagagagagagaaccccttttgggggaaaagagttttgaggccaaaatgtgtttcgttaacgagggagaagaaaggctggcaaatttggggtgaaaaaagggggttggggctcacaacttgggacctttcatgagggatgccaaaacgtaaaggtctaagttgataaaacaaattggcacattttttgccaaatgattctggagatcctcaggatttgtgcaactctcaatattttttctggagcgctccttagaagcgtatcgtactgttgaagagctttacaaacgtccagatgaagaatataatgaaggcacaagtagtgttcaaaatcgtgttcgttttgaattgcttccaattttgaaaaagggattgttttttgaccctgaattttggaacttcgtaatgattaagaaaaactgtgtagcattattgagtgataaatcagcagttagatttctaaatgaaagcacactggaaaataatgcaggtaatctaaaaaggacggaggaacagcaaggtttggatgaagggtttgactctcttacagatcagagcactggagagactgatcctgatgatgtatctggagtgcagcctaaaggtcatattaatacgaagaaaaatcttacagctctcaatacttccaaagtagatcacaatgtcccaaggcatcgttgtatgttatgtaacaaggaatttttaggtggtcacattgtaaggcatgcccaggctcatcagaaaaaaggcagttttgcatgtgtaatatgtggtaggaaatttagaaacagaggacttatgcagaagcatttgaagaatcatgttaagaagatacagaggcagcaaattgctgcagctcaacaggatgatcaggaagtcactgctttggaagaaataaattgttctagttcttccatttcatttgaaaatgggaattctgatagtaaggatttggaagtggagacacttactgcttctagtgaaggaaacaaagaagtcatccctgagcatgtggctgaattcattgaaattcccataagtgtaccagaagatgttattgaaaatgttattgaaaatggcagtcctaataattctttaaataatgttttcaagcctttaactgaatgtggggatgattatgaggaggaagaggatgaagaaggtgattatgaagaagatgattatgacctgaatcaagaaacttcagtaattcataaaatcaatggaactgtgtgccatccaaaagacatatatgccacagatcaagaaggaaactttaagtgtcctgctcttggttgtgtccggatatttaaaagaattgggtttctaaataaacatgcaatgaccgtacatccaaccgatttaaatgtgcgacaaacagtaatgaagtggagcaaaggaaaatgcaaattttgtcaaaggcaatttgaagattctcaacattttatagaccaacttaatagacatagctatccaaatgtgtatttttgtttgcattttaattgcaacgagtcgtttaagctgccgttccagcttgcccagcacacaaaaagtcacaggacatttcaggctcagtgtagttttccagaatgccatgagctttttgaagatcttcctctgctgtatgaacatgaagctcaacactatttaagtaaaacaccagagtcatctgcacaaccaagtgaaacaattctttgggatgttcagacagactcaaatcctaatcaggaaaaagactcatctagtaatgagaaacaaactattagtctgccagtttctactagcaaatcaaggaaagagtctacagaaccaaggacatgtatagaaagtatggaaaagaaaacagacagtttagttcagaatggaaacgaacgttctgatgacactgtttcaaatataagcttgatagaccaaaagatgcctgacatagagccaaattctgaaaataattgtagtagtagtgatatagtcaatggacacagtgaaatagagcaaacacctttagtttcatcagatcctgctttgaaaattgatacaaacagaatcaggacagaaaatggttccattttgcccagtgttgtaccacaagaacacaacaccttgccagtatctcaggcaccttccaaaccaaatctgacaagtgaacatacttcatatggcttaattttaacaaaaccatacgtcagaccattgcctcccagttaccttgatgaacggtatcttagtatgccaaaacgcagaaaatttctgactgatagagtagatgcctgttctgatcaagataacgtgtataaaaaatcagtgaaaagattaagatgtggcaaatgcctgaccacctactgtaatgcagaagcacttgaggctcatcttgcacaaaagaaatgtcagacactctttggatttgattcagatgatgaaagtgcctgatgaaaatggttcagaaagatctgtcaatcaagcagtagtgtgaaaaaagcactataagaaaatgcatcatcagtttgctatttccctgatggccttaattttagagtggtcttggattactaaagataaagacaaagcacattttctagaatgaactcacagagatgtgctggcttagactccaaaaggattataaaactcccaaagtaccagttttccagaaaaccacattttacagtttatgatgattaatagcagcagcatgttcagtttcgcttatatgagaaacatgtttaggcaactagtcagaaaaccagctatggccttacagaaagggaaaagtttaacccattattaaaaagtgtgtgtgggaggggggctggtttacaatattaaaccatttaaagtattttattctacaaatggggtttgttttcttgtcatgcataatcagattatgtcccctcccttctggttaaacatggtttaaggaaccgctgctgtttggtttgtgattgatttagaaacttatacattaacttaccacagtgctatcaattaaagattgtaacaggtttccagatgattaattaggtcaaagttcaatgaatggcacgccagcattgaaaattaaaaaacaaaacaaaaaaaaaaccacagtgctttgctaataagctcttgatagaacctcccactaaccacttttgtggtacaaattagttaacatttaaagggcagcagtgtcaataaaatagaaaaaaaccgatcagtactctggggagagatgaaaggaatctaagactttacaggctttgtagttgaaggaaaacactgaattgcaaattattcaatgtgaataatggtaaaagcacactgggatacttctgtttgtgtatatgttgggacattgcttgatgattcatagtaaggtcctttagacattaatgtgagttatctaagtacagtcctattaaaataactggctcaaaaaatcagctaagaatcaggttgagaaatcattcattttattctattaggagaggtaattccaaaataagccatactattcctgtttttttaattcattagtgatgactctggtctgaacaggtaatttttatatgtaaaaggaagtatttacacaaaacatttgcacaagaacacagtaagagatacattcaagcatgttttccttagtgatgttantttcctaagaagattttaacttaataaagtgttaaaacaataaatatttttaaaaataccctctcagatgttttccatttgtccattattgaaaggaagatgcttaaagacttccttttactaatagtgtgtaaatctaaaacagggattaaaataacaaaaaggcagtgtttcaaaacagatctcctaatgtcccaatgtcaaatattccagttattctaaataataaaatctttgttcaaggcagataatctcatcagaccctattagagcttcttgaatgaggctattacggaagtggggaatttcttccaggtagcatccatattttattaaattaggatttccagatcatgatagatcagatgatttttttttaatttcccggttttattggtttatcatcagcattcactgctatgcaatgatggtcataagtccattccaaatttaaatttgtttctgttatgtagcctacattaggctgtggaatttacatttaggtaactaaacacagctcataattaaaatcttttctttaaggtcagctaaaaaaaatgtttcctgtatttcttgatactaaaaatgtaatgatttttattttagttcattctaaaagtatgtcttgtaatactgctttgtacattttccagaagtttaatattttatcacattttccacaagttgtaacaattgatataaatccatgcccacaaagtattccattttcattacttttactgttcatgccaagatgtttcaaatatattccatttgtaatctgtctttaacttgaggtttatttctacttttgtgttgctaaaattatttctgcaagactgagatcaaactggtttatatataactaaatcaaggaatgttttataaaattctatttgaccacantgtcttaacctcggtttatatacttctcaaatagctattgaaagaatgtgttcattttattacatctgcttttaaaacataaacctacatcattttgcttttatagggtgcataaacttccaacagttctaatttgagcgcttcagaagaaaaggaagcttgcttcttattcctcagattcttctttttttctgttttgaggatgtattcatcctacatggaccaagtttcaaatctttgtttttaaataaaaatttccttcaaaaaattaaatgttaaatttctgctgtgtgtcagtaaggtgaagaaaatagcaaatctgaatttttgctgctcagatattatggaggaggtaaaaaggggaatctccgtggacaaggacactggtactttgggctttagccatattcatttttttgaaaccaccaattatataatacttaaataatttatatcattgaacttgtgattcttttcaaatcacactgaaggttcagccgtactcctttcatgtttggtttaatactgttgtatggatgaaaaacctaaaagggatgatagtgtttattttttaatttatttggtactgtaaaacaccttttcagaatgagtaaatgctgcatatgcattttggagttgttaatatgtgaaagatattacagattcagcaagaaaggaaatttgtgcttccttgttgaatgttaaattattttactttgcattttataagagtacaaattaaaactgagccattgaactgcaataaatcaacaatagtgtctcatttcaagaaattttttgtactgtacatagatttgttcaataaaacgtccttgttggtaaaaaaaaaaaa

SEQ ID NO: 486824 - DNA, 923 bp, Homo sapiens
ttttttaggaagaaggacgttttattgaagaaatgtatgtagagtcgaaaaaatttgttgaaatgagacactattgttgatttattgcagttcaatggctcagttttaattgtactcttataaaatgcaaagtaaaataattaacattcaacaaggaagcacaaattccttcttgctgaatctgtaatatcttcacatattaacaactccaaaatgcatatgcagcattactcattctgaaaaggtgttttacagtaccaaataaattaaaaaataaacactatcatcccttttaggtttttcatccatacaacagtattaaaccaaacatgaaaggagtacggctgaaccttcagtgtgatttgaaaagaatcacaagttcaatgatataaattatttaagtattatataattggtggtttcaaaaaaggggaatctccgtggacaaggacactggtactttgggctttagccatattcatttttttgaaaccaccaattatataatacttaaataatttatatcattgaacttgtgattcttttcaaatcacactgaaggttcagccgtactcctttcatgtttggtttaatactgttgtatggatgaaaaacctaaaagggatgatagtgtttattttttaatttatttggtactgtaaaacaccttttcagaatgagtaaatgctgcatatgcattttggagttgttaatatgtgaaagatattacagattcagcaagaaaggaaatttgtgcttccttgttgaatgttaaattattttactttgcattttataagagtacaaattaaaactgagccattgaactgcaataaatcaacaatagtgtctcatttcaagaaattttttgtactgtacatagatttgttcaataaaacgtccttgttggtaaaaaaaaaaaa

SEQ ID NO: 486825 - DNA, 173 bp, Homo sapiens
tggaggaatgaaacagctcccgacgcgccactgtaagagctcactgagaaggtctccggcttcactcctgaagtcaggcaagaccacgaacccgccagaaggaagaaactccggacgtatctgaacatcagaaggaaccaatcccggacacactgtttgcagggaggtgtaga

SEQ ID NO: 486826 - DNA, 120 bp, Homo sapiens
tgagtagaataagacatggatgccactcctggcacccccgtcacacagtacgtggaagtcctagccagagcactcgaagcaagagaaagaaataaaaggcatccagaataggatagagag

SEQ ID NO: 486827 - DNA, 428 bp, Homo sapiens
  misc_feature (21)..(21): n is a, c, g, or t
  misc_feature (54)..(54): n is a, c, g, or t
cgggcattttagtatcaaaanatttaacaaggatataacttcagaaaaaaaganaaaagtccattaaattgaaaaacctgctattatcattgattagcaagtctcaaagagacagtagtttgggaactactatcatatacatgtaaattaatttcttagatcaatctctttgccctcagtgagaccctggtttgaaatgcactgttatgatatcttgcaaagatggccaaaaccaaaacagtaaagccaaactaagtaagcaactaaaaaaggaaaataagggaagcttatttctaatcactggctctttcctttacaaaaagacattttatatatgactggtaaagtccctaaattgaagagcagcaaagggtcaaatgcccagtttggtttatataagaaaagctgtaaagatctttggtcgacgc

SEQ ID NO: 486828 - DNA, 194 bp, Homo sapiens
ggttttttttgggggggggggccccgggggttttttaaccagggtggaggccccccccgggggggggggggccccccccccccccccatggggggggggggcccaggtttttggtatttttaggaagggtttggggggagccccctaatttttttttttttttgttaaaaaaaaaggggcccccttccccctga

SEQ ID NO: 486829 - DNA, 776 bp, Homo sapiens
  misc_feature (279)..(279): n is a, c, g, or t
tccactcagtaggtgtcttatccatactggtggacttttcccagggggaatggttgaagggaggggcaggaagggctgaccggaaagccacggttgggtttccctccatccaggggaaaaaaaactcggtagggacaatgcttaggttagagttgaacgggggaaaccactcactagtgttgggcgtgagaatgcacgtggtgcaggtgactttcagaacaaccgtgagttccttcgtgctcgaggaacagtgcacatttcttagagtgtggcaaaaanaaaacacgaagcacctcaaagaaaaacaccaaggttgcttacaagacgcaaatgtgctatgtgtaagaagggttcttagggcagccagcagtttgaaaagccgggggtttgtggcgtgtggccacctgtggccattgccctgtgttcccactgtgccctgtggtgccgggcttgtcgggccaccagttgcccttctttgagacagttcttccagtggggtctccagggggttctggtgagccacagaagggttggtgaacgggagaaggagcctgagattgttggcagccacccgggggcagtcccaaaggcgggggcttgcggttgacaacttttcaggggactctctctgaggggggtgggcccgagggggttggtgggccttggcgggggcaagcgggcgcctggtgagggattccggctcagcgttctatttcttgggggcccgggggtggacgcccctctcgggaaatctctaatacccgttggcgttgcct

SEQ ID NO: 486830 - DNA, 449 bp, Homo sapiens
cacgagggttcagcgcggcggcgatcagcagcgacggcggtcgtatcggcaggcgggcgatcagcgtgcgcagagcggcgggcggcggcggcagtgccggcagcctgatcgggaacgaggtgttcatgcgggtatcctttccagtccgggacggcggtgggcgtaaccattgaccagaccgccgggcaggctcagcgctgcgagcgccgcggcggcttcagcgacgtcggcctgaccgttccaggtgcgctcgaacaggtcgaccacggtggcgaaatcgcgcgaggtgggcgacagccgggcgcggctgacgccggcggcgcgcagtgccggggcgtcggcgatcaggcaatgctgcgccgccgactgcgtctgtatgccattcaaggcgaggaagtgctgctgttcggtggtgtcgagcagcaggccgtccgggtgttcgatgcagc

SEQ ID NO: 486831 - DNA, 157 bp, Homo sapiens
tcagtgatgctaaaaaggacaacagattaacgctgactgtagtcacccgtcgttgtcgtcaaagacgagatctgattcattcttgatgtgaactgttgggaatgggaacgcattgcatgcatggagctgcagacggagcgcactcgtgcggccaggc

SEQ ID NO: 486832 - DNA, 263 bp, Homo sapiens
ggtgaactccgacatcggacgcgatgatctgcgatgtgatcccgtaaccgctgccaaacgacatcccaccgctgagccatccgagaatcgccacgatcaagccacagccacccgcgaaccagacagggtgcaggcgacgccattcccagatgacaaagtgacgatgccgctgcggccacagcagcatccgactgaacaatccccccatcaggccacagccaataccaatcgccagaaccggggccacgagatcgaggctgacc

SEQ ID NO: 486833 - DNA, 750 bp, Homo sapiens
gtgccccagacaggttttttcgcacccctcgctggtccccacggtgcttggcccagttatggaaggctccctccgtgggcctttggtttcgaccggccgctaggcgtcctttcttttatccgggcctccccaccagaggggcgagcggcactgttttgaactacgtgcttggttacacacaggagagttctctcgagtgcgggttactatcccccatatatggagggcccttctcgagtgcggtgtcttactggttccgacacaaggcccgcggtgtccccacagcagagggtggccacagcggtggtgacgagccgcgcgtgctgtgtcgccgtctcttctagatatagttcttggtatcgcgcccttctttcaatagcgtctcctccgctgctccccacagatgagtacgacgctcgttatatttcacgggtctctctcgcgggagatcaagagtgagacctgagctcgtttatagggtcgcgcgaagataatagcaagaggagaataagatcgagaaactagagagaagaggagattaataggggatgaggcgccacagacgagttatagcaagaataccacctcccaacgcgcgggggaatactgggaaccacctccacaaggtggagtattgcacactcctgcccccaccactgagcacgagcccacaccccgagctcacagcgcgggttcttcgcagacacccccccacaacgtcggagagagcccctggaaagcaccgtacag

SEQ ID NO: 486834 - DNA, 223 bp, Homo sapiens
acctcgagttcggtaccgtaacattcgtgtcccatgatcagggcctgctacagcagtggagctgtagacagcagtgtaaacgtctgtgacatgcccatgcgagttacctgagtgaaggttatgactactctgactgaccatcatcatcgtgggactgactttggtggaagtccttggttacatgtcattattgcgtttccgacaagttataaagttgtcatta

SEQ ID NO: 486835 - DNA, 429 bp, Homo sapiens
  misc_feature (324)..(324): n is a, c, g, or t
ctattcgactatgcgtgagctcaggtgattcatatgctttatgcgagtaatccgaatgtgtttagcagtgggacttttaggggattcagaggatgtcacgcctgttgcggcccagttccctcgtatttgaggggtactctatagtctggagtggtaaaagcgtcagaaaaatccccgattgacatgaatttctgaggtaagacatagctttatcaggtatggaggacctgattgcataggtagtgtgtggtggccttggaatgacctttctggtgtcatatagagccatcactggtatagggtcagtgtgttggttagtaggcntagagtgaggagcgctatggagtgcaagtgcaatcacatgcataggccggaggtcattaggagctctaagatggcccctgttaaggatcatattctagtttagct

SEQ ID NO: 486836 - DNA, 170 bp, Homo sapiens
aaaaaaaaaaaaaaaaattagcccggggggatgcctcccccctaagggccccgcttctcaggggggttaggcaggagaatcaatttagccccccggaggtttggggtgcagtgagctgtgaaagcccccctgcccccccccctgggcaaaaaaacaaaaccctgtttcca

SEQ ID NO: 486837 - DNA, 217 bp, Homo sapiens
gtcgacctaaggatccacacgtacgctcatgtatatatccttaaggcctcatacatcacttcattttacagatggatattggacatgcagtcactcttctagaaactggggatatagcaggaacaaaacaggcacaatccctgccctcagtgagcttacattctagtagaagcaggactaaatagagtagaatattgtaatattgttagagtgatgc

SEQ ID NO: 486838 - DNA, 681 bp, Homo sapiens
ctctggtggatgatacgtgaagtcacaggatccagcatacatcttcctgaagtgccaggctacttatctaatcacagttgaattaagtcctatagctgctagactaaagcttgcttttgactctgagtattatgatggcctgtctgttgaatcagcactattgctagctatgacgtgggtgattatgacaagggatacaggttcatagaagacccttggacttctaccaaactgagggtctgtcatggccaggcctttgccattgataagaccatgtggaaatctgagtccattacaggcgatacgtgatttctgacgatcgcagttcactcagacgttgtcaagtgcatttttacatgtcgctcataagcatactgtggtgcctagacatctggtactgacctcagagataccgtgcaagttcagtcagagactagacttactgtcacgccagccaacgctgtcttttacagtgatatgtgccaatctgagcctgtatctttacaaattgaaaccactacaccccgctttgtacagatacagcgtaggacttggttacgccaattttgcccattttcagaccctgtagcccaccgcccttatacctcacaagggcccctaccctcttgccggggtcccctattcttgcagatggtttatcaccccctgctttccccccct

SEQ ID NO: 486839 - DNA, 344 bp, Homo sapiens
  misc_feature (63)..(63): n is a, c, g, or t
  misc_feature (187)..(187): n is a, c, g, or t
  misc_feature (229)..(229): n is a, c, g, or t
  misc_feature (236)..(236): n is a, c, g, or t
tcacgccatgtcacaatgaccccttggctcccctttcccggatgaggtcctggagcagcaggngcccctagggttgggggagccctcggaaaccgagggaggagaactgggttccggagcagcccctgctgggttctaagcagcccatcccaggcacatcatttaacctgctctggaaaagaaggcnaggcacactgtgctcacacacagcctggtgtgtgtgtgtatntcgtgtngtgtgttgtgtgcacgtgtatgtgtgtgcggtgtgtgtgtggtgtgtgtggtatgtggttgtgtgcatgtggtgtgtgtgatgtgtgtgtggtgtgtagtgtgtgtgg

SEQ ID NO: 486840 - DNA, 212 bp, Homo sapiens
aggtccgggtacatacaggataacagataatcacgcaccataattataacagaggcctctgatcaaccgcatactaagtgttacaagtacaattttttccgtataagaatactgggaaaaatggataaataacaggtaagagaaagatatctctaggcgattactaggatcattgggaaaaagtgagtacggtggatatttaaaatatcaca

SEQ ID NO: 486841 - DNA, 274 bp, Homo sapiens
cccgacggaagatgggaggaaaggcgagcctgacaaggcccctaaacgctgattccccaagtcgcccactggagggatgccttgggggaccagagaggaagaccagcgacagggtctagctctgttgccccggctggtatcaaactcctcgacccaaacgaaagtgctgggattccaggcatgagccagcgctcccggcctgcatacgggatgattccatgtggactgccacctcaaggaagcaaacaccaaggaaagcctggcgctgcgtgga

SEQ ID NO: 486842 - DNA, 437 bp, Homo sapiens
accttgtggggtgtttcagcacagaaaaacgctgttccctttacaagagggaaaacgctgagtatgtcttatctggcgcaacactgctgaaaatcagtgagcgtacaccactctgcacttgccattactggagaacgccaacgtgctggcccgtaatgccaatatctgccagcagaatggcatagtgcctattgtggaacctgaaatattgcctgatggaggagcacgacctcaaacgttgtcagtatgttacagagaaggtcttggctgctgtgtacaaaggccctaaagtgaacatcatgtatacctggaggggaccctgctcaagcccaacattggtgaccccggaccatgctgtaccatcaagtataccccagaggaagattgccatggcaattgtcactgacctgcgttcgaatgtggcccccgctttccca

SEQ ID NO: 486843 - DNA, 208 bp, Homo sapiens
ttctccctctcctaaaaatacaaaaattagctggttcatggtggcatgtgcctgtagtcccagctactcaggaggaggagggataagaagcacaatgaagcacaaaaaaacacaagaaggaaaaggctgtggctgcagctgctgcagttgttgtgacccctgcagccattgcagttgcacaaccacattagcacaggaagagccagtg

SEQ ID NO: 486844 - DNA, 281 bp, Homo sapiens
tttgcagcgtactcggcatacattcagcattgactgcagccctcataatactgtcaagaagactgccaatgaattttccctgttttgcctacatgcaagcttgccttggatcctggtccacaatgccaggttttcatgttatccagcagttacttccagctgtgttccctgcaaggctaagaatccccaggagtaagatcctcttcaccaaggctgaggactctttgttagctttaggactgaagcattttgacgggactgatgtttcttatccctcttat

SEQ ID NO: 486845 - DNA, 339 bp, Homo sapiens
cctgggaaaggtgaccaagggtctcagtaactctgcgggtttcctgacaatgcccaccctggacaacatcccgttcgtggcttatcgtgagtcaggacgtggtgaaagctgcagtggctgctgtgctctatccagaagaattcatggtcctgttggactctgtgcttcctgagagtgcccatcggctgaagtcaagcatcgggctgatcaatgaaaaggctgcagataagctgggatctacccagatcgtgaagatcctaactcaggacactcccgagttttttatagaccaaggccatgccaaggtggcccaactgatcgtgctggaagtgtttccct

SEQ ID NO: 486846 - DNA, 126 bp, Homo sapiens
  misc_feature (6)..(6): n is a, c, g, or t
caccanttgtgcggcatcagggatcgggtttacagcaacagtcatctatgagcttctggagaacgggcagcggaacctgcagatgacagcagctgctcgctgtcccaggatggttctcctggcacc

SEQ ID NO: 486847 - DNA, 499 bp, Homo sapiens
tctatttcaacaacccctcataaaatcctccaaatataaggagtccacgtctaattgctatgacaatggctgcctcaattccccagtgaggctgcttaaccaccccctcagccactcctcccacaatgacaagtatgcacaccatctgccagcttctgccatcatcaccaccacccaaaaaggcccacggacagacgtccctgtggttttccttctaaagggcaaattcccaggagtcagacttaagggtactgctctccaaaaaggttgccacaagtcacatctggttctctatcacctccagtctgaagcgtgttcttcccttcgtcagagtcacgctgccaactcggcgccaggtttgactcgcatcgcaaactgctgacctcagaggctaccaagcatctccacccccactccacagcagccgcccggcggtccccagtgcccagagatcgctgccaccactcaccctcccgctgcgccgaatccgatatcacgc

SEQ ID NO: 486848 - DNA, 432 bp, Homo sapiens
aagactccatctcaaacaaagtaaataatagaaagagagagagagaaaaaaaaaaaaagaaaagaacacttcttaatttgagggacttccccaacaccaggtgctgggggatttctaagaagatcaccaaccgactccctcacggtgaaataaaaccaagtactgaaaacgtaactaaacagcgaaccatgtagcttcacctgactcagtgctggggggcctctgccatctactggtgcttgtgtcatggatgctttttctctagaagtgggtgtgggaagtacaccaggggaactgggcaaaagccctaggcccatctctaatcttttaaccagccaatctggatggatgttctttccagaaggtgagggtacccgagcctcgatatccgtaaatcctatgggtccaaagctgttacccgggaggtgaaaa

SEQ ID NO: 486849 - DNA, 136 bp, Homo sapiens
gcggagtgcgagcgacaggacaggcctgtgtgtacaactgcacaggcatactccttgtgccagaaaggctctgaggacggcagacctgcctctcagtgacaaggccaagcaccagtagtgagagcaggctcctgta

SEQ ID NO: 486850 - DNA, 246 bp, Homo sapiens
ggatcaaccaggtggcattggaggcgtggcgcagccggcgggaccccgaggagatcctcctgcaggagcttgagccggtcatcttccgcgcggtgcttgacaacccgcaccatggcttctcaaactcgggcatcatggaagagcgccttctagacgcagttgtgtccctttcttccggttcagcggcaccacagtcccgcactgtcgtgctcaaacgagctctggccaactctgggctctgagaca

SEQ ID NO: 486851 - DNA, 784 bp, Homo sapiens
  misc_feature (2)..(2): n is a, c, g, or t
  misc_feature (83)..(83): n is a, c, g, or t
  misc_feature (110)..(112): n is a, c, g, or t
  misc_feature (126)..(126): n is a, c, g, or t
  misc_feature (208)..(208): n is a, c, g, or t
  misc_feature (210)..(211): n is a, c, g, or t
  misc_feature (225)..(225): n is a, c, g, or t
  misc_feature (228)..(228): n is a, c, g, or t
  misc_feature (230)..(231): n is a, c, g, or t
  misc_feature (233)..(233): n is a, c, g, or t
  misc_feature (235)..(236): n is a, c, g, or t
  misc_feature (239)..(239): n is a, c, g, or t
  misc_feature (241)..(241): n is a, c, g, or t
  misc_feature (243)..(243): n is a, c, g, or t
  misc_feature (245)..(245): n is a, c, g, or t
  misc_feature (258)..(258): n is a, c, g, or t
  misc_feature (260)..(260): n is a, c, g, or t
  misc_feature (264)..(264): n is a, c, g, or t
  misc_feature (270)..(270): n is a, c, g, or t
  misc_feature (273)..(273): n is a, c, g, or t
  misc_feature (282)..(282): n is a, c, g, or t
  misc_feature (310)..(311): n is a, c, g, or t
  misc_feature (419)..(419): n is a, c, g, or t
  misc_feature (421)..(421): n is a, c, g, or t
  misc_feature (426)..(426): n is a, c, g, or t
  misc_feature (430)..(430): n is a, c, g, or t
  misc_feature (433)..(433): n is a, c, g, or t
  misc_feature (750)..(751): n is a, c, g, or t
  misc_feature (760)..(760): n is a, c, g, or t
  misc_feature (764)..(765): n is a, c, g, or t
  misc_feature (782)..(782): n is a, c, g, or t
gntggtccttcacttgtgttggatttagaagtgaatgtgtttggaatatggcctacagagaatagaaacaaatccatgtaaanaattttgaaggaggcatgggagctaannngcctgtgatactangatctcagtcatatgaattacaacgtagtatttactggcaagaaggagaaagttgataggactctatgctaaaggagggcgngnntttgttgttactgnggngnngngnnttngnangntgctgactggggngntttntgccangtntcagaattnttggtcttttgggtttttgctttttaanngaggtgtgggagcagaggaatggagacaatcgtgagtttttgagctagggaaagttggagctcctttaatctttttaaaggatcagtgctgccctaagtgaataaacncnattgnccanctntattttagagttttaatgaattcaaggaagggagcatagcatatctgtggcaaactattttcccactcaaatccctgagttattgctgcatgctttaatttcttccctttcagcatctgagaaccttaaagccaatgtctgcgatctttttttggatatttatacttttagatatatagtacctttaagtagcagtatgggacaaggcttgtaaatgttttgtctaatgttctattgtcaccttttatgcatttatcacttccaaatctaactttgcacaagtaacccatgtaaaaaaaaatgtacatttttcaaannttgtaaatntttnngtccttaaaattttaantt

SEQ ID NO: 486852 - DNA, 202 bp, Homo sapiens
cgagcaggtgactctgaggatcttaaagcagtcgggcagacccgagctttaagggaaagcaggcagggtgtacgcagcccgggccggtcagcctttgacacaattaggggcggcaaccgaagtgaccgcaggattggccgggtacaggggctggaggaccagaaagccccttgcttcctgaacctccaacttccaggccctg

SEQ ID NO: 486853 - DNA, 207 bp, Homo sapiens
agctggatggagtatgcttcaccgaaatagggaataaatcttaatgtagaaagacagattaaggacccagagaatctaactagaacccataaggctagataacaaaaacaaaaaccaacagaaatcaatgatgtcaaacagccctgaaagaatccagatattggaattattaaacacaaataataaaacaactatatttactatgtt

SEQ ID NO: 486854 - DNA, 599 bp, Homo sapiens
ctggattatagtgaggagttagtaaaagtggccactattgggcttattctctgctctatagtctgtgacttgaagagtgatgaacgaatttgtttgactattttaaaattatattagaccttaagctgttttagcaagcattaaagcaaatgtatggctgccttttgaaatatttgatgtgttgcctggcaggatactgcaaagaacatggtttattttaaaatttataaacaagtcacttaaatgccagttgtctgaaaaatcttataaggttttacccttgatacggaatttacacaggtagggagtgtttagtggacaatagtgtaggttatggatggaggtgtcggtactaaattgaataacgagtaaataatcttacttgggtagagatggcctttgccaacaaagtgaactgttttggttgttttaaactcatgaagtatgggttcagtgggaatgtttggaactctgaaggatttagacaaggttttgaaaaggataatcatgggttagaaggaagtgtttgaaagtcactttgaaagttagttttgggccagcacggtagctcacccttgtaatcccagcactttgggagg

SEQ ID NO: 486855 - DNA, 111 bp, Homo sapiens
ggacttactggatctcgtcatggatatgcatcccgatccatcacgatggtgtcacgggtaccgcgcctgctgcgtatgttagcacacgctgatgcagtcagtgtagcgcgc

SEQ ID NO: 486856 - DNA, 240 bp, Homo sapiens
tggtgaaaccctgtctctactaaaaatacaaaaaattagccagtcatggtggtgtgcacctgtagtcccagctacttgtgaaggctgaacgtgggaggatcacctgagtcctgaggagtcgacggctgctatgagctgtgatcacatcacgtgcacctccaaggccttgtggttgaccacctagtgataatcttgttctcacagaaaaacaataacaacaatcaaatatcaaaataaacc

SEQ ID NO: 486857 - DNA, 267 bp, Homo sapiens
  misc_feature (189)..(189): n is a, c, g, or t
gaagtctcgaaagatgtctgtgtcttttctttgtagcccctatgaattctgatgagaaatccagtcattcaaatcatttttctttatagataatacatctgtagactgataatacatcgattttctctggctgcttttaagatttttatttttatttttgaggcagaattttacccgtatcacccaggnatgagagtgcagtgggcagtgatctcacgtgcaaccgtccgccgttccagggttcacacgtgagttccttgtgccctc

SEQ ID NO: 486858 - DNA, 112 bp, Homo sapiens
tgtgctccggtcgattctagaggaccgagagacgtgttgcattgatcaggcagccaaaagatttaaatgatctataataatttccaagcggtagattatgtggcattttatt

SEQ ID NO: 486859 - DNA, 188 bp, Homo sapiens
  misc_feature (41)..(41): n is a, c, g, or t
  misc_feature (172)..(172): n is a, c, g, or t
gccggtgagcccccatcctgcccctgcccaccaggtactgntggcctgtggcagcaagataggtggagagagacccagagatgtgagagagagtcagagacagagacagagagagagagagagacacagagagagacagagagagagcgagcgagcgcgcggcagccgcggngcgtgggcctttgctg

SEQ ID NO: 486860 - DNA, 858 bp, Homo sapiens
  misc_feature (276)..(276): n is a, c, g, or t
atcggcacgaggaggaggctgtcccgtaagaagaagtgccccactgtagtgctgaacccccacccgagccttgtgctacaaggagatcctggaaaggcgagagtcggtcggagtgctctggctgtggatggagctgggaagcctggggctgagtgaggctcagtgaccccgaagggaagggagaacaggagcactcccagcagaaagaggaggaggaggagatggcagtggtccctgcaaggcctcttcctggggtgggaatgagctggagagctnggagcaggaggaggagcggctctccaaggagtgggatggactccaaacgctggagcaagatggaccagctggccaaggagctgactggctgagaatgctggcttggatgtggtgcacgtgagtgaggcatgtgagtgacaagcctgggacagtttccatgaatgctctccattcctggtgccctggggcctacgagcttcatgggtgccctgttgcctgcagctgcagacagagtgctggagagccatccatccctgggaggacagccttgatggctgggcctgcccctccatgggtccgaggctacccctgaggagcacgaacagagtgagtgcagggcaggctggcaaacctgacagacacagcagggaccaagtgacctggagagccctgtcggccaattgagtgcaggaactggagtaaagtggccccaacagtctgcaggacactaaggaggggactgagaacccggctggcaggggctggcccaagggaccctgtggcctggctcggtttcccttggaaggtctggcaatggcggaaggagtccggaagaggacacagatcaacaggacctatgcc

SEQ ID NO: 486861 - DNA, 920 bp, Homo sapiens
  misc_feature (276)..(276): n is a, c, g, or t
  misc_feature (305)..(305): n is a, c, g, or t
atcggcacgaggaggaggctgtcccgtaagaagaagtgccccactgtagtgctgaacccccacccgagccttgtgctacaaggagatcctggaaaggcgagagtcggtcggagtgctctggctgtggatggagctgggaagcctggggctgagtgaggctcagtgaccccgaagggaagggagaacaggagcactcccagcagaaagaggaggaggaggagatggcagtggtccctgcaaggcctcttcctggggtgggaatgagctggagagctnggagcagtgatgtgatgtgatgctgtganctctccaatgtgagttggtgatgtgacctccagaactgcttgtgatgacaatgattgtgacacatgcttgtggccaatgtgatgcttgactgtgcttgaagaatgctgtgcttgtgatgtgtggcatgtgatgtgatgtgatgtgatgtgaccaacctgtggacatgttccattgaatgctctcacttcctgtgtgccctgtgtgctctactgtgcttcatgtggttgctccttgtgtgcctgcatgctgctgacttgagtgctttggatgtgtccattcctccctgtggatggacatgcctttgagtgctgtggccttgccccttccatggtcctgatgtgctaccctcgatgtgatgaatggacaatgatggatgtgatgtgtgcatgctgcaatacctgcatgaccatgatgtgaccatggaagctggaagatgcctgtctgggccatttgatgtgcatgatgcttgggacgaacatgtgtggcccaccatgtcttgcatgtgcactacgtggcgggtgctgatgacaccgggctaggcaggtggcttggccccatgggcaccctgttggccctgggctctgctgtccccttgggatggtcctgggccagtc

SEQ ID NO: 486862 - DNA, 1009 bp, Homo sapiens
  misc_feature (317)..(317): n is a, c, g, or t
  misc_feature (328)..(328): n is a, c, g, or t
agcggggctcggaccacaatcccagacgcggatgtgcagtgagttacttctcctccctggtgggtctcagttgcatctgcttgtgctctctgcctgcgataactcgcctcgaagcgaagggtatagttgagacactcaatcattgtttcttgcattgggagaggcccaacgagcatccagataaccattggctcggctctgtcatctttcattcaaactcgttattcgtgtcttcgtcacgacgactctcgtcttgtctcttcggttcatcggtcatctcaccttgcctccgttatacaatctcgtctggacccaangcacgtcctcntctcgtggactgctgaggatgggtagctaactattgaactatgtgttgcctgcgagcatgggagatctgagtaatttcttgaatctgtgaatgtctctgtggcgtcttcttccatgcacaagtataggataggagacattacacatgagagtcatgcattggagggcgcgctcggttgcagagagctcccatgctgccatgttgtggttcacatggctttcctctacggcgtctttccttctctgtgattgcattcactattccgccacaagtgtgaaaaatttaagtctttgccgcgctaactacttgaggtgtgcattatttcctcccaacaaaaggcctcgtagggctgaattacaacggtgcaaggttccacgggagtttgttacctagaggactcacccgtaactagacagaagctgtagaaaaaacctaacggggctgacgcccccagcaggggaaaaccgcttgtaagggggccagtcacaccgtatgtcggttcgaaacctgcctgctgggtttcgaggctgggggggcgttgggaacaagtctgattctccaggaacatacttgcccccaaggaaggaccgtactcgaaaagcttacacctggaaggtcctgtccttgatgcccatcaaagaggtcttcgacaattaaatttcccattcatcggcgctgtgg

SEQ ID NO: 486863 - DNA, 265 bp, Homo sapiens
aaactgatgttaacaaataatttgaactcgaaaatggacccattattttgtttcttccccagctgacattggtttggccttattatttatacttttaaaactgtttctcactgaagaacgtgataaataataaccgtggtagtcttcatgatttgtctgtctattgtgtgcctcacatgccactttacctaaattatgtcatgtaatcctcataacaccctgtgaaataggtggcagtatcccatttcacagaaggaaaccagag

SEQ ID NO: 486864 - DNA, 722 bp, Homo sapiens
cgggaccatgtgcgcgtccgggacgactggcgctgtgcgcgctccatgcacgagttggccggccaaggacatcgacgggcacatggttaacctggacaagtaccggggacttcgtgtgcatcgtcacacaacgatggacatcccagatgaggcaagaccgaagtaaactacactcagctcgtcgaccatgaacgcccgatacgctgaggtgtggtattgcggatcctggacttcccgatgtaaccagtacagggaagcaggagccagggagtaacgaagaagatcaaagagtatcagccgcgggctcacaacgtcaacaattcgatatgttcagcaagatctgcagtgaacggggacagacgacccacccgactgtggaagtcggatgaagatcccacccaagggacaagggcatactgggaaatgccatcaagtggaacttcaaccaagattacctcatcgacaagaaacggctgacgtggtgacagacgctacgagacaccataggaggagccacacagggcgaatagcagacaggacacatgacaccaacatataactaggcatccagacaggtagtgaagagacaccggcacaagcagccacccaggcaccaaaagcccatcaggcagacgaccaaacgcgaacacatgaaagagaccgccagaaagaagacagaaagggggacaaccaagaaaaccaggagcacccgccagggagag

SEQ ID NO: 486865 - DNA, 305 bp, Homo sapiens
gagactttataaaagagactggaaaatacgtggaattagaacatgcaatttaaaccaagccacataggtaaacacagcatgtctgtgactaccagaggggaatacgtatggctgtcaggtcccatagcgtttgagggaattcgcccactaggaaggctttggaattgcgtgtgagaacctgtggctggaagcacacagcaataacaatcccatcaaggcaagctggtatctgtatccaaccacagcaaaaccagtcccaaggaacacagggcttgcctggcaaaactgccaaaacagaaagcggt

SEQ ID NO: 486866 - DNA, 315 bp, Homo sapiens
  misc_feature (299)..(299): n is a, c, g, or t
agaatatcagctggtagtaacggggatgatatatgatttgttaaatagtgaatacaagaagaattccctgcttcggagcccttgttatgtaagctggccttctcaatgacacgattgtaaagaaaagaaacaactttttctcctggtactaagtacaggcctggataggtcagcctgcttcatgcttctccagactcatttgtagcactttcttcttgtactctaagcctgactgtgcaacatccagctgtctcctggtattttcattggctctacctccagcctagcacagggatccnctagagtccgagcgca

SEQ ID NO: 486867 - DNA, 80 bp, Homo sapiens
aggtgagcattagccttcatcttcgttattattcctccatgtatcttgcaataaggctctgtgaaatctggtcccagttt

SEQ ID NO: 486868 - DNA, 462 bp, Homo sapiens
catccacataaatcccttaacttcctatctttctgaagatttttaaaattattttttctagtgccctatgattttattatatacacatgtatttgtcatgtattttgaaaggggcatgaacataatcaactgttttaattagaaaactctttaatggtttcaatgctcactaaaaatccttttaaactatgactttcttgactgctttattttgacatatctattgatttgctaagtcacctctatgactaatttcttcctggtgtaacaatgcatccacataaaactttctaagttgtacttatgagaatgtatttctgttgccaaatatttttaatatttcaattaatattctatatcatagcatgcatagcaggtttgattgaatttgattttttaaatcataattttgcattcataactctgttaaagtagatgtttatatttaatgtcaaaaaaaaa

SEQ ID NO: 486869 - DNA, 558 bp, Homo sapiens
agaatatcagctggtagtaacggggatgatatatgatttgttaaatagtgaatacaagaagaattccctgcttcggagcccttgttatgtaagctggccttctcaatgacacgattgtaaagaaaagaaacaactttttctcctggtactaagtacaggcctggataggtcagcctgcttcatgcttctccagactcatttgtagcactttcttcttgtactctaagcctgactgtgcaacatccagctgtctcctggtattttcattggctctacctccagcctagcacccacagtctttatcttgctagctttctcattcttcaggtctcagtgtaaatgtcacttccttagagaggcctcctgtatctcctgaattaaaattattttctttgacccagatgcttgtatctcagtctcctatgtgcattattgcatttgttattgtttgcctcccttccacaagggcagggattatgtgtgattcctcatctctgtccccagcacccagcactgtgaatcttccctaattagtgttcaataaatgtttgtcaaatg

SEQ ID NO: 486870 - DNA, 691 bp, Homo sapiens
agaaatagtagaccccgggatattgggtggtacaccacttataaagggtcatccacttcaaccatttcaaaaatgtatttttagcccctaagttttggtaaccaacttttagcccacaaaagttaattgatcccgggggaatagcaggacccttcaaaagtccattatgttttccatccccaaaagaatgggatgcccagctcttttggcatggaaatgggaaatattgcttttcacgccattatgtggaataagggctaataaaagtgggtaaacgttaaggttattatagtcctgagattcgacttaatgtgtgattcaggtctttctgtcactccttttaaagcctaattaaggacgtcttaagtgtttctggaaaaatctgtaaaagtcctccagtggatttgcctttgcctcttaaaaaactaaatatgttggtgctgacattgtaaaggaacagattctcccgtacctgcaaaataatttctcagaagctggtatctgtaaggtaccttttaaaggctctaatttatttgtgtggttaacaaaggaggaattaattaataaattgtagaaaatgcgccgcggctaggttttccctcctcatatttgtaggctttcatttcaagctccctcacccgggcattggtcaaaacatagtttgttcaatagaacctggcccagttttcta

SEQ ID NO: 486871 - DNA, 205 bp, Homo sapiens
ccttccgcacacccctgcagctcgacccgcagcaggagcagcagctgtttccggcgccttggaagaggagttccttggccaattgccggggccctttgaggcttgttgctagctgaaccccactggaaccagccctgaccagctcgggcccccgaccctccagagctctgactctgcctatgcttctcagtctcttgctgctaga

SEQ ID NO: 486872 - DNA, 187 bp, Homo sapiens
tcgtgactcgctatcatcgccacggggctggggagcttcttgcgaagaactgccgagaatcctggacatcccggatggccccgggcctgagcacagcctctgccgactccagacgctgcctcttcctgcgggcgaggcgctgccgggcctgcagctgccacttcttcttggtgccgatgaatagcga

SEQ ID NO: 486873 - DNA, 254 bp, Homo sapiens
tgcgcgctcgtgagaggcaccggattcgcgacggagaggaacgccgcggggatgtcgttgttctgccagcgatgcgacacgtatgcgccgtactcggcggtcgtcttgtcggccttgcgacggcggtttcgcgtctcctcgtccttgtactgcagcgcagcaaacgtgatggtgcgcacgtcgaccgagggctccacgtccaccatgtgcgtcggattcgtggtggtgcccgacagcgggccgatggcactgaa

SEQ ID NO: 486874 - DNA, 125 bp, Homo sapiens
  misc_feature (19)..(19): n is a, c, g, or t
  misc_feature (94)..(95): n is a, c, g, or t
  misc_feature (118)..(118): n is a, c, g, or t
agtaacccccttaccaggngctgggcatggggccaagtgctttaagtatataatttgaagattatagaagaagggaaatagcaaatggacacannttacaaatgtgtgtgcgtggccnaggaggt

SEQ ID NO: 486875 - DNA, 584 bp, Homo sapiens
  misc_feature (6)..(6): n is a, c, g, or t
  misc_feature (72)..(72): n is a, c, g, or t
  misc_feature (97)..(97): n is a, c, g, or t
  misc_feature (99)..(99): n is a, c, g, or t
  misc_feature (113)..(113): n is a, c, g, or t
  misc_feature (118)..(118): n is a, c, g, or t
  misc_feature (123)..(123): n is a, c, g, or t
  misc_feature (144)..(144): n is a, c, g, or t
  misc_feature (164)..(164): n is a, c, g, or t
  misc_feature (172)..(172): n is a, c, g, or t
  misc_feature (175)..(175): n is a, c, g, or t
  misc_feature (185)..(186): n is a, c, g, or t
  misc_feature (188)..(188): n is a, c, g, or t
  misc_feature (232)..(232): n is a, c, g, or t
  misc_feature (248)..(248): n is a, c, g, or t
  misc_feature (307)..(307): n is a, c, g, or t
  misc_feature (309)..(309): n is a, c, g, or t
  misc_feature (311)..(311): n is a, c, g, or t
  misc_feature (335)..(335): n is a, c, g, or t
  misc_feature (341)..(341): n is a, c, g, or t
  misc_feature (388)..(389): n is a, c, g, or t
  misc_feature (394)..(394): n is a, c, g, or t
  misc_feature (396)..(397): n is a, c, g, or t
  misc_feature (575)..(575): n is a, c, g, or t
gctggnagacccctaggccactctgaggaggcaggccttctatcttagtgaatgtctatttgtgttgtctgnaggtgacgcttttattcccctaggngnttgccatctttttnggtgngaagntttctaaagcggggggtaggnatctacatcttacaaaaaancaaaaaanggnaaggaagggnncntataagcaaaaagcacttccttcttctagaaggaattctgagtntcaaataaagagaagntcttcttttaatatcgtttttctttgtatgttagaggagcagacgttattattcatgantntnaatggatctgcatatgtgattatngttgcnatgcaatacatatgaatataatttttttttttttttgagacggagtnngcttngnncacccaggctgcagtggctcgacctcggctcactgcaagctccacctcccgggttcacgccattctcctgcctcagcctctccgagtagctgggactacaggcgcccgccaccacgcccggctaattttttgtattttttagtagagacagggtttcaccgtggtctcgaactcctgncctcgtgat

SEQ ID NO: 486876 - DNA, 1275 bp, Homo sapiens
ggagtgatgacatcaccagcgccgagatcggagagcagctgaggatgtgaggagggggagcagggcgacccccagaactgcaatcctggcagcagcatgctggacgtgggatgacatccacgcctcagctactgaccctgtgccccacagtaccaatgggtccacgatgtacaaagtcatttcgtgccagataggtgtgcagaacaccatcacaccgaccacgatcgtcgacatgctgcattggatgatgtaggacccataggccatcccacgcaccagcacatcatgccctggatcagaagcaatcttcagaataaccaacgacggcacgcatgacaacagatccatcatcatggccactgaacgatcacgagctcattactgccaaccaagaggatgaacacaattcccaccaaagacaggcaccataccaaaagacacacaacagaaggtatatatggatcgtcactcgggcacagattcttaccacacactctggggtcgagacgacatgggaaccaacattggagccccaccattcggacaaccgtactcaaaacaacatctaggcgcccccagttgaaccccaacgccattgagcggcctattcacgttactgaacgagaaacagtctgatcatacaacacacacaaaatagtacgttctagcagtaatccagcacgcgcccccggggtttacaataccacctctacccaagccagctacaattacatatatgtccatacaaccaagccaacaagggattcctcatacacacgatagtgactagcaacacccacacgaacccttacccattgacccaaattgcattcatataaaacactctcacccatgtgcgccaccgtccaacatgcgagaggcagagctaacccgctgccagacataacacacaatgacacaacatacaccgcacgacaaactaatataacgaccaagcacaataatctacaaagtgtgacaacaataacacagctacacacgcgcaactaagacccacacgacaaggaacgcacaagcaacgcaccacaacacacagcatcgctacaccaccccagcagctacaacccggcggagaacaacagaaaaaagccagcaggcacacgcacgacagcgagaaagcccaccacgcgaagccaaacacagagcacgcaacagacaaccccccgcgaacgagacagagaaagccacacagaccacacgaccacgtcaaaccacaacaagcaggcaacaacactagacacaaaaaaccgaaga

SEQ ID NO: 486877 - DNA, 314 bp, Homo sapiens
  misc_feature (2)..(2): n is a, c, g, or t
  misc_feature (13)..(13): n is a, c, g, or t
  misc_feature (57)..(57): n is a, c, g, or t
  misc_feature (84)..(84): n is a, c, g, or t
  misc_feature (113)..(113): n is a, c, g, or t
  misc_feature (122)..(122): n is a, c, g, or t
  misc_feature (127)..(128): n is a, c, g, or t
  misc_feature (134)..(134): n is a, c, g, or t
  misc_feature (142)..(142): n is a, c, g, or t
  misc_feature (163)..(163): n is a, c, g, or t
  misc_feature (165)..(165): n is a, c, g, or t
  misc_feature (194)..(194): n is a, c, g, or t
  misc_feature (196)..(196): n is a, c, g, or t
  misc_feature (204)..(204): n is a, c, g, or t
  misc_feature (218)..(218): n is a, c, g, or t
  misc_feature (279)..(280): n is a, c, g, or t
cngaaaatgtacngttttagaatgtattacaatatcaatgtgaatatcttgaatccngttacaaatcctgcactgtattaaacntgtaaattaattgtttgtctgattagccnatctcaccncccgnntggggnggtatacntgtttgaagaactgtgtaacncngtaattgatttgtgtctgatgttgtaacncnatagaagngttttggaaggaancatggtgtgtgagacagtgtctgttcttttgtgccagctctgtatgatgtttgtaagaccnngtttgtaagacgtgaataaattgctgcttttgcc

SEQ ID NO: 486878 - DNA, 525 bp, Homo sapiens
  misc_feature (119)..(119): n is a, c, g, or t
  misc_feature (260)..(260): n is a, c, g, or t
aataaatcagaaatggtacctttttaagaattgcatatatttttagagacaactattaacacattgagagggaagcaaagccgggcatggtggctcacgcctgtagtcccagcgcttcnggaggcggaggcgggcggatcacctgaggtcaggagttcgagaccaacctggccaacgtgaagaaaccccgtctctactaaaaatacagaattggccgggcgtggtggcgtatgctgtggtcctagctactcgggaggctnaggtagaatcacttgaacccgggaggcacgggttgcggtgggccggtatcacaccattgcactccagcctgtgcaacaagagcgaaactccgtctcataaaaaagaaatgagagagagcagcctttcgttattgtctgtttaaaactgtaagcagttactctcttaactcccttattacctaaacttgtctggctcccaggacagccttctagagacagggagtattgggaggaaaacgttacttaactattgactgaacgttaa

SEQ ID NO: 486879 - DNA, 821 bp, Homo sapiens
atgatgctccagtgggaggagcaactcaagttcatcattgtcctgagagagaggagcagcgcggttctcggcgggacagcagaacgccagggaccctcacctggcgcgccggggcacggcctttgatttgtcctgaggtcgctggagacccgcgggcgctgccctgtcacgccgggcggtaccctttgcagtcgcgttggtgctgcgatcggccggcggtccctgccgaaggctcggtgcttctgtccacctcttacatttcttcattatcggtgcgtcatgtccgagagtcccgtctggtacatgtggggccttggtaacttatggcttctttctgggcgacggtcccagccattcgcgagaaccggggacaatggcaagtcttgagcccggagacgagcgaacatatggggaccccgggttaaaagcaagaggtcgtccttcacggccgcgtattctatcttcaggcagttgcatacatcagcgacttatttcacgatcttctccaggcgaaacggtctcccaggtgaagtctcagcaccagaggaggcaattccagttagaagttgccgtcccaggttttaggaccgaacagatggggcccttccaaagtaaggctacggacttgtgtgcaaggttacacaaaactcttgcgcgggacactacattcccggggcaactgggtgccaatcccatatctttaaacagcgcggttcccatgagaactgtcggctctgaaaatagtgacggtacggaaatgaactgcctgactgtcagatcgacagttgcattccgctggccccaaatggaaatccccgtgg

SEQ ID NO: 486880 - DNA, 365 bp, Homo sapiens
  misc_feature (1)..(1): n is a, c, g, or t
  misc_feature (98)..(98): n is a, c, g, or t
  misc_feature (203)..(203): n is a, c, g, or t
  misc_feature (208)..(208): n is a, c, g, or t
  misc_feature (231)..(231): n is a, c, g, or t
  misc_feature (279)..(279): n is a, c, g, or t
  misc_feature (292)..(292): n is a, c, g, or t
  misc_feature (333)..(333): n is a, c, g, or t
ntttccttgtgagggcccggatcccatgacccctatcaccccattgaagcttaatcacctcccagagacctcctcataccatcacgtcgggcctaggnttccacatgggaatttcagagtgaccattcagcccgtagcagaagctcctctgggtctgtcctggcccacagaccctgtgtaggaaaagcacttgcccctgcgcngaggnccccctggcagagcccggttgangcagtgagggccctgcaggataagtggaaatctccccagggggattantgggggtgccttnctcttacagagtccaaggctgggtaaaaagcgcatgtgtgntttcgtgtcctggtttggtcccctgccccagc

SEQ ID NO: 486881 - DNA, 320 bp, Homo sapiens
agcctacgctacgtgttagcaccaacagttgtacacagcatacatcgtgtacgataagtggctagcgatagatgtgctcgttccgctacatatagagtgcccatgtcgcatgaagcactatgtccctggcacttaacactactatggacgttgcatgatacctcgccactgactctcaagactctacatacagcttgtccactagagtcgacgctcaggcggccatactcatgaggtctggctgactgtggctcgatcagtacattcgagtctttagctgtcatgcagcgacggatccgacataggcacactgattgcgg

SEQ ID NO: 486882 - DNA, 1054 bp, Homo sapiens
  misc_feature (355)..(355): n is a, c, g, or t
  misc_feature (367)..(367): n is a, c, g, or t
  misc_feature (372)..(372): n is a, c, g, or t
  misc_feature (376)..(376): n is a, c, g, or t
  misc_feature (379)..(379): n is a, c, g, or t
  misc_feature (387)..(387): n is a, c, g, or t
  misc_feature (390)..(390): n is a, c, g, or t
  misc_feature (394)..(394): n is a, c, g, or t
  misc_feature (404)..(405): n is a, c, g, or t
  misc_feature (422)..(422): n is a, c, g, or t
  misc_feature (455)..(455): n is a, c, g, or t
  misc_feature (566)..(566): n is a, c, g, or t
  misc_feature (570)..(570): n is a, c, g, or t
  misc_feature (626)..(626): n is a, c, g, or t
  misc_feature (650)..(650): n is a, c, g, or t
  misc_feature (803)..(803): n is a, c, g, or t
  misc_feature (821)..(821): n is a, c, g, or t
  misc_feature (959)..(959): n is a, c, g, or t
  misc_feature (974)..(974): n is a, c, g, or t
  misc_feature (977)..(977): n is a, c, g, or t
  misc_feature (991)..(991): n is a, c, g, or t
  misc_feature (1040)..(1040): n is a, c, g, or t
cagatatgttatatgtgatttctgtacataaggagtatgagagtaacccttttacaaatggaactaatttactagaacaatgacaaaactgaactggtatttgatgtgaatccacaggagtttaagcttcaaatccagccaagaaatttgttacaatctctttcagctttgcatctgattgttctgagatctttccatcagccctgatagtgcccaacaaggcttggtgctggctgacgacatgagacaagaaagcattctcaaactttgtaatcttgctgggctccagtttatcaagatatccccttacacccgcatagataacagccacttgttcttcaatagccatgggagnatactgtccttncttcngcanctnagttagangcncgcnacgactcaanngttgttgagtggcagcntcgaggtcagacccgaactgggcaaaagcagcnacctcacgatactgagccaattccagcttcatggtacctgctacctgcttcatagccctggtttgggcagcggatccgacacgagatacagacagaccaacgttaattgcngggnggatacctttgtagaacaattctgtttccaagaagatctgtccgtcagtgatgganatgacatttgttggaatgtaagcngacacatcaccagcctgtgtttctatgactggcaaagcagtcaaggagccaccaccaaaagcatcgttcattttggctgctctctccagcaaccgggagtgtaggtagaacacatcaccaggataggcctcacgaccagggggtcggcggagnaacagagacatctgacgntaagcaacagcctgtttggataagtcgtcatagatgatcaaagcatgtttgccattgtctctaaaatactctcccatggaacagccagagtaaggagccaggtactgaagtgggggagcatccgaggccgtagccganaccacaatggtgtanttnatggcatctgcatntgttagtctcttcaccaatgggcaaaatggatctcttttgaccatagcnacataataaataca

SEQ ID NO: 486883 - DNA, 762 bp, Homo sapiens
ttgtttttccaacttctgctggaaagtcggggatttctcgtaggtccttccccttgttgggcctcttacttgtatggagaacctggccttttaggatactacactggtctcaatgttgttttggtcgaaacttttcctgagctttttctagggggttcgctctacgtgcaaggtccaagcatcctcagatttggtgacctacctgagaagaaagggcaacctggacagggacacacagtcgctcccagcaaggcgcaaaagctttccgtttttcaccgtagtgctgtctgcctatccagaagacggccatggatgcctcgatgcccgtcgagggctagctcatcaggctgttcatgatgtccggtgcgaggcatagtggctgctaaggacagggcaccaagcaatacaggttgccactggagggtccgggtgcatgcggcgtcagagttcagcagcattgtccactcctcctcttagctctgacgtctagtgcatcctagcttcgtgagtggacatctcgtggaggggacacgaaatgactgatctcacccgtttcccagtattcagagctagtgaacccctgtggccgcaggattggcctgtgtcatgttattcttcggattgtaaatcattctcctgtggaattggcaaaagcgtacatttgttcactgtccttaccagtcaacagcttcgcgtctgtgcacactggctagtgacgtgtgggctcgtcggtgtctccgtgtgtgtacatatgtgtatact

SEQ ID NO: 486884 - DNA, 287 bp, Homo sapiens
cgagatccgctcgcctcggacacccaaagagctgggattacaggcgtgagccaccttgccggccttatcagataatttatttaaaagaaaagagagagagagagataaagatgggtagattatacacaatgtatacaccaaaaagaggacatctttatccgtgagtcagggaatatataagagagatatcaaaagtccctcgccgcatgagttccacatcacatataaagtgctttcatttgaatagacaaaaaataatcttggggaaaatacgagagtaaaaacag

SEQ ID NO: 486885 - DNA, 1241 bp, Homo sapiens
  misc_feature (342)..(342): n is a, c, g, or t
  misc_feature (814)..(814): n is a, c, g, or t
  misc_feature (920)..(920): n is a, c, g, or t
  misc_feature (926)..(926): n is a, c, g, or t
  misc_feature (954)..(954): n is a, c, g, or t
  misc_feature (1107)..(1107): n is a, c, g, or t
  misc_feature (1114)..(1115): n is a, c, g, or t
  misc_feature (1119)..(1119): n is a, c, g, or t
  misc_feature (1122)..(1122): n is a, c, g, or t
  misc_feature (1124)..(1124): n is a, c, g, or t
atttggagaagtatcgtcctaaaatgcggctgcgtttcaaacgattccaacggctcatagaaacaactgttgcattcaactaaaattggggtgcctaatgctactggaagtggaacttgacgatagggcctacatttgtctatacatacttagccaacatgttggcttagctaagtctaactgaagctcccataggagtattgacaacggcagttttaccaggcctcaagctagacagatttggcaacctctgtattcgggttacagtcaacctatcttggatacttggcaacaagattcttgctgtcagcatataaaatgtgctgtcattgtatcaatganctttccccaaatcatgcagtatgagttatgactgttaaatctattcccatgccagaatcttatcaatacataagaaatttaggaagattaggtgccaaaatacccagcacaatacttgtatatttttagtaccatacagaagtaaaatcccaggaactatgaacactagaccttatgtggtttattccttcaatcatttcaaacattgaaagtagggcctacatggttatttgcctgctcactttatgtttacatctcccacattcataccaatatacgtcaggttgcttaaccatgatttttttttttttttaaccaagtcttacagggattatttacgtgtttccatggtttctcacttggggcggtattaaaaaaacctccatttggaaaatctacgttggtacagaagcacatggtctttaatggtgcttcagacaaaaaaagccttacattaatttaatggtgtggnactctggaggtggcaacttaacaggggagggcctgagaaaagaagggggagggggctataaattatttttagcaaaaggtggccttggtctggtggcaaacttgtngaatangctctttaatttagtaaaatattttttnaaaagggtagagatgcttggtatggtaatcataaattcctgaaattctggtaattttttcccatacttatcagaggtgtgtttaccacttatttggttggaaggtgatttttttttccttcccaactctttggaaaaagagtgcttctggtanggatggnngaanttnanttttatatggtaggcggggataaattggggctgacatggttttgctcgcaaggggtggtctgggtggaccattattgggggtggctgctgcgcgacaattcgggtccgtgtatggga

SEQ ID NO: 486886 - DNA, 906 bp, Homo sapiens
  misc_feature (36)..(36): n is a, c, g, or t
  misc_feature (44)..(44): n is a, c, g, or t
  misc_feature (49)..(50): n is a, c, g, or t
  misc_feature (52)..(52): n is a, c, g, or t
  misc_feature (57)..(57): n is a, c, g, or t
  misc_feature (479)..(479): n is a, c, g, or t
  misc_feature (585)..(585): n is a, c, g, or t
  misc_feature (591)..(591): n is a, c, g, or t
  misc_feature (619)..(619): n is a, c, g, or t
  misc_feature (772)..(772): n is a, c, g, or t
  misc_feature (779)..(780): n is a, c, g, or t
  misc_feature (784)..(784): n is a, c, g, or t
  misc_feature (787)..(787): n is a, c, g, or t
  misc_feature (789)..(789): n is a, c, g, or t
tcgtcgagctcggcctagttagaagttcatagcatnagcaaganacccnngncagcnatgccaggcagcaatgtgctattgaaacttaggaagattaggtgccaaaatacccagcacaatacttgtatatttttagtaccatacagaagtaaaatcccaggaactatgaacactagaccttatgtggtttattccttcaatcatttcaaacattgaaagtagggcctacatggttatttgcctgctcactttatgtttacatctcccacattcataccaatatacgtcaggttgcttaaccatgatttttttttttttttaaccaagtcttacagggattatttacgtgtttccatggtttctcacttggggcggtattaaaaaaacctccatttggaaaatctacgttggtacagaagcacatggtctttaatggtgcttcagacaaaaaaagccttacattaatttaatggtgtggnactctggaggtggcaacttaacaggggagggcctgagaaaagaagggggagggggctataaattatttttagcaaaaggtggccttggtctggtggcaaacttgtngaatangctctttaatttagtaaaatattttttnaaaagggtagagatgcttggtatggtaatcataaattcctgaaattctggtaattttttcccatacttatcagaggtgtgtttaccacttatttggttggaaggtgatttttttttccttcccaactctttggaaaaagagtgcttctggtanggatggnngaanttnanttttatatggtaggcggggataaattggggctgacatggttttgctcgcaaggggtggtctgggtggaccattattgggggtggctgctgcgcgacaattcgggtccgtgtatggga

SEQ ID NO: 486887 - DNA, 211 bp, Homo sapiens
ttactctaggagatgaaaggaaagtgcatgaaggtagtttcctcaattttttgcaagatgacatgtgaaaaaatattggtgaacctagctattcctttcctgtatttgtgacaagatattctataataggaggatataatcaagccattaatgtcaatgtcgtttttgttatcatacaaccagtaaggatctaatgagtaatgcgcaaaca

SEQ ID NO: 486888 - DNA, 112 bp, Homo sapiens
aattcacgcacgcgcaattacgcaaagcgtccaagcctcacacacccactacctccaaaactcccaaacataataactgaactactacacaacccaaatagagaccaatctt

SEQ ID NO: 486889 - DNA, 119 bp, Homo sapiens
acttccaggacttaaaacacgcaatctcacccctctgctggttatagggaaccagaatgatggcctcagcaggaccaccccaacaaggatgccagcagcaacaaggtccaccacctcct

SEQ ID NO: 486890 - DNA, 107 bp, Homo sapiens
aggtaaggttgtcacgtggaacaactgataaaggtcagctatatatgtagagctatatatgtgagtcacaaggtgtgtgacatacgtgtatacgtataatatgcgtt

SEQ ID NO: 486891 - DNA, 842 bp, Homo sapiens
  misc_feature (145)..(145): n is a, c, g, or t
catgatggctgcaacactgtgtggatccccgatgtacatggctcctgaggttattatgtctcaacattatgatgctaaggctgagctttgtgcgagcgattagggaacagtgatataccaatgcctacgttggaaaacccacccnttttcagggccaaataagtttccccttttccaaaaagggaaccagttttaaaaaacggggggaaacttttgggttttgttctaacgtttgggaaaaatctacacaaaaaaaaaaccccaaaggggggaacggcctttttatatatgtgggcgccccattaataagggttataattttctcccccaaagcggaacaggaggacagaaacccacaacagcccgccacacagagttttctctcttccacaaaaaaacgccccgccccctttgttgttttttcgaactacaaacttttttttctgcagctacgggggggggggggggccctgttgattttaaccaaagttgcctcttccgctttatattagttccccgcgccagatgttgatgtatcgattttctctagggcgggggggaggaggaggggcagggggctcaccaatttaacattctgggcggaggggggagaccccttaatatgtttttgcacgcgttcacacccgagaatggcggcgacatcaagacaagtgcggcgggaaaaaacactaaacagatgacaaccaagcgcccgcaccacacagtgaaagatgcaaacagccgaaaacacgtaacaatcagtcgggaggagcagggacaaaaatagctatcttttttcgtagcagacgaagagccaaaaacaacacacactactgtcgggt

SEQ ID NO: 486892 - DNA, 126 bp, Homo sapiens
tcaggtatactttgcaggagtgatgggggtgttgagtaagatgcaggaagaaaatgcaggaatctaacataacaaacgcactcttgcgcaacaagcacgtgcatttgagtcactttgtacttttca

SEQ ID NO: 486893 - DNA, 504 bp, Homo sapiens
cgcggtggctcacgcctgtaatcccagctctcagggaggctaagaggcgggaggatagctgtgagcccaggagttcgagacctgccgtgggcaatatagcggagaccccggttctccagaaaagcggaaaaaaaaaacacaaaggacaaaaaaaaaaaaaaggggaaaaaaaaaaaatttgtgtggggcgggattggggcttttggaaaggttttacaagagcccattgcggtgaggagcgcgcgggggccacagaggaggggcaacggcgacacactggggccaaaacgcgtggtccaaaaggggaacccggggggccaggagcaaagggcgcgggagatccctccaccacaatattaaaaaaaggcgcccggggggggagacacacggggaagggcgtctctgggaacaaacttcccaagagggggagaacaccggagaggggcccaaaccgggggagacactaacccaacccaggggggctcccaaggagagagccgagat

SEQ ID NO: 486894 - DNA, 156 bp, Homo sapiens
  misc_feature (150)..(150): n is a, c, g, or t
taacagatatgacgaatatcaccctagaggaacatagtgtttataaccaatttgaagaaaaagtgatttacagattgcttaagcattatctatcaaatctaaatggaatactttaaatcagctccatagaaaagcaacactgtgggatgnatttcc

SEQ ID NO: 486895 - DNA, 312 bp, Homo sapiens
gagacggaggaggatgtcttaatttcttgcagaggaacccacttaggtggcaccaaatcttgacttccagatggaatagtacatctatacaaggaaacagtgatggcatctatatcataaatctccagaggcactgggagaagcttctgctggcagctcgtgcaattgttgccattgaaaaccctgctgatgtcagtgttatatcctccaggaatactggccagagggctgtgctgaagttagctgcatgtcactggagccactctaattgctggccgcttcactcctggaaccttcaataaccagatccag

SEQ ID NO: 486896 - DNA, 385 bp, Homo sapiens
ccctcatgaatctcccgcatctcccacgatgccatcactatcagaccacattgtagaaagctcattactcgcttggactacatgtctggccgtgggacaagtgcatacatccaggtagggctttgagggccatttaaatcacaccaccttgctccaaggttgctggagaaaaccaatcctgactcccttagcccccaggaaaattctaaccatggagggagcgtttagtatgcggggctgggtgcataatttagctgctcttcccccgtaggggaccaccacattgtttactccctgggaactaccgggcacatttcaccgtgaagcacaatgcatctttgctattttcaggcagcatagcgtgtgtcactcactgtggggcagg

SEQ ID NO: 486897 - DNA, 197 bp, Homo sapiens
  misc_feature (184)..(185): n is a, c, g, or t
ctgaagcatcctaacagagacaggcaaactgtaaaccatggtgagaaattgacgacttcacactatggacagcttttcccaagatgtcaaaacaagactcctcatcatgataaggctcttacccccttttaatttgtcctttgcttaatgccctgcctctttcggcttgcgcaaaggatgatgnnctgtcgggtacc

SEQ ID NO: 486898 - DNA, 492 bp, Homo sapiens
gtttctccccgttgataggcatttaggttgattccatgtctgccattatgaatagtgctgcaatgaacacagacatacatgtgtctttatggtagaaagatttatattcctatgggtatatacccaataatggaattgctgggtcaaatggttgttctgtgttctttgagaaatctacagactgctctgcacaataacggaataatttacattcccaccaacaatatatgagcattccctcaccaacagtatataagcattccctgttttccacagcctcgccagcatttattttttgactttttaaataataaccattctgactagtataagatgatatctaattatggttttgatttccatttctctaatgaatagtgatgttaaacattctttcatatgcttgttgaccatgtgtttgtcttcttaaaaatgtgtctgttccggttgggctgtgctggctcgcgcctactatcccaacggggaagaacg

SEQ ID NO: 486899 - DNA, 154 bp, Homo sapiens
  misc_feature (88)..(88): n is a, c, g, or t
  misc_feature (112)..(112): n is a, c, g, or t
aggcactgacacattgaaaggaagcagagcaacaatgacacagcacggatgtgggaaaggggatcccccctttgtatgatgcaaatgntgaaatgtacaaaatcaaccatgncaacaaagaaaaagaccttgtacagcaaataaaaaaaaaaaa

SEQ ID NO: 486900 - DNA, 913 bp, Homo sapiens
gggatccgtctcgatctctgcctgggaggggcgccccggtggtgtgtgacatgttctccggccggtcgggccggcggtggggcgttcctgcgggtggacggctgggccctcggggtgtggcaccccgtgctcccgcctgcgccgcctcctccgcgtgcggtatcccagggttgtgtgtgtcgcaccaggtcttctgtttcccagcgcagctggggcggcggggccccttccaaggttccccggggaccatgggccaaccctgggagcgcacctttcattcggcatcaaagccgggacggggttgcagccgggaccttggtgggcacgaagaactcattcaaagggcgcttgccggaagccagaagggggaattccccgcgcttctgttgggccaattggaaaggtttccctccgggggcccttcttggaaagaaaacacctgggaagcagccagctaatctttgtgcctcttggaagagaacccggaacccgattctttccccttgggcgtgggtcgacagttaacatttggaaacctccaagggccaggttttgtggcacacattggtctggcgaaaggggcgcttggaacgtgttggtagaaaacaaggggccgaagttagttgcctttggggggaggaccccaataccaggacagaatttcaaagagccgcggacaccaattcggggggggaactttcgggcattacaggggttgggcaggaaacatccatttcatgggcaggtgacttcacagtacacaaggttgtgtgaaaacggacaattcacgcctatgtggttgaacgtcctgaagaaactggttggacatacaagttcttgggcatcactggacgggtcttacgacatacagagggggcccacagaagcaggcctcttcaaacggggtggtgtc

SEQ ID NO: 486901 - DNA, 192 bp, Homo sapiens
actggcggtctactagagaagaaatcattcctgagaaatccaaaagaaaaaaaaaaaagaggaatggtagctagtatcttctagcctattctttttggccacttttctttcttttttttttttttttttgtggaaacaaattgttccactctttggcccgggttccttcgggtgggcgggttacccgcgccc

SEQ ID NO: 486902 - DNA, 703 bp, Homo sapiens
ggtggtgtgtgggctgagggggccggggctgggagaagcccgatgggcggagagacgcgaacggggactttgattgaagcagttggcgcgaggcgcagagcgcgagaggacaccgcaggccctgcgcatcgctagacgcacaaagcctctggttcggcgcccagactgggtgcgcgccgacaacatgacgcgaggtgccgaggtgtgtgctcgctgggggtgtggactgactggagggcctccaatccttagttcctcatacttgcctgtaactgtgccctcggctggtgcaggcacgtgtctccgtgccgtttgcgccgctggcataacctggacggctatctggaagacctacttactgcacgggtacgctgtgactgccagcgactgtgtgtgttcatgttgggtcaactccagttcgcctgcactgatgctgttgatgccccgtgacctccagggtgtagagtaaagtagggccaggccagcggctctatgctgatccttgggaggtaggaggacagatgtgatggactactcgtgtgcccgatggaccacatgggcctttgagctagcgtgcgagaccattgcgaggtttgagagggggatcctgggcttgagattcacggctacctcctgttgtggcagcgtgtgcactgacgtacctaactctggtgtgtctgtctcccaccgtggcaggggagga

SEQ ID NO: 486903 - DNA, 211 bp, Homo sapiens
  misc_feature (47)..(47): n is a, c, g, or t
  misc_feature (145)..(145): n is a, c, g, or t
tactctagagatcgcggcggtgcatggtgtcgggggtgcagcatagngagatgggtagtggagtgagggagatggggtaagtgagtgagggaactggggcaggcacatcacatcctggctaggattcgtgtagtgcttcacgtgncatgtcacggacttgccggctaggcactgtgttgccggagtgcaatggctgctcgtggtgtacagg

SEQ ID NO: 486904 - DNA, 205 bp, Homo sapiens
ataagtgtagagggaaggttaatggttgatattgctagaggtggcgcttccaattaggtgcatgagtaggcttactagaagtgtgaaaacgtatgcttggattaagtgcgacagcgtatttctaaggatagtccagtagaatatagaacttgtgaagatagataagtgtagaagggaaggttaaatggttgatatatgctaggtt

SEQ ID NO: 486905 - DNA, 136 bp, Homo sapiens
gcttaaagggggggaaaccaaaaaaaaaatttggttttttaaaaggcccttttaagttttaaaaaccagggcccccccggggtaaaggccaaaaatttgaaagttatgggcccaaaattgtttaaatttcccccca

SEQ ID NO: 486906 - DNA, 334 bp, Homo sapiens
gagatggctttctattgcctgctcagtgagcacctaacttagtattagtatttggtagatgcctactaagcactgagtgaatgcatacatatcaggccattaagagctaaaaatacttttttttgagatggagcctcgctctgttgccaggctggagtgcagtggcacgatctcagctcactgcaacctccgccttccgggttcaagcaattctcctgcctcagcctcccgagtagctgggactacaggctcgtgccaccgcgcccagctaattttttgtatttttagtagagacagggtttcatcatgttagccagaatggtctcaatctcct

SEQ ID NO: 486907 - DNA, 181 bp, Homo sapiens
atacgattagccaaggtccacttggcccagcactaagaaaaagatgcgtagtttgcacagaaggggttgtgagtactgactcgtcaacagcaccagcagagttgggaacgtagcaagagcacatgttgttgcagtcagtcagagtgtcctcagagtggaaaagtcacgtcaagtagtacgg

SEQ ID NO: 486908 - DNA, 226 bp, Homo sapiens
tatcccgtgtagcgaatcgggggtatagctgttcgaattcataagaacaggcaggttagaaataaggtcttgcgtgacaaaatatgttgtgtaagtacaggcgaaagtgcctcatatgttgttcctacgaagattgtattgtttagggtgtatattattattatgttcgtgtttccggctattaagaatagggcgaccgggcctgcggcgtactcgatgttgatcc

SEQ ID NO: 486909 - DNA, 340 bp, Homo sapiens
tggtagagacaagatctcactatgttgcccaggctggtctcaaattgctgggctcaagggatcctgccgtcttggcctcctgaagtgctgagactacaggcgtgacgaccggagccagacattatcttacattcaatgaaacagtaactttctggtgctgatgctacagttaacttaatttttgttacctttctgcgacttaaaatgtttctttcaaagtaccaatgtaaactcccttggaaaggctatcctaccagattaaccagatatctatgttacttacataactccccagactcaagcttgacttaagcaaacaaacctttagttttgtttagtc

SEQ ID NO: 486910 - DNA, 551 bp, Homo sapiens
ggatctgcaacctgccgtcgaatcgacgagcatcgcacaacgcgtcgacacgatcgactggccaaccgtcgatgccgaactcgatcgctacggatgcgcgcacgtaccgggcctgatgccggcaagcgagtgcgatgccctcacgtcgctctatccacgggatgcgctctatcgttcacgcgtcgtgatggcgcggcacgggttcggacgcggcgaatacaagtatttcgcgtatccgctgcctgcgctcatcgccgagttgcgcgaaacgctctacccgcatctcgcaccgatcgcgaatcgctggaaccaggcactcggaatcgacgtccgctatccgaaagaccacacgacattcctcgatcgcctccatgcggcgggacagacgcgaccgacgccgctgatcctgcaatacggccccgacgactacaactgcctccatcaggatctctatggcgaacacgtgttcccgctccaggtcgcgatcctgctgtcggcgccgggccgcgatttcaccggaggggagttcgtgttgacggaacagcggccgc

SEQ ID NO: 486911 - DNA, 199 bp, Homo sapiens
acgctcatctagatggctgatcatccgcaagcctgtgacggtccattcccgggctcgatgccggaaaaacaccttgtgccgccgtgaagggcaggcacatgggcataggctagcggaagggtacagccaattgcccgaattgccacgagaaggtcacatggattagcgagaatgactgattttgtcgccggcttgctca

SEQ ID NO: 486912 - DNA, 378 bp, Homo sapiens
ggccgcacagcttctcggccgcctggagaataagtgtgtcactccctccctttttcctccttccccatgaaggtcaatgagaaactgtaaatagcaaggatgagggaaagtgaggaggccagggaggccattgcattcatctgtgttctaaaatatccaactcagccacatgcggtggctcacgcctgcaatcccagcactttgggaggccaagacagatggatcacgaggtcaggagattaagaccatcctggccaacatggtgaaaccccgtctctactaaaaatacaaaaaattagctgggcgtggtggggtgtgcctgtagtcccagctactcgggaggctgaggcaggagaatcgcttgaactaggaagttgg

SEQ ID NO: 486913 - DNA, 487 bp, Homo sapiens
cagaaggcatcagaggccatcgggggctccatcctggtcccctgcccgccaaaaaaatggccttaggaatgacccaggtgggtgggcatcctgcttgtaacattccccaagggccccagttggttgcccagaacttgggcttcagcctggccaacttgttgttgagcaaaggagccaaaaacatcctgggatgttgcccggcagcttaacaatgcccattaactggtttgtggggcccaaatgcctgggttgttgctgtccagtgcctacatcccgggcctcagtgccccattttccctgctatttggggagtgattaccccgggagattgaactgcagggttcaacccttccagggatttgcctccccttggggccttgatgactcccttgcccccccagtatgtggggggttcatttttttaaaaaagtccaagcaccaccctttgaatgtaaccaatcctactaataaaccagttttgaaggta

SEQ ID NO: 486914 - DNA, 737 bp, Homo sapiens
aacaaaacttagaagttcgtcctgcctgggcccatggcaataaatcaagagctcaaaattaaatccgtttgtggacctcaaacacccctgagggctgcaatgtagggtccagaaggattttgacccacagaaaggaagcccatggaacacaagttaaagaggttttgctggccaggtatgtggctcacgcctgtatcccagcacttgggaggctaaggtggcgggatcacctgatgtcaggagttcaagaccagcctggccagcatggtgaaaccccatctttactaaaaatacaaaaaactagccaggcgtggtggtgggcacctgtaatcccagctacttgggaggctgaggcaggagaatctcttgaacccaggaggcggaggttgcagtgagccgagatcgctccactgcactccagcccaggtgacagtgtgagactccatctcaaaaaaaaaaataagaggccgggtgcggtggctcaagcctgtaatcccagcactttgggaggccgaggcaggcagatcacgaggtcaggagatccagaccatcctggctaacacggtgaaaccccgtctctactaaaaatacaaaaaaattagtcgggcgtggtggcggacgcctgtattcacagctactcgggaggttgaggcaggagaatggggtgaacccgggaggaagagcttgcagtgagccgagatcgcgccactgcactccagcctgggtgacagagccag

SEQ ID NO: 486915 - DNA, 164 bp, Homo sapiens
gatttataggtcctagctgttcttgagtaacaccgtcgagaaagcgtatatactgaagagtgccttagttgacaggaggtggaagtcaggcggtatcttggctaagggaacaggtggtaaaagaaagcatgtaatgatattaggatgaccactcaagatgactg

SEQ ID NO: 486916 - DNA, 548 bp, Homo sapiens
gagaagacgtgcggagggagacgcagagacagaggagagtgccgggcatgccacccagtctcgggggagcacttagctcccccgccccggctcccaccctgtccggggggctcctgaagccctcaggcccaaccccgggtctccctcatggaagccacgcgtgtgccccagcgaggtagcaggagtgcaggtggacgtcggctgaatgcgcacggtgcgctcgtgggccttctgagtcccatcccgctcctagccggtgtccttaagggccgttctgagaacacgacacacccgtaccaaagcttatgactctggactctcatcacgttcagagcaccctagacacccgataaacctcgacataaagcactagcctacaccgcatgaaaattgcacgaaaccccctccctacaattcctcgcaaagtcaaatcccattgggaagacccagcatatactagtacactacaagaataatacttgaacattcagacattaccactaagaataccgaaatacatcacttgaatccttctagacactacacag

SEQ ID NO: 486917 - DNA, 218 bp, Homo sapiens
acatgaggcggcacacaataggcagcaacaactgtgtggaaagctggatgaactggtcagtagcggaacatgggaggtgacactgggtattaccatgagctcaaccttagattggatgagctcaatagaatacacagtgttcccaaacagagaggggcatagcccaaagcccctttctctgcaggcctccttaatgagaaaaaggcactcagagaaaa

SEQ ID NO: 486918 - DNA, 785 bp, Homo sapiens
  misc_feature (754)..(754): n is a, c, g, or t
ggcggccgcctttgcaaggttgctggacagatggaactggaagggcagccgtctgccgcccacgaacaccttctcaagcactttgagtgaccacggcttgcaagctggtggctggccccccgagtcccgggctctgaggcacggccgtcgacttaagcgttgcatcctgttacctggagaccctctgagctctcacctgctacttctgccgctgcttctgcacagagcccgggcgaggacccctccaggatgcaggtcccgaacagcaccggcccggacaacgcgacgctgcagatgctgcggaacccggcgatcgcggtggccctgcccgtggtgtactcgctggtggcggcggtcagcatcccgggcaacctcttctctctgtgggtgctgtgccggcgcatggggcccagatccccgtcggtcatcttcatgatcaacctgagcgtcacggacctgatgctggccagcgtgttgcctttccaaatctactaccattgcaaccgccaccactgggtattcggggtgctgctttgcaacgtggtgaccgtggccttttacgcaaacatgtattccagcatcctcaccatgacctgtatcagcgtggaggcttcctgggggtcctgtacccgctcagctccaagcgctggcgccgccgtcgttacgcggtggccgcgtgtgcagggacctggctgctgctcctgaacgccctgtccccgctggcgcgcaccgatctcactaaccggtgcaagcnctgggcatcaccactgcttcgacgtcctcaa

SEQ ID NO: 486919 - DNA, 842 bp, Homo sapiens
  misc_feature (84)..(84): n is a, c, g, or t
  misc_feature (811)..(811): n is a, c, g, or t
gagatgacagatcgcagctaagagcagcttgctgggtctccggaggctgctggtgtctgtctcagggtacggtgcaggcacagncagtgggatttttttcccagcagagcagagagctggccctccactcctgctcctgtgcggagctcactcccatagggcagccgcctctcgcccaggaggagggtcccccaggaccccctgcctagcttgacggctgctcagacaagcaccaccagaccagcatcacccaggacgtctgccctccctgcagccaccgttagcccgggcgaggacccctccaggatgcaggtcccgaacagcaccggcccggacaacgcgacgctgcagatgctgcggaacccggcgatcgcggtggccctgcccgtggtgtactcgctggtggcggcggtcagcatcccgggcaacctcttctctctgtgggtgctgtgccggcgcatggggcccagatccccgtcggtcatcttcatgatcaacctgagcgtcacggacctgatgctggccagcgtgttgcctttccaaatctactaccattgcaaccgccaccactgggtattcggggtgctgctttgcaacgtggtgaccgtggccttttacgcaaacatgtattccagcatcctcaccatgacctgtatcagcgtggaggcttcctgggggtcctgtacccgctcagctccaagcgctggcgccgccgtcgttacgcggtggccgcgtgtgcagggacctggctgctgctcctgaacgccctgtccccgctggcgcgcaccgatctcactaaccggtgcaagcnctgggcatcaccactgcttcgacgtcctcaa

SEQ ID NO: 486920 - DNA, 217 bp, Homo sapiens
gctcgacctagagattactgaaaaaataaatcacaaatcccaaatacatgaagattaaacaacatacttctaaataacacatgaattaaataagaaatctcaagacacatttaaaaatactttgaactaaatgaaaatggaaaacacagactgaaatttgtgggatgtatgaaagcaaagttacagggaaatttatagcattgaatgcatacattag

SEQ ID NO: 486921 - DNA, 216 bp, Homo sapiens
cgggaggatctcttgagaccaggagctcaagaccagcctaggcaacatagcaaaactccatctctacaaaaaaaaaaaaaaatttttttttaaaattacccagtctagggtgtcatgcaccgggggtccgggctactcaaaaagccagggcaagaggatggcgtgatcccaggagtccacggttgcagggagctatgatcaggacactgttctcaa

SEQ ID NO: 486922 - DNA, 409 bp, Homo sapiens
  misc_feature (362)..(362): n is a, c, g, or t
attcgacacaagggaatcatacagtatttgtccttttgtgactggtttcacttagcataaagtctttaagatgcatccatgtttccagtgtttcggtttttttagaaaaactcatacgtgattgcagccgggcatggtggctcacgcctgtaatcccagcacttgggaggccaaggcaggcggatcacctgaggtcaggagttaaagacgagcctgacaaacatggagaaaccccatctctactaaaaatacaaaattagctgggcgtggtggcacatgcctgtaatcccagctactcaggaggctgggacaggagaattggttgaacccaggaggcggaggttgcagtgagcccgagattntgccactgcactccagcctgggcaacaagagttgaaactctgtctca

SEQ ID NO: 486923 - DNA, 156 bp, Homo sapiens
cccattctggcaatttttctacataaaggcttcctaaccagcccaacccaacttaacattcctttttccttctcttaaggaggggcaatagtccttactggctataccatccggggtgcacttttttttaaactaccttaaactgaattatctttg

SEQ ID NO: 486924 - DNA, 176 bp, Homo sapiens
accagacgcttgcaggacaggcgccgccagtcaggggcttgcggccgaccctcccctcccactccccactgcgcgtactccagatatgccagtgcacgtataaggtcacttcgcgtcccgtggactccccttccctgacgtcgtcacgtggactggcgtgcggcttcctggagatc

SEQ ID NO: 486925 - DNA, 257 bp, Homo sapiens
agctcgtacccttatccgggagtgaggaggatattggggaaaacatcaaagaggtgggacaagcgttggatttgtgttctagtcccccagatccagtggcttattgtggctcttaggtattaagttccacctctgtgggcttcagtttgctctactctaaaacagaaggtgaggactaaatgtgtcttctactgtctttcagtctgtaacaatacacgtattctaatggacgaatgccaagaactagggaaggtgag

SEQ ID NO: 486926 - DNA, 1703 bp, Homo sapiens
  misc_feature (845)..(845): n is a, c, g, or t
cccacgcgtccggcatttaccatctcacttctaggaatactagatatatcagctcaccacctcatatcctccctatctatgcctaggaagcgaagtaaatactagtcagctggtccgagtgtatagactactgctcatatacccctcaactacgccgatctcccatcgttgatgccagagtagtagatgctctagtgtgctcaatagcatatgtcgtgttagcacgctcctgcgaggccatgcgaggatgggacctaggcacctacctacgctctcaactcttaccgaagacatattagagcactaagacttacagtaacactacaccttagagactctagcttcgcaactgcttacgagagcgataaatcgtcccagagctaaattatgatttcactcactcacgtgcacgatgtgagctgttaccaacagaggtacgacaaataagtaatgagaattcatagcacgcaagccgacctacacagattctgaacctattagagagcattcagtccgctctcactaatgttgatggaagccacatgtcaaagcgaaccaacgcgatgagtgcaagagctgcttcccgcccagagactaagggaccatcacgaacaccgcgcgtaaagcagaaccgccacaatcgcgttagatcacgtaacaccataggctggagctcccagtacgcgccaatcacgaaacacaattgcgccgaaaggagcagatcgccacaggcgttcaatgccacagcatgcaaaacgagcttaagtcaatcggtcaccaagatggaacttccttagaccgtgccatcgttactcatcgttaccatacgtccacacgttaggganacacaacgttcccatattcaagctgcgcgtaagcacggtacccgaccacggcaaccaacggagaagggctatcaactcgacaatcaacttcagtggacatacctccaattgtcatatcccgaataacagagccaagacaacaatgtccaatttgccgcgcatacaacctattttggagcattatctcaccattgcaacccgctgtgaatgatgaacgtgggcaaatgacgctacgccacacagtgactattcggacccagttggtactaacgtgcctatgtgacaacatactttacacctattatactacatatctcatccttaccaaggacactatatggatagaggtcatccacggagtatcaccccctttacatctccattcctgcccaacgcttataactctctaaccaccgctaaacataggaacaccgccctaatgaatactacatttaaaacagcaacattctctatgactaactccaacctagtctaacatgtaccccccaagaaaacattatcaccagaccttcaggaagcgtccgacccccaccggttcacaacatggacactactaggtctttaacaagacacgctgcgtcaccctgaaacaggggccactgggttcgagatacaccacattatggagacactacatacacaccaccgattagaacccgacccagggcggggccataaaacaaactgcgcagggaatatcacacaacagcggggcatacaagaaagcgccaacagaagtaactacccacgacagtagcctaacgacacctgataaacaaagacgatctagaaagccattggtcgacacactacaacctactaaccgcaccgaacaca

SEQ ID NO: 486927 - DNA, 718 bp, Homo sapiens
  misc_feature (124)..(124): n is a, c, g, or t
ttacatatcgatgacgatgacaagtcaggctttgattagagatggagacgagagaagatgcaatggcaatggttgaccatagtcggaaaataagctccgttagtgattccaagggggagatgtngatgaaagtcgaccctgttctgtacgaacatcataacagaaactgggcttcgtgcaggactatccaaacggacgaggcatagatgttacatgaagaacaagcactattgtccacggaagaagtatcttactcttcgcaagatggcaatggaatctccgaaggatgataatcaactccaaaacgtgatggtgtccgcaggaatgactagagtaggttctaaacagaaggtaagaggaacaatggagagagaagtccggtgaagatggtgatgaatagcacttcaataggatgacacagaccagagcaggaatctaatatgcttctttgaatctgaaagtatgagctactgtgtatcatggaagaatgaagctagtcagcatctgctagaaagtggcaagttcagtgggagcacgtaggaccgactgctttgctaagtctataggtagactgttggcttctgcatgggaataacagtgctaccatcagataagtgctgtgaaaacatcgcatgggaacgtgcttccggagccatgctagagaaaagggtttaccaaacggtgtgacaagatcgaggaactctgatcaacgaaaaac

SEQ ID NO: 486928 - DNA, 145 bp, Homo sapiens
tttatcctctggagcctggtggtgatgattatctggagtcgcacacacgcgtgagaagtaagtgcatctcaggaaagtgttccaactggagccaggacgctgtcttcagagaagaaaagagacacagccaaccctgtagttggag

SEQ ID NO: 486929 - DNA, 802 bp, Homo sapiens
  misc_feature (748)..(748): n is a, c, g, or t
  misc_feature (802)..(802): n is a, c, g, or t
gctcacgtcatcgacctctcgatccgatccatacgatctccgatggactgaagaatgcggactcgatcgtgtggctgccttgtctgattctcgacagagtcagccactgggactattccatagccctactgctgctagtcagcgcagatgggcttcagagcgccatgtgtatccatcaatcgctcccatatgcacctcgtgagacgtgaacatttatgcgacgtgaactcgagtcctgactaacccttgcaacggcccagaatggccgtcgcgtcatagtatctctgtgtgatgctggcactgcgttgctctaacagcagtcggtgcgaggcctagtattagcggtactcgatgttcgtctactgcagtaacatgcgtgggagacaacgagtccgtgtcattgtaatccatcgcctgtctttgcaaagcgtactagggccaaacacgaaccttctcattaagggtcctaatgatcatgtccccaggtgcatggcccgagagaatagtcgaatattcgtggaagtgcggtcgcaaccaagctagaatttaacaaatagcatttagcgtagtcgcgcgcattcgccgaatagcgattggggaacagaccctagttcgaatgaatctgagggaggctactcaagtaagacgagtccgcagccgcgtcacagcgagttctttacgctttcacttcagtcttgcccttcattattgcaggccctagcagcactccagcctcctattcttgcancgaaacggggattcaaacaagcccctaggaatcacctcccattccgataaagtn

SEQ ID NO: 486930 - DNA, 201 bp, Homo sapiens
agccggaccgacgtatcgccaaaccacgccgggtactttttgtgttcagtagagatggggttcaccatgtaagccaggatggtctgatctcctgacctcatgatccgcccatcttggctcccaaagtgctgagattacaggtgtgagccaccacgcctggtcgtctggctcattttcttactttttgtagtgttggggata

SEQ ID NO: 486931 - DNA, 243 bp, Homo sapiens
  misc_feature (19)..(19): n is a, c, g, or t
  misc_feature (60)..(60): n is a, c, g, or t
ggagaaggtacgcatagcngctaaattcatcactcatgcacccccagggaatttaatgangtattcaatgacggtcggctactacttaataatgacaatcttctcaggggaggggcagcacatgcctttgcccagtataacatggagcagtgtcacgcgtgtgaagatagaaggatatgtagatcaggtcttaattacagagcgcggtgacctcggtgatagcagattttagatccaagaaac

SEQ ID NO: 486932 - DNA, 555 bp, Homo sapiens
tcctgaagaagcttagactgggatagacacacaattaggagttattagaccaaatggtggtctaagcccagtggaaagaatgcagctgttatgagtaattcccaccataaatcttagacactttgcaaaaagaaatctaagaccagatttgactggcttatctgccaaaatatggacagtttttgacaatgcagatgagtctgttaaaaatagttgaaaactggtttaggtagcatttttggtagcccgaatgatggacaaaccatgcagatgtggagtttgagcctggttgagtggtgtgtcctgaaagcctgcttgtttttctaacccataacaaaatgcatctgaacctctacagtctgcaaatgtgggctgggaattttgcacaaacagtccctctcctgagatttatggcacttcctaattcctagggaggccagagctaccacaagaagtgccattctcgcaatactttgaacttctggcttctccctccggcgaaaatctttgagcacgggaacactcaggttgtcctcaacgctgccacgtttctgt

SEQ ID NO: 486933 - DNA, 269 bp, Homo sapiens
ggccagagtaatcactcccagtccacaactgactgactagggtggaactgactcaatccaagccgaatcaggtctccctgaggtctctgcctatggctacaccgaggagaattgcttgaacctgggaggtggaagttgcagtgagctggagattgcaccactgcactccagactgggagacagagcgggactctgtctaaaaaaaaaaagcttctttttcaattatacaggttctgattgaacctaatttgtcaaacgaaaaattgaaa

SEQ ID NO: 486934 - DNA, 1248 bp, Homo sapiens
ttctggcgccgagaagaccagcaggttatcgatgcatacacttacccggtaatcacgtgccaaactgggcacagtgagaagacatccatatcaggcagttgttacgtacaatagtgaacacgctagagtgtcgcggcacacgctccaacgcagcatgagctggtgcaagtctggagtactactagaactagcggaggtcagtcggaacataaatggaacgcatttcgcatgcaaatccttcctgacgacacgtgaggcggtgcgtggacgatgaggcagtacggggcctgcctatcacgagttaatgccgttgggtgatcgttagcgcattgaacatcctagaacaaccgccgtgaaggcagatgcaaacggttggcggtaagtactaactcaatagggaaactacttcggtgcccattttggttggggcccacacttttgccgaacacaaccccttaagtcgcaaaaggctaaaccgtaaactttggctaggaacgatacattccatttggggccataggcgcccaccaacgggaggcaagtcacagtaggaagcccattccttgttctaccatcaaaaggaccagatggcgacctcctacgcctgccgtggccacccaaggttcctttccaaggggtgcttggccagccttcttggccaatggctctcgctgcaaaattggggctcaagggcctggccgcttgtgcctaggattacgaggcgtcgctaacaattcacctggaataacgccttagggggattacttccaatcactcaacacagtaaaggtaggcggcgcaatggaatcggctcctgtccgtaaaagccaccttggtccccccttacttgtggggcgcgttagtaacaatcaaacctttggcgggttggcttggaaacacccatagcccataaccctaacggtacccgcacctggcatctaaacccactctacaccttgggcaccttcatccaacctatggtaggaccactataccccctttttaaccaaggttctccgaacaggaacgcacttactttggaccgtgggacaaccttttgcgtccacccacgcgggcacagcatcccaagtaccacctttgataaccccatatttacacgcaacacacacccattcggggccattataccaatctcccccatgaaaccctaccaatgaataaagacagatattttatgggttggcgcgacaatgcaattaccctggggcatatgggacacacactggg

SEQ ID NO: 486935 - DNA, 516 bp, Homo sapiens
  misc_feature (238)..(238): n is a, c, g, or t
  misc_feature (294)..(294): n is a, c, g, or t
  misc_feature (304)..(304): n is a, c, g, or t
  misc_feature (329)..(329): n is a, c, g, or t
  misc_feature (388)..(388): n is a, c, g, or t
  misc_feature (393)..(393): n is a, c, g, or t
  misc_feature (422)..(422): n is a, c, g, or t
  misc_feature (462)..(462): n is a, c, g, or t
  misc_feature (513)..(513): n is a, c, g, or t
cactctagcctgggcaacagagtgagactccgtctcaaaaaaaaaaaaaaaagaagaagaaacaaaagtttttaaaaacaaaccaggcatggtgacatgcacctgtagtcccagctactcatgaggctgaggtggggggatcacttgaacctaggaggtcgaggctgcagtgagccaagatcataccactgtactccaacctgggtgacagagtgagaccctgactcaaaaagagtanttctgtagtgaaaccattaatatctacagcaataataaagactaaacatagcttcnttcagttacnttttaccctatgagttgtggcaccntacagcaaaataaaacaaaacttagggttttttagattctgaaggccgcagggcttatngctcngcctgcatcccagcactctggaaggccangtgggtagactgctgagcccaagggttcagaccacctggncaacaggtgccttgtctctacgtactagcgggtgtgtggcatgtgccgttnccc

SEQ ID NO: 486936 - DNA, 164 bp, Homo sapiens
tctataaaggaaccaattaacaggcacatattggacaccagtgtgtttgacactgtgccctactgcgtatccctgctgttcttctacaggagctctaccattctatttacggggcagatcagaataaaacacagttctactttgaacgcttgtgagtatacgtg

SEQ ID NO: 486937 - DNA, 163 bp, Homo sapiens
ataattctgggaagaggttgtaactgtgggcacactgtcaacgaagtgcttgaaccaacctacgtgatgactcgtgctttgacccctacacagtttcccattatgcctgttggagatgagtgggaacgaatgtctgaatcagtgctttaaactgttgtgctgt

SEQ ID NO: 486938 - DNA, 132 bp, Homo sapiens
  misc_feature (32)..(32): n is a, c, g, or t
acacgaacgctttactggttgttaggcacatntgtaatttactctctctacaggttttctagtgtcaagagctgtcctctttggctaacagttacattaccaggggattagacgggtctgtgggcaatttaa

SEQ ID NO: 486939 - DNA, 761 bp, Homo sapiens
gagcgggtggggggctcggaagatggctgcggagccgagcaccgggcagtggctgcagtgcggcgtgcggcggcggcgggccgtgagcgctggcgggcggggtgctccgcccttgcggacgtggggcgctgagcccgagaggcgcggaggcggcgagggcgcgggggctctgaggaccgctcgggcgcccggactcctggcacaccatgggccagccgcagagggacgcagtccaaagagcaaaactgcgtgtggaaaccgtgacgaaagggatgcgtgacatgctcaactcagtggcaggcagggctatacacccaaggaaaggttctaggtgcagtgaccgaacaaagcagccaagcaattcatttggctgacactgctagcgttgcaacaggacgggcaattgcccgtccatttgacagttccacgcctggacgaactgccaatggaccgaccatgggcactcatccctggacggcagcacgaacaaaggaactgggcaatgcgccggtggtagcgaagcaaacgggagtgaggcaaacgaacggatgaccccaagttggccggcgcgcagaagcagtagtatggcccacaacgggatagccgggaaggcgttgcacaagcaaagccaaaggccagcagggggcaagagaaagaccccgtcaaaggggatcaacacgcggaaaggaccccatgcgggaagaagaagggtacatcatgacacagaaggcgaacgggccccagggcccttctacccactc

SEQ ID NO: 486940 - DNA, 229 bp, Homo sapiens
aggaagcaaacgttctcacggccatctgtgacatggtagcctggctaggctacacaccttacaaagtcacatatgcgtctgactattttgaccagctatatgcgtgggctgtggagccatcagcatggctaattcaatggcagaggcacccgcgagttagaggcacccgcgatgatagaaggcacccgtgaggtagaaggcaccgaggtagaggcacccgggaggtaga

SEQ ID NO: 486941 - DNA, 301 bp, Homo sapiens
agaatgtggtgttcggtggtttcatcactgtgtgaacctcagtgttcagacaaatctagatggtatagcctactacacacatgggctctatggtatagtctattgctcttaggctacaaacctgtatagcatgtactatagtactgaatactgtaggcagttataacacaaaggtaagtatttgtgcatctaaacataggacaggtacagtaagaatacagcacaaaagataaaaaaatggtatgccatttttatggcatagctcctgctttcgagtgagtcagtgagtgagtggtgagta

SEQ ID NO: 486942 - DNA, 490 bp, Homo sapiens
  misc_feature (81)..(81): n is a, c, g, or t
agtttctaacactccaatgctaactttttggatgtatttctttctagcatgtagaaagggcttttcctggcagccaagaanagccctttcttggctgccaggaagtagggagcagggatgtggcatggtgatgatctgaggacagccaggcatatgctcagacactttggaaaactggggagggggagcagggagacagaatcttcatcttcttccttttgtgaactggggaggagggtgcttggtgacattttcctgagtataaagaaggaatacaggtttgaaaggtttgtaattgtatatgaaaacaggtattgaaaaccaatactgggggaaaaaaggcattgtaaacacttctatttaaaatgaagatttctggaacaactatactatatagtggtatcacaagtctttagctggcaagatctagcactgaaacaactcttaatttttaacttgtgagggttctttttaaagcaccacttaagac

SEQ ID NO: 486943 - DNA, 1030 bp, Homo sapiens
aactaggctaggagaggcgggtggtgaatcggccgagggatgcatgatgtagaacatcatctcgggtccgacgtgcccttggttggcaatgccccagtcctagagacttgtcctgacagtgccgcacggcctacttttgatctctcagagcaggtggctccatccccagactagacctggctgctctccgaggccctccactgctccccttattgccccattcttgtggcttgccggggcacttggctcccttcttggccggtgactgcgttccatcatctcgcccgactccccaagggccaactgcttctcactcaggcgtggtgtcattctcaggaggaccagagccgtgcgtgagcctttatttacttttcagtaaacactggtgccgtttttagtccttacttcgagatactatatatgaatatctaagtgtaaaatgagaccttttcgtacggagctgtagagtatcgctttacagagctcagctaaatcaggcttcaccaatcttgagctctgtggtctcctcaccctgtctgcatggaagacctggctggacgctctcgggagagcagacatagcaccagaagccagtgggagaagtgtgcgatccgtgtctgggccacagtagtattcactgtgtagtcttagagttccgtaagcagtctcttcatacatgtcttacagtctggagtgtactgactgaatctgtgtaagccaatgagaatacgccatccttggaggtaggccgtcccaggcgtcctttgattgccctccagggatagattctcaatccaaattgcctctaccgtccgcagggaccgcgatcgtttcccctcacggtgggccggggcggtgcaggtgggtacacgaagacgggtccccggagagggccggacacggggaccaaaccaagaggggaggggggcgtactaaaaaggaccttcaaaggccgaagggaattgacacaaaaccaccgggcgccgcgagggcccaaccaagcttccccgcgcggaagccgccgcctcgc

SEQ ID NO: 486944 - DNA, 119 bp, Homo sapiens
ccacgcgtctgcggacgcgtgggccgggctgtcatggggacccccaacaatctgacccccaccaactgcagctggtgtgcccatctccgcgctggagagcgatgcgtgccaatgccagc

SEQ ID NO: 486945 - DNA, 859 bp, Homo sapiens
ttggaggtgaccgggggctgcatggaggtgaagccgcatggggacttggtgtctgccatcagggctggtgggaacgaccaccaagtctgcctggtggtggactgtgcaaactgacgagttcttcaagaaatgcagagtgatccgcatctctaggcagcgacctgaatggtcccctgcctgtgcccttcaccaatggggtagtatacagcaaaggagcacacagtcgtgaagcccttggcagaggcaggccttggagagccccaggccagtcctggtgagatccggcctccagtgacatcagcgaggagctgaattcccagagacgagcccccaaaacaggactccactagctgccctcgtcgtacctcctccgtccgatcccatcctagacttcaacatctccctgtgccatggtcaaagagagggccgcagcatgaaacgcagcagcaaacgggccccgcagatggactgcgagcaatgaaagacgaactcttcgaggaacctctgagcgccgtggtgcacccagtgactgggagggcgatgccagctattcgcacccacgttatttccttcttccccaattactcccctggatcggtgtcaagttcgagcaccccatagtcccctttcttgacaaatggatttttctagagaactatgttcttccctgactttagcggaacggtgaatgtgttcccggtcgtcgccgcaaggcgggcaggggactcctgcctccgcgtcctccctccgtgggtgcttatccttgcgggtgtccctttggcggctgccttggacttcgctggactggcccgcccgggtctcgggcccgggagagggggctccttgcgccctgtggatg

SEQ ID NO: 486946 - DNA, 215 bp, Homo sapiens
caggccggaaccgcggatcgagaacttcacgccttcattattcgccgccttggcatagacgccggcctggtacttgaacacgtcttcgttggtgctgacgcgcccctgttgcacgctgctcatatcgatgaaattggtgccaccgggcacgctcttgagctgcgcctgggccacctcgccagcgctggcttcgctgctggagacctcgaccgggg

SEQ ID NO: 486947 - DNA, 294 bp, Homo sapiens
cctcggccggatgagcggctcaatcaacataaactggatcctgggggctgctgagaccacaggaaaacagtggggagcttgctggagctgcatggtttggagatactggaagaaaggtgtacaacctacaggttctgtctcgggggagagaaagaggagtgaagggtgcacttggcctcttggctcatcggggctgcccaagggtaatggtttaaaattttgagacctatttctcagttagttccaggaggttgaaccacctctctgtctcaccacagccttagaccgctctta

SEQ ID NO: 486948 - DNA, 181 bp, Homo sapiens
gaagccaagaccaaaaaaaaaaaaaaaaatggacataggacttgaatagacattccaaagagtggcaggtgccaacaagcacatgaaaagatgatcagcatcatgaatcgttagagaagtgcaaattgaatctgcagtgagatccctcttcatggccagtaggacagccatttcctaaaaa

SEQ ID NO: 486949 - DNA, 218 bp, Homo sapiens
catgaaagtggtgaatgttagaaggtgaactccacggatagcaattcaggatggagtaacacgtctctcgtgctgtcagacctatctctttgtgaatcaacatggaaggtaacctttaagcaaagatttgaaggagaagaagacatgagttatgaagctatgagtgggaggagggatgcaggcagataccatcctagtgcagacaaggtagagccgag

SEQ ID NO: 486950 - DNA, 836 bp, Homo sapiens
aaaaaaaaagtatagtaccataagaccatttttaccattttaagggtacacaatttggtgactttaagtacattcacagttctggtaaaaatcaacattatccattggccagaatgttttcatcatcccaaatagaaaccatactcattagcattcctggtctccccttcctcaagccccggtgtaacttctggtctaccttctggtatcgaactacctcatgaatgggaatcacaatattggtccttaggggtctgggcctacttcacttagcataacggtttccaaagtcatctatgtggtagtaatgtatcacaagtttaattcactggttaaagctgtataatatcccccggtgtatgttaaccaaaattttatttacgccgtccactctgtggacactgagggtggtagacaccttttggccgttgtgaacatgcttctgtgatcatggtggtcacagggtatctatcggagtcattgcttcaagcaaataggggggtaaataatctcaccagttggaacttgactggggtcaatagattgaattatccacagttgtgaactctggggggaaaccataaaactgtattctcccacaggtggtggtacccatttaccactttgtctacaagcaaatatggaaacgagttcccacattccgtgaaaaggtccttttatccaagcactttacctgttgtaaaaaattgtcctccactcttttcaccgtgttgtgagtcatgtcacgcatggattgagatgcgatagatagttatgcacacacattacattgtttgatgacagcactgttgcacctggtcatagtatactacagc

SEQ ID NO: 486951 - DNA, 248 bp, Homo sapiens
gcaaaaaacctttggtaggtaaaaaaagaaaaaaggctcctgttggggttaaaaaacaaaaaaaacccctggggggaaaaaaggccgccggttcccaaaaacccgccccctaaaaaaagcccgcaaaaaaaaaacccccccccaaggaaaaaaagcccgcggcaaaaacttttaaatttggtttttcccaaaagggccaatccttttgggcagcttttttttaataaaaccccgtttttcccggccca

SEQ ID NO: 486952 - DNA, 630 bp, Homo sapiens
tgagacgttgtttgactaatactgggtatgtacactacaagtatgggaaatagtataaagttgattaaaggttaccttctgataatttaggccatacgtattataattgggagaactatcccccgaaaaaaaaacccccttaaaccccgagtaattactaaatagtgagtagaagagattaaaaggaaaacttggctagtccatagtcgccgcgtggtgtttcaccacccgattgccagctagttcacagaattgtttcttctcccactccccctgcttcacttgactacgccctttaaaaaaaaatatataaattaaccatttaatcaggaataagtccaggaaaggaggaataaagaaagaaagataaaatagggcccaatacgccaatgaccagatgatacactgtaaccctccacccatattaataactgttaaatatgagtagccttaaatattcccatccaaaggccgagattgtcatactagattggggaaaaaaaaagacctaggctggtgccatggctcacccctgtagtcccagccctttgggaggccgaggtgggtggatcacttgaggtcaggacttcaggaccaccctgacccacctggccaaacctgtctctacta

SEQ ID NO: 486953 - DNA, 1661 bp, Homo sapiens
  misc_feature (1020)..(1021): n is a, c, g, or t
  misc_feature (1030)..(1030): n is a, c, g, or t
  misc_feature (1038)..(1038): n is a, c, g, or t
  misc_feature (1044)..(1044): n is a, c, g, or t
  misc_feature (1046)..(1046): n is a, c, g, or t
  misc_feature (1052)..(1052): n is a, c, g, or t
  misc_feature (1055)..(1055): n is a, c, g, or t
  misc_feature (1087)..(1087): n is a, c, g, or t
  misc_feature (1092)..(1092): n is a, c, g, or t
  misc_feature (1094)..(1094): n is a, c, g, or t
  misc_feature (1099)..(1099): n is a, c, g, or t
  misc_feature (1101)..(1101): n is a, c, g, or t
  misc_feature (1103)..(1103): n is a, c, g, or t
  misc_feature (1106)..(1106): n is a, c, g, or t
  misc_feature (1117)..(1118): n is a, c, g, or t
  misc_feature (1123)..(1123): n is a, c, g, or t
  misc_feature (1169)..(1170): n is a, c, g, or t
  misc_feature (1172)..(1173): n is a, c, g, or t
  misc_feature (1177)..(1177): n is a, c, g, or t
  misc_feature (1185)..(1185): n is a, c, g, or t
  misc_feature (1210)..(1210): n is a, c, g, or t
  misc_feature (1220)..(1220): n is a, c, g, or t
  misc_feature (1249)..(1249): n is a, c, g, or t
  misc_feature (1253)..(1253): n is a, c, g, or t
  misc_feature (1257)..(1258): n is a, c, g, or t
  misc_feature (1268)..(1268): n is a, c, g, or t
  misc_feature (1270)..(1270): n is a, c, g, or t
  misc_feature (1277)..(1278): n is a, c, g, or t
  misc_feature (1307)..(1307): n is a, c, g, or t
  misc_feature (1310)..(1310): n is a, c, g, or t
  misc_feature (1333)..(1333): n is a, c, g, or t
  misc_feature (1341)..(1341): n is a, c, g, or t
  misc_feature (1552)..(1552): n is a, c, g, or t
  misc_feature (1569)..(1569): n is a, c, g, or t
  misc_feature (1615)..(1615): n is a, c, g, or t
aatcaatcacggtcgttagtgtgttgtgctgacgcaccaacatcagccgtgtgtgattaaagacacggtgttggtccccctattagcctgtcgaggcgcccacccagtgggtttgcccaagagagcgcggttgttttatccgtccgccgccctcgttatctttattcccggtctccttaagggatgccaggcgcccttgggtgtgccaaatatttccggacaccaaggggcgtggagcaccaaagcacagccattgggcgggtgtgggccaaaagacaacacagcgcgctctttttccagaataggcgcgcgcccatagaagggggagagagccacaacaagaaggaaaaaagtgggggtggagagccaccacacgtgtgttctaaaggaaaaaaagaatttggggtatatgagatgggggaaagaacccaccccgtcgcggtaattggcttccacagaaattgatgaggaaattatttttggggagaaaggcaccccgctgtttggtgctacaccccagggggcgccccaacaagggagacccccccaaaatggtcgcgcaatccgctgaagtggggtccttcaacaaagggggttcttctctgttgtgttttggaaaagatgggaggagtttctctttgccggtggaaatgtttcgcccaaagagaattggagttggagagagtgtcgcgcaatttgttatagagagaaagatttcctccaagagcgcttggagattttatcctttggagaagaaagaatgtgtctcacaaagggggttattaaaaaaacctctgcgcgcgcttggagcagtagaacacgtgttccccacaactggcgccccaattgggagatcttctttgtaccaccccgtgggcgacccacaaaataggagggtgtgccccccataggggtgcccacacacaaatatatgcgccacgacaaccacatagggatattggaaagactccctcacaccgtgtggaataaggtcgccacaggagcatttaccacccgcannaggggtgtnacatctgngctctntnccgtgnctntgtgtgctctgtgtttgtgggggtgttttacncttananaaaancncnccncacccacactnntctanagagatactcccggagaagagcctctctcttatatgcgctcaacgnncnncccnacacacgngggtctccgcgccacatatctccgngagaagaganagagatgagagtgtgagaatatctacttngagncccnnagagagaggngntcacagnncacacaatgagacttgtagaaagagaagntgngctcacacataaaatgtgagatntccacgancacgccacattgtgagaaaagaacacatatgagaaaagggcttgcccacacatctatatttatatcctctcccactagaagttcttcgcttatgagaaaagtataaaaatgtctcgagaagaagccccacaggtttgagaattgggaaagctcactggaggcttcactggtgaaaggcacgtagtttctgggaaaagcccctcggggaacnaagacccggtgctaaanttggacgagctgatggatatgaaccccccgtcccagaatctgtttnaagttccagacttccaatagtggccaattaaaagtgctatttgtga

SEQ ID NO: 486954 - DNA, 291 bp, Homo sapiens
agactgcttagtatgctaatgtgaacacaaaatatctgagacaggtctcagtcaatttaggaaagtttattttaccaaagttaaagatgcacccatgacacagcctcaggaagtcctgagacatgtgccccacggtggttgggggtacagtttgcttttatgtatttcagggagacatgagacatcaatcaatatgtgtaagatgtacattggtttagtccagtaagggcagcaacaacttcaaagtggggggtttccacgttaggacataggatagggagacaaaaggtg

SEQ ID NO: 486955 - DNA, 787 bp, Homo sapiens
  misc_feature (3)..(3): n is a, c, g, or t
  misc_feature (87)..(87): n is a, c, g, or t
  misc_feature (106)..(106): n is a, c, g, or t
  misc_feature (138)..(138): n is a, c, g, or t
  misc_feature (146)..(146): n is a, c, g, or t
  misc_feature (270)..(270): n is a, c, g, or t
  misc_feature (275)..(275): n is a, c, g, or t
  misc_feature (284)..(284): n is a, c, g, or t
  misc_feature (357)..(357): n is a, c, g, or t
  misc_feature (424)..(424): n is a, c, g, or t
  misc_feature (711)..(711): n is a, c, g, or t
  misc_feature (720)..(720): n is a, c, g, or t
  misc_feature (724)..(724): n is a, c, g, or t
tgnctcccattttcattttagccattttgtcgcctgcacccactcccttcatacaatctagtcagaatagcagttctagagcacagnttctcagtctaagctatgnaaaagctccccttatccaacagagtttaaaantagtgacntgggtttttgcgagtgctttgtttactaaggactttggggaggaaccatgctaagccatgaccagtgaggagaagcaacagagcctgtctgcccccatgagcggagtctgccctctgctcctcngcagncaggtcacngcctactgcctgggggctctagtcatcccagtggaagacgaatgtaacctgcgtggtgatgtgacaactgttncccccctgaccccagaggatctggctctaggttgggatcaatcctgaatttcgttatgtgttaattnacttttattaaaaaagtatagtatatataatacaaaacaataacccttctggggtttcttgtggcggttgaaatagtcccacatgtggtcatcagaaaataagccattcctcataccaatataggatcagctccttgacctctgaggggcaggagtgcttcctggtgtgtgtattagaatcccttcctgccttgtttcatggcagtgaaatgcctcttggtcctgtccaagtgtatctttcactgatttctgaatcatgttctagttgcttgaccctgccacatggntaccagtgngcantctgagcataactgtactaaatcctttttccatatcagtataataaaggagtgatgtgcaata

SEQ ID NO: 486956 - DNA, 152 bp, Homo sapiens
aggtatgttgaggctgcatgagtcgtgattgcaccactgcgctccagcctgggtggaatgccagagtgacaccgtgagacagcgggagtgggtgagcgtagcatttctttatatataattttatttatataggacaaccagggagacccatt

SEQ ID NO: 486957 - DNA, 307 bp, Homo sapiens
cagaggttgaggtggaggatcctttgagcctggaggtggaggctgcagtagccatgctcatgccactgcattccagcctgggtgacaaagcaagaccttctctcaaaaaggggtggggaggacagttatggtatcaggtaataaaggagagagagatggcatcctgagctcagttgagggttaaacgaaagcagagaaactagccaccacacgagagagcatgtgtacacttgtagatttttggtgagagatatcgcatttctttgtttctcagaggaactcatagctagagtcagagaaaagagtt

SEQ ID NO: 486958 - DNA, 146 bp, Homo sapiens
ggtcgatctctgcaggatcccttatttaccttcttattggtacaggtcgtgacacagctacaaatcacagggcatagaatataagcccactccactatctccgtcccctcctagcaccaataggaggatttaatacagaacaaaca

SEQ ID NO: 486959 - DNA, 348 bp, Homo sapiens
  misc_feature (283)..(283): n is a, c, g, or t
agagggagcggcggaggccctagtgcttttgcttgacctggcgaagtaggagccctcgaatgcgacccggcttcactagaagtaacccttgcagatgaagatttcttcttaggcgacttgggagacttggctggaattatcaataggggcttaggaggatggggatgaatatgagaatattaatatatatagggcgagctgcttttatcgggcttggagagcgatcgggggaggagagctaacgcggggcggccgagatcctggactcataggggcctaatantttattttggcatttatggtgaggcctctgactcaggacgaacaaatcagggctctgctgaagga

SEQ ID NO: 486960 - DNA, 986 bp, Homo sapiens
  misc_feature (38)..(39): n is a, c, g, or t
  misc_feature (46)..(46): n is a, c, g, or t
  misc_feature (60)..(60): n is a, c, g, or t
  misc_feature (64)..(64): n is a, c, g, or t
  misc_feature (68)..(68): n is a, c, g, or t
  misc_feature (100)..(100): n is a, c, g, or t
  misc_feature (113)..(113): n is a, c, g, or t
  misc_feature (122)..(122): n is a, c, g, or t
  misc_feature (129)..(129): n is a, c, g, or t
  misc_feature (164)..(164): n is a, c, g, or t
  misc_feature (171)..(171): n is a, c, g, or t
  misc_feature (174)..(174): n is a, c, g, or t
  misc_feature (189)..(189): n is a, c, g, or t
  misc_feature (198)..(198): n is a, c, g, or t
  misc_feature (203)..(203): n is a, c, g, or t
  misc_feature (210)..(210): n is a, c, g, or t
  misc_feature (214)..(214): n is a, c, g, or t
  misc_feature (217)..(217): n is a, c, g, or t
  misc_feature (222)..(222): n is a, c, g, or t
  misc_feature (232)..(232): n is a, c, g, or t
  misc_feature (240)..(240): n is a, c, g, or t
  misc_feature (249)..(249): n is a, c, g, or t
  misc_feature (264)..(267): n is a, c, g, or t
  misc_feature (269)..(269): n is a, c, g, or t
  misc_feature (271)..(272): n is a, c, g, or t
  misc_feature (276)..(277): n is a, c, g, or t
  misc_feature (281)..(281): n is a, c, g, or t
  misc_feature (284)..(284): n is a, c, g, or t
  misc_feature (295)..(295): n is a, c, g, or t
  misc_feature (301)..(301): n is a, c, g, or t
  misc_feature (303)..(303): n is a, c, g, or t
  misc_feature (305)..(305): n is a, c, g, or t
  misc_feature (307)..(307): n is a, c, g, or t
  misc_feature (311)..(311): n is a, c, g, or t
  misc_feature (320)..(321): n is a, c, g, or t
  misc_feature (323)..(325): n is a, c, g, or t
  misc_feature (331)..(331): n is a, c, g, or t
  misc_feature (333)..(335): n is a, c, g, or t
  misc_feature (345)..(345): n is a, c, g, or t
  misc_feature (347)..(347): n is a, c, g, or t
  misc_feature (351)..(351): n is a, c, g, or t
  misc_feature (355)..(356): n is a, c, g, or t
  misc_feature (364)..(364): n is a, c, g, or t
  misc_feature (374)..(374): n is a, c, g, or t
  misc_feature (387)..(387): n is a, c, g, or t
  misc_feature (391)..(391): n is a, c, g, or t
  misc_feature (442)..(442): n is a, c, g, or t
  misc_feature (445)..(446): n is a, c, g, or t
  misc_feature (455)..(455): n is a, c, g, or t
  misc_feature (480)..(481): n is a, c, g, or t
  misc_feature (504)..(504): n is a, c, g, or t
  misc_feature (508)..(508): n is a, c, g, or t
  misc_feature (510)..(510): n is a, c, g, or t
  misc_feature (516)..(516): n is a, c, g, or t
  misc_feature (916)..(916): n is a, c, g, or t
  misc_feature (968)..(968): n is a, c, g, or t
ggcggcggctatttcccgccattgtgcgaagtgaaggnnaggagcncgtacgcgcccgcntgantgtngccagcagctcctcggcggccccaccgcagcngccgctccctgangcgcgggangcccgcnccccgcggctcgctgtgcgtgggagggcgcgagcnaacgcgngcnaggagcggccgagcngctgaagangagcngggcgcnggcngcncggcngcgctcggcncgcggatngcctccgcncggtcttcgccggcnnnngnanntggnnaaangcngtgtggggagnattggntnancnaccngctgggaanngnnnagggantnnncgcaaaaaananagtnaatnntaaatggnagaagaaaanaattaaatatttnaaanaaaaactgaaggaaaataatgctcctaaatgggtaacatcactgaaaaatnccnnttcattatntgaaacctaataattttgtgaaaanncgttgcataattcaagatatgtntganantgagtnttacatgggagtttatgaaacggttaaccaaaacacaaaagcacatgttcttcattttggaaaatatagagatgtagcagagtgtgggcctcaacaagaacttgatttaaactctccacgaaataccactttggaaagacagactttctattgtgttccggtgcctggggaatctacgtgggtaaaagaagcctatgttaatgcaaaccaagctcgagtcagtccctcaacatcctacactcctagtcgccacaagaggagttatgaagatgatgacgatatggacctacagcccaataagcagaaagaccaacatgcaggtgccagacaagcagggagtgttggtggtctcaatggtgtggagagcaaaacgtttagaaactgaacttctactgggcanagctgaactctctgaacttggcctctccttttgatttgaatttccattgcangagagaaggccttcatgc

SEQ ID NO: 486961 - DNA, 658 bp, Homo sapiens
agatagatccttttaacggtctaaagcaagctcatacttggtcaggtctgtcaattatagcaagtagctgagtctctgtctactatagaatagaaagaaaatggggttctagccataagaaggcttataaatctgaccatgcgtttagtcccatatgaataaacacaaaactgtgctacttggatacacagttgttatttaatgttttgtacgatctagcctttccacgtacaggcactttcatgagagaaccttagtcctcacttgaggcacttttgttgtcgggttattagtgtattgtttttgtcgggtatttgcctacattcaacccctgagcatttcaggtagacagagcgtgagttcaaaactctgttctaacggtgtttattgtagtggagtaatgggtttcgcagtgataagtcatacttttccaccgaaagggagggcttgggaatccctgagattagctaaagttaagcttgttggaagaattccttgattggaaattgtacctttgtgttttgttgctctgtttcctgaaaataactaggggatgctcctggcttcgtccatctaagtgctttgattaccttggatgcccaccgattctttcacttcaagaaaaaacaaattactgtgcagagtctctgtacccttt

SEQ ID NO: 486962 - DNA, 1019 bp, Homo sapiens
  misc_feature (1019)..(1019): n is a, c, g, or t
gggagcgaaggaggtagagaagagtggcggcgccagtgcgagggagcgtagcttggttgctccgtagtacggttggctcgcgaggaatgaatcccgagcgggctccgggactggactagagatggcgggcgtgggatggtgtgcggggctgtggctcctgacgttcctcccagtggcgcgtgagcggcactgatttgtccctggggcgtgccagtgctgaccgccggagatgaggcgtccgattagcaaggtaaaagtaacagaagcatggctcatttgcccaacaccttttggtggctagcctgtgatatctgggccataactgtagaggaaagagcgaacgtcatgatcagcaggttccttagtctaaagcctatatctggattcattactggtgatcaagctagacaactttttttttcaatctgggttacctcaacctgtttgtcgcacagattatgggcactagcttgaccatgaactaagtgattggaagacatggatcaaggttgccggttttgccctattatatcatacgttactgtactgtgaactcaattaagcagcgatatcaggacttacactctgggaattaccgcactgtactatgcatacagcgtacagagttgcagtattactagcgcactgagcatttagagtatcgggatcgtatacggcaagactgacatcgtgctacactgtgatgcatgcacgcgttgagggatccaaacacagttgctggaagtctctcccaacatacaattttcttgtacatcaagaattagcaccctgactgacagttccccttgtaattaaccttcctcattttgcttcctgctcacatggacagacctacttatcatctgtcagcaccatcaacttaactcccggcacccctctctttcagtcctctcgaaactctctctcaaaaccaagctatcacattcctatgtcatcccaactttcaaacaccacacaccagcatactattgtgttactcactttctcaaacagacaan

SEQ ID NO: 486963 - DNA, 172 bp, Homo sapiens
tggggctaactcgaaatacgtgtaagcccataaaattacttttggcataagaagatagggactcatgcttgctctgagaatttgaggacgtttttggtttgcttgtgtgtttgttttagatttaaattgagggaaatcgcacattttgaaatgcaccaagactgtgtcttac

SEQ ID NO: 486964 - DNA, 177 bp, Homo sapiens
tctatctttctaaaaagcagacccatacctttccagggtcaaagtacagaatagaatacattgatacaaagtacagaaaaatactttgaactttatccatatctttaactctgtgtaaagacttgagaagtctaatacacaggcaaaccaatacagaattgactgcagatgaacaga

SEQ ID NO: 486965 - DNA, 279 bp, Homo sapiens
agtgagccggtccaaccctaagtgccaaatgtacatatataatgaattggatagaaattgtagcatatccatacaatggaatatcattcagccataagaaagaaatggcaggcaggcgcaacagctcatgactataatcccagtgctttgggaggccgaggcaggaggattgcttgaagccaggagtttgagaccagcctgggtaacatagtgagaccccatttttacaaaaacttttaaaaattgaccaggcatggaggcacacctgtagtcccagct

SEQ ID NO: 486966 - DNA, 136 bp, Homo sapiens
tggctctttgtcacccaggctggagtacaatggcgtggtctcagctcactgcaactatccgcctacccaggttagaagtagatactacccgcctacagcctacctaacacgactatcgaacagccgcaattctagc

SEQ ID NO: 486967 - DNA, 511 bp, Homo sapiens
  misc_feature (297)..(297): n is a, c, g, or t
  misc_feature (332)..(332): n is a, c, g, or t
  misc_feature (410)..(410): n is a, c, g, or t
  misc_feature (443)..(443): n is a, c, g, or t
  misc_feature (478)..(478): n is a, c, g, or t
  misc_feature (500)..(500): n is a, c, g, or t
gagaataaaagcaggctgcctgagccaccagtggaactcgctggggtccccttccacactgcctttatgagctgtaacactcaacacaaaggtctgcagcttcactcctgaagccagcgagaccacgaacccacaagaaggaaaaaactcccaacacatccagcaagaccatgaacccaccgggaggaatgaacaaactgcggacacgtctcctttaagaactgtaacactgaccgcgaggaagttcagtgaggaccaaggaacccaccaattctgggacacaataggcatttccantctgttttcaaattgggtgtcctctttggatagtnggatgtggctttgtcttcacccacagtagttttacattgctctctctgtttgacatactttggaacattttgcccagncttggaattaatgtggtggctttcccagtttanttttccccccccaaccccccccaaaaaaaagggcnataggttggagggttacatttncccctttgggg

SEQ ID NO: 486968 - DNA, 305 bp, Homo sapiens
gcagctagttgtggtttaggcactaaaagtaatacagacatttctaagactacatttcaggaaagagtcctgaaaaagataaatgtgattcaatgcttgttgaactagcgatctagtcaggaaccgaaaaacaagacattggaagtaacagcccagagcagggctagatttgcccggtgggtaatgaagcttcagggtctcttcatatgcacaggctccttccttccttccgttccttcctctctgtctctctctctctttctttctttcctttctttctttcatggaggtttcactgttgtcag

SEQ ID NO: 486969 - DNA, 1264 bp, Homo sapiens
  misc_feature (635)..(635): n is a, c, g, or t
cgaaacccaggggcggagatcagctgactggcccggagacctcgctggtccgcttcactacgcgcggtaggcacgtgagactagatggtgtctggagctccaggccataatgcactgaatggtcgcttgcaagttggctgcgcgcgccaggtcttgatgcatccaaacttgctccctggtgcacggtgaggagcagggtggtgcaggagacgccactggtgagaacatgcttgtgtcggccttgctcattcgtacaccttctttggagttctattccattgtggcttctatgtctcggcagattgacctctttgagctcgttgttgcgcgtttgtcgattcgctgatgacgcgagcgatagagtccctgtggaaccacctggacccaacatgttgtcaccgttggatgggcattcgtggcgcgtagggccgagctatgatccgtggcagtgccttggattcactgtcctcgaccacgttcgcttgtgatcctcagcgcaactttcacatacgtgggggtgcagacacatcgtgggacgcaaattatggggggggagaacctcggcatagtggcgcggttcgtcaaacccggggtcgtttcgccttcaatttgcgtagcgcatctaaatcgattgntgagcaggcctagggcggattcattagcgtctctccgtcgacttcgtggcgaattcgaacgcggcccagaaggcaggtctatcccggtgggcccaactagagatggcaacaccctgtgtgtccaaacgtggtcccgttcgacatgcgttccctgacgactcgggcctccccattctaaccgggacaaccagcggcgttgtggccctttggttgtccctttatccccgttggctggagggcttggaggttcggggcttggggccttggtatgggccccactttgggggcaccccctagggtgtgggacttgcggtggatggcccccagacgaagggaaacaccgggtgtgaccacgggaccatccaaggaatcagcagagcagacggcggaagggagatacctatgcggcaccataggtaaacagcagctgatgggttaaccaccggcgatggacgggaaacagcgggcgccagttgcgccgagaaccccaaataaggtcacacggtggaggattggtgcccccacgatgggagcacaagagtgggggacccttgcacacacagcggtatcagcccgggtatacaagatcagcaacacagaggggagagtaagaacctagggggaaaccc

SEQ ID NO: 486970 - DNA, 724 bp, Homo sapiens
tacaaaaaaaaggtagctttttttatgacaataggaaagactacaaagcaccggggggggaggaggagtgacccagcccctcaaaaagggagggggaaaggaaaatgtaaacatccgtgggtaaaataaagctcctccacccccagcacagctcagtgggaatttttttctcttactttttatatttcacaaccctctccagcataacacaaccacaactcccttatcactgtgtgctcaaacaaaccagcactctttcccccaccagtgaagaagcactacaccacccaaccccaaacatctaccaacatagaccactctcgagggctctataatactggtgtcgcacggggagtggcgtgggcctcgtggagagggaaatgtcgcccgaagggacaggccgtgccccgagtgctctccaccagcgaaaacccccgagagtctccccgcggcgagcggtactccacaggtgctcccaccaagagggcgcccccggcggcgcccacaaggaggaggcgccgcgcccacaatctctcccagacaactatacaccccgtggctctcacacaagagcatctccccccttccagcgggcattctacgaaagacggcgaaaaggccccatggtagtcatcccctgcggcgaaggcacctaggaaagggccacgcccacgctatctcccaaaaatgggccgggccctttaacccatctcgtgggaacatg

SEQ ID NO: 486971 - DNA, 116 bp, Homo sapiens
aatcagctcgtacccccttcatgttttgtcatgatattggaaataagctttcatataataatttggaaggtgaataaacttttgaagctgctatgttgggacaggcagaagaagtg

SEQ ID NO: 486972 - DNA, 247 bp, Homo sapiens
  misc_feature (204)..(204): n is a, c, g, or t
gacgtgtagcagtggacagctacaggaagacactctcaggttcaccacagcgcagcgccaagaacttaaaacgtacacagtaagacaacatgtaacttcctagagttaacgtttacagttcaaactagttccaattacttttcttttgcttggtgttttttttttttcttttaagagagagtctcgctctgtcgcccaggtggnagtacaggggtgtgatctcagctcatggcaacagggtctctca

SEQ ID NO: 486973 - DNA, 265 bp, Homo sapiens
ccaaattttttcccccctttacccaaaaaaaagcccgggggggcccccatttttgggttctttccccccccccccccccccctttttttgaacccttttttccccaagggttttaaaaacccccccctttttggggggccccccccttttttttttttcccctttccccccccccctcccccccttttgggtttttttcccccccggtttttttttcaatttttttcccctgggggtttccccccaattttttttttttccccca

SEQ ID NO: 486974 - DNA, 143 bp, Homo sapiens
tgctgtctagaggatccctacactgggtcgagttcagctaatcatcaaacatgtccacatccatcccctcacactgtgcagtgtgtatcagttttgtgcgaaaggaaaaactactctctctgggctgtcagcaccagtttttg

SEQ ID NO: 486975 - DNA, 116 bp, Homo sapiens
gccgcccttattgttttttttaagagcttaattggtagctttttcagctattaaaaccatttaaattgttaaccacctgatgagggcttcaggtaaattaaaggatttgcgggaag

SEQ ID NO: 486976 - DNA, 825 bp, Homo sapiens
agcggctgtgcgagttggtaggaaacttggatcttattcggtccaaggaaaaggaatgtctgacaggcttaggcttgtgcgtccccttggacttagactcgaagcttcagtatatcctctgaaatggctttttcaatagcagacttgcacaaagatggcagttgtacggatttgcatagcatgcttgtaatttgcagattttcatgcgtgacattaggctgagtacggtatgacgagtcaggttaacgactcactgtctatgactttcagctcgtaaggactggtcaaaaggacagcagtcttctatgttctgtagttcatagtattcactttcagctagaaggttaatcgtatatcgtaatttcttgagaccaggaagtaacgccgttatgtaacggtaaagccgtcagacaattatcattttagtggtaatactgacgcattttagtcccactaggtttagagatgggagatagtgactaaactggtgtctgacttttgatcctagagatttctcctctgaaaaatacatagggctgttggtgagagcagacttgaggtgatgatagttggtctctggtctaccacagatttcataagctccttggaaagcttgcttatgatcattcttaacttcttggtagctagaaattgagaggtagttgaaatctttaggagtgaacttctgagagggcataagaatgtgacgtgacgggaacaatacttaaatctgattgaactaggtgtaatataggttgtgggaaatttatttggacctggtgttgtacctggtgggataatctgtccctattaaatcaagtgttg

SEQ ID NO: 486977 - DNA, 141 bp, Homo sapiens
cacccccccgttccccgatgtcgtaactcacccacactagaagataacttctattggtatttgctgtcaggaaaggacatagaaaaaaaaagggtcttagtattcagttcagaaaaggggagaaaccattacctaccaccc

SEQ ID NO: 486978 - DNA, 699 bp, Homo sapiens
gctgcaggaattcggcacgaggagagagagagagagagagagagagagagagagagagagagagagagagagagagagagagagagagatagagagagctgttaccgttactggaactgccgtttcggcttgagcctgatcacgatgtcaacctcccacatgcacttagtcttcgtggccgtgcccatgggggcgaagccagtccggagcctggctgggattggtgaagtcctgagcatgaagctggaggaatgtggttttgacatggcctatcttgtccttggcctgtttctggtgctaaagaaagatctatacctcttccgggtatggctgacagacacttgtggcgccaacgccaagcagtcctggttctgcttcctatgcctttgagagtggtgctacgccttcttgtgatgctctctgggaagctctcaatccctagtcctcattctgagtttgcagcccgattgggactccttcccttttctctacgaaggttattgttattttcttactcaccttcctcctacttcggggtctttttggagttttcttcccttaccattttcacttttttttttgatttttgctttttcatgcccttccccgttctttttcctctttccattttcctctgtgccaggttcccgcctattcttgattggattccccggccctttccctcacccctcctttttt

SEQ ID NO: 486979 - DNA, 406 bp, Homo sapiens
gaacatcgctgttatcctgttttttttttcaaggtgcagatttcatattgtttaaacaatttgtgcagttaacacaatcatcacagggtcctgaggtgacattcgtcctcagcttaggaagatgatggtattaagagattaaagtaaagacaggcataggaaatcacaagagtattgattggggaagtggtaagtgtccatgaaattttcacaatttatgttcagagattgcagtaaagacaggtgtaagaaattatgaatgaatttggggaactaataaatgtctgtgaaatcttcacaatttatcttcttctgccatggcttcagctggtccctccgttcggagtccctgacttcctgaaacatatagatgtgaatttgggagctctgtaactatgtttttctc

SEQ ID NO: 486980 - DNA, 228 bp, Homo sapiens
tcatctgggggggcccgttcacgccttgtgcaggactgaaggccagttcaccctgtaggtcctaagctcgcttggcccatggcgctgccgggacgctaggggagggtttgaatggtagcagctggggacctaggaggggccccaaggtatggaggtagtagtagtcctgcgtgtcccagggattgtagagtagggtccatctagacccatacttggggattcctacta

SEQ ID NO: 486981 - DNA, 284 bp, Homo sapiens
aggcgtgggattcctggagcaccttcttcgggcgcaatgcagcatacggcgcgatgatggttacgcgcccgcagactatcggttacctgctggccgattcgcctaccggaactgccgcgtggatgtacgaaaaaatcgccgcgtggacggacagtgatggccagcctgaacgggtattgacccgtgacgagatgctggacgatatcagcctgtactggctgacgaacgcaggcgcatcgtcatcgcgtttctacggggaaaacaacaacaacaatttcagcgct

SEQ ID NO: 486982 - DNA, 386 bp, Homo sapiens
tgagcctcccactggttgccaggcgatggctgaactcaggagtcaagaccagcctgggcaacgtggtgaaattccatctctactaaaaatacaaaaactagctgggggtgggggtgtgcgcctgtggtcccagctactcgggaggctgaggcagaatggcctgaactcaggaggcagaggtgtgcagtgagccaagatggtaccactgcactccagccggggcaacagagcgagattccatcttcaaaaaaaaaggaaagaaagaaaataacagggtaacaagggagatcctgcggccacggggcacatcctcaaacattcacagggattggggggtcaaaacatggacaccgggaaaacgaacacgtggcctagtgatggtggaa

SEQ ID NO: 486983 - DNA, 357 bp, Homo sapiens
agaaaagttgagccaataatcacgtagagtccgtgaaagcctgtggctacaaaaaatgttgaccggtagatcccgtcgaaaatggtaaaggaagcctcaaagtactctgaggctgtgtagaagggtaaaatagagctattagactatggtgagctcaggtgattgatactcctgatgcgagtaatgcgaatgtgtttagaagtgggacttctaggggattatagcggggtaatgcctgttggggcacagtgcccccctagttggggggtagggtatagcctggagtggtaaaaggctcagaaatatcgtgcaaagaaaaactcttctgaggtaatatataggattatcgcgtgtcgt

SEQ ID NO: 486984 - DNA, 116 bp, Homo sapiens
aaaccatgacatacattccccaccaacagtaaatccccctcgcctgactagttataatgcgatgcatgcgatatcaggacggggaatgatcgacaggcttaaaagaactcattcat

SEQ ID NO: 486985 - DNA, 138 bp, Homo sapiens
caagtatacgtcatgtcatagggtaagttcatgacgtcatgtccagtggcaataaagcacagacgagacgatgagcttaacgtgggatgagaggcagatagaatagtgaacagaagcatacgcccaggtaagcagggt

SEQ ID NO: 486986 - DNA, 110 bp, Homo sapiens
acagggggtcgtgttatcgctcccagaaggcgcgcgtgtgcagcagcaaaagctcagaagaacctaaagtcggaatcggaggaagatcgaacattacgtgtgattaaagc

SEQ ID NO: 486987 - DNA, 1392 bp, Homo sapiens
ggatggagaggtcattaatggagtccaacgcaggagcacaaggatgtgatgtgaggcaggagccacctggatggccatctgtccgcgatctcatgaggggcccgagcagaagcaggatagttgctccgactctgctggcacatttccccagaacctgagctcccgaccgagcccagacatgctcgccctccactccgtcatgtccctaggtcagccttagctgccctagcgctccggtccaggtatcaggcctgaccagacggacaccacacaccagcacccagcaaaactccaacctaacaaggaacagtcacccccaaggcggccagaactgcgacgcggcgcactgagaccagccacgacctgacgctccccacccctgacccgaccgaccgcgacgacgccagcgcgcccacgcgccgcggccgcgcgcgggacacccgtaccccacccctcgccactaccaacaagtccccgggcatacacacatgcaatgctaaaatgcgaagaaacatggacaaggcccaagacagaaatgcgacagcgctacaaccatcgacacaggcacatcccagccggcaaccacggcaggcccacagcggacagcacaaccatacagcgacccagcccagcggcagcgcaaaaccacacagcggccccacccaccaccgcaccaagcgcacaccggcgacacagggcacgcacacacacagacccccacccggacacaagacaccacggagcacaccagcacagacgacaggcgacaacacgaccctaaccagggcacaccacccaaacacgacacagccgcacgccatacaccccccccaacctaccccggccccacagggacctggaacgccagacgaaacacaaccaccagcgcgccccacaacgagccacgccacccgccaccacccacgacaacagcaccctaccgcagtgaacgccacccccaagcccccccctcaccatccgcaccccgcgtccagccccgacacacgcggaccgcaagaccgacaaaccaggcaacggacccaccccccaacaaccacggcgaaaccccagaacaccaccgacgaaaggcaaggacgacagggacgaaagacaccacgcccccaccccgcgcaacacaaaaccaccagagcaacccgcaccacccgaacaaaccacaacaagaaacgagagaacccacaaagagcatcgaaagcaacactgacacagcaaaccgaggaaacaaacaaaaagaagaaagccaacagaccacagaccgcaacaccgcgcaccagcccaccacagacaccaccgacaccacgcacacgacaaacaaccgacgaccacacagcgagcaccgcccaccacacagaccgacgacaaactcaagcaaac

SEQ ID NO: 486988 - DNA, 274 bp, Homo sapiens
gcgagagacaaaggggggggtgtgtgatgccatcatcacaggcaggtgacatgtctttagcatgcttcctcctggtggccaagacaggctgtaacagagggttgttttgtgaggggtgtgggtgttatcaagtgaattagtcacttgaaagatgggcgtcagacttgcatacgcagcagatcagcatccttcgctgccccttagcaacttaggtggttgatttgaaactgtgaaggtgtgattttttcaggagctggaagtcttagaaaagcct

SEQ ID NO: 486989 - DNA, 769 bp, Homo sapiens
tggggttccttaacagtcatacttccccagtaccatccccgcaggggagggcgtctggggaaggccctggtgggagctcggtcaaacaggatgggtactggggacagaatatgcacgggtaaagaagccaaagaagcacaatcaaaagaggcgaccagcaaggtaacttcttgtggaagtagaagaatagcatcgccattcagaacataccctcactcacaccactactcgtggcaaacacaccagctccagcgtggccacccaactaatctctttcgaacctcgcaattaccacagagcaggaaaaattcagcaatgtggtgactcatattccatatgtgtgtggtcacaactcacacagacatataaaccacacatatgtgaccaggtggtggtgttcaatcgtgtattcgcacatacactacgtgtgtctcaagagagtgtgtgagtagaggagtaaataagcagcggaaacgagagtgtcacgagacagagggctcaccccgcggcggtaccacctggttcccagccgcggtggtatacaaaaccccttattacatatttttgttagggacccccagtacacacaccggagtattactaatacaccacgcggaattcccaggaccgagacacacatactacctatcacattgtggcactgtgaaagtactctccttcagttgtcagtaatgctggacgataccaacagacaatattatgaaaaccacaaaaagttgtgtaaccgcagttggaggtgaacaccact

SEQ ID NO: 486990 - DNA, 117 bp, Homo sapiens
cttagaggatccccctattcagcggcacctcgcttttcatcggcaccattagctctagaggtccatgcattcttcatattatacttgaattcaatacggggtgccgatgaatagcga

SEQ ID NO: 486991 - DNA, 109 bp, Homo sapiens
tctagagcatccccttacaacccacgatcaccccgcaaacccatcaatactaaaaccccttaaataggagaaggcttagggctttgatctgctatattaggcgttgatt

SEQ ID NO: 486992 - DNA, 156 bp, Homo sapiens
ttagaggcgaagatgttgtaggtataggcgatacacactgcccggtatcggttagcgccaaccgtcgtccttcgcgagtgaacaagtcttcgccgatacgctcttccaactgacgaatctgggccgagaccgccgattgagaggtatgcaactcct

SEQ ID NO: 486993 - DNA, 240 bp, Homo sapiens
cacattctcaacagaaaacaaacaaatcacatattgcaagaatttaacttaataaaaagaacattcacacagaaaatattgcttgagaaataagaaatagaaggtgaaaaagaaattttcaaaccccaaataatgataaaaatagatgtatcctctgtaaaaatctggactaaactattcagtcattcatggttattcagtattcagagcatgaagtgaaacaccaaagctataaaaatt

SEQ ID NO: 486994 - DNA, 934 bp, Homo sapiens
  misc_feature (498)..(498): n is a, c, g, or t
aaatattgtcaagctaacaaggttaggaaaacaaggtgtgagatatgtcaaattcaggtgtacggcgtttgttgtattgaccatgatgaggagaagcagtcgaaatgttcgcaacagtaacggacgcggactgcacctccattggaggtagagtgggactgaacgcccgaaccggagcctggactccgcttttcgactcctcccgacaagtaaattatggaccgggtgtggtggctcacgcctgcaatcccagcactttgggaggtatgaggcgggtggatcacttcaggtcaggagatcgagaccacggcgtaaatcccgtctctactacaaacatactatagacaattggccaggcatggtggcagggtgcctgtggtcccagctactcaagagaggctgaggcaggagaatggctgaagcccgggaggcggagcttgcagtgagctgagatcgcgccactgcactccagcctgtgtgacagagcgagactcgtcntcagaataaaaaaagaatctacacaagagtgaaaatttcccgggggcgtatggaagatttatttttgagtggtgttcttagatttggacttcatttggaagcacgggggtcatcggctgtggtccacccaaatagtggaatcccgccaagggtggatattggactccgtcagggtctccaccgtggcagcccctcagacccctcacgggcgcatcaaggtgtgactccctcacacaagccctgtccaagcgccctcccccatgcagcgggggtctggacacaccccacgccggcagcactccggccaccacaccccagggccccagtcgggcctaaaacttatgggggtaaccctcttccttggctagaacaaacgcgcggcccctccacgctcatcttgtggcccacgggcttgcgcatcctcaaaacgtcctgg

SEQ ID NO: 486995 - DNA, 733 bp, Homo sapiens
gaggtaggaggtcctgggtgacttcggaagtccgtagtgtctacatcgcacgatcattcgatacgctctagggcctgtgtggctaggtcggttctctcctttccagtcggagacctgctggccgtgaaatgatgctccgccagatccatcggtacaggtccaatgaagcatgcgagacgtcaagtatcgtgaccgatctgcctaatgttttaccctgtgtcctatctatgtcgttcgagggtgcgccatcgtgttctagttccctgggaacgtccatcgatttacgagcgcatttactcgtccgtcagatgcagatcctgactcgtctagtgttgtgtcatcttagttggtcccaggtctctgtgaaacctctacgccatgcattgtgggcgtctctgtctgacaggatggacaggagaccggacattggtcgggatacaatacaaagctagtttttcctagttagtgaatatcggaagcagtctggtggccgctcatcttgtgcacggttgtgctggtccaggagggatagatgtgcgcttgtgtgggtcatgagactagcataggtcaggttccctatgtgttataccatctctggaggtctctggtattcgccgtatgcaccaacaggccttcggtacataacaggggtccgtgattcttggaatcctcacttggtcatggacgtcgtagttcggggaaaacttcgacagtgtggaatttttgcagttaa

SEQ ID NO: 486996 - DNA, 278 bp, Homo sapiens
aagaggggtacagatcattgcacatggaaaatattcccagcagtatctgtgatctacagcttttaaaaaggagcatctcagaataagatgtctgagatcaaaaaacatgagtatattacaaggggaaacgatggaatgtgattctcatgattgaaagcttgatttagattgcatacagcttttgctacccaagaccaagaggctctggcaagacagggtggttttccgaatgccagactgaggtgccttatgaaggcagctcgcgagtccgctgcatt

SEQ ID NO: 486997 - DNA, 106 bp, Homo sapiens
ttgcttcattacaggcaattaatttataatatatcctgaacagctcttttgtgctgctggtgtcatggctatatgagcatgcagattttgcaggtagtggacacgc

SEQ ID NO: 486998 - DNA, 409 bp, Homo sapiens
  misc_feature (15)..(15): n is a, c, g, or t
ctgcgggtcgcgganggttctggtccgcccgggatggggccgagacgagtgggtttcccgtacgtcccgccgctgtgtgagcaggactgtgcgtccgctcgctgagcaggcgcacgagggcgcggagaccactccgtggcactccacctcgcgggtggtcgtcgccccaggggactgaagcgcagtggaataactacacgcgtgggcgagcctctgagccgggcttcctctctccgtgctctccctgaggtcctgccgggaactgagaaatgagctgcaccattgagaaggcacttgctgacgctaaagcccttgttgaaaggttgagagatcatgatgatgcagcagagtctctcatcgagcagaccactgccctcagcaagcgaagtggaagcgaatgaagcagaac

SEQ ID NO: 486999 - DNA, 286 bp, Homo sapiens
gcacgtacttacctctacccaccaactgaccaagccacacgtactaaaggtcgaactcaaagatatgtacagggtatcaaccaaataccaaggggaacagtcaaccttcaatacaaggtcaaaatcagcaacaagttctacaatccagtgctgatatcagatacaagcttcaaggacaatctcttttcgaaggcttattccagtttcgtgaggctagcatgaggtgtgtgcattagccagggcgcaatttctattctcaatcaaccaatgcagcaaatgctacgca

SEQ ID NO: 487000 - DNA, 940 bp, Homo sapiens
  misc_feature (535)..(535): n is a, c, g, or t
  misc_feature (539)..(539): n is a, c, g, or t
  misc_feature (601)..(601): n is a, c, g, or t
  misc_feature (629)..(629): n is a, c, g, or t
  misc_feature (633)..(633): n is a, c, g, or t
  misc_feature (658)..(658): n is a, c, g, or t
  misc_feature (693)..(694): n is a, c, g, or t
  misc_feature (763)..(764): n is a, c, g, or t
  misc_feature (803)..(803): n is a, c, g, or t
  misc_feature (830)..(830): n is a, c, g, or t
  misc_feature (838)..(838): n is a, c, g, or t
  misc_feature (861)..(861): n is a, c, g, or t
ggttttcctgcgcaggagccgcagggccgtaggcagccatggcgcccagccggaatggcatggtcttgaagccccacttccacaatggactggcaggtcggcgctgtgtgccacagtgtgttcaatccatgcgcggccgcgtacaggactccgcagcacgtaatggcctcggctaatgccgaatgtgcgctgcccgacatcgctccctgcgctcccgctgtcaggcgtccctagtccgtgcccaatccgtgtcgcatgcctccaccggattcctgtgtagccacatcgaaatggctgcggctgcctggcctgcgtgcgttcaagccttggatggacgctctaggggtgtgccgggctacttcaccacatgacacggtgtgcctcggaccctatcgcgacatattgcttgtgcgcataccgcaatggagggcctggaacacagacgtcccaacgtgcagcgtcctcttggcaaggatcgcacatctgttggcaaagacgcgctcgagagggcaagtagctcggctccagagatctncatnctctgcgttcacccgatgagacaagtccgcttcagtgcccccaacaagaaacgtggaagacnacgtatcgtggcgtagaaagtgaacctngaanaaacctcgtgcgcaagccccaggcnttagacgcttggaaccgtggtcccattgcgcctgnntccggaagacatgtctaattacatgcaaacgggaagagaaggcgtcggaaagtccatcaacgttgcagnngagacgagcacagcacatttccgaaagacccttgcgctnagttcctcacgctagttggtcccctgntgaccaanatgcgcctcgggcgtcgtttcgngacaataactgcgcgcaaaataaagtaagcaccaacggtagaagcccgacatgaaacgagcgacctgttctgacatcaa

SEQ ID NO: 487001 - DNA, 437 bp, Homo sapiens
ctctagagtgtaaaaggaggtgagtattacctatagacattgggcagtggagctagaagcgatcatcagattgaggtttgattatttgtggaagagtattacaaagtggtggtgtatactttgtaagaaggcacatcatgtcttgtacctttatcgtgtgatcgactatagatgtcaatgcctagactctatccattcattaggggttcaatcttatcattccttatttatttatttgtgtgttgaaacatcttcataaagggaaactttgtcgtatccactatcatgttaccctgatgcaaactgcacaggaactgcaaggtaattccttgatcctttccttttgtcagctttcaaagtaatggactggttgtctagcatctttcaaagatgaccaattaccttactttatttggtgtcattatgacgtcacaact

SEQ ID NO: 487002 - DNA, 130 bp, Homo sapiens
atatttgcccaggctagagtacagcggctattcacaggtgcaatcaaagcatactacagcctcaaactcccggcgccaagcaatcctccagcctcagcctcctgagtagctgggattatgggcccgtgcc

SEQ ID NO: 487003 - DNA, 105 bp, Homo sapiens
tgggtgtttataaaaacgggtgttttccgggggtttaaagtgatgggtcacttcagtgttttttaaagataaaattttgtgcaaattttaaaacaaaaaaaaaag

SEQ ID NO: 487004 - DNA, 1168 bp, Homo sapiens
  misc_feature (625)..(625): n is a, c, g, or t
gaccagtccgagtgcggccttgcttgagtcacgtctgagcgcgattccggagactgcctgggggccgaaaaagcgggcgctaccagcaaaagggtcgtccagatagtcccgtttggagagcacacaccaacctggacggctgacagcgaagtgtggaccgacaggacagcattcacgagcatcgagtcttgatgtacggtaccgaagcgcgtgccgcagaggagatgaccgagtctcatgggcgctatagggaaagtcgtggcgagacttttcgttcgatgcgcgcggcttgacaaagttggttagtcaccttcgataagtggcaaaagagagtcgatcccaagtggtaggatacgtatcgaactcgatactcttcacatgacctgacgtcttgctgtgcgttaaccaaggaactccgtaggtcgtaataagagaaatctagccttctgtgggcttctattcgtactaagttgacaactctggcgagccgagcaagattgcgctatcgaaagttacctaccctatagtcagacttggggctctgaggaggcacggacggacaggaccagcgctaggtcgccatcggtcgggagcttgcgcctgtaggaacagacatggcaccatntcatcgaacaatcacttgaaaaagaacgtaaatcttaacacaggacatacattatgcatgtcacgctaagcctttattggtgactaggtacttggggccaatgacacacggcactattgtctccaacccagattacttaagtctcaagataaacttacccttgacgggagtggccacttttccagcaaacttctctatggcggagggcaggcagatggcacgtcatacatctgctctgagtggccttatttcgagccgttgtcaacaacgggaccctggtaggaacacaggtgatttgcgtcacgcagacctgtgcacctcgtgccttacttggtagccgtataaaataggttgccaatcgcaagggtaaaagtacagaataactggagttcatattagtggatacaggaacactaaaggagacgccgactacatggtgcttaatatctgcggacttcccacttgcgcaaagcagggtgttatcttcaattcccaacgatgtggttagcactcatcacagggtgacggtatgcacattagaga

SEQ ID NO: 487005 - DNA, 224 bp, Homo sapiens
cgtagatagatggatgcccatttagaaaattattctattcctattatacagaggaatgtaacctggattggaaaccatggtattcaaggcgcaactgaaagaatgggggtgtttatctaggagaaagatgagggggcacaggctgtgactatcttcaggcagctgaccaactttacatacattagacagatgccatgtttagagttctcaccaactgaagagtg

SEQ ID NO: 487006 - DNA, 487 bp, Homo sapiens
  misc_feature (370)..(370): n is a, c, g, or t
  misc_feature (372)..(372): n is a, c, g, or t
taacttctacaccactgacttcagactcaagtgtggcagcctcagctttactgctgttcatccatctatctccattgtgagcctttttcttaatatgtccttcccaagtgacagaattagttgtcccatcatttcaattggttgggggaaaaaaatcccagtatttttggttaggaagccagagggttaacatatttcatctgtttaatgtctgattaagacattgatagtgtatctctatccgctttcttatccatcatcctggggaaaaatgtctcagcagcgttatgaacttagcttaccctatttattcagaactgaaataagtaaataaactagcaaatttggaactaaaccactagtccaattnanagcaattgccctggacaccctgtgtttagacatattgatgttttgtataagtcttaactgattcatctcttaagcaaaattacaaataaataccacttacaaagcttaaaaaaaa

SEQ ID NO: 487007 - DNA, 1506 bp, Homo sapiens
  misc_feature (268)..(268): n is a, c, g, or t
tggctgtaacagtgttaattggatgatgagtccagggctcctgctgaagcccggggggggaggggcacagagcgaaagtggggcgctaagtggaagtgcttgaaggctgcctccggtaatgtcggctcggagcttccaaacataggcagagggcacgggttgaggccttcgggcacacagccggcgcccagttcacccggacccagaagtggaaggcgcgggccggggcccgtgacacgaggccacttgtgccaaagggtgcgcatcnacacacctcacagcacaacctccgtcacgtgagaacctcagaggccagtcatccaacaacttccaacccacggtgcacaatgtgactataagcggcacaatttaccatctcaagaacgggaccggggggaaaccagagctcgggagagggcattaggaaaatcctcatcaaaacaaacggagaaacgacacggagaacacgcctcaaacaacaaccaacacaaaagcagcacaaaaacgggagtgaaacacacaagaccaacacacccacgggcacgcgctgagcaagaggacacaagcgcaaaacacaacacacacgacaagcacacgacaagacacccacacccacccagggcacaacagacctcacgaccacgaacacagcacacggagcacacacaccagaccccagcagcaaaacagagcgaagagaccgagaaacaagaagaaacaaaaaatgacaaaaaccaacacagagtataaacagcagacaatgaagaaagacaaagcagcaaaccaacgcgaacgcggaccacaacaaaagacccgtaaaccacagcaccagaacagacacaacaacagaaagacacaatgggacaccacacacaacacacaacacacacaaacacacaaagaacgagacgaaaaaaacgcgagagaccgaacaaacaaaaacaaaacacaagatggaaatggccacaagagcccagaaaaaaagacaaaaacaaaaacaccaagacaataacagacagacacaataatcgaagcaaacaagtagtaacaagcaggtcgcaaccagggacaaatgtacaccagtagcacacaaacacaacaacacaccaacacacaaacgagaagaagcacaacaagaaaaacgaccacaaagaagagagaaaaaaacaaaagaagagtagaaaaaaccaaaagagagaaaaaaaagacacagaactagaaaggacacacgaaaaagaacaacacacaacaacaacgcgaaaaggagaaccagaacgaggacggcgaagcagcacgaaaaagagaagaagaagaagcaagaaacggtacaagtaacaacgaggacgccacacaacacaacaacaaagcagacacaacaccgcacgaagcaaacaccacacgagaaaagacaagcagaaaacgacgaagaaaaacaaagaaggaccagacagcaacacacgagaaccgaaaccacgacacgaaaaaaagcaaaaaacacgcagcgac

SEQ ID NO: 487008 - DNA, 872 bp, Homo sapiens
aggggggtccaggcccttcttcctttggggggaacccgcttcgaccttaactttggagggttggatgtggtccccgccccacaattggggaattttctgggggaagaaatctttggggggtttatttggagaggagattatgtgacctctttggaaattcttgtcgcgcgagacttttggggaaggtgccccgtgcatgcccccgctgctttagaccgggttgccggcgctcaaccaatggttggggggtattatttcgcggcattatcccccgagggcgcgagcggggttcgtcggaggccaggctctggttgtggggaacacgcctgtgtctcatgtgacgcccccagggcttctcctgttaggaccccccccggcctccgcctaattattactcttttctttgcccgctgccccgaagcgatcctattgtgcgaaccacgcctgtgggatatctccctgtgcgccgaccgcgctcccacatctcgagacagacccccaaaaacgctttcccccccggaagactttagacctcgccctctgtgcctttccctcccccctcctatagccagagaacaccacttatatgtgggagcaaccgtgtttaggaagattaaagagtaggcaccaccgctttgatattttacattgggatttcatctggttatatatagactttttccccaaaacttatttcccccacccaaccacgacacccaaatataccatgatttttccccttaaattttataaaaattgggggtttttttttttaaaaaaatttttctttttcaaaaaattcttctccatttttgtgatttttttttttttgggaaaaaaaatagattttttaaggagtttcccccccccca

SEQ ID NO: 487009 - DNA, 218 bp, Homo sapiens
catctgcttctgcgctgaatcttctgtagctgtaaggcattttacccctttgtccgtccagcatcccttcacgtcctcatcctctctaacatttatcttgtctattattcatagttttttccatgtaggtttagctcctcaggtctatttacgtccttctaatcatgtgtgaacagtggtgtctgtcttgtcggcgctgacatatacgacatgaccga

SEQ ID NO: 487010 - DNA, 104 bp, Homo sapiens
gccaagctacctcgtggagtctttgtttgtatccgacaaagagctaggctaagggcgagggctccatctgatcagatttggtggtcagcagcagcagcaggacg

SEQ ID NO: 487011 - DNA, 261 bp, Homo sapiens
ggcagctatccggttcaattaggagaaatagcatgggcaaggtcctgaataaagggagggtatgggtttaaagaatggaaaaacagcagcgtggtttggtaagagaaaggaagaatggcaacagagaaagtagcagaaaaaataggggtcatatcatgcaggacatttcagcccatgggaaggagtttgtattttattttaaatgcagtcatttttattgctgtctgtctttgtgcacaactgattgaaccggatagcttg

SEQ ID NO: 487012 - DNA, 172 bp, Homo sapiens
gcatccaatctgcctgattctgctgattctacctccctaaaaagccctcaaggccaggtgtggtggctcatgcctgtaatgctaccactctgggaggccgaggtgggaggatcacttgagcccaggagttcaagaccagcctgggcaacacggcaaaagcctatctctacca

SEQ ID NO: 487013 - DNA, 592 bp, Homo sapiens
  misc_feature (20)..(20): n is a, c, g, or t
  misc_feature (23)..(23): n is a, c, g, or t
  misc_feature (29)..(29): n is a, c, g, or t
  misc_feature (133)..(133): n is a, c, g, or t
cggccggggcacgaatcccnctntctctngggatagcagagccgctctaagttgctccatatcattggagtatagggtgctggtgtttggtttcttcatgcgttactggactcagatttaagcggtacaaagngaaacgctctggccgtcacacgtaggacgcaggaaggtcactcgtggtgaggctgacatgctcacacagtacaacagtagagggggaagatcctaagacaggggaactccagagatgagtggcggagcgcttcagttcagctttaaaggccaggacggcgcacacgtggctggcgcgctcgttccagtggcggcacgtccttgggcggctctaatgtctgcagctcaagggctggcgctgtgttaagtataaaaatgggtgtgatttttatgttttgttgtaaagtgattgttggtcttctgttgacattcggggtgatcctgttctgcgctgtgtacaatgtgagatcggtgcgttctcgtgatgttttgcggtggctgtgggggttgtacgcgggaccagctcgcgtaatgcattgcctgtagcaatgtaagaaaaggcctgtttctttaaaaaaaa

SEQ ID NO: 487014 - DNA, 259 bp, Homo sapiens
ctctaaggatcctacacgctcgtacgacgcgtatgagcccgaattatatcaatagaatgggatgcttttagattaaatgaaggtgacttaaacagcttacagtttagtttaaaagttgtaggtgattacaataatttgaaggcgatcttcttaaaagagattaaaccgaaggtgattaaaaagatcttggaaatctcatgactgcaggggcgaaattgccgtcactttaacagccctagtttaaccgcagtttaactaa

SEQ ID NO: 487015 - DNA, 201 bp, Homo sapiens
taaggatcccctgttgaccaggtaggggagtgtggtagacccagaaacttctggggacgtcagtcatatttactaatatttggaggcagtgggatgcatgctggtcccctaaggttgatgcgtatcacgttacgagcacgaacaattcgtgacctacgagctggttttctccttctggggtttccgcgttgtacggttgac

SEQ ID NO: 487016 - DNA, 1505 bp, Homo sapiens
  misc_feature (211)..(211): n is a, c, g, or t
gaccaaatgggcggatgacgccggtgcagggggggcgtgcccgcggggccctggtggacctgggatggtgtaaccgcggttggtttccgtggaagtgtttcgtcacgggtggatcccggtggccagtcggctcgctgagcccgtggactgcgtggccggaggccgaagtgccggtgtgaagcctcagcgagaacgcagaggtccgaaggantaacgtgaagtagtcatcgcccagttagccaaacgtatggcgctctgcgttgggtcgatagggacgattagtcgaattcaagtcccgtgagcggagatctagtcgtcgttgctcccttgtccacttaatcggaattcagaagactctatcgagtattcttcccttggggcgcctcttctgcaggaggatcgaagggattcaagaagcaatttagttgccaccggatgcagtagaggcactaggcgcagttgccggagaccatcgtgcatcctatgggttcaagtgggcaattgaagtgctagcgtagatacggggggagcctatcatagattgggcacaggagtactgcggtctggcagttgtatcaattgttgcgcttcacttaagttagtaggtgctaggaccattgactggcccatttacccggttggggggggcacaattcaattccccttagaggacaaaaggatttcttccaattacggatacccgctgggtgcagcacgaggggcttaacttgtggtggggcaaatcagaatgaattcggggcgatatggcccgcgcgaccaaactttgtctcccccttttggccggaggaagttcgcacctatgggccgcaggtagacaaggcgcttcctttgtatgcatgggataaccggcccattcagaatccccctttgacaagcctcgaaggggtacctactttgggcgcaagttccgtaccttcccctgattatccctttggtgggccccttaaaggaaagagtcttgcttcgatttgtagttggcgccgttgggactccatccggaagtggaccgtggctgttaactagcccttcaagggcgctccagggtggtgcattgtccgagcgtttgtcgcaagaccaccgttgagggcgataaccatttcggagccttagaaacgggtgcgagcaccgtttttggagggtgcccaggaattttctcttagtatggaacccttaaacgagggggttagccgtttggagcccgccccgaaccgtccgttggaaaacgggaggacctctgggttatttaccagcaccaaagaggttttcgccttaaatttcaagcggaagggtttccaactttggactccgagcctttccgggttcaaaagagagccgcgcagagagcagaagagaggtccttcccccgcgtgggcaggctggggagctcccaggggactccccaagagcttggtggggttaagcaaacgagtatgggcggtttttaagttaccgagtgcacacaagatctaaagcgtcgcaagttc

SEQ ID NO: 487017 - DNA, 198 bp, Homo sapiens
tgactagggggggggggtttgctttgagggaagtacgcttattttttttttttagtctttggttttctttttcccttttttctgaaaaaggggttctcgctatttttccccaggcgttctcaaactcctgggctcaacctatcctcccgccttttaccccccctaaaacctggaattacaggcgtaacccaccgcccc

SEQ ID NO: 487018 - DNA, 395 bp, Homo sapiens
  misc_feature (331)..(331): n is a, c, g, or t
  misc_feature (342)..(342): n is a, c, g, or t
  misc_feature (367)..(367): n is a, c, g, or t
  misc_feature (371)..(371): n is a, c, g, or t
  misc_feature (373)..(373): n is a, c, g, or t
aaaattgggcctttaaaaaaaaaaaaaaaaaaaaaaaaaaaaaaaaaaaaaaaaaaaaaaaaaaaaaaaaaaaaaaaagcgctcgtcgcgcaggcgcttctggtcctcctccgagaggcccttcttgaagcccttgacggcttcgcccagatcctggccgatgttgcgcagacgcttggtgccgaagatcagcacgacgaccgccagcacgatcagccagtgccagatgctgaaactgcccatggggtggctcgcggtgggaaggagggatcgaaggataacgcagcgcccgccggccgccgtgtgacggcgcgtccgtcagggcagcggntcgaccttggncgggctctcgacggtctcgaacggntgcngngtgggctcggtgggggccggct

SEQ ID NO: 487019 - DNA, 441 bp, Homo sapiens
aggcttcaggaactgcgcaaggaggaggaggttgcagtgggccgagatcctgccactgtactccagcttgtgcaacagagtgagaccccatctcaaaaaaaaaaaaaaggaaaaaaaaaaaaaatttttgggcggcttgggccttggaaaaagttttttaaacctttggtttgggggcggggccccaggtgggtacgtgtggacctggggccaaaaggcgtggtccctaagggaaactccggggccaaagagacaaggtggcgtggagttctttcaaccaattaaaaaaagcgcgccggggggggacaccccgagggcgttctcttggaacaattctcaagaagtgggagttccgaggaaggccataacggggattctatcaccggggaggtccaaggaagacgtctcagattttcatatttaccgcccggtcctgtagct

SEQ ID NO: 487020 - DNA, 303 bp, Homo sapiens
  misc_feature (76)..(76): n is a, c, g, or t
cctggatccatccagaatacatttcctttagtcatcatgtctcctgtggctcttcttggctgtgacagtttctcanctgggcagggggtgatgaacttgccattttcatcagattgtaccaagacctactatcaatatgacttatgactagtggtgttgaccttgatcacctggctgaggtagttcttgtcaggcttctccactgtcgagttgctctccccatcccccttttccatggggtactctttgaaagaaagtcactatatgcagcccttccttaaaaatattaaaatgaactagctt

SEQ ID NO: 487021 - DNA, 1092 bp, Homo sapiens
  misc_feature (114)..(114): n is a, c, g, or t
  misc_feature (329)..(329): n is a, c, g, or t
  misc_feature (443)..(443): n is a, c, g, or t
gctgagaggacgcgcgtgagcgtcgcgggagcctcgtggctaccactgagcgacgtggctattggtgaaaggagaggttggctgcaacgagaacagaggtggtagattctatcnatggtaccttgagactggcacacgactactttctcgtctcgtcacagcaatgactggactaccctatcaatatggcatactatatggaggcggtctgccaagggtattgtggacctagacgtgatggctcctcgctcgaacatatcttgttcttcatgctcgagctgctaggtagctccagccgtagtagtggcaatgcactggtatgcggagcntccccgtggccccaatcagcttctcatgcgatctctgaatgacacgtgacgagtggagcacacaacttcgtacatcaggaacagcaacacattccgatagtgggcagagttccntgaagtgaagcgcggtgaaggatgttgcgcacaacacagcacgatgtacgaggagcaatgtgcgcatgatcgcgcgccatctagcagaatgcaacgcgagggatgcgacgcgagcatgcgacctctaacggttcggtggcatcgatccacgagactggaccacagcggtccaaagcgggtgccttagagacccataatctggcggaggcggtgttgcgcaacatcgagggccctaaagactcactacaaaacgagcccgaaaaggaagaacttctacttcggagaggcaaacactgttgtcttggaagcttagcacctttgaagacgcctttgttcttgcgcccgggatcggggggcaccatttcactgcggaccccacgtgcttgaagtgcacctcggcgctatgccaagagtgtgagggaggcgacaggtatgccgacactggcttccaatccttaaagcctctaccgagattccaaatgcttcgacaagagaatcacgagcaattggtacaagtacgtgaagtgaaggcaacaccgcgagcaagtaggaggttgggggacacccgggcacccaacatccaaccgccgggaagaaaaaccctgcggtttcaccttgttcgaggaaaactctccccagaggtagaccc

SEQ ID NO: 487022 - DNA, 548 bp, Homo sapiens
  misc_feature (31)..(31): n is a, c, g, or t
  misc_feature (67)..(67): n is a, c, g, or t
  misc_feature (108)..(108): n is a, c, g, or t
accccccacgttccaaccacccaattcatgnctccagctcgacgtgtattcaccactgcggtgcatncctccctgtacaagctccttggacacgtgagctccgtgctnacctcccaatctcgcaaacatggagcctggtcgacgtgtattcaccactggcggtgcatgcctccctgtacaagttccgtcgacacgtgagcaccgtgctgacctccaaatatcgttaagctggagcctggtcgactttagaggatcctccagtacccgagcatgcatgcatgcctccagctcgacgtgtattcaccactgcggtgcatgcctccctggacaagttccgtcgacacgtgagcaccgtgctgacctccaaatatcgttaagctggagcctggtcgacgtgtattcaccactgcggtgcatgcctccctgtacaagttccgtcgacacgtgagcaccgtgctgacctccaaatatcgttaagctggagcctggtcgactctagaggatcctccagtacccgagtcgattcactggtaccgagcgcatgtata

SEQ ID NO: 487023 - DNA, 757 bp, Homo sapiens
  misc_feature (698)..(698): n is a, c, g, or t
  misc_feature (701)..(702): n is a, c, g, or t
  misc_feature (705)..(705): n is a, c, g, or t
  misc_feature (725)..(725): n is a, c, g, or t
  misc_feature (733)..(733): n is a, c, g, or t
cgctgctgctctggcgttctagaggatcccgacatgacccaagcatgcatgcatgctgcaggtcgacgtgtattcaccactgcggtgcatgcctccctgtacaagttccgtcgacacgtgagcaccgtgctgacctccaaatatcgttaagctggagcctggtcgactttagaggatcctccagtacccgagcatgcatgcatgcctccagctcgacgtgtattcaccactgcggtgcatgcctccctggacaagttccgtcgacacgtgagcaccgtgctgacctccaaatatcgttaagctggagcctggtcgacgtgtattcaccactgcggtgcatgcctccctgtacaagttccgtcgacacgtgagcaccgtgctgacctccaaatatcgttaagctggagcctggtcgactctagaggatcctccaatacccgagcatgcatgcatgcctggaggtcgacgtgtattcaccactgcggtgcatgcctccctgtacaagttccgtcgacacgtgagcaccgtgctgacctccaaatatcgttaagctggagcctggtcgacgtgtattcaccactgcggtgcatgcctccctgtacaagttccgtcgacacgtgagcaccgtgctgacctccaaatatcgttaagctggagcctggtcgactctagaggatccttcagtacccgagcatgcntgnntgnttgcaggtcgacgtgtattnaccactgnggtgcatgcctccttggacaagtt

SEQ ID NO: 487024 - DNA, 195 bp, Homo sapiens
tgattatcatctcgtctactgcttcttggtactattcccgtcttgagggctagtttgctcccgcctctaggtatgccacctggtgaagggacagaagactgcacggttacaggagccgggaccgcccttgtggacgctgaggcccactacaccttcctagcccggcctgttggcccgacctagctagggtcccat

SEQ ID NO: 487025 - DNA, 310 bp, Homo sapiens
agtgtgctgcggcgattctagaggatcccgacatgagccaagcatgcatgcatgcctgcaggtcgacgtgtattcaccactgcggtgcatgcctccctgtacaagttccgtcgacacgtgagcaccgtgctgacctccaaatatcgttaagctggagcctggtcgacgtgtattcaccactgcggtgcatgcctccctgtacaagttccgtcgacacgtgagcaccgtgctgacactcctaatctcgttaaactggagcctgctcgatctatagaggatcctgctataacccgtttccgagtttatagta

SEQ ID NO: 487026 - DNA, 471 bp, Homo sapiens
cgctgctgctctggcgttctagaggatcccgacatgacccaagcatgcatgcatgctgcaggtcgacgtgtattcaccactgcggtgcatgcctccctgtacaagttccgtcgacacgtgagcaccgtgctgacctccaaatatcgttaagctggagcctggtcgactttagaggatcctccagtacccgagcatgcatgcatgcctccagctcgacgtgtattcaccactgcggtgcatgcctccctggacaagttccgtcgacacgtgagcaccgtgctgacctccaaatatcgttaagctggagcctggtcgacgtgtattcaccactgcggtgcatgcctccctgtacaagttccgtcgacacgtgagcaccgtgctgacctccaaatatcgttaagctggagcctggtcgactctagaggatcctccagtacccgagtcgattcactggtaccgagcgcatgtata

SEQ ID NO: 487027 - DNA, 104 bp, Homo sapiens
cgctggccaatggcagtacacagcatcatccttggcaagaatctactaccttccacagcggccaggctccactgaaacaacactcttacctgacaacacacagc

SEQ ID NO: 487028 - DNA, 825 bp, Homo sapiens
  misc_feature (7)..(7): n is a, c, g, or t
  misc_feature (130)..(130): n is a, c, g, or t
  misc_feature (143)..(143): n is a, c, g, or t
  misc_feature (169)..(169): n is a, c, g, or t
  misc_feature (258)..(258): n is a, c, g, or t
  misc_feature (275)..(275): n is a, c, g, or t
  misc_feature (367)..(367): n is a, c, g, or t
  misc_feature (382)..(383): n is a, c, g, or t
  misc_feature (474)..(474): n is a, c, g, or t
  misc_feature (494)..(494): n is a, c, g, or t
  misc_feature (497)..(497): n is a, c, g, or t
  misc_feature (504)..(506): n is a, c, g, or t
  misc_feature (805)..(805): n is a, c, g, or t
gcctgcngggccctccagtcccgctggggggttttactttttcccttgtccctttgggccattgattccccccattttcaaataaatccttattccgactcccctccgttggaaagttttgctgaaaatntttctggataacncccaaaacccctcctgttggaaatcncctgtccttcccctttgggacccttaaggggggtcccccggggaccctggtattaggtgaaaatggttcctggggtcccccgtgttgtncccccccttgggggccnccccccagcttagatgtgacaaagttccttctcatttggctgttccctcagggtaggcctagggtgggggggggggaaaaagattcctaaancggccaatttttaannattctgctttggctggttttgtgcttttatgggtggctggtttctaagaatcatttttcttcaaggggttttttttcggggggggggctanatgtgttgtgcctttccttntcntcccggnnnccccctgtggtatttcccaccttctccccctctctactttcatgaaatagtaactatttcactacaaacctatttttcactaaatacacacatttcctaatcctggagcctcctgggaaaagcagtgggttctccctgggtcttgcaagactccagtgttcacaggagagtgtggggaatagcttcaccccgtctcctgggatgggctttgtcagaggtcacgtgcagagacgctatcagacttccaccaggcatgtttaagcaattacccctacttgtaccagttatgtgatttcccnatctccaacacttcccctta

SEQ ID NO: 487029 - DNA, 465 bp, Homo sapiens
  misc_feature (42)..(42): n is a, c, g, or t
  misc_feature (44)..(44): n is a, c, g, or t
ggctgttctagaggtacacggacgatgagccaaaacatgatncntggttgtaagatcgacgtgtattcaccactggcggtgcatgcctccctgtacaagttccgtcgacacgtgagcaccgtgctgacctccaaatatcgttaagctggagcctggtcgactttagaggatcctccagtacccgagcatgcatgcatgcctccagctcgacgtgtattcaccactgcggtgcatgcctccctggacaagttccgtcgacacgtgagcaccgtgctgacctccaaatatcgttaagctggagcctggtcgacgtgtattcaccactgcggtgcatgcctccctgtacaagttccgtcgacacgtgagcaccgtgctgacctccaaatatcgttaagctggagcctggtcgactctagaggatcctccagtacccgagtcgattcactggtaccgagcgcatgtata

SEQ ID NO: 487030 - DNA, 345 bp, Homo sapiens
ggaggtggaggttgcattgaggtgagattgcgatgacactgcacactagtctgggcaacaagagcaaaaactctggccaggcgcggtggctcacgcttgtaatcccagcactttgggaggccgaggcgggtggattacttgagcccaagggttggagaccagcctggccaacatggtgaaaccctgtctctactaaaaatacacaaattagctgtgcgtggtggcttgtgcctgtaattccagccacttgggaggctgaggcaggagaatcacttgaacccaggaggtggaggctgcagtgagccgagatgtcgccactgcactccagcctaggcgacagagtga

SEQ ID NO: 487031 - DNA, 284 bp, Homo sapiens
ccccccccccccccccctcccttgggaaagggtttaaaaccccccaaagggggccccaaaaggggggggtttggggggggggaccccccaattaaaaccccttggggtctctggaaaaactatggggtttaaaaaagattcccccatggggctttaaaaagcgggggaaaattaaaggggagccgccctggttaaaggggaattttttttagccttttaacccccttgggttttttggttttttttccccaaaaaaaaaaaaggtttcgccccttttgctttta

SEQ ID NO: 487032 - DNA, 452 bp, Homo sapiens
cctgtgtaaaagacggacctggcatgatcgtgattcgtgaagtccgaggcgttgcaccacatgcggtgcatgcctccctgtacaagttccgtcgacacgtgagcaccgtgctgacctccaaatatcgttaagctggagcctggtcgactttagaggatcctccagtacccgagcatgcatgcatgcctccagctcgacgtgtattcaccactgcggtgcatgcctccctggacaagttccgtcgacacgtgagcaccgtgctgacctccaaatatcgttaagctggagcctggtcgacgtgtattcaccactgcggtgcatgcctccctgtacaagttccgtcgacacgtgagcaccgtgctgacctccaaatatcgttaagctggagcctggtcgactctagaggatcctccagtacccgagtcgattcactggtaccgagcgcatgtata

SEQ ID NO: 487033 - DNA, 403 bp, Homo sapiens
taattttttattttgataaaataaatataaaatttgccattttatccatttttaagtatacaattcattgtcattaattacattcaaaatattgtgcaaccaccactattatctctttgggggttttttgttttgttttgttttgtttcgtttttgagatggaatcttgctctgttgcccagtctggagtgcagtggtgcaatctcagctcactgcaacctccgcctcctgggttcaagtgattctcctgcctcagcctcccaagtagctgggactacaggtgcataccaccatgcccagctaaattttttttgtatttttactagagacattttttttgtattttttgtattttcccccatgttgagcaggctggtcttgaactcctgactcaggtggtgtg

SEQ ID NO: 487034 - DNA, 450 bp, Homo sapiens
  misc_feature (18)..(18): n is a, c, g, or t
tgactctaaggagcgtantagaccaagcatcatcgtgcgggattgacgtgtatacaccacgcggtgcatgcctccctgtacaagttccgtcgacacgtgagcaccgtgctgacctccaaatatcgttaagctggagcctggtcgactttagaggatcctccagtacccgagcatgcatgcatgcctccagctcgacgtgtattcaccactgcggtgcatgcctccctggacaagttccgtcgacacgtgagcaccgtgctgacctccaaatatcgttaagctggagcctggtcgacgtgtattcaccactgcggtgcatgcctccctgtacaagttccgtcgacacgtgagcaccgtgctgacctccaaatatcgttaagctggagcctggtcgactctagaggatcctccagtacccgagtcgattcactggtaccgagcgcatgtata

SEQ ID NO: 487035 - DNA, 505 bp, Homo sapiens
gaatgtccagacctggacccgtgaagtcctcagctcctgcagctttgaagtgcttctgaacacaccacatccatcagcagtggaatgcaaagtcccgaacaaaccgaaggaagcctgcagccaagccggggcagtttcagtctccaccccaaatccaggactgtagaaacggccaggaagaaaaccaccccctcttaaggttgttattgtgaccgttctttggaccatttttttaaaaatgggaaattacatatttctgtgccaagggcaacaaacacctgcagttaaaggactaccttccgcgaggcgccctttcggagcatccatttttatagttccagccaggccagaccgaggggtggtgcataacccctgcttggtgcatttctttacttgcaaggggacagatgtgtgggcttaagtttgggattagagggggctctggcacatatggtgctcaggtgattatccatcgttcgtatagccaataaacatttatcacgca

SEQ ID NO: 487036 - DNA, 499 bp, Homo sapiens
ctacatcataaatgttaggaacagtatatgccactcactgaaactgcatcatagttatgcaattatgtatgtttcattagccaaaaaacagcttacatgtgtatgtggactgtactataacgtcacgctatctagatatacataagaatatgatttttcccatacgtataacttcacttgttattcatcactgattatttgggttacattggactcatttcaagcaggtcgcttttgtacatctcgtgtattagaaacctaatagtgtaatttgatttgagccataaaacacattttaatattagcttgtatatatagttattaagcttgtttttgtggaaaaaaaacttactaaaacctaggtaactctagattaggccagttcaggtgtattttgtatctttagtactggatcatatcgtaaaaatagagataaagttgggaagatatattgattatgctgttctttgaggggaaaagaccctggggtaccgagctc

SEQ ID NO: 487037 - DNA, 356 bp, Homo sapiens
  misc_feature (188)..(188): n is a, c, g, or t
tgagatggaatctcactctgtcgcccaggctggagagcagtggcgcgatctccgctcactgcaagctccgcctcccgggttcacgccattcccctgccttagcctcccgagtagctgggactacaggcacctgtcaccacgcctggctaattttttgtatttttagtagagacagggtttcaccctgnttagccaggatggtctcaatctcctgaccttgtgatctgcccgcctcggcctcccaaagtgctgggattacaggcatgaaccaccatgcccggcctggagcctgtgatcttaaccactcacttacaagctgtaactcactcatttaaaacctgtgccatcggtcgacg

SEQ ID NO: 487038 - DNA, 447 bp, Homo sapiens
tctagagcactgacctaagcactgcgactgcactgcgctgcatgtcgacgtttacacgcggtgcatgcctccctgtacaagttccgtcgacacgtgagcaccgtgctgacctccaaatatcgttaagctggagcctggtcgactttagaggatcctccagtacccgagcatgcatgcatgcctccagctcgacgtgtattcaccactgcggtgcatgcctccctggacaagttccgtcgacacgtgagcaccgtgctgacctccaaatatcgttaagctggagcctggtcgacgtgtattcaccactgcggtgcatgcctccctgtacaagttccgtcgacacgtgagcaccgtgctgacctccaaatatcgttaagctggagcctggtcgactctagaggatcctccagtacccgagtcgattcactggtaccgagcgcatgtata

SEQ ID NO: 487039 - DNA, 1401 bp, Homo sapiens
actgctcgctaacttcatccacacgcactcctgcccgcacatgcgcaacgccactcaccacacacgcgccctgcactgccacaccatgcaaccatcgcccacccgcgcccctccagccaccctcgccccgcccctcgccgctcctccctactcccgccccactgccctgcacaacaaacggcggcgcccgcaccccacaccctcgacccccacaactccgcgcccccacgcctcccaccactccacacacccgccctgcacacccccaccccacccggcactccggcccgcccaccgcacaccacccacctatcccctccacccaccaccccccccccccgcgcccacacaccacccgccccacgcgcccccccacccacgcccaaccaccgccacccactccccgcccccccccctcatacactcacgcctcccacccccgccccggccccaccccagccccagccgcccactcccaccctcccccacaccacgcaccccaccccacgccccccccccacacccgacaccccaccgcccccacccccccccacgccccccccacacagcccctcgcaccacccccccacaccccccgcacccacccaacacccagcccccccaaccccgcacccccacacccacccccgacccccccccaccaccacaccccccgcagcgccaccgcccacccccacacccaccccccccacgacccccccccacaccccacccgccgccccccactccccccgaccaagccaccacccacacacacacactctggcccctcccccctcaccaccgcaccacccacccaacaaccgccccaccccacctcaccccccccaccgcccccgcccccccaccactcccccacccccgcaacacccccgacaccagcgcaccccacctccccccccacaccccccccccaccccaacacacgaccccgcgccaccactcgccccccccgacgcacccccgcgcttcccctcccctcccctcccacggacgccaccacggccgccacatccctacgctcgcaaccagactcacgtcgcactccactcacatcacccacacccgccgacaccccctactacccacctcccccaacctcccacccacacctatctcacgcctacatagcacctcccccgccagaccacacaagcatccccacaactaaccaactgccgacacgtaacgccccgcaacacccctcctcgcacgcacatccgccactcaccgagccgccctcctacccaagcgactgggccacacacacccgaccaccccccgcccacacccaccaccctaccgccgcaactcacatacctcgaacacgctaccgcaacacacagctgaacacagacacaaacacggagccggcacgcc

SEQ ID NO: 487040 - DNA, 710 bp, Homo sapiens
cgctgctgctctggcgttctagaggatcccgacatgacccaagcatgcatgcatgctgcaggtcgacgtgtattcaccactgcggtgcatgcctccctgtacaagttccgtcgacacgtgagcaccgtgctgacctccaaatatcgttaagctggagcctggtcgactttagaggatcctccagtacccgagcatgcatgcatgcctccagctcgacgtgtattcaccactgcggtgcatgcctccctggacaagttccgtcgacacgtgagcaccgtgctgacctccaaatatcgttaagctggagcctggtcgacgtgtattcaccactgcggtgcatgcctccctgtacaagttccgtcgacacgtgagcaccgtgctgacctccaaatatcgttaagctggagcctggtcgactctagaggatcctccaatacccgagcatgcatgcatgcctggaggtcgacgtgtattcaccactgcggtgcatgcctccctgtacaagttccgtcgacacgtgagcaccgtgctgacctccaaatatcgttaagctggagcctggtcgacgtgtattcaccactgcggtgcatgcctccctgtacaagttccgtcgacacgtgagcaccgtgctgacactcctaatctcgttaaactggagcctgctcgatctatagaggatcctgctataacccgtttccgagtttatagta

SEQ ID NO: 487041 - DNA, 1821 bp, Homo sapiens
aggaggatttggtgcagtgttgtgtatgcgaggtggagcgtggtttggaggggggggcggtagtgagcgatgtgggattgtccgtaggaggaaaatgagggagggtgggtggagggtgaggggaatgaggagctggggggtagatgttggtgggagttggttgtgtaggaatcatgatgtggtttgagttggtgagggatggatggggtggagggtatggtttttgtggatggggcaagttacggcgaggtctagggcgactcactcggcctcggcggccgcgcgcggcggggtggccgcctggtggagcgcgcacgcacgacagatgcgtcgaggagctgtgctgtgtcgggctcgggtgtgtcgtggcgggctgcgctggtgtggcggcgggatcgggcgtgccgcggcgggcgtgtcaccacggtggcgcgatgccgagtgtcgttgtggctgctgacctgcgctagctggcgcgcgtttgtggtgggttagtttatggtgtgtactggatgagtgtggtgggttagtgttttgggtggtagggtatggggtgaagtggtgggttgtgtggtgtggtgtggggagtcgttggtgtgtgctgttgggtatctgtgaggttggtgtgtcgtgagtgtgttgattgtcgagcacggagtgggggtggagagagggagagagaatagtgatatgtggagtgtggggatgagtggagtgagtggggggttgagctggctcgctgatttaggacttatgactgacgagtctgctcgcgccgtggccgttgtgcacgctcgcgggtctggtgagcagagctggggtctgggttgcgtggtatgtgcgggtatgccagcgcgtgcgccgctgtcggtgcagcgaggacggcccgccccacggcacgcaaccttactgtactactgcgagccagcattgctcatgcgagggggcagcaggatattagggtggcattaagtaattagaggaagactaatagcttgagtttctctatttgttgtaggtgttacaataagtagtcgagtgctgaacacgggattgatgaacatactacagtgggtcggtctcagcacgagatggttatataccagaatacggcccatgtgatcagtgggcacgctttaataactatgggagacggacggagtagtggacctccaatatgttagtggagccctcatgtcctatattagtgcagctgttgaaaggatattggggaaaggtacttcttgagtgaatgcttgcactgactgtcgctagcatgtgttgacaggtgtgacttggctttgtaggtcgatgcaggcaggacgtgcatgggtatgtccatgtacctaccctaccgaggcgcagagtgtgagctcagtatagggtagattaaggttgcgtcatgtgggttaaaccaggagtgggtcagcgtgcatgggccgcagtgcgtttgcgtgggctttgctggctgcgcttcgatgcatctagtctccagtgtaccagtcgtccgtgtggaatgtgggtggcgtcagtgtggatgacccagtgaagtcaatgggctccgcacgttcagccaacgactgatgagtgactcatctctgtcaccctagcacgaataaagaaaggcggaatcaagatagacaacatagcaacaaggaatcacaaaatcagacaccaaagaaaaacaaaaataaatacaacaaaaatataacaatacaaaaacaataaataacaaaacacaacaatcacatcattactacaagaaagctaagcatataaataataaataaaacaaaaaaaatcaaatatcaaacaaatcac

SEQ ID NO: 487042 - DNA, 476 bp, Homo sapiens
cgctgctgctctggcgttctagaggatcccgacatgacccaagcatgcatgcatgctgcaggtcgacgtgtattcaccactgcggtgcatgcctccctgtacaagttccgtcgacacgtgagcaccgtgctgacctccaaatatcgttaagctggagcctggtcgactttagaggatcctccagtacccgagcatgcatgcatgcctccagctcgacgtgtattcaccactgcggtgcatgcctccctggacaagttccgtcgacacgtgagcaccgtgctgacctccaaatatcgttaagctggagcctggtcgacgtgtattcaccactgcggtgcatgcctccctgtacaagttccgtcgacacgtgagcaccgtgctgacctccaaatatcgttaagctggagcctggtcgactctagaggatcctccacgacaggtattaccacgtcatcgaacgttgtaagagcgacgcc

SEQ ID NO: 487043 - DNA, 105 bp, Homo sapiens
cccgtatacgctgagtgtggtttagcggatcctggccttcccgtgtaaccagttcgggaagcaggagccaggagtaacgaagagatcaaagagttcgccgcggag

SEQ ID NO: 487044 - DNA, 719 bp, Homo sapiens
tggggggggggaaaattattccctaggggtgtaccccccgggttgggacctttcgccaaatccccccttttcccaaaggggggcgccgggggggggtgcgtgctacattgatacaccagtaggatgctggcccagcaacttggatcttggggggggacccccgatgtgtccacccggtggccagaaaacaacagagatggggttggatcattacagtgtgtggtgagaaagccgcacgaggaagaagatagctggtgtgttctagcaaaaaaatatggaggcacgacatggtgggacacacgttgtggcgcactgtctgtcataaccccgctctcagggatccagacaagcaatcttattaccctcaccgacgccaataaagggcctcgggggaacatataagacaaagccaacagctgggaggggcgccagagaagggcgcccacccagagtaagtagctcaccacagaagagcgcccaaaccaacccacaggatgatatcaaacgatctacaagggcgacaattgtgaggaacacaggcggccacaggatataagaggaaaaacactatcgtggggagaagtggccacggctcagttcatgagaaacacaagaggggcgctccatcttacaaaaatagcacccaggatgagcaaccaaataaggctccagtgaaaacaaaccacagaagcaaaggaggagccataggagaaaaagac

SEQ ID NO: 487045 - DNA, 773 bp, Homo sapiens
  misc_feature (10)..(10): n is a, c, g, or t
  misc_feature (12)..(12): n is a, c, g, or t
  misc_feature (40)..(40): n is a, c, g, or t
  misc_feature (66)..(66): n is a, c, g, or t
  misc_feature (85)..(85): n is a, c, g, or t
  misc_feature (114)..(114): n is a, c, g, or t
  misc_feature (121)..(121): n is a, c, g, or t
  misc_feature (139)..(139): n is a, c, g, or t
  misc_feature (147)..(147): n is a, c, g, or t
  misc_feature (149)..(149): n is a, c, g, or t
  misc_feature (151)..(151): n is a, c, g, or t
  misc_feature (161)..(161): n is a, c, g, or t
  misc_feature (189)..(189): n is a, c, g, or t
  misc_feature (204)..(204): n is a, c, g, or t
  misc_feature (206)..(206): n is a, c, g, or t
  misc_feature (219)..(219): n is a, c, g, or t
  misc_feature (239)..(239): n is a, c, g, or t
  misc_feature (257)..(257): n is a, c, g, or t
  misc_feature (271)..(271): n is a, c, g, or t
  misc_feature (273)..(273): n is a, c, g, or t
  misc_feature (313)..(313): n is a, c, g, or t
  misc_feature (321)..(321): n is a, c, g, or t
  misc_feature (356)..(356): n is a, c, g, or t
  misc_feature (370)..(370): n is a, c, g, or t
  misc_feature (373)..(373): n is a, c, g, or t
  misc_feature (376)..(376): n is a, c, g, or t
  misc_feature (404)..(404): n is a, c, g, or t
  misc_feature (428)..(428): n is a, c, g, or t
  misc_feature (452)..(452): n is a, c, g, or t
  misc_feature (467)..(467): n is a, c, g, or t
  misc_feature (536)..(536): n is a, c, g, or t
  misc_feature (594)..(594): n is a, c, g, or t
  misc_feature (613)..(613): n is a, c, g, or t
  misc_feature (640)..(640): n is a, c, g, or t
  misc_feature (665)..(665): n is a, c, g, or t
  misc_feature (700)..(700): n is a, c, g, or t
  misc_feature (765)..(765): n is a, c, g, or t
taaaaaaaananatttattcagcgtcacgatcagactgtnacatttagcaatcaacagcatggggngcaaaaaaaaaaaatctanattaaaaccctttgttggaatgctttacnctttccncagaacagaaactaaaanaacctgtnananaattagtcanaaatacagtcctcgagttttttgcccanacacatgagtttttntntaaaacatgtttnctttgtagcagccaggcccngccaccactgtgcttggntgagttcacaaatntnttgtaacctgtagcttccctgttacttctctggctctccnctcctgcnaagctttgtttcctaattaaaatcttctgccactnccatagctactgcngcngcnggaaccgccaaagccaccttggtttcgnggttttgcaaagtattggcctccnccgccataggggccagagcttctncctccaaaatttccncccttcatgggtccaaaatttgaagactgattgttgtaattcccaaaatcattgtagcttccaccaccnccaaaattgcttccatcattaccaaatccattatagccatccccactgccaccatatncaccaccaccacggctgcnaccaaagccaccacgaccactgaagtntcctccacgaccgaagttgtgattnccaccgaaaccacctccacgaccaccaccaaagtntccagaaccacttcgacctctttggctggatgacgcactagccatctcttgctttgacagggctnttctaact

SEQ ID NO: 487046 - DNA, 673 bp, Homo sapiens
cgaaatgggagaaatgcagcgatgtgatgaggggaatgtgggctgccagtgcgagcaccctgtggagccagcgggacctgggcaggggcgcccggagcaggctgcgcatgcgtggcccctgctgcggggatccgtgctgtaagagagctgtagcactggctctgcactgagtcctggggcctgatgtaccattgtgagctgtgccagctgcccctctggctgctgacgctgcccatatgtgagcccccaagctgcagccccgtggcccagcccagaccctatccctccttcctggtgctggagtgtagtaagcagtgatccagctcacccatgctgggaggtgcagcaccatgatggaggggctcccgttggaggtggagtgcggcaaccccgcattgccccaaggcaattggcccttggcaattcccccagtggccttggacaggcaaatgacctcggacgtccccacaggaagcttgtgacatgccaagcctcaggggaacccctttgggcttgcagcccacactttcttgccgaaattgactcttggccacccctcaagagcttgtgcggcaccagaacgggctggtgtaattggttgccttgtgttggccccaatggcccaccggggaagttgcagaacacacccatctctcgccagccagggaggcag

SEQ ID NO: 487047 - DNA, 283 bp, Homo sapiens
agaagaaactttgtagtgactcctagaatctgcctgccatgggagaggactcgataatctaagggacattatcttgtagtgaaaaattatctccctcctggctgggagcggtggtagacaccttattatctcagcacattgggaggccgaggtgggtggatcacgaggacaggagatcgagaccatcctggtgtgacacagttaaacctcatctctgctaaagatacaaaaaattagccgggtgtggtagccggtgccctgtgatcccaggttactcaggagg

SEQ ID NO: 487048 - DNA, 374 bp, Homo sapiens
tctcctcctcatccacaaacagagtttttattgcttgaccaaggaacagttcgtccatttgtaattgccaattggacgttggagaaatcatcaaagtgctgcttgtcaccctcggcacaggggatccatatgggcataatagttagcccatatttcagtttgttccttaggtcactcagccacaggtaatagtcataaaactaaggaattcgggctgctttggcccaataagtgcagtaggtggggtaacatagcaccacttgtatctagaggtcgttcttgtcgcctcacacctctccccttgataaagtgctatgtgtcacccacagtaccgctatgtggccccgtcaacacagagtacacaaacaccagct

SEQ ID NO: 487049 - DNA, 868 bp, Homo sapiens
  misc_feature (53)..(53): n is a, c, g, or t
  misc_feature (57)..(57): n is a, c, g, or t
  misc_feature (60)..(60): n is a, c, g, or t
  misc_feature (74)..(74): n is a, c, g, or t
  misc_feature (79)..(79): n is a, c, g, or t
  misc_feature (86)..(86): n is a, c, g, or t
  misc_feature (90)..(90): n is a, c, g, or t
  misc_feature (110)..(110): n is a, c, g, or t
  misc_feature (112)..(112): n is a, c, g, or t
  misc_feature (148)..(151): n is a, c, g, or t
  misc_feature (153)..(153): n is a, c, g, or t
  misc_feature (165)..(165): n is a, c, g, or t
  misc_feature (167)..(167): n is a, c, g, or t
  misc_feature (171)..(171): n is a, c, g, or t
  misc_feature (192)..(192): n is a, c, g, or t
  misc_feature (215)..(215): n is a, c, g, or t
  misc_feature (220)..(220): n is a, c, g, or t
  misc_feature (230)..(230): n is a, c, g, or t
  misc_feature (280)..(280): n is a, c, g, or t
  misc_feature (308)..(308): n is a, c, g, or t
  misc_feature (330)..(330): n is a, c, g, or t
  misc_feature (342)..(342): n is a, c, g, or t
  misc_feature (363)..(363): n is a, c, g, or t
  misc_feature (387)..(387): n is a, c, g, or t
  misc_feature (393)..(393): n is a, c, g, or t
  misc_feature (402)..(402): n is a, c, g, or t
  misc_feature (407)..(407): n is a, c, g, or t
  misc_feature (533)..(533): n is a, c, g, or t
  misc_feature (557)..(557): n is a, c, g, or t
  misc_feature (562)..(562): n is a, c, g, or t
  misc_feature (566)..(566): n is a, c, g, or t
  misc_feature (571)..(572): n is a, c, g, or t
  misc_feature (579)..(579): n is a, c, g, or t
  misc_feature (688)..(688): n is a, c, g, or t
  misc_feature (800)..(800): n is a, c, g, or t
  misc_feature (861)..(861): n is a, c, g, or t
gttccaaatcttccggcagctaaaccagagtcaggtggcatggacagggagtngtcngcnctttccgggatagnaaatnccatctnagtncagcaagattcagtcatctncntttgggattggaacgagccaaacctacccggcagannnntnttcctacagctncntctncagcccagctacttcctcgcnaagtgggaatgcttactccagtnttgcnaacaggactncagggttcgctgaaagtggacaaagtagcgggcagttccaagggcggccntcggaagtttggtcgcagtggcaaagcnagcaccatggccagcagagcgntgagcagcattnccaccagcagctcggtcagantgaagtgttccaggaaatgttgcncatgcnaggagatcnaaccnaggggactggcaactataaaatggaagattttgctgacttgggcatgtttccactgttttttgagtagctgcggccagagtgaggctcctgctgtacagtgccacccatactgtgatgtggatgcncatgtgaatgaggccaaccttagntttgnttgntctgnnggagccncccaccagaagccatctcccccgctgtgtgtccccaggcgcatcatcgctccactctcccctgcagccgcggctgttcggccactgaccaggggccctggcagacattnggggatcagttgtatttattgtattttatctgtgtgtgctcaggaggtgagcctagtgggtccttaagtttggttgtgaataatctcttgatagacaatttatacccatganagttcagccaatgcccagagtgaccaagcaacaccagcaggcctgcccaggatgctgaaanagaattt

SEQ ID NO: 487050 - DNA, 971 bp, Homo sapiens
gtgtgttgggttagctatatgttttttgacacgcttggtgtgctttggagccgtagacggatgtaactatgtgtgcccagccggtcgatatgagcgcaattatgcgaactacagttccgtcggccgaaaatccggttcccctcgcggtgtcaccacgcgcaatgggtaccaaggtgtcccccgctatagggcgttcccctctggtcggccgtcgaacattttgcgtatgggtctctatcccgtgtgcccgtgtcgcaaagtccccacgcaacggtggttattgttccccttctcgcgcgttcccgtatttgccgctgtggatattttctgccgcgcccgtcattcgttggtcgtccgtgcccctgtccagttcctgagccttcccttacaaaacaggacgagggtcaacgggatgcgcctccgatgccacccaagccatggggcacccccaggtgctgtacctatacggggaccccccactttcggtgcgcggcttatgcttgccaactgcctgaacaaaaatctgttccccccgctattgttccttgtaaccccgcgcgcgacctctgcgagacttccgctgacgctgtgacaccacttcgcgagtatggtatattccccgcgctttgagcccccccccattcgtatttatattacccatctcaccaagacagttctgttgcgactccataaggactggtctccccaccaataagcgttgtataaacacagaaccccaattttctccggaaacgttttaaccccacccaacactttgctcccacgcacacaaaacgacacggtgtataataccgggcctcaacatcgtctctgtaaatctttttgggacccaacacacccatgtctatgccccactcccgtctcctagaaattattctccccttaaaaaattttgaaaaggggccctttttcccctttcccccccccttcccccctttgagcccaaaaaa

SEQ ID NO: 487051 - DNA, 192 bp, Homo sapiens
gtaacaagaagcttatagaggaacttagaaacttaaaagacatttgttctcccaaaacagattactagaaatattaacctatatactgacagcatgtcactgtattacgctcgcttgagcaggaatacaagtatatagctggcaggaatggtggcttctttactttgtatcattcatcttcttctttaatca

SEQ ID NO: 487052 - DNA, 106 bp, Homo sapiens
aagcgcatcattcaaataaaacaaaataaaaaagtattacaggcaagattaaaaaatttgcattacataatttacacgaaagcaatgcatcacctcacctgtgtct

SEQ ID NO: 487053 - DNA, 526 bp, Homo sapiens
  misc_feature (211)..(211): n is a, c, g, or t
gacttctgcacgtcaggttgtatgcctaggaggaaggtatggtgtgaagctgtctatggtccgaattgaggttatggcacgatgggatggtgatgtcttgtttgaggcggtgctgttcggtcggttggggggggaagaattcgtagcgcatctgcgtttttctctggtgcaggccggaggggagaaaaccaccttgccggagagatccccncccccgcggtctaagagcccaggagagctctggccccacctgttatgcccgcgagattccccggggtggatatatgcggataggagggttgggacatcgaggagagttgttcataaaagacttttcttcggaagagaaagggccgcggatttggaaaattaattggtgcccccactcggtcccccctcgagaggtttgaacacccccccccccaatttccagggttttttaaagagccctttggtttttttaaaattgccaccacaagaagccaacatttttttggtccacaaaaaaaaaggggaaaccccggga

SEQ ID NO: 487054 - DNA, 151 bp, Homo sapiens
aagatgaacagcagttacaagaacttgcactggaagaaaggcaaccattgatcaaaaaatcacatgttgtacaatgagcttttccagagacttgtgcaaaagggagaaatatgacaaacaatgatgttattttcagaggtgacagcctgga

SEQ ID NO: 487055 - DNA, 610 bp, Homo sapiens
  misc_feature (117)..(117): n is a, c, g, or t
aaactgaggacattttggtgggttaaacccttttttttctcattggggtggagggggggctttagggcagagggacagggtgtaggctgggggattaaggtggggaattattttagntggggtcagccccttttcccttcctcctgtgcccaagaacatttgtccctccaaatattttcttcagaaggttaatttattttgccccctcggttagggcccttttttaaggggaaaaaaggcaagtggtagggatggggttttttaaaacccccgggtggagagggaaatttttgggcagcggttttcctcaccctttccctttcccagcccatttccaaatggggcccccatgggggggttagggacatgggaaaaaccccgggtaagccattttttttttttgttcccttcctcccccccgggggggggggggaaaatgttttttggggttagggggccccccccctgttccctgtttggggttttcccccgtcggtttcccctttgggccgggttgggtccccaaatccccccccccttttttttgcccgttgttgagggtcccggcttccccccagttcccggtttgggccataaagggggacccata

SEQ ID NO: 487056 - DNA, 721 bp, Homo sapiens
tgttataagcgtgcgtgactgggaaacaggtgcacgtgcagtcctggctatgcatccatgggttcaattgttggtttatagatcccacaaataagtgagaacatgtgatatttgtcttcctctgcccgacttatttcagttaacatagtgacctccagttccacccatgttgttccagatgataggatctcattctttttttgtggctgaatagtactccattgtttatatgtagcacattttctttactcattcatctgtggatggaaacttaggttacttctaaatcttggctatcatgaacagtgttgtaacaaacatgggagtgcagatacctctttgatatactgatttcctctcttttgggcatatacccagcagtgggattgcgggctcatatagtagctcaatttttagtttttttgaggaatctctaaactgttctccataatggttgtactaatttacattcccactaacagtgtagaaaggcttcctttctccacatcctcacaagcatttgttattgcctgtctttaggctataactataagccattttacctgtggtgagatgatatcatattgtagtttagattggcatttccctgatgatcagttatgttgagcaccttttcatattcatattttgactacaatattaaactgctttgggatcaggatcaatgaccctggattgtggtgaatacttttacattccg

SEQ ID NO: 487057 - DNA, 564 bp, Homo sapiens
  misc_feature (547)..(547): n is a, c, g, or t
taggtggaaaggaagtctaagtggaattcttgaatggatgttaggttctggggtatgaagcgaagattctgtgtgccggagtaccaagtgtgagtggtagttggagaaggcgaagggtaaaggtgggcctcatgggagatggcatgggtgatgtagtgggtgaaatagggaatactggagtcatcatgtgatctcgggtggccccggcttcccctggatatcaacatgacacactaggagaccaggagtcgttcgagggcttgccggccagcgacggttggcaaataactcaggcacacggcctagctgggcctgttccccgcagcccaaggtgtagaggtcaccatcagctgtcatgcatcaccaagtggtcgtttcctgaggccacctttaccacaggcacatccagctgcacctgcacaggcaccatgctcttcttcatgggctccaacagtccaatcacaccgttattgtcccggaaggagccccagaggaagacacggccatcatcggtgagcggtgctgtgtgactgtctcctgctgacanctgttacaacttctctt

SEQ ID NO: 487058 - DNA, 1112 bp, Homo sapiens
cagtgagctgagatcacgccacatcagccggggcaaaagagcaaaacttcgtctcaaaaaaaaaaaaaagggaatcggtatattttggtttcggataaatagtgtcgggtttcccatttctaagaattacacacttattttatactcccttccaaacagtgaagcagaactccccttttcttcatttcctgccagtgcttcattatacagttttcccatctttagccactctgttcggtgacaatccagttttccgatttcccatttctcggcatttcttcagtaagtaattggcggcaattggtcccatggtctaatatctcttaacgctttcctggtgacctggctggtggtaaatcttccttgcccgttggcttaatttgggacattcatggcgcccatttccttaacctggaatctttctcacagccgggacaagggagtttcctataattcttaaattacgcgtcttaactaaagcgcataatcctgggggttttaaaagaaaagcaaaaaaaaacaactaacacacacaaccatacatacaaccaacacaaaaaacatgtttgtgtggggagcgcagctcattgtgcgccccctctaaacaaaaagcgttctttttttgacagaaaccccatattgcggtgtgggaggcaccgccgggggggggcccccacaatctagtgactactgtgtgcacaccacggtgggccccacacagaagaggagggtcgtaccccccaaggaggagaaaacaaccctgcggcgggcagcacaatcaaaacccaacaacgcggtggtcgatgaggcgtttctctctccaccccacgcatgattataaaaaaaacaggccccgcccggcgggggaggggagccaaaccaccacagacgacagcgtgtttttcgtcatagcaaacacacacaatctctccctccaccaaagagatcaggaggcagtctcaccaagcgagagcgcgacgacacaataacaatgcggcaggcgcttcacatacaccaaccagccagagggagatgcactcacaaccggaagaggcgcgtcgaacgatatatctacaagatatataaccgcgccggcgtctactgctggtggc

SEQ ID NO: 487059 - DNA, 116 bp, Homo sapiens
tcccccccccgggggggggcccccccccctttcccctccccaaaaaaaggggaaatttaaaagccttcccaaatttttttttggtttaaaacccccccaaggggggggttttttga

SEQ ID NO: 487060 - DNA, 960 bp, Homo sapiens
gattcggtttggagcgcgacgcgagtctgtaagtggatcatgggctgcagtagcttgtgcctagtaagctgcctgtcttcgacgagtgcttggttctctcctaagttaaaaagcccggcgcaactgagcgtcttggactacctctcagatgggtgtcctgaggtcgttgccgtgtgatcttatcagcagggagtcccaagcgagctcgaaatttaacatagagtaagctcgaccctggttgaggtggtccaagcatatagaaggtgacagctagtttaagtgtcgagactcttatttgctctttgcacggctgccttacaggcctagaagtcaatgcaaattcaaccaggtatggctggaggagtttgtgactcatctgtacctgttgaattgattcagacccaagtggctgatctcctgcctgtacgttagtaaccttagtaggcaataaccgtaatggtaactcaggccgagtacccattttgcacaaatcactggttataacattatgaagccggataccagatcatattacaaacaccttaactagtaggtaatccctggctaggggaatgtcaaattccaatccttgtattaagtttaccccttacagtgtcaggtgagaaaagtaaatcaggtgagttccaatagcccccatctttggcatggagacggaacgagcgtttaaagacggatgacggtgaaactcatcgcgagaattacgcaagtcaaggtggacaccgtttatttggaggagaagacataatataacacagaaaagatgccggtcgaccaatgaagatgttacaaccacgttttggggggcgaccagagagtaagcaagtgaagcggtctagagactggagtaatgggcggatccaccataaaagctggacttgtgtgcacacgcagacagatggtcaacacaaaacaatagcgcgggatagataagcactagaa

SEQ ID NO: 487061 - DNA, 354 bp, Homo sapiens
gggctggctctatatctccatcggacgtgactaagtatgggtagcctaaagttccattaggatccaattgtgattctctaaaacgttctctcgatgtgtatatctgtacagatagaatcttaatcgaatgacagtaactacacagtttgatacctgtggcaaatactgtattagcatctatagatttagggcgatctttaagaaaaagatggaatggtcagagtctaagttatttcatcactgtactttggttaatgtgaactatgattcatatattttatcctttcaaactgaaattacctgctagagtgagcaaccatctcaccactgtggctctttagcttttcccatatg

SEQ ID NO: 487062 - DNA, 1084 bp, Homo sapiens
  misc_feature (1084)..(1084): n is a, c, g, or t
ggtgtggtggagcccgagaacctggcccgggagaggaagatgcagtgggtgcagcgtgcagcggctggagcgcaaggtgcacgtgcccatctaccctggtgagatggagctgctcctacaaccctgttcctgatgaacccactgcctgtgctgctacatggatggctctgtggtgcctggtgtgccggtgccccactgtgtggatgatgactactccctggtgcccagctcctgtgaatgatgctcctgcctgtgcttgaatgtgatattgcacaatgatgcaatgtgagttgcccccatgcggccacccatggccgcagcccaggtcccctgcatgggtgatgtgcctgccacgcaccaacacgctcatcatcctttctcatctgctaacaccaccaccatccatcggacacccaatgcgggcatcataccccccacactgctcagggtgagtgggagggatcatggcgatgagacttgtgagtgccaaaagaagggggcctgttggatggctgggaaccccgcagcgcgaggctgcctcatcaacgtgcaagaggaaatggaggggtctcgtggacatctccagacccatacacaactgggagggtccccatccatccttcccgtactcctgggacaggcagcaatggacattgtgggctgcatgtagcattctccgtcagagagggcctcatctcactgtagccctggaacccagggaccattctttgcccttcccccatccattggttgggaaagaacgctcaggaccctcaacagtgagctcaaggtgtgatgccttacacaagcagcactcaagaatggcaagttggacctgatgacctgagactttgggcgtaatcgcgaaggactccctgacacgaccaatccgatgaaagaggaaaaagtagaaagaaaaaataaatcataaagaaagataaggagtgaagagattaatgggaggaaagagctgaaaggacgtagtagaggaaagagggggattaatagatagaagaatgaaagagtaagagagtagtatgagtcgatgctcaaaatagagaagtagaataaacgaggagagtan

SEQ ID NO: 487063 - DNA, 680 bp, Homo sapiens
  misc_feature (680)..(680): n is a, c, g, or t
gtattatattttttcactgatggtgtcaatcgtctgaccgaagaactcggctgtgatgagattatgatagagagtagttagatgctgttaaaagaggaggaaactacttgaggagggacccaactttccgctatctttgggttcattccaaatagttttgtgccactatgaaaacacttgaccttcaaaaaaaatttgtttttcacgaatagacacacgaataggcacagtgactgcacaggttggtgaaaaaggaagaggaatcacttaaacgcaacacacgaacaacaagattttaagaccgttgaaatcaattatcaagaacgtcctaaaacacctatggcttgacttgttatgatccagattattttccttgcatggggaaaactatctttcatatctgttcgctgtacagatggtttgcaagaataagtcatgaccaagacaaactgccaatacaaaagcccactgatactaattatatacatgagaccaaaaccgtatccaactaggacacatatctttcgagttatctggactgaaagcttcacgaaactcggaaaacttctatttccgtgatctagtcaagccacagttatcaaaggctacatcctcaggtccgatactggatgagtcacactcactatgtactcacgcgggcttgtatccttaggacgggn

SEQ ID NO: 487064 - DNA, 433 bp, Homo sapiens
cccaattagattttaaactgcctatgggtagttgctgttacttatagctgtagtgctcctgagccaactgaacaactgctgagataatcctaggaataatgtatgctgagggtatgccgtgctctctatgtaatgagttcctcacattgattcatctatggaagacttgcttgagcatggtgggagtgatgtctcttcagtggcacagtcttcattctatttcttaccctttaaataattcacatttttcagtgcatggaattaaattttcaagattccattggccgtgacatccccaaaatgcttgaattatttaaaaatggacatgaaattaaggtagatgaagaaagggagaactttctccagaccagaatagcaacattggatatgtcaagtgaccagatagctgccaatctgcaagcagttattaatg

SEQ ID NO: 487065 - DNA, 285 bp, Homo sapiens
gctccctcgtggcgccgggtacgcatcaatcatcggtggataacaaacgcggtccggcggtcattgatagagatgatgttctaccggtcgcttggcacaacagagtcgcactactgccagcagattctgcgtgtgcagaaccgaagaactcgctcatgtagtcgcgccagacacatactgcgtaccgctatggacacggtattagggcagggtttactgtcatcgacagtctgactgaaagtagagagttgctgaaacaggcgcatcatagtacggtatcgtcca

SEQ ID NO: 487066 - DNA, 709 bp, Homo sapiens
cagtcgtggggcgcccacgaatttgcgcgctctcttgctagtgctccccagctctcgagatacggccgaaaccatggcctttcgaaaacctgaaaagccctgcgggactccaggtgctcaacgattacctgggggactaggtagctacatcgagggtgtattgtgccatctaacaacggcagatgtggcagtactttgagagccgtgtcctagcccaaccgcctgccgcagattgtgtcatgccctacgatgagtaataatcacattcaagtcttaccgaaagaggaaaaggccagcatgccaggagtgaagaaagcttggggcaaatagtggtgcctgccgactgtggagtcatcactacaggaagtggagctaacagatcgtgctaggagtgatgattgacttttgacctctttggatcttgatcgatgaggagagacagtgaaagcaatgcctcagatggctaagggaacgaacgtgttgcccacttatgaactcactgaaagccgaaaaaacctgcactttgtctgccatgtccttccccattctcacttagcatgtgaaagctcgcggatgatgcagaccagattattgccgaaatccagagggactgcgtccagaaggctttcaagcagacggcttaggtctggggggctcatctaaacctagttcccgtggggatacgggaattaagaacgctttcaatacg

SEQ ID NO: 487067 - DNA, 449 bp, Homo sapiens
  misc_feature (28)..(28): n is a, c, g, or t
gcggacaaaccttacaaagcaaaacgtntaatcacaaagagggggctaccaaagagacaaagctttgcctgccacttctgcctccagatcaggcctttatgatactgtagcctgattctactgtacaatgtaaaaccatccttgtacttgcatgtctaaccccttcatgattcccaacactcactttctcttccccacccctctccaataaaaacaaacccagacaggaaacgacaaaaaaacggggggatacgttgcaagtttcttccacagaaattgtacgaagcctgattagcagacacaccaacacaacctaattatccctaagctgaagcatgattctagccactatagaaatatggtacgaagtgtaatcatgcataggtcaaaaataatcagcacaagatcagccgtcttccaacaattaccatgcgacatggtaatcccac

SEQ ID NO: 487068 - DNA, 634 bp, Homo sapiens
actagttagctaccatgcgtcattatttatcaaaagatatatgctgcttaaacacaaatacgttttaaaatatattttaggcagtacggttttgggtttttttttttgcaagttctttaggtgagtaaatttagtgataaatgatattattttcttttgagacaggttgctttgtcgactaggatggagtgcagtgcaatggcgcgatcctgtaacctccggctctcgagttcaaacgattctcctgcctcagcctcccgagtagctgggattacagacacgcgccatccgacccagatgatctttttaaatgcaaaatgccattgacgcataaaatcaaagaatcagcttaagttccagaaaagagaccaaccatatgaacaagtagacaacaacgacaactacataataggccttttgggattttggatgatattgcatcaaatccatacattaacctgagagacgagcgacttctttaacattgagcctgtcaatcatgatttttaattcatttacgtcttctgtaatgtttgttaatataattgtattttgtgctatgcagaagtttcactgatctttcattatgtctatatatacttgatatttctgacactattgttaggatctttct

SEQ ID NO: 487069 - DNA, 337 bp, Homo sapiens
  misc_feature (51)..(52): n is a, c, g, or t
  misc_feature (60)..(60): n is a, c, g, or t
  misc_feature (63)..(67): n is a, c, g, or t
  misc_feature (69)..(69): n is a, c, g, or t
  misc_feature (108)..(108): n is a, c, g, or t
  misc_feature (112)..(112): n is a, c, g, or t
  misc_feature (153)..(153): n is a, c, g, or t
  misc_feature (171)..(176): n is a, c, g, or t
  misc_feature (192)..(192): n is a, c, g, or t
  misc_feature (210)..(210): n is a, c, g, or t
  misc_feature (264)..(264): n is a, c, g, or t
  misc_feature (290)..(290): n is a, c, g, or t
  misc_feature (299)..(299): n is a, c, g, or t
accagaggtgcacacaaatatacctgcaataaagcatattctagctatttnntattagtnaannnnntnatagcaataaagtatctattaatatgccagttatttatntctnatatctagctaatctcattaataaacaaaacaacccctgangcaggtattattactctnnnnnnacagagaaggtaactnaggcttaagaggataatnaccaaattgcctggtgacaaacagttaggtagtatgtactgaatatggtgactncaatctaacccgtctgtgtgattatnatgcctttntgtaacttggtaaatgttaacagtttttatacttgagt

SEQ ID NO: 487070 - DNA, 99 bp, Homo sapiens
ccaacttgtctcagcatcacatctcctgtgctctttatttttgccggaccagtttcggttaggagaatgtgcctttttgtacctttgcatttaggttta

SEQ ID NO: 487071 - DNA, 130 bp, Homo sapiens
  misc_feature (45)..(45): n is a, c, g, or t
tttaagtttgctatgaaaacaatgtacttttattaattaaaagtnaaaaacaacaaaagggaaatttcacaacctttgtttgcaactatataatctttatatagaaaaactataaagtgacagtctgatc

SEQ ID NO: 487072 - DNA, 226 bp, Homo sapiens
catcccatatctttgggacgctaaggcaggcagatgctggagtacaggagttcgagaccagcctaagcaacatggcgaaaccctgcctctataaaaaacacacaaaaatcaaggtgtggtgatgcacccctgtggtcccagctattggggaggctgaggtgggagaatcacctgagcccaggctacagagagctgtgatccacactactgcattccagcctaggtg

SEQ ID NO: 487073 - DNA, 418 bp, Homo sapiens
gcacagttccacagaactgtacaagaatggcatcagcatctgctcagcttctggggaggcctcaggaacttatactcatggtgcagggtgaagtgggagcaggcacatcacatggtgagagagggaacaagagagtgaggaggaggagccagacccctttaaacgcaccaaagtctcatatgaactaactggagcgaataactcagttcatcgaacaaggggatggtgctagtgccattcatgaggggtctgccctgatgatccaacacttcccaactagggccccagcctccaacattggagattgcatttcagcattgagaatttggcagggggtcaacaccattttcaaaactacatcaggatgcagtcacatgttgaaaatattttggatatattaatatttagtagtgtacta

SEQ ID NO: 487074 - DNA, 946 bp, Homo sapiens
gctagacttgacgagctgtgtctatggtcgggccctctgccgtcagctgctccggaccgagctcgggtgtatggggccagtaggaaccgtgatccggggccccgataacgtggcctgccccacatttatcccgtggactggacagtgagtggtctaccctatgcatctgagaatggactaccatctcgatatgagccagtggctgttattggtgtacggtagccatataggagacacctgtacacaggccctgtgataccccacagtaggccactttgtggaccctcaaagagtgtgagaagttaccccaaatggcagagaaggaaggatggaaaggaaggccggaaaccacaatcaaaaaaaagatacagagaagagatgagaccttacactgcaggccgaacatgaaagggcaacaagacgacaatacccacaaaagaaagtaccggaacatgcaaggaaacgatcatggtgaccacaataccccggaaacacagcacaacccagagaagatccaaaagggtaagccccatgggaagcatcaagaaacacgtggtacgaaacaaggcaaccgtaaatagaacataatacgtgggaaccacagggaaacacaccacaaaaacataggacaatgacaacgaaacgaaaaggcgaatccaacgcatactagccttgccagcaacacgataacacagtaaaaagaagcggaacaaatagaacaacatcccattctgaagttgccccaaaaactggccaagaccgaattcaacccagaggaaataaaaagaaagacacaaaaagaaaaacaaaaagcgtggagggaacagaaggatgtgttgagacacaaaggacacaaagccaggagaatagaacatcacaggaggcatgggacaccagaaaacatcgtaagaaggcataaaccaaggaactgggacacgatacccac

SEQ ID NO: 487075 - DNA, 361 bp, Homo sapiens
  misc_feature (285)..(285): n is a, c, g, or t
  misc_feature (304)..(304): n is a, c, g, or t
  misc_feature (317)..(317): n is a, c, g, or t
attttatttatttatttattttgtttttgagacaaagtcttgctcttgttgcccaggctggagtgcaatttcatgatctcggctcactgcagtctccatctcccaacttcaattgattctcctgcctcagcctcccaagtagctgggattacaggcatgcaccaccacgcctggctaattttgtatttttagtagatatagggttttaccatgttggtcaggctggtctcggattcctgacctcatgtgatccacccaccttagtctcccaaagtgctgggattncaggcgtgagaaatcgtgncccagccaaggantaggaatttccaaagcttacaaactgagagtcttcacagagggg

SEQ ID NO: 487076 - DNA, 505 bp, Homo sapiens
  misc_feature (227)..(227): n is a, c, g, or t
  misc_feature (295)..(295): n is a, c, g, or t
  misc_feature (365)..(365): n is a, c, g, or t
  misc_feature (370)..(370): n is a, c, g, or t
  misc_feature (376)..(377): n is a, c, g, or t
  misc_feature (459)..(459): n is a, c, g, or t
  misc_feature (498)..(498): n is a, c, g, or t
ggcagctctagaatgagggtgctttgggcataacaggctcagccatccttctggtgtctcgccctgtctcctttcccatccttgggttcacttctctccctttttctcttcacttcaaaagtggttagctccagttaaatacctggagttgggacagcagaaaagctgctaaatgcagatttgctttttctcactaaagaaagaggaacattttagtcactaatttncacttcatttaacctttctttccacagaatggcctgacttttgctggaaggggacaaagccctaaganatttatatccatgagtagaacatttatgatatcacttacacagcttcctggcctgtagcttttccagacntagcntatatnntagtcaaagtagagggatggatttaaggaattgtctaagataagtgagaagagaggacatttgtcctacctaaaggcaatgngcagcttgtggggtggtggcggggggaatctatctcgtnggctggg

SEQ ID NO: 487077 - DNA, 186 bp, Homo sapiens
taacaggctttggagcactctagattcctgttaatcctacaaggggctgtgtgcggtggctcacacctgtaaccccagcactttgggaggctgaagtgggcggatcacaaggtcaggagtttgagaccagcctgaccaacatgatgacaccccgtctctactaaagatacaaaaattagctgggcg

SEQ ID NO: 487078 - DNA, 1263 bp, Homo sapiens
ggagagagaactagtctcgagtttgatgtttatgttctctactcattaaactttttaaatggggtctcacaaattctgtgacaaattttgggtcaatttgttcccattaaaaagtcctgattttaaaaacttaattaactttaaaacgtgccacacgcaaaaaagaaacaccaagaggtggtctccacaaaacatttcctcctttctccttctcgtgagaggtttacacgagtgcattgtgcttactcatttacccagctctttatactacttaaacttaaaagtggccaattgtgaacacaaacgagtctcgtgagaaaccgttctctttcccacccacgtggatataaacagtgtggggtgtggcaggttatttgagggcactaatcatcgcacttatagccctctcgtgaagccttttcgtgggcccaacacttggggtgcacctatggcccaagactctcacgagcaaacccatctcgtgtgcatccacacagtgcctttttggaatgtgaacaacccgagcgcgacacagcgtgtctcagtgcatctctcaatattccaccagaccactagcccacacacggcagaacacacacagaggtgtggacacataagcgctcgtgagagagacgcctctctcaaacaaaacaacctagtaggagctctttgccccgaaggaaacacccccactcaataccacacgccatagtaggacgaagaacataatacgcacccgaagaatctcctccaacacgacatatttttagaggggccccctctatcttttgcaccaagctcttctttacaccacaacgaaaaagcgagcgacgaaatccacacaaccacctatagacaccctataagagactctcaacaaacccaaaacagtcttgtcgaccaagtcgccacaacgtaggttaggaacaccccctgtatatttggggccaacaactccccaaaaatataacgcagaggggcggaccaatattagcacgcagggggccgccatattaactacgctgcgccccccctggcgacagtggagattaaccagacgacgacaaataaaatctcacaaccaactgtgacacaccgcgacgcttagaaaaagtccccccagggacgtggcattactccccacaaagcatggcagcagggaggcacaccaaaaaatttgacgcaggcgatggaatccacacccaccaagaacacaagacgcgtagttgggccaccaagcacgcagagcacatacagatatcc

SEQ ID NO: 487079 - DNA, 155 bp, Homo sapiens
gaggatcccgtggcagttatcggactttttcctcctggtgtgttctaatgcaacaaggcttgcaagggcagcacagccaggcacagcctagggtgggagagacagggtcataaggctggaagacataatagaacagggtcagttttagcctcaat

SEQ ID NO: 487080 - DNA, 169 bp, Homo sapiens
ctcattagcgagattcatccgagctcaaacaagatgagtgctagatcgagagaagttgctacgccaacagccataacaccatcacatgttgcagcagcagcctatggaggcttcacttactcacgacttcaggctcaccctgttgagctctcgcgctcgtcatcaatga

SEQ ID NO: 487081 - DNA, 2731 bp, Homo sapiens
gccttggacgcggttcaggaatccgccgccgctagccggctcgggcctgagcggggagggcgccaggcaggacctctcgcaggctcgctgcgcaggacggcgcccgcctggcgccgcttcccttccagcgtgccgaccggcccggcagcgcctccatccctccggcccgccccggagaagacgcacagctcgggcccgcgggcgttggggcttggaaccgcttctgccgggatcttccaggaggaaagcgaagttgcgagcggatgctgcccgcgccggaccccagccgcggagggtcggggccgccggtggagtctcggcggccggggacaagggtgtcccccacctgaagacggcaagctgggtcctgagtgatgcccctcagctgagtgtccaaggctggcccgaggagccccacggccccacctttccccatggagaaaggactcactttgccccaggactgccgggactttgtgcacagcctgaagatgagaagcaaatacgcccttttcttggtttttgtggtgatagtttttgtcttcatcgaaaaggaaaataaaatcatatcaagggtctcagacaagctgaagcagattccccaagctctagcagatgccaacagcaccgacccagccctgatcttagctgagaacgcatctctcttgtccctgagcgagctcgattcagccttctcccagcttcagagccgtctccgcaacctcagcttgcagctgggcgtggagccagccatggaggccgcaggggaggaagaggaagagcagagaaaggaggaggagccgcccagaccggccgtggcggggccccggcgccacgtgctgctcatggccaccacgcgcaccggctcctcgttcgtgggcgagttcttcaaccagcagggcaacatcttctacctcttcgagccgctgtggcacatcgagcgcacagtgtccttcgagccggggggcgccaacgccgcgggctcggccctggtgtaccgcgacgtgctcaagcagctcttcctgtgcgacctgtacgtgctggagcacttcatcacgccgctgcccgaggaccacctgactcagttcatgttccgccggggctccagccgctccctgtgcgaggaccccgtctgtacgcccttcgtcaagaaggtcttcgagaagtaccactgcaagaaccgccgctgcggccccctcaacgtgacgctggccgcagaggcctgccgccgcaaggagcacatggccctcaaggcggtgcgcatccggcagctggagttcctgcagccgctggccgaggacccccgcctggacctgcgcgtcatccagctggtgcgcgacccccgggccgtgctggcctcgcgcatggtggccttcgccggcaagtataagacctggaagaagtggctggacgacgagggccaggacggcctgagggaagaggaggtgcagcggctgcggggcaactgcgagagcatccgcctgtccgcggagctggggctgcggcagcccgcctggctgcggggccgctacatgctggtgcgctacgaggacgtggcacgcgggccgctgcagaaggcccgcgagatgtacccgttcgccggcatccccctgaccccgcaggtggaagactggatccaaaagaacacgcaggcggcccacgacggcagcggcatctactccacgcagaagaactcctcggagcagttcgagaagtggcgcttcagcatgcccttcaagctggcccaggtggtgcaggccccgtgcggccctgccatgcgcctcttcggctacaaactggcgcgggacgccgccgccctcaccaaccgctcagtcagcctgctggaggagaggggcaccttctgggtcacgtaggggggtctggggccgtatgccctccttgtggaaaggcctgggcccgtctttctggctgaaaggcctgccccgtctttctgccccagccctcgcagcagagagccggcacagcgccatgagcggagcagcgcctcctgtagcagtagggcccccagccagcgctccagccaaagcggcggccccaagggttaatgtggcggagaaacagggacaggtgcccgaggtccccttggaagggccatcacacccagacccaacgggttgcagcctcctgagcaggcctaggcaggcccgggcctgttggcaagcttcgatctcgaactacaacaaccagaaacatacattcgtgcctggagaccctgcaggccagagtccaaatatttaacaatcagaaggggcaaggctctgaccagtgacagtcagacctcctgctttatttggtgttaaccgtttcttgtctggatggtgaagtctggaatctgggtgggctccttggaggaggggctaggacagccgtgggtgtcaaaggtggcatttgaggctcgtttgaggtgacagtggctgtttccgaactagtacagagcgattcagcgttttcatgaatgggttggctgtgctggttactgatgaatatgggccccttatagagctgcaaaacacacacatgcgtatagacatacatacatgtacaccatacatagacaagcatcataaaggcacaagtgcacacacatctatgcagacaagcttcctcgctgcttatgcccacagggtttttctgtatgacacacctcagaggagcctgtgcttaacatttgtaggattatttcgagggcagggcaggggaaagaaacgcg

SEQ ID NO: 487082 - DNA, 194 bp, Homo sapiens
cactctagaggatcgctcaaatgacagagaggaagtgagagagacaggtgtcggggaggtgccaggctcttttaaacaagcagttcttcaggaactaagagtgagtcactcccatgagaacagcaccaagccattcatgggggaatctgcccccatgacccagacccctcccgttaggcttcacctccaacact

SEQ ID NO: 487083 - DNA, 688 bp, Homo sapiens
gttatttcttgccttctgctagcttttgaatgtgtttgctcttgcttttctagttcttttaattgtgatactagggtgtcaattttggatctttcctgctttctcttgtgggcatttagtgctataaatttccctctacacgctgctttgaatgcgtcccagagatttgggtatgttgtgtctttgttctcattggtttcaaagaacatctttatttctgccttcatttcattaggtacccagtagtcattcaggagcaggttgttcagtttccatgtagttgagcagttttgagtgagattcttaatcctgagttctagtttgatttcactgtggtctgagagatagtttgttataatttctgttcttttacatttgctgaggagagctttacttccaagtatgtggtcaattttggaataggtgtggtgtggtgctgaaatgtatattctgttgatttgcagtggagtgttcttgacatggctattaggtctgcttggtgcaaagctgaattcaattcctgggtatcctggttgactttctggctgcttgctctgtttaaagttgacggttgggagtaaccgtctccattatcaagggcgggttcttagctctctttctccgcacttccgcattttctttaagccctgttccttcctgccccgcctcctatactctatcgcgccct

SEQ ID NO: 487084 - DNA, 354 bp, Homo sapiens
acaaaagggcaacgcccatcagatacatccctcaggtgaacaccccactgttactaatgttggcacagaagaaccggtgtgtgcccttcaaacagggcatggagtatcaccgtgccctcaaaacccgaaatgtgcctgttcggctcctgctttatcccaaaagcacccaggcattatcaaaggtgaaggtgaagtcagacagcttcataaattgtgtgctcgggcaacgcacacacttgggcagttaaagccctgccattcggcataagctgaacagcttgtgtgggctctggactccacgaatgcgtggccaaaggaatgtgggcaagggagtcataataaattaggccacag

SEQ ID NO: 487085 - DNA, 242 bp, Homo sapiens
  misc_feature (26)..(26): n is a, c, g, or t
  misc_feature (207)..(207): n is a, c, g, or t
  misc_feature (227)..(227): n is a, c, g, or t
ttaaaaatattcccctgggacttttncttcatcactaacacttgtgattcaaaaggacacctcccctgtactggaagggcccagaggaaattccctggttttggtttttggtttggtttggtttgccttttggtaaaacatttccaaagaggtggcaggtaattctggaattttccaaaaccccctccccaattaaacttttaattnaaaaaaaaatgggtccaccnaaattctattggaaa

SEQ ID NO: 487086 - DNA, 96 bp, Homo sapiens
atatcgtcgacccacgcgtccgattttctggttagaaacaagagtaacacccggacagttcaggcagctgccagcacctcctgggtcccctgcaaa

SEQ ID NO: 487087 - DNA, 165 bp, Homo sapiens
cgctaagacactgcgtacgtttgacagtgtacgcccagtcaactccccactgcactgtccctgagcggtcgcgccggccgcggacacttcgaaacctcagtgacgtgagtggggtggtcggaaccaccagagggacgcggcagcgcgatagaaagctgaagagga

SEQ ID NO: 487088 - DNA, 599 bp, Homo sapiens
gcacgagaggagagtcaaatactgtgaacatcactcacacgaggtggaggaaacctgtgatatagctagagaatatacacacggttgtgtttcatatagagtgcagaaaccaaaccatgcttgtgtgaaccttaaatatgaaaggtggttctcaaggtcccctttggcctttggtgctgtcatatgaaatcttacaaggaaggatgaagaaaagcctggggggagggtcttctcggaaatgaagtgggtttttttggtattaaatataacgtggctgtgggtacaggtacttaacgaatgtgtagaagaaggtcttaaggcattagaggcctatataaaaggcaggggaggttctcttctaacctaaattaatattggtcaagggtattttttggttctaaattaagactttaatggctttaaacagtgggtctcataatttacatatcattcatttgatgcccttttacacagaaactctttagaggttataaaccatctatgtaaaggagccacatggtatgtgttcacacagctactcttaaatataaatgtgagataagaaatatatatgtgcacaattttggcatggtagcacc

SEQ ID NO: 487089 - DNA, 270 bp, Homo sapiens
agtcgagaagtggaggcggtgacattgtagatgctgcagtgaaagcgacagagccacggaaggccgagactccaccatgttggtgatctgcacatacagcaaaatcactcgcactctgcctcatcttatctctagaaggtattttaccacactgtgtcccttctttagtagggaatgtctttgggccaaaagataatgaatagttctggaccatgactggctagaggcccaagttaggatacgagtcaggagagaggggtagtcctctag

SEQ ID NO: 487090 - DNA, 205 bp, Homo sapiens
agccgatccttataagacgacagaaggggagaagacgacagatatggggattgcccacaggccagcatcactgcaaacgagatgcacattgtgactgggatcagcgctgtagagggggttaatgtgcagcgttttcagaacaggctgcacaaggatgtggcaggaaagatgggtgatagggttgctaggggttgctcccacaaac

SEQ ID NO: 487091 - DNA, 456 bp, Homo sapiens
ctcctgcctcaggtgatcctcccactcagcctcccaaagtggtgagattacaggtgtgaagcaatgtgcccagctccataattcacattttaaaaggaactttctttgaggagggaatctatttacttctatgtgtctttttgagacggagtcttgctctgtcgcccaggtcgggatgcagtggcgtgatctcggctcactgcaagctgcgcctcccgggctcacaccattctcccgcctcagcctcccgagcagctgggaccgcaggcgcccacgaccacgcccgcctaattttttgtatctttagcagagacggggtctcaccgtgttagccaggatggtcttgatctccgggcctagtgatccacctgcatcgggctcccgaagtgctgggattataggcatgagccactgcgcccagcctctatttacttctatactcccaagacccagtgc

SEQ ID NO: 487092 - DNA, 314 bp, Homo sapiens
tctgtccactccctcgatggcttccgacacccaggcctctgggaccgctacatggcaccctccgcgctgcctcctgcccctccatcatgactcaggcgcctccccaacctccgcccacgctcaccataaacttgctctgagtttggagactcgcccctcctctcggggagcaagtggggggcctccagatctgcctgtgtctctctctgagcacctggtgtccgtgtacaaggatggatgtgtacagtggctccttgggaactgagacatatctcagggaatggtctctgtgctcagcccatccaccagaagag

SEQ ID NO: 487093 - DNA, 410 bp, Homo sapiens
ttgcaacccatcgcgaacaccagattaaaagacctccagcaatccaggattctagtatactcatctcggacggcggtatgtaagatgtgattggattaaagaagacagacaacaagtgcattaataaggaacaacattctgaatactcacgagtagtaatctggcacacttacccctaggccagaggacacagggcaaccacacaggaaagggataccaggacagagtccagggagtttggcttataccacaaaaggagtaagggcagtttaatccagggtatgcgaaaactaggtctatgacataaacttgacttccaaaaatacctcagcctttaaaaggtccccaataccaacaaatcaacaaagtagtcaagatgacagccacggtcagggacagatgaacagtca

SEQ ID NO: 487094 - DNA, 192 bp, Homo sapiens
acaatacaaattgggactctttcccagcctgagcgtaataaacggagtgatctacgcgttctctggaggtgacactgcatttaaaactactaaatattagtgaaaattgattgattcagatttgcatttcaactgaacactaagaactgctacccgaagtaagtctttgtcgacgcggccgcgaatttagta

SEQ ID NO: 487095 - DNA, 335 bp, Homo sapiens
ggtcgacgatgaatacacatctgtgaaatagtcgtaaatgaaacaaagaaaaacgtctttgaaacttttcaactattttgtattacatccatatataataagacctcatatggaacatttgtacagaacatattagggagaaatttattgccatgacctagaatgcaaatctgtcagtctgactcaaaaaaacttataccctatgaccctgatctctgggaatgcatgtaggagtattttggcttccagaagtaaaatactctagggtagcactgtccaatagaaatataatgtggggcacatatgtaacttgaaattttccagtagtcacattc

SEQ ID NO: 487096 - DNA, 159 bp, Homo sapiens
tcgtcggctgcggtgtctatgctgcgttggagacagccgagcctggcaaccaggctgtatcacttcgtctgatgacacagctgtgttcactggagatgcctgtcgatcgtggtgtggcgacgacttcagcatgctgtgccagacttgtacactcggtca

SEQ ID NO: 487097 - DNA, 376 bp, Homo sapiens
tctcagctctggcactggcaccccaggttggtccccgtctgcagaggcttggctttcgagccattgggtgtctctcctttggctctgtgcggcttgctcttgtcagccatgctttcagggtaggctctgagcaatctggcgaacagccctggctgctccaaaaccaaaaagctggttcctctggaggatgggcgagtctgtggagcagccacccattgctgtcccaagctcactcaggaatttacacccgtctggtttcttgatgtgtgctgggtcttttcctctgttccctactcccccccacggcagagtataggctttctaagatgctgcgatcccgttctgctgcccgtaataaaaatgctttcagactctg

SEQ ID NO: 487098 - DNA, 949 bp, Homo sapiens
tggggttttttgggtttttttcccaacatttgggttatcttaaataacatacacaggggttcccaccccatattcataacaaagagtttattcataaagagggtttctaaaaataacattttttttcttttgtggggtgtgtgaaagagctaggagaagagtgtcccaggtggggaagagggtgggttgggaggggggagggaggggcgtaagaaaaggggaaaccgcgggtcttctcccgcgacagtctcgtgaacccccacaaatctccccctcctcctcacacgcgtgggccccacaaacaacaaccccctctacatctatacgagaaatggagagaccaagcaacaggctgcgagcacgagaaactctcgtggagcgcccgtgggcgaacagaaaatctctctgcgtgaggttacacgtgcacatatatatgtgtgtctcacaccactctaataagagcgtgcaggcgtctcccgatgcacccacattagcgggggcggggccaacgcaacaaacacacggggcccgcagaaaacacaccaccgaggggaacgggggcgcactaaggcgggaaaaaagaacgcgaaacacagcacacacacacacacaaaccccccccctttatcgccccgctttaaatccccggggaacccttcccacaagagggtctccacaacccaaaaaccacacaacaccctgtgggagtacggcgtgaaaaacaaggggcctggatagcgtggcaccacaagaaggaagagcagaaaatgggtagcaaacacgctaaagaaggaggacaaacacagaaacccaccccccgcgcagaacccccccaaaggtggggccaacaccccacggggagcgtccggcacacaccagacatccacaacaacaacataataacaaaaaatcacgaggggaaagaccacagaaggacctgggaaagagt

SEQ ID NO: 487099 - DNA, 945 bp, Homo sapiens
  misc_feature (87)..(87): n is a, c, g, or t
  misc_feature (142)..(143): n is a, c, g, or t
  misc_feature (154)..(154): n is a, c, g, or t
  misc_feature (196)..(196): n is a, c, g, or t
  misc_feature (204)..(204): n is a, c, g, or t
  misc_feature (214)..(214): n is a, c, g, or t
  misc_feature (217)..(218): n is a, c, g, or t
  misc_feature (222)..(223): n is a, c, g, or t
  misc_feature (228)..(228): n is a, c, g, or t
  misc_feature (238)..(239): n is a, c, g, or t
  misc_feature (303)..(303): n is a, c, g, or t
  misc_feature (310)..(310): n is a, c, g, or t
  misc_feature (316)..(316): n is a, c, g, or t
  misc_feature (325)..(325): n is a, c, g, or t
  misc_feature (348)..(348): n is a, c, g, or t
  misc_feature (357)..(357): n is a, c, g, or t
  misc_feature (389)..(389): n is a, c, g, or t
  misc_feature (391)..(391): n is a, c, g, or t
  misc_feature (400)..(400): n is a, c, g, or t
  misc_feature (417)..(417): n is a, c, g, or t
  misc_feature (433)..(433): n is a, c, g, or t
  misc_feature (440)..(440): n is a, c, g, or t
  misc_feature (452)..(452): n is a, c, g, or t
  misc_feature (454)..(454): n is a, c, g, or t
  misc_feature (456)..(457): n is a, c, g, or t
  misc_feature (460)..(461): n is a, c, g, or t
  misc_feature (463)..(465): n is a, c, g, or t
  misc_feature (467)..(468): n is a, c, g, or t
  misc_feature (470)..(471): n is a, c, g, or t
  misc_feature (474)..(474): n is a, c, g, or t
  misc_feature (476)..(478): n is a, c, g, or t
  misc_feature (481)..(481): n is a, c, g, or t
  misc_feature (684)..(684): n is a, c, g, or t
  misc_feature (690)..(690): n is a, c, g, or t
  misc_feature (795)..(795): n is a, c, g, or t
  misc_feature (801)..(801): n is a, c, g, or t
  misc_feature (804)..(806): n is a, c, g, or t
  misc_feature (813)..(817): n is a, c, g, or t
  misc_feature (827)..(827): n is a, c, g, or t
  misc_feature (833)..(833): n is a, c, g, or t
  misc_feature (839)..(839): n is a, c, g, or t
  misc_feature (877)..(877): n is a, c, g, or t
  misc_feature (931)..(931): n is a, c, g, or t
gagctccgggcttaccaggttttccgggactccgtgggatccgcggcttacacggcttgccaggcaccaagggctttccaggatccncaggttctgcacatccacggagacccaggcttcccaggccctcctgcggcgaaanncgtgacccacngcacgcagcgccaccacccttccaccgccctcgctgcgcgcnctcccacnacccccaacncgnncccnncgcgncctccagggnnacgaggcccacctgggaccccaggacttcagggcgttcccaggcatcacccccccttccccccnccccccncccccnccctcacanaccgccccccccccccctcattngccctcccnccttcccccccgcccccccccccccccccctncnccccctctncctccccagccaacccngcccccccggcccccncccaccnccccccaccccncncnnccnncnnncnncnnccncnnnccnccggcgccccaggcgcaggcctgggtgtgttttggtctcccaggcagaaaaagggcccagggggtgaaccaaggcttcatgggggaacactggacccaccggggcggtgggcgacagaggccccaagggacccaagggagacccaggattccctggtgcccccgggactgtgggagccccgggattgcaggaatccccagaanattgcngtccaaccagggacagtgggtcccaggggaggcgaggccccctggggcaccgggggagatggggcccagggccccccggagaaccaggttttcgtggggctccanggaaanctnnncccaccnnnnnccccgcgtcnctcctntccccngcttccggggagatgaaggaccataggcaccaggggcngattggccaagaaggtgcacaggcggtccaggggagcccggcctgccgggtatncaggccgcacgtca

SEQ ID NO: 487100 - DNA, 363 bp, Homo sapiens
ggtcaggcacgcgctgtagtcccagctactcaggaggctgaggcaggagaatcacgtgaacccgggaggcagaggttgcagtgagtcaagatcacgccactgcatcccagcctgggaaacagcgagactctgtctcaaaaaaaaaaaaagagggggtggatggccaggtttaattttgggcgggagatggaggagatccggttttaatgggagcttggtaaatggagccggggacgggtttattacaaggacttttactttttaaaattttaccttagtatttattttactcattaaaacaggctactttacgggtacccaggtgggtcaggtccatactcgtggagggctccaggggcctgg

SEQ ID NO: 487101 - DNA, 317 bp, Homo sapiens
ctcttctccctgacaccaaccaacatctacaagcatgaacaccacccagaaaaatatggcctcatcaaatgaactatataagacaacagggaataatcctggagaaagagatatatgacctttcagacagagaattcaaaatagccatgttgaggaaactcaaggaaattcaagataacacagagaaataattcagaattctatctgcataaatttaacaacaaagattcagcgaaccaagtcagaaatcctacgagttagagaaatgcaatggcacatattgaacgaaaggatcagagatctcttaagtaacagaa

SEQ ID NO: 487102 - DNA, 164 bp, Homo sapiens
tatatatcctcttctagaggagtccgtgttctgtaatcgagtaacaccccggatcaagcctcaccaccgtcttgctacagacttatatgaccgccgatcttcagacaagaccctgtatgaacagcgacaaagttatgcgcaatttacccactggtgaagaccgt

SEQ ID NO: 487103 - DNA, 192 bp, Homo sapiens
tccaggctgaccattgacaggcgggagtcgagaccaggctggacaatggcaaaacccgtctctaccaaaaatataaaaatagctgggtgtggtggtgtgcagctgtaatcccagctacaaggtaggctgaggcatgagaattgcttgaacctgggaggcagacactgcagtgaaccgacgttgtgccactgc

SEQ ID NO: 487104 - DNA, 631 bp, Homo sapiens
ctttgccccgatgatgtggctttgaagaactttgcccatactttcttcacccatctcatgaggagagggaacactgctgagaaactgatgaagctgccgagacccacgaggtggccgaatcttccttcaggatatccaggaacccgactgtgatgactgggagagacgggcttgtaatagccatgggagtggtgccattaccatttgggaaaaaaatagtggaatccagtcacttactgggaactgccaccaaactggcccactgcaccaaaaatgacacccccatttgtggtgacattccattgagcaccaccttacctgaatgagccggtgaaagccctccaagaattgggtgaccccagtgacccacttgcgccagatgggagcgcccgaatctggcttggccggaatatctctttgaccagcacaccctgggagaccagtgataatgaaagctaagcctcgggctaatttcccccataaccctggggtgactttcctggtcaccaacaggccagtgcaagcatgttggggtttcctttaccttttctataagttgtacccaaacataccccttaagattctttgatttgtacccttcccttccaaataaagaaatttggtaccccca

SEQ ID NO: 487105 - DNA, 638 bp, Homo sapiens
gtgaatgccgctgctatggtagggactcgtccacttcgaccgcagctatgtgatccatctcagacacctggataatgcactgggtcctgatgccgggcagacaggcatggacggtgaagccgtcagtgatcccagtcttgtgaaggcgtttctccagctgatcgacgccctcgatgaagaatttggacagctcaacgagtccattctccacatgctgcatctttgcctccctggcatgaatgatcatcagccgcggcattgccttggtagcgacagcctccactatgcaggagaggttccggtccagtaggtagtaatactgatccttctggctcatcatgggtatcggatacacagtctaggaggtcacgtagaagtattgatcttgggtgcccttgtgattaaagcgtgtctctcacttagcttgaaagacaatgtcattcgccatgatcgcgcctgcattgctatagaggttcttaagcaagtcaacgatcatgcctctagctccaatcgcaatctcaccagcgtttagccgcatgaggatgccagagttgccaaagttggtagcaacagtgtgcatcagggtgatggtcatccaggtgctcgacacggagtcgtgcaggttagccgaccgttcg

SEQ ID NO: 487106 - DNA, 253 bp, Homo sapiens
aacgtgcacagaaggacttttcctttgatgttcatgtgtgccactgggatattcattcaggtgaataccggtttgtaattcattatctgaacctggaacaaaactcagttttgcctgtcaacataaagtacctttccctctcaggttttgccttctctagaaatgatatgcaggtatatttatgtccaccatgtcacttgtgccctttgctctatccatctttcctaggtcttggcttccaagatatccagaa

SEQ ID NO: 487107 - DNA, 743 bp, Homo sapiens
  misc_feature (740)..(740): n is a, c, g, or t
gcaccgggaagggcgggggggctgcttttccccagtgtttaaaaggggttctttccaagccatttagtgggtaacgccaggttttccaattcagacgttgtaaactccgcccattaatgtctatattccccctttagggggatttgccaagtgtgcccggatatggcccgcacgcattagctttcccagtttagacttccctggggcgagccggcggacaagctattagtggtattggcatttcccgggggtttagtttttttttattttttacaaatatactggagaatcatgcaatgctgccagcattggatgcaatccggggccacaagtctgcacactcctttgctactggtcctgtaatggcagaacctttcatctcgcctttattgttcactatgactcctgcattatcttcaaaataaagaaacacgccatcttttctacggtatgactttcgttgtcgaatgaccactgctggatgtaccttttttctgagctctggtttgcctttcttgactgtggccatcaccatgtcacccacaccagcagcgggaagtctgttcagccgtcccttgatccccttcacggagatgatatacaggtttttggctcctgtgttgtcagcacaattgattacagctcctaccggaagacccaaggaaatccggaatttcgcaccagaggacccaccacgtcctcgcttcgacatcttgaacgccggaaaaaagaaaaaaggnccc

SEQ ID NO: 487108 - DNA, 450 bp, Homo sapiens
ccactgggacatgcaaagacatgaacgtcatcacatggagattttgcttccaggaaatggagaaagatattcatgattttgagtttcagtggaaagaagatgaaagaaatagccatgaaggaccccatgacagaaatcaaacagttgacgggtagtacaaaccgacatgatcaaaggcatgctggaaacaagcctattaaagatcagcttggatcaagctttcattcgcatctgcctgaactccacatgtttcagaccgaagggaaaattggtaatcaagttgagaagtctatcaacagtgcttcgttggtttcaacatcccaaagaatttcttgtaggcctaaaacccacatttctaagaactatgggaataatttcctgaattcttcattactcacacaaaaagcaggaagtacacatgagagaaaaatctttccagtgtggagagag

SEQ ID NO: 487109 - DNA, 381 bp, Homo sapiens
aggtactattatttctggttttataataagaaaatttttgtttaatcaaatggggcctttcaaccaaataacatttcaggggtttagtttttttttaaaaggttttgttaccttaaagcaagtaccttttgttgtggctttttttaaaaaaaccgggcctaaaatggttaaaaatgtaatattttctaaaatccggttttggggtaatgttgccgggttttactttattgcatcttttttggttaattgtatttaagccttgtgcaatcacttgggaaaaattttaaatttttaacattggggttttaatacattttaagccctttgtttttaaatttcttttgttcccggggttttaaaaataaattttggccaaattta

SEQ ID NO: 487110 - DNA, 783 bp, Homo sapiens
  misc_feature (491)..(491): n is a, c, g, or t
taacaggcttcgcctgtgcttcctgttcctcttttaccaaggacccgccaacatgggccgcgttcgcaccaaaaccgtgaagaaggcggcccgggtcatcatagaaaagtactacacgcgcctgggcaacgacttccacacgaacaagcgcgtgtgcgaggagatcgccattatccccagcaaaaagctccgcaacaagatagcaggttatgtcacgcatctgatgaagcgaattcagagaggcccagtaagaggtatctccatcaagctgcaggaggaggagagagaaaggagagacaattatgttcctgaggtctcagccttggatcaggagattattgaagtagatcctgacactaaggaaatgctgaagcttttggacttcggcagtctgtccaaccttcaggtcactcagcctacagttgggatgaatttcaaaacgcctcggggacctgtttgaattttttctgtagtgctgtattattttcaantaacatctgggacatcacacacatacactaaataactaaactacctgttttcggtaccgcctcagactccatggaaaagttttcgacacattttcgttgtgagcccgactgcccccggatagggttagtctacctggctatacgtattttcccgtagaaatctcgggactgataacagtgccggggcttcctgcaccctaataatatagccccgtggtcaacgaaagctttctgaatacaccaccatggggatcatggaggcgaatgagggtctgtcgagggctcaagcaga

SEQ ID NO: 487111 - DNA, 1099 bp, Homo sapiens
  misc_feature (639)..(639): n is a, c, g, or t
  misc_feature (642)..(642): n is a, c, g, or t
cctgatgtcgccacgatttcccgctcggccgtgggtggtgaagcttgtagcctcgctccatgaggatctttcatgaggtatcggtcaggtcccggcccagcccggtcccaacgcccggatggctgggggagggcgtagccctcgtagatgggccccctgtgggtgaccccctctcccgagtccctgaccatgccgcgttcgcaccaaaaccgtgaagaaggcggcccgggtcatcatagaaaagtactacacgcgcctgggcaacgacttccacacgaacaagcgcgtgtgcgaggagatcgccattatccccagcaaaaagctccgcaacaagatagcaggttatgtcacgcatctgatgaagcgaattcagagaggcccagtaagaggtatctccatcaagctgcaggaggaggagagagaaaggagagacaattatgttcctgaggtctcagccttggatcaggagattattgaagtagatcctgacactaaggaaatgctgaagcttttggacttcggcagtctgtccaaccttcaggtcactcagcctacagttgggatgaatttcaaaacgcctcggggacctgtttgaattttttctgtagtgctgtattattttcaataaattctgggacnacnatacataatagatagaaacgaggaaccccgcgggcatctcaagtcgaggcggcgggcaaaaatggcgtgtgagtagagatgtggaccacttgggccaatgagcggagttgccctggaaccgcaagagttacctttggtcccacagtgggtgaaatctggccggagctcccataatgaggagagtcggtataaaatgcggcgataaaagcccgagggttcaccccggcgtgttagtgagaccggcgggaaaaccggccacttgtgagggagggtaatacccaccggcgtgaacccaatcagaccaaatagtccattggaccgcgcccggggatttcacagactttcagttaacaaacgatgcaagccctgggcttttgaaaacaacgccatgctgtgtgcccactgcacagacacatctcaatcccagcttcgtacgacgccgagaagggtgtatacc

SEQ ID NO: 487112 - DNA, 590 bp, Homo sapiens
  misc_feature (587)..(587): n is a, c, g, or t
ctggcaggcaagggcggggatatcagatgaataaaggacgaaagaaaagaaaggaagaaagatgggaggggtggatagatttattcaattttgttttgtaaaaagatgcattttttattcaagtgttattggggacagataaaaagctggaggtatttttttctatccgggctctcagtgttgcacactcctttgctactggtcctgtaatggcagaacctttcatctcgcctttattgttcactatgactcctgcattatcttcaaaataaagaaacacgccatcttttctacggtatgactttcgttgtcgaatgaccactgctggatgtaccttttttctgagctctggtttgcctttcttgactgtggccatcaccatgtcacccacaccagcagcgggaagtctgttcagccgtcccttgatccccttcacggagatgatatacaggtttttggctcctgtgttgtcagcacaattgattacagctcctaccggaagacccaaggaaatccggaatttcgcaccagaggacccaccacgtcctcgcttcgacatcttgaacgccggaaaaaagaaaaaaggnccc

SEQ ID NO: 487113 - DNA, 744 bp, Homo sapiens
gccccacaggctgctgccaccggctgctgctgctgctagctctgctgctcgctgccagcccaggaggcgccttggcgcggtgcccaggctgcgggcaatgggtgcaggcgggttgtccatgggggctgcgtggaggaggaggatggggggtcgccagccgagggctgcgcggaagctgagggctgtctcaggagggaggggcaggagtgcggggtctacacccctaactgcgccccagactgcagtgccatccgcccaaggacgacgaggcgccttttgcgggcgctgctgctcgcgcgaagccggctgctctcgggccgcggccgccttgtgtttggcggaagggaatctcttagggaaagttaaaccccaagcagggctattgcccgcccacgggatgtggaacctgcagaggaccaacagaggactccaggcgagctctaccacgccctcccagcccaattctgcggggtgtccaagacactgagatgggcccatgccgtagacattctggacctcaggtgctgcagcaaactccagacctgaggtctaccgcagggggctcaaaacagtctacgttgcccgaattggtgaccatcgaggcgttctaccggaaggccggcagtgcgcgctcctcccaaggggcagcggccgagggtccctgctggtgttgtgcatccggattggcgaggtcccctggcagggttcctccagattggccatggaagctcctacccttgcgca

SEQ ID NO: 487114 - DNA, 937 bp, Homo sapiens
  misc_feature (127)..(127): n is a, c, g, or t
  misc_feature (203)..(203): n is a, c, g, or t
  misc_feature (205)..(205): n is a, c, g, or t
  misc_feature (213)..(213): n is a, c, g, or t
  misc_feature (216)..(216): n is a, c, g, or t
  misc_feature (222)..(222): n is a, c, g, or t
  misc_feature (249)..(250): n is a, c, g, or t
  misc_feature (293)..(295): n is a, c, g, or t
ggtaggtgttttggctcgaggcctgcatcctccacaatcgtcccccatctgcagcttcccgcggtcctcagcccacagagaggccctgggccgggaaggcgcagagccctgtcaggctggagcgcancgggacggcggattccgcattaagcccggcgcccggcactgtttagccgggccctctccggctcagcgcagccggngntccccaancanaccggncggggctcggcgccgcactcttcccannaaggttgcgctggctcgtgagtgatcctgtcctctccacccgnnngggccgcgttcgcaccaaaaccgtgaagaaggcggcccgggtcatcatagaaaagtactacacgcgcctgggcaacgacttccacacgaacaagcgcgtgtgcgaggagatcgccattatccccagcaaaaagctccgcaacaagatagcaggttatgtcacgcatctgatgaagcgaattcagagaggcccagtaagaggtatctccatcaagctgcaggaggaggagagagaaaggagagacaattatgttcctgaggtctcagccttggatcaggagattattgaagtagatcctgacactaaggaaatgctgaagcttttggacttcggcagtctgtccaaccttcaggtcactcagcctacagttgggatgaatttcaaaacgcctcggggacctgtttgaattttttctgtagtgctgtattattttcaataaatctgggacaacagccttagaaacacaagaaagagaaactgggaggcctatattgcgggggcgggaaagaggggttggagaagatgggcctaaccggtggtgtatcctggttgtcgctgacgcagaggtttgctgtgtactagatggggcagaatctggccgggtccctatagtggaggtctgcatgaattacaataaacgag

SEQ ID NO: 487115 - DNA, 2062 bp, Homo sapiens
  misc_feature (695)..(695): n is a, c, g, or t
  misc_feature (701)..(701): n is a, c, g, or t
  misc_feature (1602)..(1602): n is a, c, g, or t
  misc_feature (1605)..(1605): n is a, c, g, or t
agctgtgtgtgatatctcttcatggcgtcaagtttatatctcttggtggtgaacatttcttccggtggacgatgccttggggatgtcttctccctgccggtcacgagtatagtagcgaatcacacgtgttgccccaccctagttgtgttatctagacaggtgtgctacccactggcaccgttgagagagtcatgccttatgattgcccgccatggctgccacagttttggagaacagggtcagttcggctccagccaattgcaagccgtgcgtacttccaggaggaagctaccatggtataccagtcatggacagtatctactaatgacttgtgggactcaaaacccagataatacttttgagcccaaaattgtaaatacagcaattgggagatgctgtaaagtctgcaactcacacgaacagcaaggattgctttaaaacacaaatgcccagagtttccattttcagaaaagtgatggtcagggtatgtctaaaacatctgtagagcctgggtgggcagatcacttgagatcaggagtttgagtcgtttggcaaacatggtgaaaccctgtctccaccaaaaatacaaaactagccaggcatgacggcaggtgcctgcaatcccagctacttaggaggctgaggcaggagaatcgcctgaaacctggaagtgaacagggagacaagcactgcanacaaanactttttaatggctttagtttttttttattttttacaaatatactggagaatcatgcaatgctgccagcattggatgcaatccggggccacaagtctgcacactcctttgctactggtcctgtaatggcagaacctttcatctcgcctttattgttcactatgactcctgcattatcttcaaaataaagaaacacgccatcttttctacggtatgactttcgttgtcgaatgaccactgctggatgtaccttttttctgagctctggtttgcctttcttgactgtggccatcaccatgtcacccacaccagcagcgggaagtctgttcagccgtcccttgatccccttcacggagatgatatacaggtttttggctcctgtgttgtcagcacaattgattacagctcctaccggaagacccaaggaaatccggaatttcgcaccagaggacccaccacgtcctcgcttcgacatctaagaaggcggcccgggtcatcatagaaaagtactacacgcgcctgggcaacgacttccacacgaacaagcgcgtgtgcgaggagatcgccattatccccagcaaaaagctccgcaacaagatagcaggttatgtcacgcatctgatgaagcgaattcagagaggcccagtaagaggtatctccatcaagctgcaggaggaggagagagaaaggagagacaattatgttcctgaggtctcagccttggatcaggagattattgaagtagatcctgacactaaggaaatgctgaagcttttggacttcggcagtctgtccaaccttcaggtcactcagcctacagttgggatgaatttcaaaacgcctcggggacctgtttgaattttttctgtagtgctgtattattttcaataaattctgggacnacnatacataatagatagaaacgaggaaccccgcgggcatctcaagtcgaggcggcgggcaaaaatggcgtgtgagtagagatgtggaccacttgggccaatgagcggagttgccctggaaccgcaagagttacctttggtcccacagtgggtgaaatctggccggagctcccataatgaggagagtcggtataaaatgcggcgataaaagcccgagggttcaccccggcgtgttagtgagaccggcgggaaaaccggccacttgtgagggagggtaatacccaccggcgtgaacccaatcagaccaaatagtccattggaccgcgcccggggatttcacagactttcagttaacaaacgatgcaagccctgggcttttgaaaacaacgccatgctgtgtgcccactgcacagacacatctcaatcccagcttcgtacgacgccgagaagggtgtatacc

SEQ ID NO: 487116 - DNA, 1546 bp, Homo sapiens
  misc_feature (1086)..(1086): n is a, c, g, or t
  misc_feature (1089)..(1089): n is a, c, g, or t
gccaaattgggttaagccagagtcccaataaaggagttgtaattcgaaggccaagaattgttaatgaatccaccataggggtaattgccaaagttagacgaaaaaagggttaaaaagcaatagggccaaattcaaagttgcattttccaaatcggccatcaaggtttaaaactgtttggaaagactgattatttagggtttagtttttttttattttttacaaatatactggagaatcatgcaatgctgccagcattggatgcaatccggggccacaagtctgcacactcctttgctactggtcctgtaatggcagaacctttcatctcgcctttattgttcactatgactcctgcattatcttcaaaataaagaaacacgccatcttttctacggtatgactttcgttgtcgaatgaccactgctggatgtaccttttttctgagctctggtttgcctttcttgactgtggccatcaccatgtcacccacaccagcagcgggaagtctgttcagccgtcccttgatccccttcacggagatgatatacaggtttttggctcctgtgttgtcagcacaattgattacagctcctaccggaagacccaaggaaatccggaatttcgcaccagaggacccaccacgtcctcgcttcgacatctaagaaggcggcccgggtcatcatagaaaagtactacacgcgcctgggcaacgacttccacacgaacaagcgcgtgtgcgaggagatcgccattatccccagcaaaaagctccgcaacaagatagcaggttatgtcacgcatctgatgaagcgaattcagagaggcccagtaagaggtatctccatcaagctgcaggaggaggagagagaaaggagagacaattatgttcctgaggtctcagccttggatcaggagattattgaagtagatcctgacactaaggaaatgctgaagcttttggacttcggcagtctgtccaaccttcaggtcactcagcctacagttgggatgaatttcaaaacgcctcggggacctgtttgaattttttctgtagtgctgtattattttcaataaattctgggacnacnatacataatagatagaaacgaggaaccccgcgggcatctcaagtcgaggcggcgggcaaaaatggcgtgtgagtagagatgtggaccacttgggccaatgagcggagttgccctggaaccgcaagagttacctttggtcccacagtgggtgaaatctggccggagctcccataatgaggagagtcggtataaaatgcggcgataaaagcccgagggttcaccccggcgtgttagtgagaccggcgggaaaaccggccacttgtgagggagggtaatacccaccggcgtgaacccaatcagaccaaatagtccattggaccgcgcccggggatttcacagactttcagttaacaaacgatgcaagccctgggcttttgaaaacaacgccatgctgtgtgcccactgcacagacacatctcaatcccagcttcgtacgacgccgagaagggtgtatacc

SEQ ID NO: 487117 - DNA, 1599 bp, Homo sapiens
  misc_feature (1139)..(1139): n is a, c, g, or t
  misc_feature (1142)..(1142): n is a, c, g, or t
gcaccgggaagggcgggggggctgcttttccccagtgtttaaaaggggttctttccaagccatttagtgggtaacgccaggttttccaattcagacgttgtaaactccgcccattaatgtctatattccccctttagggggatttgccaagtgtgcccggatatggcccgcacgcattagctttcccagtttagacttccctggggcgagccggcggacaagctattagtggtattggcatttcccgggggtttagtttttttttattttttacaaatatactggagaatcatgcaatgctgccagcattggatgcaatccggggccacaagtctgcacactcctttgctactggtcctgtaatggcagaacctttcatctcgcctttattgttcactatgactcctgcattatcttcaaaataaagaaacacgccatcttttctacggtatgactttcgttgtcgaatgaccactgctggatgtaccttttttctgagctctggtttgcctttcttgactgtggccatcaccatgtcacccacaccagcagcgggaagtctgttcagccgtcccttgatccccttcacggagatgatatacaggtttttggctcctgtgttgtcagcacaattgattacagctcctaccggaagacccaaggaaatccggaatttcgcaccagaggacccaccacgtcctcgcttcgacatctaagaaggcggcccgggtcatcatagaaaagtactacacgcgcctgggcaacgacttccacacgaacaagcgcgtgtgcgaggagatcgccattatccccagcaaaaagctccgcaacaagatagcaggttatgtcacgcatctgatgaagcgaattcagagaggcccagtaagaggtatctccatcaagctgcaggaggaggagagagaaaggagagacaattatgttcctgaggtctcagccttggatcaggagattattgaagtagatcctgacactaaggaaatgctgaagcttttggacttcggcagtctgtccaaccttcaggtcactcagcctacagttgggatgaatttcaaaacgcctcggggacctgtttgaattttttctgtagtgctgtattattttcaataaattctgggacnacnatacataatagatagaaacgaggaaccccgcgggcatctcaagtcgaggcggcgggcaaaaatggcgtgtgagtagagatgtggaccacttgggccaatgagcggagttgccctggaaccgcaagagttacctttggtcccacagtgggtgaaatctggccggagctcccataatgaggagagtcggtataaaatgcggcgataaaagcccgagggttcaccccggcgtgttagtgagaccggcgggaaaaccggccacttgtgagggagggtaatacccaccggcgtgaacccaatcagaccaaatagtccattggaccgcgcccggggatttcacagactttcagttaacaaacgatgcaagccctgggcttttgaaaacaacgccatgctgtgtgcccactgcacagacacatctcaatcccagcttcgtacgacgccgagaagggtgtatacc

SEQ ID NO: 487118 - DNA, 217 bp, Homo sapiens
gatcttagagtagcagactaatattccaagcagtgtgacacgctgcattcctttaaagcacatgatgtcaattgttcaagtagttttctggttttaagagacaataacaatattgaacaagctttaatgatggcttctccccatccacatgtttttgtaccttagagacacttggagttgatgtacatcacccactccaactctcttatcttataga

SEQ ID NO: 487119 - DNA, 338 bp, Homo sapiens
ttttttttttcgaggcagagtcttgctctgtcacccagggtggagtgcagtagcatgatctcagctcactgcaacctccgcctcccaggttcaagcgattcttctgcctcagcctcctgagtagatgggactacaggagagtgccaccatgcctggctaatttttgtatttttggtagagatgaggtttcaccatattggccaggctggtctcgaactcctgacctcgtgatcaacccaccttggcctcccaaagtgctgggattacaggcatgagcaccatgcctggagtaatattttaaatttctttaatgacacaccaccatacaaaagcgtcga

SEQ ID NO: 487120 - DNA, 1472 bp, Homo sapiens
  misc_feature (695)..(695): n is a, c, g, or t
  misc_feature (701)..(701): n is a, c, g, or t
agctgtgtgtgatatctcttcatggcgtcaagtttatatctcttggtggtgaacatttcttccggtggacgatgccttggggatgtcttctccctgccggtcacgagtatagtagcgaatcacacgtgttgccccaccctagttgtgttatctagacaggtgtgctacccactggcaccgttgagagagtcatgccttatgattgcccgccatggctgccacagttttggagaacagggtcagttcggctccagccaattgcaagccgtgcgtacttccaggaggaagctaccatggtataccagtcatggacagtatctactaatgacttgtgggactcaaaacccagataatacttttgagcccaaaattgtaaatacagcaattgggagatgctgtaaagtctgcaactcacacgaacagcaaggattgctttaaaacacaaatgcccagagtttccattttcagaaaagtgatggtcagggtatgtctaaaacatctgtagagcctgggtgggcagatcacttgagatcaggagtttgagtcgtttggcaaacatggtgaaaccctgtctccaccaaaaatacaaaactagccaggcatgacggcaggtgcctgcaatcccagctacttaggaggctgaggcaggagaatcgcctgaaacctggaagtgaacagggagacaagcactgcanacaaanactttttaatggctttagtttttttttattttttacaaatatactggagaatcatgcaatgctgccagcattggatgcaatccggggccacaagtctgcacactcctttgctactggtcctgtaatggcagaacctttcatctcgcctttattgttcactatgactcctgcattatcttcaaaataaagaaacacgccatcttttctacggtatgactttcgttgtcgaatgaccactgctggatgtaccttttttctgagctctggtttgcctttcttgactgtggccatcaccatgtcacccacaccagcagcgggaagtctgttcagccgtcccttgatccccttcacggagatgatatacaggtttttggctcctgtgttgtcagcacaattgattacagctcctaccggaagacccaaggaaatccggaatttcgcaccagaggacccaccacgtcctcgcttcgacatctggccaaattcttgagcccggggatccattgtctagaggggccgcacccgcggggaagctcagttttgtccctttaatgagggtaatttcaggctggcggaacatggcataagtggtcctgtgggaaatggtatcccgtaccaattcaacaacatacgagccggaggataaagtgtaaagcctgggggcctatgggggggccaacctcaataaatgggtgggccaattggcgctttcacaggggaaacctgggtgccaagtgatatatgtaacggccaacccccgggaaaggcggg

SEQ ID NO: 487121 - DNA, 453 bp, Homo sapiens
  misc_feature (10)..(10): n is a, c, g, or t
  misc_feature (28)..(28): n is a, c, g, or t
  misc_feature (40)..(40): n is a, c, g, or t
  misc_feature (81)..(81): n is a, c, g, or t
  misc_feature (100)..(101): n is a, c, g, or t
  misc_feature (107)..(107): n is a, c, g, or t
  misc_feature (202)..(202): n is a, c, g, or t
  misc_feature (227)..(227): n is a, c, g, or t
  misc_feature (230)..(230): n is a, c, g, or t
tcccctgggnctcctcccctccccaaangccccgtcaagncctgaaaactcgccctccccccccgtgacctcctgcccctncggggctcgccaaaggccnnctggtncactccgtccatccattttgccccccggagaccgtcctttcctttgtgcccttgatgttgaagagcgccctctcttttgaagcaaacaagcattnctatatgcaaccagagtagaggggnacngctcagcaggtgtgacccagggttctctgaatctgttattgtttttgcttctggaaagttcatttggggtttacaacaactaggatgtgttgggtgagatgtttcagatctggagaaatgagcaggtgtcgggaaatgtgtgacttaaccgtggtgagggctggaaatccaaactcaccaccatgatctgtgaaataaagcccttagcagtgtgaaaaaaaaa

SEQ ID NO: 487122 - DNA, 924 bp, Homo sapiens
  misc_feature (44)..(44): n is a, c, g, or t
  misc_feature (82)..(82): n is a, c, g, or t
  misc_feature (85)..(85): n is a, c, g, or t
  misc_feature (95)..(95): n is a, c, g, or t
  misc_feature (106)..(106): n is a, c, g, or t
  misc_feature (137)..(137): n is a, c, g, or t
  misc_feature (144)..(146): n is a, c, g, or t
  misc_feature (174)..(174): n is a, c, g, or t
  misc_feature (202)..(202): n is a, c, g, or t
  misc_feature (208)..(208): n is a, c, g, or t
  misc_feature (210)..(210): n is a, c, g, or t
  misc_feature (212)..(212): n is a, c, g, or t
  misc_feature (214)..(214): n is a, c, g, or t
  misc_feature (216)..(216): n is a, c, g, or t
  misc_feature (218)..(218): n is a, c, g, or t
  misc_feature (220)..(220): n is a, c, g, or t
  misc_feature (225)..(225): n is a, c, g, or t
  misc_feature (310)..(310): n is a, c, g, or t
  misc_feature (392)..(392): n is a, c, g, or t
  misc_feature (396)..(396): n is a, c, g, or t
  misc_feature (470)..(470): n is a, c, g, or t
  misc_feature (534)..(534): n is a, c, g, or t
  misc_feature (570)..(570): n is a, c, g, or t
  misc_feature (581)..(581): n is a, c, g, or t
  misc_feature (585)..(585): n is a, c, g, or t
  misc_feature (591)..(591): n is a, c, g, or t
  misc_feature (611)..(611): n is a, c, g, or t
  misc_feature (632)..(632): n is a, c, g, or t
  misc_feature (641)..(642): n is a, c, g, or t
  misc_feature (647)..(647): n is a, c, g, or t
  misc_feature (649)..(649): n is a, c, g, or t
  misc_feature (658)..(658): n is a, c, g, or t
  misc_feature (660)..(660): n is a, c, g, or t
  misc_feature (682)..(683): n is a, c, g, or t
  misc_feature (685)..(685): n is a, c, g, or t
  misc_feature (692)..(692): n is a, c, g, or t
  misc_feature (703)..(703): n is a, c, g, or t
  misc_feature (707)..(707): n is a, c, g, or t
  misc_feature (719)..(719): n is a, c, g, or t
  misc_feature (789)..(789): n is a, c, g, or t
  misc_feature (818)..(818): n is a, c, g, or t
  misc_feature (840)..(840): n is a, c, g, or t
  misc_feature (846)..(846): n is a, c, g, or t
  misc_feature (848)..(848): n is a, c, g, or t
  misc_feature (872)..(872): n is a, c, g, or t
cttactataatatgaactgaggcccagaaggaaatcccttagtntttttttgatttaacgacagtgtcttgtgatgtggaanttntctcagtctntcatctttgcnaaactgttgcttagtattctggttttttttnttttttnnntttttatttacaaacttctttgggtgtnaggatgtgctgccacaaggccaaaaatnacattntntntntntntnctctnctctctaccattctcctcagtgccaggtggggacagattccacccactgggcctgggaggaagaaaagcaccttggccactagtnagggaggagtcacagccagcaagaagagagagacctaagtagacaagagtagtttcaatgggaagaagcagggccaccagtnaganaaccaggagactccttctgaaaggcttccacctgggaggaaagatggcagcagtgccatgaggaggccagatcnctcctcctcaatcctctgcgccgggccctcccagagtcacttcttcagggcacccaggctcttnagggtctcttgggcatgggtcagctgctgctgcagnatctgagcggngtgntctaantgaaaggacgatttagagtngaccatgcatcttctccaccntggctcggnngccangngtgaagtanancgcccgccccgcccggtccccnnangaggccngacagcggccngtgntgtcaaaggacnagttggcgatacactcgccatggacccgctcaaagcactcctccttctcgccccgccgggtattgtaganatgaatactactgccactggccaaggccnagacctgggcgttggggggagncggccncncggcacggcgcggcacccgcggcntcttcaaagcggcctgtctttagcaagtaggggtctgcttcttcttgtattc

SEQ ID NO: 487123 - DNA, 1206 bp, Homo sapiens
  misc_feature (695)..(695): n is a, c, g, or t
  misc_feature (701)..(701): n is a, c, g, or t
  misc_feature (1203)..(1203): n is a, c, g, or t
agctgtgtgtgatatctcttcatggcgtcaagtttatatctcttggtggtgaacatttcttccggtggacgatgccttggggatgtcttctccctgccggtcacgagtatagtagcgaatcacacgtgttgccccaccctagttgtgttatctagacaggtgtgctacccactggcaccgttgagagagtcatgccttatgattgcccgccatggctgccacagttttggagaacagggtcagttcggctccagccaattgcaagccgtgcgtacttccaggaggaagctaccatggtataccagtcatggacagtatctactaatgacttgtgggactcaaaacccagataatacttttgagcccaaaattgtaaatacagcaattgggagatgctgtaaagtctgcaactcacacgaacagcaaggattgctttaaaacacaaatgcccagagtttccattttcagaaaagtgatggtcagggtatgtctaaaacatctgtagagcctgggtgggcagatcacttgagatcaggagtttgagtcgtttggcaaacatggtgaaaccctgtctccaccaaaaatacaaaactagccaggcatgacggcaggtgcctgcaatcccagctacttaggaggctgaggcaggagaatcgcctgaaacctggaagtgaacagggagacaagcactgcanacaaanactttttaatggctttagtttttttttattttttacaaatatactggagaatcatgcaatgctgccagcattggatgcaatccggggccacaagtctgcacactcctttgctactggtcctgtaatggcagaacctttcatctcgcctttattgttcactatgactcctgcattatcttcaaaataaagaaacacgccatcttttctacggtatgactttcgttgtcgaatgaccactgctggatgtaccttttttctgagctctggtttgcctttcttgactgtggccatcaccatgtcacccacaccagcagcgggaagtctgttcagccgtcccttgatccccttcacggagatgatatacaggtttttggctcctgtgttgtcagcacaattgattacagctcctaccggaagacccaaggaaatccggaatttcgcaccagaggacccaccacgtcctcgcttcgacatcttgaacgccggaaaaaagaaaaaaggnccc

SEQ ID NO: 487124 - DNA, 431 bp, Homo sapiens
cttgtggcggttcatgcctgttatcctagcactttgggaggctgaggcagctggatcatctgaggtcaagagtttgagaccagcctgatcaacatggcgaaaccccgtctctactacatacaaattagccggtcatgctggcagatgcctgtaatcccagctacttgcgaggctgaggcaggagaattgcttgaatccagcaggtagaggctgcagtgagccgtgactgcaccattgtacttcagcccgttcgacagagcgagactctgtcctcacccatccctctatccccatcgttctcattcttcaacatcaacagctgccggcaacaccgccacgatcgtcttcccaactgctgctccccgtctcctgtttttcctcccacacacatcccaccacaccgcctcactctccctatcacgtattccccc

SEQ ID NO: 487125 - DNA, 590 bp, Homo sapiens
  misc_feature (234)..(234): n is a, c, g, or t
cctggggtgatctagaggacccccagtccaaatccggggtaccagggtgacttctacatccaggatcccatctacggggagtacaggtatccctacctcacaagccaacaactattactccctcatcggggggcatcaggggttcattacctatgatgacagacctcacctcagggtacacagtctccagcaggtcggcaaggccaacaagggtcattccttcatctcccacgntccagaatacagaaacctcaagtctggttagcagtgagtgtcggctaccacgtcccaggggaggaccaattttcacaagtacggagaacactccaacagggtccctccggacaagctttccagggacacattcattttcctctgccagggtcgggcagcgagggtagggaccactcacacccagagtatctcctcacccccagccatcaccagtacactccacacaagagcggaatccaccccatcacctacaagcaccaggtcattcacaacatttacaaagagggaaacaccttcatccggggtagctagaattacaggcatgcaccagcaaacccgctaattttcggtatctc

SEQ ID NO: 487126 - DNA, 262 bp, Homo sapiens
aatctagcttgcaagccgtaagggagaatcgtgtgacggcatgcgatgacttcttcttctgtttcaaacggaagaatgttacgattggtgcgaatacttcttcacatacaaccttcatttgcggggttacgtccgttaataccgtcggttgaagcaacgttccttgccgctgtccgcctgtgagtaagcgagctccttgagaaacggcttcttgtatccatgcttccgcccggcacgctgcttctaatgtaatcatcggacc

SEQ ID NO: 487127 - DNA, 1267 bp, Homo sapiens
ccgtacactctggaccacaccccggcactggggactctgcacggtcccttccagccctaagataccccaccgcaggaaacgcccctggacctcaactcccaaaaactcacgcgaaaggcggcaagtcccacaacaccggaggaccacccttcacgtctgccgccttatgaactcgcatacacactgcgttgcgcggcggccctcatatacccggaaccctagacgccatccccggaaagaaggggaacattggagcctagtgtcatggtaaaccacatcgctccatgtaccacccgcgtgagctatcctcttcacgatgttgcaaccgcctccgtaagtaacgtgacggtattgccctacacaaggacccacaagatggatgaaactgtctagctacaaccaaaaagttcccgcggataaatgagggatcaacgagaccacaattacttcaaccccaatggatcgtcaagttggttacaaccaaccacatgtcaggcgtagcgataaagcgtactagtagcgcggacgtctttgggcctcctgtaagcacctccatagctcgaatacgtttacacacatgacaggtcctttcggcaaaggacgtctgtaccaaagcatcgtcaggcaagtgtcatacaagagtgactatgagacacgtgcccaagtctcctggcctgtttgagacaccacctgtggggccatgtgctctcgaagagagacgtctgattcgacgaccaggcaagcaaagaagtcaagtcttggccaagaaagcctaggatcacgcgaaccacacgtcaggaacttaggcccacacaccatggaatcaggcctctgcagacacggccaggcatacgctgaccacagacaaggcgcacagcttggcctgctggccgtccagccgagtggcaatcgtaagtcaggcccgcgatcgtgtactcaaggatgaagcaagagatcgatgactggactgatccggctaacttccaccatgccccgacgtctctctatccttgctgtcgtatccgatagatcccttagcccgttgcacgacccgaaaacaggtcgccaacaaatggctttcatcacgtaatatgcgtaggcattctcggtggacttgtcactttgtattctagtggatgtctgctattaagtgttcatctattagtagtgctatacattgtataagactgtcctctttgaagatattgaaaatttaaggttcacgtatgaatatcaattttgaatttttaatggtgtttatgattac

SEQ ID NO: 487128 - DNA, 891 bp, Homo sapiens
  misc_feature (1)..(1): n is a, c, g, or t
naccttgtgcccgccgcatgctctgctcagcacacatgaatgctttgggccccgcacctgttcgggggccgcccatgtgtggcgcccggcgtccctttgtgggacctcgcggggggccccctttttagtctggcgtatacatctcggccgccgggatctttcatgccgccccctggccccagagggagaagtgtaagatgttggtcggcaccccgcggagtgtttgtatcgacacagtgggtactcgcccgcccgagtcgagcgtcgacgtgggccaccacatttctcgctcgcacttctgtgccaggccgcgccgcgctaatctttttgtctctcggcgcgcctccgcgtgcgtctgtatctccacttgaatagtgctgctgagtgcgagcgcgagtaatacagactgtgccccacatagcctgtgctgtaagagaacacaacatctaaatgtaagtttcatagccgaccccccatattcaacgggccacgcctgctggtgtggcccgccacgcccctccgtaacatcccgcagccaccttttgggaggagttgtcacagagcgggggggagttaatacctaacgcgcaccgcggaggtttttacagaaacctcccgctctggcgcaactcagtgctcttgtgtacccccttctttgtcggtgtagctcgcaccgaagtttacgtgagcactcccttgcgcagcactcctgtattccccaccattcatcgcgcggctgtggcccagcagtatgctaggtggaacccgccgggggcgcagcagtttccgcccggtggcccccaggttggtcccctcagccactgccccccctggggtggtaccgaggtgcaggtgccgccgttttctaaaaacccccaccacccacatgac

SEQ ID NO: 487129 - DNA, 1015 bp, Homo sapiens
gaagagacctgtgtatggcaggcgtcacgctcgatttcaattgtgtactgggttcattgcgatgctctcgaggatgttgccctacgagtcatcgaacgctccgtaccttgcgttcgcccccttaccctgacagatccgtgtgtcctcatgggaatgacgcaggaggacaagtcatcgactggcctgagatatctatttgcgatatcaccttgttactgggaccagaaatcaggtcatggatatccagctggttcatcactgccttgtttgtgcctcgcgacaaagtcccaataatactattcacttaagagtattttatggtcgactcaagacatggtcgtagattcattggtcagtaagagataaggattttacgaatagtctagcacagatcctcgaaggagcaatctacttcgcgagatctccataagatccaatcgatggtgtcgcatacagtataggtacagatcattacggtttggtaaggcggtcattgagggtcactgaaagtttgacattaaagccacacgtacaatgttcagaacccaagctacagccccgcctatagtgctatctcttgataaaggtttgcgaaagcgttgacctgaggagcgtttcgcctaggagccttacagagatttggctccttgcgtgtgagagattgtagccctgtgagtctccttggggtggcctgcctattcgcctcggctgtgtcatggattctggtcgaccttgccatgatcaccaagatcctcggtagacaagctgagcgagtaccgagtaccatgagacgagcccggcggcctgagagatgcgagcgacgtaccacttggtgcagtccaaggcgttatggccggggcgcgcaccggaacacctgaaacgtccgtggaccaacgcggccccgcggcggagcgcattcgagcacccggcacaggaacgcgaccgggacaaccaggtacacctaacgtcgcgggccccccaatgtaccccccgggggccggacaggggcccccca

SEQ ID NO: 487130 - DNA, 1572 bp, Homo sapiens
  misc_feature (771)..(771): n is a, c, g, or t
  misc_feature (960)..(960): n is a, c, g, or t
  misc_feature (1194)..(1194): n is a, c, g, or t
cgtggtggctgtggtgcgggcgcgcgttgggagagcgacggtcggtggttgtgtgggtagatggagtcggtcggtgcgtgtgcggtgggcgtggtagtggtgtgtggtgcgctggggtgcatgggatggttgttgtttgtgctgcgcgtggtgctgggtcgctggcgtggtgtttctgcggcgggccgttgtgtgcgtggtgcgccgacaagcggtgggggggggaacgtggcttgtgttgccacggagcgcgtgggttgtgagtggagcccccccgtttgtgccgccccgcggggctgttgttgacgccgcggtggtagtttgtgcgggaaaagtctcggggggcgtgggtgcgccgccgccatgtggaagtaagagggggccgttgtccgtgtgtagagggattgtttgtgaaacccgtgggaggggggttgtgtgtccccccagaaaatgtgtgtcccacgcgcgccgacgggaaagggaggatgaaagagccgcccgctgtgttgagtgacgccgattcatgggtcgtgtgaagttgggggtagaaacacattagggggccaggcgatgtgggcaccggtaagtgaaagaggtgtggcccgcttgtaaagttgttgagtcgaaatgtggtgggcctttctgtcacccccctgggaaagggtgtgcgcacccagcgggatgttgaccttctttaagataggcatggcgcatgtgtgtggaaaaaatttttaagggggatgtggaggaccttcgcgtgtgtgttggaanctcgggaggccgcctttggagcaaatgtgtataagagtgtgggggatatgtgtgtgtgaactcttatgtggatatgctccactgtggccaaatgtgggaggatacccccaggcacccaagcacacatacgccaattttaggtttttgcgtggaaagaaggttttaggaacatcccaacgcctcttctgngggcgtgtgccagaggacattgtgccgctcatatgttgctgttgatatatccgaacaaccatgctcgaatgaaaagtgtgttgtaatatgtaaggccctttccttatgaaagtgtgcacagagatatctccacagatatatataaaacgcacacatatgtgtgaccacggtgtataatctgtatatgtgaatatatatgccactctgtgtgcacatgtatatcgtctgtgaagngcgcgcgagatatacacacatgtgttataaacactaccaccaggcttatacaagagtgagattatattcacaaaccctctttctcttgggagaaactctttgtaagaattgtgaattatttctataatggagaggagatttcgtattatcccacaaataccacacatacaaggtgagaaatgaaagagaatagttggtgttataaataccggccattgagaacccatcccatcttccaataaccaccataataatatttttcattcctctgctattcgtgtactctcctcgccataattaaaatttgtaaagatctttcttccttgatggtttatccaatagtcactcatttgccctaataaaaaacatttccagata

SEQ ID NO: 487131 - DNA, 382 bp, Homo sapiens
tcaaattggatacatgctggtttagggattgtcaattacctcatcaaatattttgtagtctgattacagctgtacagaaaataagggaataattcaaacttggagcactggctttggcctgggtgggagtatcatttttcaacctgtggaataagcagtagcagaaacatttataaaaatggatgtggtgtttacgttcttgagtgatcaacgttttgtagttttcgttgagggaaaaatgagtggttggcatgaaataaaaacaaaagtactttaaattaaggatttgcagtttttttgctgtttggtttgcagtcatcctagaacctgggtgacctcacagtttcacgtcgacgcgaccgcgaatttagtagtagtaggc

SEQ ID NO: 487132 - DNA, 1350 bp, Homo sapiens
gcgaccggacggagggccgggaggtgcggggtctgcgtgatgcgagctgcgcctctcggcaaagatttcgcgctgcccatcctcgggtcctttcatcagtaatctggtagttggatcacgtctgccaagtcggcagtgaagaattaacggaaacgacaacggagacgctcggttctctcccgcttgtgctcacttgcggcctcctctttcccttcgcctccggccgccggtgcaaacctgacgcttatacacatcggcgacctggacgttgtaacgttaccccgatggcgaacggaggagcctcgctagagcaccctgtatacttttgaccgtgtcttacggataccggggcagagcacttgttgtaggttgaatagctagtctcgtgcgtgggtgcgtctgctgggggcccggtggtgccgcgggtcttccggcgggggacggccccgcccatttcgtggcctgtcgcgctgttgtgcccgtaagtgcctttgggctagtcctacgccttgttcttcctgcgctttgctgctgtggcaggctgggtgcccctgtggaagtgcgtttgttggaactcctgcgcccacgtgcgccactcctttggctcttccagttgctaccctcctgcgggctcctcgggcgcctggtcagccccttgtggggagcgtcatctgggtcactgggctaagttgcggagcgcaggcacgcccgactagtctgtacgggagtaccgcgggggacgtcccgtcgtggctcttcacactgtgagcagccgtggttttgatggcgcgtctctgtgttcggcatggcctgttggtgcgtgtgccttggctgcctgttgcgtgtgtctgagctcgtttttcgtttccgctccgccgttgctctcccgccctgttctccccagtcttcgccgagtgtctcgtgtgtgctctgtgggcgtgccgttcgtgcacggccccattccttctgggcgcccgtgctcggctgtgggggccgcccatttttcatccgaagttgtgcgtcaaccaccgcgcgaggcctcccacccagatccaggcgagtgcacagcgatttggggcatctccgcgccggaaccgcggctcgcactctccaatcggtcgatttcgccaccgtatctcctatgcgatgtcaaccgcacggcgtcctggattccggtccgccgaagtgcccggagtcgacacagattcttcgggtcgaccgcacaatgtccttcgtcgccgcatccccacactcttgctcgcacgcgcgaccgacatgtggtccggcatcgcctgcgaccgacggtcagtcgtctactgatcgtccgattcgctcctcagcaagtcggag

SEQ ID NO: 487133 - DNA, 151 bp, Homo sapiens
ccacatttcaggttcaggcaacatcagcaggcatcatacatttctgtgtaccactccattttgccaggtactcactggcaggtctgcagcaacctttaaacatgcgtgtcgcgtcacggggcatcctctcaaagtcgcaactgctcaggca

SEQ ID NO: 487134 - DNA, 133 bp, Homo sapiens
  misc_feature (18)..(18): n is a, c, g, or t
  misc_feature (98)..(98): n is a, c, g, or t
ctcgtgcacccacccctncttaggcaacctggtggtcccttgctcccgggaggcaccatggtgatgccgaggttagtgcggacacccgatcggcatancgcactacagcccagaaggggtgggtggagagcgg

SEQ ID NO: 487135 - DNA, 269 bp, Homo sapiens
  misc_feature (16)..(16): n is a, c, g, or t
  misc_feature (41)..(41): n is a, c, g, or t
  misc_feature (56)..(56): n is a, c, g, or t
  misc_feature (75)..(75): n is a, c, g, or t
  misc_feature (83)..(84): n is a, c, g, or t
  misc_feature (100)..(100): n is a, c, g, or t
  misc_feature (118)..(119): n is a, c, g, or t
  misc_feature (131)..(131): n is a, c, g, or t
  misc_feature (135)..(138): n is a, c, g, or t
  misc_feature (141)..(143): n is a, c, g, or t
  misc_feature (145)..(145): n is a, c, g, or t
  misc_feature (176)..(176): n is a, c, g, or t
  misc_feature (221)..(223): n is a, c, g, or t
  misc_feature (225)..(225): n is a, c, g, or t
  misc_feature (227)..(227): n is a, c, g, or t
  misc_feature (237)..(237): n is a, c, g, or t
  misc_feature (245)..(245): n is a, c, g, or t
  misc_feature (251)..(252): n is a, c, g, or t
  misc_feature (261)..(261): n is a, c, g, or t
agagtttgtgcggaancgatataagtactttacagcaaganggtatagttatgttncctggactggtttttacanttttaaanngagttcgagctgtcanttttgtactaattataanngtggcacataantcannnngannnanttgagatgatttgtcctcccaaagtatacangtttattttatggtataaagtgttctctctggaaatgtttttaannnangncttagcttcnctttcganataaanntattaaaanattgaaat

SEQ ID NO: 487136 - DNA, 933 bp, Homo sapiens
ggctagtacagcctgtgtggtcaatcggcactgaggaaagggctatctgctcccttcgccaaattatcccacaacaactgtcatgctctggagagccccgccgcgaactctttttttggtcgacgtctgcatcatcagctcgtggcagaggcgaggcaggcgtgcggtgtgtggtgtgctgctggtggtgtgcgtgctggctgtgtgtgctggttactactgcccactggctgtggtgtctacctgcctgccctgcctgcctgacgctgcccttactgtggcttgcatgagcttgctgtggctacattccccactgcttgtgtgctgtgcataacgctgctaattgagtgcatgctgtctgcctggtgcagctgtgtgtgctgggttgtgctgtggggtgtcttagtgtccctggtggctgcactgtgctactgtggccctcggcccgatagacctgtgggctatgactgctgcccctggtcttgcctgtgctgtgctgctgcagcaacctctggggtgcttggccctgttcccctggctgcatgccccctggggtgctgctggtttcgattctccctgccctgagctagcctcctgtgctctggccggatgctgggccccgggcaaaggaggctgagcccatcgacttcgccgacgccccccccacagctaggcttgcggagaaagcggcgagggggctcagcaggggtcgacgaggaggggcggcacgcgttcgacctcggggcggggaggggagcctctcccccggccccttcccgagagcagcaaagcctcagccggagcaagggttccctgtgggcattcccaaagggtgaaaacgcggccgcaactggcgcatggcaaagagtggtcgggacaatgcgtgcccctaaatgaacgacaaaccctgggctgaaaagggtcaggcaatgc

SEQ ID NO: 487137 - DNA, 653 bp, Homo sapiens
ctagagtgtaccctggagtcatgttcacgggtataggacactttagtgtatacgttaatggatcatcaatttgtctcactacctacaaatggaattgcatcgtgtttccatgctgagtagtgaaacagtgacaaagctaatcataataacctacatcaaaagagaactaagctaacactgctcactttcttttgaacaggcaaaatataaatatatgcactctagaatgcacaatggtttagtcactaaaaaatgcaaatgggatcttgaagaatgtatgcaaatccagggtgcagtgaagatgagctgagatgctgtgcaactgtgtaagggttcctggcactgcagtctcttggccactagctgaatctggacatggaaggtttaagctaatgccaagtggagatgcagaaaatgctaagtagacttaggggctgtgcacaggaactaaaaggcaggaaacgtactaaatattactgagagcatccaccccaggaaggactttaccttccaggagctccaaactggcaccacccctagtgctcacatggctgactttatcctccgtggtccatttggcacagcaagtggcagtgtctccaccacctatgatggtgatgcagcccctagaagtggcttcaacacctcatcat

SEQ ID NO: 487138 - DNA, 80 bp, Homo sapiens
gccgtgacgcagcccttgttaccccaggctattactaaacggtggtggtcgtttgatcttaatctaatatgacatcacca

SEQ ID NO: 487139 - DNA, 165 bp, Homo sapiens
  misc_feature (124)..(124): n is a, c, g, or t
acctagcaggatccccccccaaaccagttgtggatgcaattctaggagtattgatcaacatacaaataacgtataatatgccgctggtctctacattgattcaatgcggatatgagactattanaggtactgggagatattatatcctttatcttctctcagttg

SEQ ID NO: 487140 - DNA, 466 bp, Homo sapiens
  misc_feature (152)..(152): n is a, c, g, or t
  misc_feature (183)..(183): n is a, c, g, or t
  misc_feature (230)..(230): n is a, c, g, or t
  misc_feature (238)..(238): n is a, c, g, or t
ctgtggagcgggcaggaactctagccacctttctctgttacctgcagctgattggcaaaggtcctatggagctcccagaagcctcagctaggaaaatgagccctcacttcagcctgtcatctagcaacgtggggcagctgccatagctgacntgcatgcacaaggctgacatcatgggcatcntacccacccatgccatgatgagcccattcacgtttgtccatcttccntgcctccntggctctgccttaatctcctggactccggaggactgagcccccaccggagctggctggggcttgggtcagggtgaggaataaaaggagcgaggaatcaatgtttttaacacagctggctgtctgtgagatgaaatgaagaataccaccctttggcatctctgcgtacctccaaagtccagtgcaccagcagattttactttatgaataaatgacacaaaacagaaaaa

SEQ ID NO: 487141 - DNA, 401 bp, Homo sapiens
  misc_feature (179)..(179): n is a, c, g, or t
  misc_feature (199)..(199): n is a, c, g, or t
gtatgaagttgcaattgggaacttggagataggtagcgattctcaaccggggcccaccgagaaggcaggcctaggagtaagctgcccccaaggtgatcttagcaatgtttctgtttagctgcttcctaaagccttgcccacccagcatgtcctcacgtgcacacctcccctgcccagtntacacccaccctatgctgcntgagcttcagaccccaccccacccctatgcccactatgtgtgcacaagtgactcacccctaggacagccctatgtacatagccagttttgtaatctcagaagccctgcccttcccctccacacacaggggttaaagccgtgtgccctcccagtggctgggatggtgacagtgacatccacagtaaacagatgaaatgtgaaa

SEQ ID NO: 487142 - DNA, 367 bp, Homo sapiens
  misc_feature (12)..(12): n is a, c, g, or t
  misc_feature (20)..(20): n is a, c, g, or t
  misc_feature (53)..(53): n is a, c, g, or t
  misc_feature (98)..(98): n is a, c, g, or t
  misc_feature (107)..(107): n is a, c, g, or t
  misc_feature (114)..(114): n is a, c, g, or t
  misc_feature (156)..(156): n is a, c, g, or t
  misc_feature (161)..(161): n is a, c, g, or t
  misc_feature (199)..(199): n is a, c, g, or t
  misc_feature (306)..(306): n is a, c, g, or t
  misc_feature (314)..(314): n is a, c, g, or t
ataaatataatnaaaaattnccagaggctagcacttggattctaacacgtatnctattgtattatccattagttctgtaatatttaattttagattcncttattctngtaattngcaaagcacaaggtctgtataacagtgtcatgtagagttttntaganagcttcaacctgagttctgcgttataaagcctggaganagctaagcttagaacataacttgctgaggtataattatctttttgtagcaggaatttatgtgccagaggtgagagtctttctggtactgattttttgagaccaaggntaaaaggntcgttttgtaagacatgccatggcaatggctgagttgggggacagtttccgcc

SEQ ID NO: 487143 - DNA, 1743 bp, Homo sapiens
agcaaatatgtcatcagtagagcccgggtttagtcaggcacgaggaagacattttccccgcacaactgctaaagctccagagacacgagcgtgtgtggcagcaagagccgccagttcgggaccaccgcagctggggtggcagcggcgcaggaggggtcgcggggagggagtggtgagcgcaggcggcaggggtctgggaaagacgaagtcgctatttgctgtctgagcgcgctcgcagctcctggaagtgttgccgcctctcggtttcgctctcgctcgctgcgctcctagaaggggcggccgcctccaggactgaccagggccaagtggcgctcggcgggcactacatggcggagggtgaagggtacttcgccatgtctgaggacgagctggcctgcagcccctacatccccctaggcggcgacttcggcggcggcgacttcggcggcggcgacttcggcggcggcgacttcggcggcggcgacttcggcggtggcggcagcttcggtgggcattgcttggactattgcgaaagccctacggcgcactgcaatgtgctgaactgggagcaagtgcagcggctggacggcatcctgagcgagaccattccgattcacgggcgcggcaacttccccacgctcgagctgcagccgagcctgatcgtgaaggtggtgcggcggcgcctggccgagaagcgcattggcgtccgcgacgtgcgcctcaacggctcggcagccagccatgtcctgcaccaggacagcggcctgggctacaaggacctggacctcatcttctgcgccgacctgcgcggggaaggggagtttcagactgtgaaggacgtcgtgctggactgcctgttggacttcttacccgagggggtgaacaaagagaagatcacaccactcacgctcaaggaagcttatgtgcagaaaatggttaaagtgtgcaatgactctgaccgatggagtcttatatccctgtcaaacaacagtggcaaaaatgtggaactgaaatttgtggattccctccggaggcagtttgaattcagtgtagattcttttcaaatcaaattagactctcttctgctcttttatgaatgttcagagaacccaatgactgagacatttcaccccacaataatcggggagagcgtctatggcgatttccaggaagcctttgatcacctttgtaacaagatcattgccaccaggaacccagaggaaatccgagggggaggcctgcttaagtactgcaacctcttggtgaggggctttaggcccgcctctgatgaaatcaaggcccttcaaaggtacatgtgttccaggtttttcatcgacttctcagacattggagagcagcagagaaaactggagtcctatttgcagaaccactttgtgggattggaagaccgcaagtatgagtatctcatgacccttcatggagtggtaaatgagagcacagtgtgcctgatgggacatgaaagaagacagactttaaaccttatcaccatgctggctatccgggtgttagctgaccaaaatgtcattcctaatgtggctaatgtcacttgctattaccagccagccccctatgtagcagatgccaactttagcaattactacattgcacaggttcagccagtattcacgtgccagcaacagacctactccacttggctaccctgcaattaagaatcatttaaaaatgtcctgtggggaagccatttcagacaagacaggagag

SEQ ID NO: 487144 - DNA, 1300 bp, Homo sapiens
ggcgtgcaggtgccagtgcagggcgcgagtgatcctgctgatcgatggcggtggcagcgggaggacacccgctccggtgcgaccggccgggggcgccctttcgcgccccagtggctgcgtgccgctggtgctacggggatgcctgcgggcggaccatgaagggcggaagccccaagggaaggggcctggccctcaccgccccagatcggggcgattaaaaaggcaaggagaagcaagcagggaaaagaaaagagaagggtaaaaaacagaaaagcggagacgaacaaaaggggaacccaagagcagatgcacggtgaggcacaataaacgagggaaaaacaacaagaacggaccagcagcgaacagagggcgagaaaagcgcaaagagcgaaaagccgagacacagagaagcaaaagaaaggagaaggacaagagacgaaacgaacacacaagggagacacgagcagacacaaacataaccgaggaagaagaaacgcaaaacaagacgacagggaaagaaaagggaaaaaccaaccagaggagaggaaaccgaacaaaaagagaaaaaagaagcaaggagagagcccgcgaagaaagagcagggaggagaccaccacgcgagagacgcaccgcaacaggaatagaacagcagaacgaaacaccaacaaccaaagcacccaccgaacgcgcaaaggcagacaaccagccaaacacgacgacgccacacacgacacacaccacacacaaagaggacaagcagcagaaccgagaaccaagaaagaaaacagaaaggcaacgacaggacgcgaagaacaccagaagaaggaaaaaaaacagaaaaaacaaccaaggcagagaccaaacagaagaagacaacagaccacacaaaagagagaaccaacacacacacacaacagaagggacggagggcaaaagaaggaagaaaagaggggagaacaagagaggaggcaaacagacgaggaagacacgagaaaagaaaaagggacaagcaagcaagaaagagagaagaaaaccggagagaccaaacagaaggggagaacgagaaagagacagagaaaagagagcgagcgaagaccagcgacacagaagaggcaaacaggaagagagaagaaaagagacagaaagagaaaacgcgccaacgaaggcagcaagaaacagagggacgggcagcaggagaagagagacgaggaggaaaaccagcacgccaccgcagcaacgcagcggacggcaaacaacacgaaacgcaaagcacgaaaaaaacacaaccgacaacaagaga

SEQ ID NO: 487145 - DNA, 1798 bp, Homo sapiens
agcaaatatgtcatcagtagagcccgggtttagtcaggcacgaggaagacattttccccgcacaactgctaaagctccagagacacgagcgtgtgtggcagcaagagccgccagttcgggaccaccgcagctggggtggcagcggcgcaggaggggtcgcggggagggagtggtgagcgcaggcggcaggggtctgggaaagacgaagtcgctatttgctgtctgagcgcgctcgcagctcctggaagtgttgccgcctctcggtttcgctctcgctcgctgcgctcctagaaggggcggccgcctccaggtgacacagacgggactctcgcttgcgctttccagatgcatcagagatacttttggactgaccagggccaagtggcgctcggcgggcactacatggcggagggtgaagggtacttcgccatgtctgaggacgagctggcctgcagcccctacatccccctaggcggcgacttcggcggcggcgacttcggcggcggcgacttcggcggcggcgacttcggcggcggcgacttcggcggtggcggcagcttcggtgggcattgcttggactattgcgaaagccctacggcgcactgcaatgtgctgaactgggagcaagtgcagcggctggacggcatcctgagcgagaccattccgattcacgggcgcggcaacttccccacgctcgagctgcagccgagcctgatcgtgaaggtggtgcggcggcgcctggccgagaagcgcattggcgtccgcgacgtgcgcctcaacggctcggcagccagccatgtcctgcaccaggacagcggcctgggctacaaggacctggacctcatcttctgcgccgacctgcgcggggaaggggagtttcagactgtgaaggacgtcgtgctggactgcctgttggacttcttacccgagggggtgaacaaagagaagatcacaccactcacgctcaaggaagcttatgtgcagaaaatggttaaagtgtgcaatgactctgaccgatggagtcttatatccctgtcaaacaacagtggcaaaaatgtggaactgaaatttgtggattccctccggaggcagtttgaattcagtgtagattcttttcaaatcaaattagactctcttctgctcttttatgaatgttcagagaacccaatgactgagacatttcaccccacaataatcggggagagcgtctatggcgatttccaggaagcctttgatcacctttgtaacaagatcattgccaccaggaacccagaggaaatccgagggggaggcctgcttaagtactgcaacctcttggtgaggggctttaggcccgcctctgatgaaatcaaggcccttcaaaggtacatgtgttccaggtttttcatcgacttctcagacattggagagcagcagagaaaactggagtcctatttgcagaaccactttgtgggattggaagaccgcaagtatgagtatctcatgacccttcatggagtggtaaatgagagcacagtgtgcctgatgggacatgaaagaagacagactttaaaccttatcaccatgctggctatccgggtgttagctgaccaaaatgtcattcctaatgtggctaatgtcacttgctattaccagccagccccctatgtagcagatgccaactttagcaattactacattgcacaggttcagccagtattcacgtgccagcaacagacctactccacttggctaccctgcaattaagaatcatttaaaaatgtcctgtggggaagccatttcagacaagacaggagag

SEQ ID NO: 487146 - DNA, 396 bp, Homo sapiens
gttaagctgcaggaaactacttctctgagataaacatgcccccatagacaacataatccgggcatggtatgattccgaaattcgtgtccttcttgggcagaactgattgtagtcccacttcagtttgaatctgcgtgggcgctcactatcattgcttctgggacatcagaacatgcctgggctgtggtagatggaggtgccatcccagcattcatatctctgtagggatctccccatgctcacatcagtgaacaagctgtctgggctctaggatacattgcaagtgatggctcagtgttccgagactaggttattaagtacggtgcagttgacccactgttggctctccttgcagttcctgatatgtcatctttagcatgtggctacttacgtaat

SEQ ID NO: 487147 - DNA, 1689 bp, Homo sapiens
  misc_feature (1689)..(1689): n is a, c, g, or t
gactgtgcccagcactgaggcccaaggcgcttcgaccgttaccatcacgagtgccgccgagcaatgtcatgacgaatctgtactctacaatagtcgccgatcagtcaggcctggatgccgtggtggactgcaaggcctctgtgacacttgcttgatcatatgatgattgccgtggccatgatgcggtctacggcggagcaggtactcggacctccagaggcatgtggagagggcgcccaggggtcgtcatggacatggcatggacatgtgagtcgttggactaacggtcgatacctcaatatgaaggaaccgtcggttaatccatggggttgactagacggatgcatgatggataccatagcatagcaaccaatcataacattccgatactcatgagcatcaattgctggcatgtgcctgccccaagtatggcaccaaaggagtggccaagtctccgagatgatatttgcaccatgaagagggaaggaagtaaacaaaggacacggaacagtacggtcaccaatgcatgtagatgtccgtttggattcgcaagagactcattgtagcatttacatacgtggcacagagagtaacccacattcaaaaacaatgaacatcgtggggacacgaaaccgcaggaaagaacggcaaatcatacaacaccaacaatcacaatcccattcaccgcacaaactcgaagagatatacccaggagaagacacattttcatgcaagacaagcgtggcagttacagcaagagaagaataaatacttgtagggaaaggaccacaacacgaagcaaaggaaaggatgccaacaaagcacgcatcgataacaagacattgaaatgggggccacaaggagggaaagtaccgtcacaacgagaatggaccatggaccacgatccacaaatagagtccaaagtaggcaacttcccaggaacaacacacaaggaaagcgacaagagaaatgaacacaacacgaaccataaaagtcgagcgatgaaccacagagagcaagctaaccccataccagtaaggaaatgggccacactacaaagagaggggacccaagcacaccagctagagttgaaccagcagatagggcccagagaaccaaagagacataagcaagagacgcgaaacaaagcagaagagcatacacgagagtagacaacaaagggacgaaacggagccataaagcaccaccaagagccagaagaacaacaaagacaaacgacaaagagccgaaacacacgaaacgaagcagcgaaccaatatagaacacccatacaaacaagacacgaatagacaagcacagacaaaacgagaaaagccaactagacagagacacacaacaggagataagacaccgaaagaagaaagagacacacaacaaggaacaaagacgatagacaagaaaagagaagcaacagaggacaggagaagaagacgacgaggagcgaaaacaaggcagacaatgaacgaagagagcacgagaaccaagaaaacaggaagagagcagcaagaccaacagaaaagacaaaatagcacgagagaacaagataaagagagaagcaacgagagcaacaagagacagaacaacagagaacaggaaaagcaaaagagacaagagagagagaagaaaagagaatagtgcagctaacgagaaaaacagcagacggagaan

SEQ ID NO: 487148 - DNA, 605 bp, Homo sapiens
agcgggcgttgacggtgacggcggctttgtgtgtgggcggaccccggaggcctgagcggcaccgtgcccccagctcccctgtggggccccggggcccccagaaacctggcaggacggagccagacggggcgggcaccatgaacaacgttacaggcaagagcctgcggcggaggaagccacgcctatcgtgcccgagggcggtcgcgcccggaccagtggcagggcagacgaggacgcggttgcggaagggcacgtgcaggctacccggtcagggtacctgggtcacgtggaggtagaaggagtcgccggggaactgcgaacgtgtgtgaacgcatgcgggtgaaccgagaggctgaaagggctgactggggggcccgaacaggtgcccgtgaaagtcgtgtcgcttgctgagaggctgctcagtccacgacctagggggcgtccgacgatgggtggaaccgacaggaaatccagaggaagtctctcgtgaggtcgaaccaggaaacccaggtcgacaataacggggtcttttcgcgtctttgcggtggcctccctggacccggcaatgaccccttggggaggccaacggggcgttttcctttccc

SEQ ID NO: 487149 - DNA, 1001 bp, Homo sapiens
ggtcacacctgatgagccacccgctggtgcccagagccccgagacctggcttcctaccctgccccccaggaggtgcctggtccctgtgaccatgaagaccgtcctgcgacgcgtgtcagtatatggcggccgaggtaccgtggggtcctacccagcttggtgtctggaacggaacctcgcccacctagctacgcgcatggccaggccctgggaggccatggtagccgcgtcaaggcccccgatggggagacccaagtccaatgacggaggtggacctgttcgtctccaccagagaggatcagaggtcttgacagcggactcccaggaggccattgatggaccactgccctgacataccatctcctacacatgccgactagtcggctgcgtgcatggtgctgagtggcgcggcggcggctggcacggaggccggaccccaggaccacggacagccgcctctacaagatgctctgccacgtattctacgcaggaggacgcccagctcatcgcccaggccattggccaggccttcgccgaccgactacaagccagttcctacgggaaagcaggtattgacccccagccaggtgggcgtgcacccgagacccaggcgcctgccactccataatggggacctggaccacttctccaacagtgacaactgccgggaggtgcacctcgagaagacggcgaggggagggcctgggcgtggcccttagtggagtcggagctggggctcacatgatgcccacaaggccgtaatccgacaagacttgtgacggggagctgataagagcacaggggggccctcagcatggaggaccgacttgaacgcattcaacgggaccagcctggtgtgggctgccccgtggtagggatccagggcggttccgtagacaaatacgagacgtaggaaactcaggatgtcagtgcctccgttaccaccagcatatcacggcccacgacggaaaagttggtatggtagagacgataatgagcac

SEQ ID NO: 487150 - DNA, 601 bp, Homo sapiens
  misc_feature (330)..(330): n is a, c, g, or t
cctggctcttaacttaggaggaaaatgcaaattaagatcgcaatcagatacctctagaatggctaaaactcccagggtctcagccacccagtggctcaccttccaggtcccagtgcagggagacctctcaggaaagcatctctggtgccatttccttgtcactgctaatgagcaaactgctagtaacgtcttagagaaaacaggcccaagctaagaagaggcattctctaaaacatattacctaattgtttcactggagcggagacgggggagggagggaacattatgaaataaaagcctggaaagcccacatatttttagaagcaaatngcacataaaagtacatgatcgtcaatgatttaaatgactgaaatgtcacactgacattcatgaccaaacatgctgatggaatttatgaatgcacaactgtacctcaagccaccgggattcgtttctggccttcctgcctcaggtgatttctacacctttgtttgctgctgccttgtactgggattcactcatttcacaaaaaagcaaactaaggttaagagaatgtcagtggttttgcagagatgctgcaatcaattgcacagaaagcagt

SEQ ID NO: 487151 - DNA, 837 bp, Homo sapiens
tcaccaatttatttccatgtccctttatttgtaaattacccatttttcaaaagtgcccctgaaaaaattaaaaaaaattaagggaccccttcaaaaaagggtctcccgtggattggggagggaggacttatattttggaaccctcttgttggggagaaggaaattgttatctacgggatcagtggacgtgccatttttggctaattgattctcagaccaccgtgagggctgtggcagatttcaggattgaacgcgttttcgggagcctccatccaaaacttttcccataagggagttcccagggtgcccatcatcacattgaaactacgcgggtggagatagatatcatcggaacagagagattacatgaagatctcaggaaggcacacataaacgcggtgtcatttgacaaagggggccttgggcacaaggtttgaccaggtaaatccctatgtaataacaggcgtcgggcctctataatgctctatcatgagcacaaccaggaggaggtcacactatgatatgggcggtccgactccaaaaaaaacgtacagccaggttcggcgtagttaaaataagctgtacgccgatgggaaaacaaatacattatacgattgggatgttttaataaagtggcagattatgtacagaaattattatttcggcaacgtgttaaagtgctatccagactctccaaaaagaagaggagataaaaattttagcatcaattgtaaacactttgggaaaagagaactttcatggggaacatattgttaggggcccccccggatcgggggaaaaaaaaatatgtgggcctgataacaagaaggaaaccag

SEQ ID NO: 487152 - DNA, 304 bp, Homo sapiens
gtttcaaaagccaaataaccccttatggaattcaactcagggtttgaggacttcctggctggtcctatggccctcaaccccagggattacaaattgcaaatttaatgggtcatttgggatcaaagggtcaattatgaggcccctagaatttttcaattatacgaatatgttctttgggttttgctggggcccagccagggttacctttttttttatggggggttttgattttttcccccagaaatgggttttatttgagggacccaggtcttaggtttcccaataaagaaaaaaaatttcccta

SEQ ID NO: 487153 - DNA, 461 bp, Homo sapiens
  misc_feature (370)..(370): n is a, c, g, or t
atgagaatgtccctggatgatgatgtgtcaacaaaagttgggaataactgtggtaacaggaaatattacactacaactgttctctagaaatctccaccatccccatccttcctcagcaaatgaaggtgggtgctttggatcctttctctgttcttagaaaggggaatggatgcttcgtatagagagctatgattcagacgcccatcagagtgccaagctccatgctgacaggcacatttggctacattcaacaaccctatatgagatacataaacggcacatgccattttcttctcctttgaaacgagtctccaacgcaaaggctttcacttttcattctctattttaactttaaataccaatgaacccnctggtgaaacctctcctctacaacattcactcagacagtgatcacgccaaccgcaccacatctaaaaattacaaaggagaactttgtacca

SEQ ID NO: 487154 - DNA, 379 bp, Homo sapiens
cgtgagaggatgcttcccacattattcagcttctgaaacgggttacttgacccacagatgtgaagctagaggcgtgaaggagactgatgtggtttctcctcagtttctctgtgtggcaccaggtggcagcagaggtcagcaaggcaaacccgagcccagggatgcggggtgtgggcaggtacatcctctcttgagctacagcagatgaactctgttcggtgtcatggttgttgtttagtttgctattttgtctccaacttggtgcttcatcaggacacgcttcggatcacaattcccagtgctgaagacaaggccaaactcttggatgtgtgctttgattagtgcctgtgacgcagcttcaggaggtcctgagaacgtg

SEQ ID NO: 487155 - DNA, 923 bp, Homo sapiens
aatcccagcacttgggaggctgaggcgggtggatcacctgaggtcagttcgagaccagcctggccaacatagtgaaaccccatctctactaaaaatacaaaaattagccgggtgtggcaggagaaatgcttaaacccaggagtcagaggttgcagtgagccaagatagcaccactgcactccagcctgggtgacagagcgagactatgtctggaaaaaaaaaaaaaaaaaaaggaccaaaatggaagcgagggaataaattttttccccggcaaggggaacccaaaggcaggcgggagtgctatacttttttttccttttccttctcctttgttttttttttacccaccaatccgtcgcatatttaaaggggaggcagccatctcctcaccgagaaaagaggcacctctgggtttcacccccgggacggggttcgaccgcccggcggaagggggctccccacgttggtgcactttttttctgcccccatatttttagtgtgcccccggattgtggtggcgcaaactttttttagcgtcggggggagacgcactcccattcttcctacacgttggggggtgtccgccccctactttacggggggagggcctatttcttgagaatcaccaggaaaccccggtgaactgggtgttgcccgttggcgtaagagactacaggatcttttcatccgaaggacacagaaaactagtttttcatagacacgggaatttaacggggggccgtttacccacatccaataggaattacacctcgacttgggcccaggatacgtaatataaggggtttgcggcaacaggcatataggcgtgccggtgagtgaccatctgtgggaacccaatggggaccgctgtacaacacagcgccgtcggggcgacagcggcgcttcgatgaggcatccgttgt

SEQ ID NO: 487156 - DNA, 278 bp, Homo sapiens
gatctgtttctgtactgtagtttgctttctagaattttattatctatctatattgagacagagtatcactcttgtaggccaggatagagtgtagtggtgcgatctcagttcactacaagctctgcctccctggttcagactcctgcctcagccttcaaagtagctaggattacaggcgcccaccaccacacccagctaattttttgtatatttagtagagatggggtatcaccatgttggccaggctggtctcgaactcctgacctcaggggatccac

SEQ ID NO: 487157 - DNA, 146 bp, Homo sapiens
tggctccctaatgaggtggtgtctccccgttgacccacaccaggatgtcttattgtcattgtgccagataccgcgggcgtcgggccagtcgcgggccatgcccgggccagcagcaggggcgacacgggctttgtcgaacgcggaag

SEQ ID NO: 487158 - DNA, 205 bp, Homo sapiens
cttcctgctctgcctcacaaggtgctgagaatacaggtgcatgataccacgcccgtctaattctgcgtatttttactagagacagggtcttggtgaaggaggttgaagatgagaggtatggttttgagtagtcctcctatttttcgaatatcttgttcattgttaatgttgtgtctgatagacccggagcacattaatagtatgg

SEQ ID NO: 487159 - DNA, 268 bp, Homo sapiens
ttttttccccccggggggggggggttcctttaaccaagtttgggcccttgcccccccccctgggcccccaaggggggatttttttttcaaaaaaaaaaaaagaaattccgccccccccttaaggtccgtgggtctttgttttttcccaggaaaggcgttttaagccccctccttccccggttgggggggggcttttccaaattttttggcccagggtttttaaaaaccctttcccttttttggggccataaaatttttttgaggccca

SEQ ID NO: 487160 - DNA, 344 bp, Homo sapiens
  misc_feature (1)..(1): n is a, c, g, or t
  misc_feature (20)..(20): n is a, c, g, or t
  misc_feature (79)..(79): n is a, c, g, or t
  misc_feature (86)..(86): n is a, c, g, or t
  misc_feature (89)..(89): n is a, c, g, or t
  misc_feature (116)..(116): n is a, c, g, or t
  misc_feature (141)..(141): n is a, c, g, or t
  misc_feature (168)..(168): n is a, c, g, or t
  misc_feature (171)..(173): n is a, c, g, or t
  misc_feature (194)..(194): n is a, c, g, or t
  misc_feature (197)..(197): n is a, c, g, or t
  misc_feature (209)..(209): n is a, c, g, or t
  misc_feature (213)..(213): n is a, c, g, or t
nagcacgaggtagagcagantaagccccgtcccaaacacagatgggaccatgaactccggacacagcttcaccagaccncctcggnctncttccatggcgccggagtggcttgggncggcccaggagcttccccagggctnccaccgtccatggcggtgcgggggganccnnntcttcctgtccttcaccacgnggngtgcccaccccntggngggtcttggggttctggaagaagcagccccctactaggcggaaatgggaggccaccatgcagaatctcaaacgaccgcttggcctcctacctggggaagtttcgcgccctggggggggccaccatgaagct

SEQ ID NO: 487161 - DNA, 142 bp, Homo sapiens
ggacggcagtgcacctagacattctgatagtctgctctagagtactccccggagtctcactatcagcaacacgtatggacagtaaactcatcaggaagatatcggcgacattgtggacttggtcttcagtgagcgtagaaga

SEQ ID NO: 487162 - DNA, 135 bp, Homo sapiens
tgtctcaggttataaggataactgtttatcaaattaacatctcttaaacagtctctgagaagtactttacctgaaagacagtatgagaacagtattccagtaacagtttaaaagcagttacccaaaatctgatta

SEQ ID NO: 487163 - DNA, 277 bp, Homo sapiens
aattaattaccactaacacttcaatatcccccacattctccctcatcaatctcaattacttccactactcaaacacgtagctatattatacaaaccacacctcacacagaaacacatcttgaaaacttctcttttaaaatccaacaaactatttagtgccttctaatgtttcttctattgttatgttcgacctatttttctattatataatattccatgtatttacattttccttttataactaaacaaatcttaaacccacttaaaaactcccttg

SEQ ID NO: 487164 - DNA, 571 bp, Homo sapiens
attcgcggccgcgtcgacactggccttcgatatgaatctcgccttcgtcgtactcttcgagaaaggccatgctccgcagcagggtgcttttgcccgagccggaagggccgatcaggcacaccacttcggaatgccggacctgcaggtcgatccccttgagtacacgcagggcgccgaagctcttgccgacattgtgcaggcgcaccatgggttgcgagtcgccggggagttgttcggaggtcttcatggggtcaccttgtttcgggacaatgggtggcagggggcgttgttggatagtcattgcggctgcctgctcataaagcggccgacccgggtctccaggaccatgcccaggcgtgaacagaactccaccagcagcagatagccgatacacagcaccagcagggtttcgacgaaagcgaaggtttgcgagccgataccggtcatgaccatggtcagctccgggatggtgatgatcgacagcaccgcggtttccttgcacaggatggtcaccaggttgaccagcgccggcaggatgatcaccagcatttgcggaacttggttgcgcagg

SEQ ID NO: 487165 - DNA, 432 bp, Homo sapiens
cacctttggaaagtgccaggtgcgaatgattgccaggacggtcgatagtcagttcaagttcgccggtaaagggcgcaaaaggcgcgggcaggcgcacagattgcgtcgcgccgactggtccagcagtcggatcggcgggaggacttcagcacctgcactgtcctacaaggtgccgtactgcggttgatcgatagctagacagtcgcagttagcgggctatctggctcggcggcggggtgcgtaccggctagtacacggtcggcgatgctctcgacctgcttgtgcccgtcgtccttaaaccaggcgcctttgtcgcgcatggtggaggcagcattcaggcggtagatccgcgggcgcttggcgtacagctgttgttcgtgggccagttcggcttccaggctggaaatttcactggagagtcgcgagctatca

SEQ ID NO: 487166 - DNA, 129 bp, Homo sapiens
aatagtggacaactcttggctcactgagcctctggctccggttcgggcaattctcccacctcagcctcccgagtagctgtgattgcagggcgattctggaggccccctggtgtgtgatggtgcactcca

SEQ ID NO: 487167 - DNA, 111 bp, Homo sapiens
ctagaggatccttgatgttatcccaacacagaaacattccaagctgtgataaactctctcaccctaaaaccaataaaaactcttagtccataggagcaagcactcctaacc

SEQ ID NO: 487168 - DNA, 149 bp, Homo sapiens
  misc_feature (128)..(128): n is a, c, g, or t
gatccgatgcggaggcggagctgaaagttcaaatgtcctggagcagctgacagaagacgggggtatcaacagtaacctctacttcctactcacacagagagaagcccatgtttcctaccagcgagagntgccgcattttacttgaagca

SEQ ID NO: 487169 - DNA, 115 bp, Homo sapiens
gagttagagtaatgacatgttaccatggcgtagatatcttgcgtctattgaagaggagagagatcgaggaaaccagaaatatcacaagccccactgctaaattatgacgtagctt

SEQ ID NO: 487170 - DNA, 609 bp, Homo sapiens
caaatagaaatgggttgaacataaaggacacatgttatgtgtgggtgaagcaatgtagggccttctatatagaagcgttcacactatcacaaaacaatcgcccatgaacatgattggatgatgaaaataaaacaaatgtcttgagacattctacatggatgcgcaattcattactttccctttcgcaagaccagcacttgacgccatacacatagtgcccttcacgaaaaataaatactagcctcatcgtcagtgtaccattctattacactttttaaaacatggcaaagagcacatgtgcatgattacaaaaacaagggaaaggtttagtgttaacctagaacttccgcactgatttgtgacatgaaacaaaaaaattgcatcctgtgaattgggaccaaatggtatctcgcttactaaaaaagcgtcacttgaatatatggaggctctcgattggcaatacaagacaggactgtattcacgtattcggtaacacatcactgctcatactaactgcagacaggatgaatgatgacattatcttaccagccacagtgaggcaaactaaatgtgctatggatatggagcaaccatatgtgaggtattaca

SEQ ID NO: 487171 - DNA, 1044 bp, Homo sapiens
tggactgggacgacagccctcactagggggctatttataaccatacaaggcaggaggctatagcgtgcgtgtgttcgactctgtgggggccagtttaatataaactgtgccacacaacacagctgtgagcctccacacagccacatgtgaggatgtggggacagccattctccttggggttctcgtgaatataccgtattcaaggtgtgacgcaggtgaatttcaatctcaagcgcttgtgtgtccatctccaggcaccgctcttgtgcgcaaaaacaaccagtgtgtgcttttgtggctgtgctgtgagaacgcttgtatacgctttttcaaaacggttcacacatattctcaagtggtactcggtcgaagtgtttttaaaattagacactttacgagggagaggggtggccacacagagcaagaggcccgagaggtcccttcgttaagccaccgaagagctccgaggtataggaagtgcgtgaccccggcccaggggggtggctgtgggggggtctagaggaactcacgagggcctcgcgacacccataagcgagagggccgcggagggccacgagagagggctctccgaggggggcccacccgcacgggaggcgcagagacgagagatccaaagggcacaacaacaaaggagggtaaacacgagcgcaagaggcgacccagagagagggggcggcacccgggaaacaacactatgtgcgagaccaagaggagtactcccagaaaaaccaaataaaggagaacaaaagcccccaaaagacaggcacaggagaaagggtcccagaaaaaaagggggagacgaaaaagcgaaaaaaaaatgaggcaaacagcaaccccccgggagggggaagtgtgcacccagagaagaggaaaagcaagagcgcagaaaggaggaacagagagcagtaaaagagacaggtagtacgaaaacaagagcaacagaaaggaaaaggggaaaccgaaccatgaaaacaggtacgaagagaagacacccgcagagggatcaccaaagagagacccggt

SEQ ID NO: 487172 - DNA, 116 bp, Homo sapiens
tgtcagactagcccctgtgtcaacggtggggtctgcaatgaccgagtcaatggcttcagactgacacctgacctcctcgtggcttcagcgagctccacgtgtcagctgtgacgtgg

SEQ ID NO: 487173 - DNA, 141 bp, Homo sapiens
aagacagtgtctagccgtaatatctgggggataatgctgcgcctgtgcagcatcttacaagatgctacctgtctccagtggcgttgctagatccacggaggtaggaaactgcatctctcagacatccgtccccatggaagc

SEQ ID NO: 487174 - DNA, 775 bp, Homo sapiens
ctctaccggccgagggctgagacgacgccctcagtcgcgacgggggcgggaacggggacgcggtcgagagagttcgccggtcatcagagactcgaacgagggagcccatccgggaagcgtgcccgttcctataggctagggtggacgggggatagtccgcgcgagagatttcatgaaacagtaacgtgagctttcgacgagggacataccatctggtgcgcgtgacaggaaggcctagggcaagccgtgacctgcggtgggtctagtactgaaggatagccaagcgtggtggtgcctcatccacgcgtacagcaggagttcagcgagtcatggccccaacaggacatcccacgttggggtcgcgcggcagtacagggggagcaggagcacggctgtcaaggtgtcaaggccaggttgtggagtggcgtcgtagctagctgagggatgtctgtacatgatacgtctcgggttctactcgtgtgaggtggtcccgtgggtcaggaccactgggtctactagagtactgctggccagtttgttgcgtctaagtcaggtgccactcttgatcaccgtcagggattgccgtgctaacaaaggtggcctgtacgatgagatcttcaaagtgagtgtgatggacatgatggcctccagggaagtggggattggctatagtatgacagcagaggggatggggtgaataacattctttggggttttcaatggaattgcatggtttcctggtggttgtttatggcttgtgttggggggtcttgtt

SEQ ID NO: 487175 - DNA, 133 bp, Homo sapiens
catcctatcagagacacccccctctatgaggcgctccaatagcaccccccactacgacatgatctctcgtctctacgcgcaccctccccctgcacatatggtattggtcactcctccccgcctccttcttcct

SEQ ID NO: 487176 - DNA, 384 bp, Homo sapiens
  misc_feature (120)..(120): n is a, c, g, or t
ctcctttgtctgggggagagtatttcagttaggaagtttgttggaattcagaggcaaacaatgtctatcagtccttggattataatttcacttctgtgatcctcaagagtttctcttttntctttgctttcttgtcctctgttcttttggcactgtgtagccaccttagagaaagaatgttttgtattttcttctttttgactgttttctcatagtccctggtcttcagaatgaacagaaacgattccaactggaagaactgagaaagtttggggcccagtttaaggtgagagaagagtgagctgggatattagcagggtaaaggggttgggagtggttcgtagatgaggcaaaggactagataggagtcaaagagatgagatc

SEQ ID NO: 487177 - DNA, 230 bp, Homo sapiens
gtgctggagaggttcagattttcccctgatctgtaagcatgtgtttagaggggaaatggtgggtgcatccgggcctaaagatgacgtacatggatgactgaatcactgcgcctggcactcactgtgtacagggatacacattagtagctatgttgtgtcatttcttgtgacatggaatagagtgagggtccatgttgcctatggggccagctgcagagttatccgggctc

SEQ ID NO: 487178 - DNA, 108 bp, Homo sapiens
agactgcctggggatcaaatggagaatgttaggaaataattcatgcagcaagactagattgatagagagagatttgccaacgtggaggtatctctagcctcatctgga

SEQ ID NO: 487179 - DNA, 213 bp, Homo sapiens
  misc_feature (108)..(108): n is a, c, g, or t
tgctgactgcttaggtggtggttgctgaaggttgggtgacagtggtaattcagtgattttggttttgtttggtttctttaagagacaggtctcattctgtcactcagngtggagtgcagtggtacgatcatagttcactgcagccttgacttcccgggctcaagcaatccttctgcctcagtctttccagtagctaggaatatcaagaatcgg

SEQ ID NO: 487180 - DNA, 803 bp, Homo sapiens
ggagccttaatggatggttttcatagtagaatgaataaaggtatttgctctatgtataagtagttttaacggaaagtattaaagaattgagggtggaattcttagaaccaaagttattcttaataagaaatcaccacatgcttggaaaaaacaaaaaaaaaaaaaaaaaaaaaaaaaaaaaaaaaaaaaaaaaaacacccgagcagcggccgagtatactatggctgggggggcgggagaaaagaagagagagaagaagagagcggcagcgcgaggggaccaggggccacgccgcacaagctagggagaacagggagcgaaccacggagggggcgcaccacacaaaaaggggcaggacaaaaaacatacaagcgccaacgaaccgggacatcccgccgagaatattgtgccctccagcacgcgaccaacaagaacagaagaaaaaaacaaagaaagaacaaaaaagaagaaagacaagaaaaacgacaaaacaaggaccaaaaaagagagagcgcacgaagcgagcaaggaagaaggcaccgcccgccgagagcgaaggcagagagcaggcccgccggcaagaaggcgaacagaaacagagagccacgaggacgcgaaccaaggacacaagaaagccaaagacgcggaaaggcaaagggaagccaaaaaaaacagaacacaccgaaaagcgagagcagggagagacgaaaaacaaatgagaaacaaaagaaaaagagaggacagacaaaaacaaaaaagagggaacaaaacgaaacacacaacggaagccggcagaaggagcc

SEQ ID NO: 487181 - DNA, 128 bp, Homo sapiens
tgaatctaagttgaagacagataatgttgagtacctaactgtataactttacatgtatttattttacacagttgatccttgggtatgatttagcagtctaagtttgaattgtctctataagtatgtta

SEQ ID NO: 487182 - DNA, 411 bp, Homo sapiens
cagagtccaaacagtgctcagagtccaaacagtgcccagagtccaaacagtgctcatagtccaaacagtgcccatattcctaacagtgcccagagtccaaacagtgcccagagtccaaacagtgcccagagtccaaacagtgcccagagcccaaacagtgcccagagtccatatagtgcctagagtccaaacagtgcccagagttcatacagtgcccatagtccaaacagtgcccagagtccaaacagtgcccagagtccaaacagtgcccatagtccaaacagtgcgcagagtccaaacagtgcccagagtccaaacagtgcccagagtccaaacagtgcccatagtcctaacagtgctcggagttcaaacagtgcccagagtccaaacatgtgcccatagaattacccg

SEQ ID NO: 487183 - DNA, 134 bp, Homo sapiens
attccttgccaaggagtttgaaatttatactatagaaataactttaggatgaggtagagttaaagaggtaaagcacatgttccacaacccaggaaagtatttttaagaaagattggatttcctacccttagaga

SEQ ID NO: 487184 - DNA, 440 bp, Homo sapiens
ctaactgtgtgcacagaggtcgcccagtgctaggcttcccgtcctgcccatatggagcactgcgcatacctcttagtagacacaggctacagatcagggctggccagagcagagatagatgggggtaagcagacttatttgtgtgaatcaaaaacagaggacccttacaggaaactcatgccttggtttggagaaagcccacgtttccaccaacataatattgggaacgctaaggaaacacggaaaaaagagtgtgccttccccaccctcatatagctcagaaaccaaggcagaggcttgatatgaagtccaattaaagagattagacgagatgagaggggagtacagaaggcctagtggacgcgccctccatgtaagggtaggaaaaggcaatagatgatgttgataaacacggacaggttgaaggcgatgctgcccca

SEQ ID NO: 487185 - DNA, 169 bp, Homo sapiens
ccgactttctagagtagtaaccacatcttcctactaattttcatgttaaaaacactataggaaagacagatttacttttaggtataaaatgtcctgaatttgcaaattttatagtgcttatgagaatttatatgggcttttatatcgcttgataaggttgtctgtgccc

SEQ ID NO: 487186 - DNA, 931 bp, Homo sapiens
  misc_feature (14)..(14): n is a, c, g, or t
  misc_feature (50)..(50): n is a, c, g, or t
  misc_feature (68)..(68): n is a, c, g, or t
  misc_feature (82)..(82): n is a, c, g, or t
  misc_feature (107)..(107): n is a, c, g, or t
  misc_feature (127)..(127): n is a, c, g, or t
  misc_feature (132)..(132): n is a, c, g, or t
  misc_feature (143)..(143): n is a, c, g, or t
  misc_feature (176)..(176): n is a, c, g, or t
  misc_feature (194)..(194): n is a, c, g, or t
  misc_feature (208)..(208): n is a, c, g, or t
  misc_feature (212)..(212): n is a, c, g, or t
  misc_feature (222)..(222): n is a, c, g, or t
  misc_feature (226)..(226): n is a, c, g, or t
  misc_feature (230)..(230): n is a, c, g, or t
  misc_feature (247)..(247): n is a, c, g, or t
  misc_feature (257)..(257): n is a, c, g, or t
  misc_feature (263)..(263): n is a, c, g, or t
  misc_feature (270)..(270): n is a, c, g, or t
  misc_feature (273)..(273): n is a, c, g, or t
  misc_feature (281)..(281): n is a, c, g, or t
  misc_feature (290)..(290): n is a, c, g, or t
  misc_feature (292)..(292): n is a, c, g, or t
  misc_feature (308)..(308): n is a, c, g, or t
  misc_feature (311)..(311): n is a, c, g, or t
  misc_feature (332)..(332): n is a, c, g, or t
  misc_feature (348)..(348): n is a, c, g, or t
  misc_feature (350)..(350): n is a, c, g, or t
  misc_feature (353)..(353): n is a, c, g, or t
  misc_feature (359)..(359): n is a, c, g, or t
  misc_feature (365)..(365): n is a, c, g, or t
  misc_feature (374)..(374): n is a, c, g, or t
  misc_feature (376)..(378): n is a, c, g, or t
  misc_feature (386)..(386): n is a, c, g, or t
  misc_feature (401)..(401): n is a, c, g, or t
  misc_feature (413)..(413): n is a, c, g, or t
  misc_feature (443)..(443): n is a, c, g, or t
  misc_feature (455)..(455): n is a, c, g, or t
  misc_feature (490)..(490): n is a, c, g, or t
  misc_feature (526)..(526): n is a, c, g, or t
  misc_feature (552)..(552): n is a, c, g, or t
  misc_feature (556)..(556): n is a, c, g, or t
  misc_feature (566)..(566): n is a, c, g, or t
  misc_feature (575)..(575): n is a, c, g, or t
  misc_feature (589)..(589): n is a, c, g, or t
  misc_feature (635)..(635): n is a, c, g, or t
  misc_feature (658)..(658): n is a, c, g, or t
  misc_feature (696)..(696): n is a, c, g, or t
  misc_feature (772)..(772): n is a, c, g, or t
  misc_feature (832)..(832): n is a, c, g, or t
  misc_feature (858)..(858): n is a, c, g, or t
  misc_feature (909)..(909): n is a, c, g, or t
tcacggtgcgaganacgatgtccgacctgccggaggtgcggaatggagcntcggcactggagatctcntacaacggggagcntcagtcctggttccagaggcagctncggggcgcacagtaccagcncatcntcagggaccanatctgtaaggacatgagtacattggtggctgcncgcatgcggcaaatcccnttggccccagggtnagantggcgcgatntgcncaanatcgaggtgcggctctnagacggcacnatggcnaggaagntgnggtatacncaccatganangaagaacggccgcagnagntctggggccctccgtggggtntgctcctgcgtggaancnggnaaagcntgcgancccgcagcnannnagtacaanaccctcatcccctgntgcctacaccanaccgggaaccgcacaaccactgggatggantctatggaaggntcgagtgggaaggcttcttcagcacaaccgtaacnaaccccgagcccatgggcaagcagggccgcgtgctncacccagagcagcaccgtgtggtgancgtncgggagtatncacactccnagggattacctganacctaccggctcttcggcaacatcctggacaagcaccggcaggggngcaatgccgtgccaacgcccctngccaaagccattagcttggagatcaagctttgtatgtnggccaaagcccgagagagtgccttagctaaaataaaggaggaggaagctgctaaggactagttctgccctcccgtnacccctgtttctggcaccaggaatccccaacatgcactgatgttgtgtttttaacatgtnaatctgtccgttcacatgtgtggtanatggtgtttgtggcttggctgacatgaagctgttgtgtgaggtcgcttatnactaatgattagtgatcaattg

SEQ ID NO: 487187 - DNA, 250 bp, Homo sapiens
agccagcccggtgggcacgcaccgtgtcctggctgtatctttctttcttttttttaatttttttgagacagaatctcactctgtcacccaggctagagtgcagcggtgtgatctcagctcactgcaacctccgcctcctgggttcaagtgattctcatgtctcggcctcccaagcagctggggtcacaagcatgtgctaccacacctggctaacttttgtattttcagtggagacggtgcgttggcccaa

SEQ ID NO: 487188 - DNA, 358 bp, Homo sapiens
gaaaagatccaaaataaatccttgcctatcagctactagcgcctagcactcgcttctcacagtaagtccctgcgacctgcaacgccagcatccctagggtacttgttagaaatgcatatcctcaggccccaccccaaacctactgactcagaaactctgagggtctagcccaccaattgttttaacaagccctccagatggttctgttgctggctaaagctctaagaactactggcttatagcatgggctataaaccagactgccaccattgggttgtaaggaccgtttaattgattcaatccacatagcttaactagccaatcatagctgtctgcagagccaaccacactccagcat

SEQ ID NO: 487189 - DNA, 292 bp, Homo sapiens
agtcggttttgctatgtaggccaggctggtctcgaactcctgtcctcaagtgatccacctgttcttggcctcccaaagtgctgggattacaagcatgagccctccacgcctggcctagatcattcttataacatttttcttttgggaagacaggttctcactctattgcccaggctgtagtgcggtggtgcaatcatggctcactgcagccttgacctcccaagctcaagcaatcctcccacctcagcatcccaagtagctgagaccacagcatatgccagcacacgcgact

SEQ ID NO: 487190 - DNA, 466 bp, Homo sapiens
  misc_feature (70)..(70): n is a, c, g, or t
  misc_feature (124)..(124): n is a, c, g, or t
  misc_feature (253)..(253): n is a, c, g, or t
tagggagggggccggctctctccccaggtgttgccggttgagggttgaatctggtttccccccaaggatnccataaacccccttttttcctccgtttgggggggcgggtcccccaacttcctgnccctccttccctttttgcccttaagggggtttcgcccacaaagggggcccgcctttggtttttgttaatgccttactcaggcaggcccccttttcgggtggggggcccccggtttttaacccccaaccnggggcccccccgggagggggtgggggggttcccccccccccccagggggggcccccaattattttttcctggttttcttttggccacccggctgagccctgtttccccggccccttgttcccttgtggctggcccaaccccccccccttgggctgttccccccccccttgggctgttttttggggggttaccaagcttttttccctcctttca

SEQ ID NO: 487191 - DNA, 439 bp, Homo sapiens
  misc_feature (264)..(264): n is a, c, g, or t
  misc_feature (290)..(290): n is a, c, g, or t
  misc_feature (373)..(373): n is a, c, g, or t
  misc_feature (417)..(417): n is a, c, g, or t
  misc_feature (426)..(426): n is a, c, g, or t
tttcaccatgttggccgggctgggtttgaactcctgacctcaagtaatccacccacctcggcctcccaaagtgctgagattacagacatgagccacccatgcctggcccagaggtttgttttgttaagaaagctacaaataaataaaagtctaacattaggtatatctcctaatgctatccctccccccctcccccgaccccacaacaggccccggtgtgtgatgttccccttcctgtgtccaagtgttctcgttgttcaattnccacctatgagtgagaacatgcggtntttggttttttgtccttgcgatagtttgctgaggaatgatgggtttccagcttcatccatgtccctacaaaaggacatggaantcattcattttttatgggctggcataggtatttccatgggtgtnatatggtgnccacatttttctt

SEQ ID NO: 487192 - DNA, 556 bp, Homo sapiens
gtgctgtaaaagaacattaagccttgttccacaaaaagaaatggtgtaaagcttggccttgtctaacgtggtacgaatgacctgtcactagtaatatactggtatgttctacatttgtatttaagattgaatctcttatgtatagggtgataaccttccccagaaacaagagtgattgcgattgtttgctagaaacttctttaaagtgcgcacatttggcagtacaaatgagtctgagtgtaatagcgccagagatttatatagtagttagaagtgtctaaaatggtaagaatgtgccagctgtgtcaagttacgagtggcgttatggtttgttcatagtgattcaaatgaacttcctattttagatagtaaatgtgatttaatagtatacttgccattttgagcctcgactgcaaaattagtgcagaggagaaaacaatttgtaagtgtaatcttgatttgacctcatatacgtgtaccattccataaaactctaaacttttgtaccagatgatagatacaggtaccgaagatatcaccttaagattgtataagg

SEQ ID NO: 487193 - DNA, 223 bp, Homo sapiens
agagtatccccctgcaggtatagtaagagggagatacacataagattctgagatgggttctgggagtgcactcagtaagcctcagtgggcgaccaaggatgagtaggatcaactctaaatgatccatcggagaggaagacaagcctcaggtggactgtgtctgaaggtctagactgggggaatgtgacaccgaccttgtcagtgataccgagctcgaaattcg

SEQ ID NO: 487194 - DNA, 575 bp, Homo sapiens
  misc_feature (547)..(547): n is a, c, g, or t
agttcgagacgagcctagcaaatgtggcaaaaccccatctctacaaaaaaatacaaaaatcagccaggcatggtggcatgtgcctgtattcccagccactcgggaggctgaggcatgagaatcacttgaatctgggaggtagaggttacagtgagccgagatcgcgccactgcactccagcctgggtgacagagtgagattctgtctcaaaaataataataataataataataataatagtaattaataccaattctacacaagttcttttgaaaaataaaagagaggactgggcacagtggctcacacctgtaatcccagcactttgggaggccgaggcaggcagatcacctgatgtcaggagtttgggaccagcctggcctacatggtaaatccttgtctctattaaaaataccaaaaattagctgggtgtggtggctcatgcctgtaatcccagctactgaggaggctgagggaggagaatcacttgaacccgggaggcagaggtttcagtaagtcaagatcatgccactgtactccagcctgngttaacagaagcaagactcccgtcttcc

SEQ ID NO: 487195 - DNA, 374 bp, Homo sapiens
ccgacccactcctgagagcagagctggcacgcagtccatgaccccgcagcttctcctggccctatgtcctctgggccagctgcccgccctgcagtggaaggaaagggcccccagcgagctactgacactgccccgggtgcaagtgcgcgacgccgtcctcgagtacccgatcgccgtggattgctcctggaccctgcccgccgtgctccaaactccacccagccccgatgtccttcattgccacgtacaggctccggcccaatgcgctgcccggggccacagctggccctgcctgcagccacgacacgcccgccacaccgctccaccagctgcaccatcacgcgactgctacccaaaggccctcgcttttcctg

SEQ ID NO: 487196 - DNA, 344 bp, Homo sapiens
cctttaagaatctagaaaaaaagagctgagattgttgggatttggggagcgcagtggctccgaaagatctgtaatgccagtgctttgggatgccaaggcaggagaatcgcttaagaccaggagtttgagatcagtctgggttacatagcgagaccctaaccatagaaaaaaaaaaattcagctgggtgcagtggctcatgcctgtaaccccagcactttgggaggctgaggcgggcggatcacctgaggtcgggagttcgaaaccagcctgaccaacatagagaaaccccgtctccactaaaaatataaaactagccaggcatgcgccaccatacctggtcgac

SEQ ID NO: 487197 - DNA, 338 bp, Homo sapiens
aagtggcactcttgagcagtacatggggcggtggggtatgcagtgacatactcctctatgaagtcacggaggagatgcttctatgtcctcccaagtctttttcacgtggccggcacaatgggatacagttccgacgtggtgtgacatagtgaagcatagccatcatcaaagtcaatgagaaacctggagcttgttattgacgtttggtgtctcagctacaattgccagcatagagccatgacctgattcccatctttgtatttggcgaccacccgactgaccacatacagcttgtcagcaggagggttggaatcataggcaatatggctccccgacaa

SEQ ID NO: 487198 - DNA, 372 bp, Homo sapiens
tctatcgtatctagctgcagtcagatcgaaatcaccgtctgtcttagctgctgaccacacgtcatcatctctgatggaagcagacccttaggaaagcaagggccattggtgaatgggaccactagtaccattctccacaggggcatgagatcggagcagactgcagctggggaataagtcagatcaaatgtgacttacatcatgacattcctttgtaacctaccagtctaagccttaaactccagctgacttttcaaggttctcttatctccccaacacttccaccttgatccctccagatagctgggttcactatgtgctatgtctccatcccagaatgacttccacctcccatctgcccatctacattta

SEQ ID NO: 487199 - DNA, 387 bp, Homo sapiens
catggtggctcacgcctgtaattccagcaccttgggaggccgaggcaggtggatcacctgaggtcaggagattcgagaccatcctggccaggacggtgaaaccccatctctactaacaatacacccaccagataacacgggcatggttggctacgagcctgctagtcccagctactcggcgacggctgaggccacgggaatagcttgaccctgggaggcggacgggtcgcaagtgagccgagatcgcaccactgccacctccacgccaggacaacacgagcaacgacataccaatatccaaccacacaacacccccccaaccacaacacgcgcccacaacacaccacacacaggcgacgccacagaacacacagcagcaacaaaaca

SEQ ID NO: 487200 - DNA, 197 bp, Homo sapiens
tgacctagtccgggagtggtcctggaaaggtatcatgctcttggtcttcattagtcacatgggcacctctagcatgtgcggtcagtacgtctgccacatcaatgagagaaggcagatgggtgatctacaatgaccagaaggtgtgtgtctccggagaagcctgtccatggacctgggctacatctacttctaccaga

SEQ ID NO: 487201 - DNA, 174 bp, Homo sapiens
agtatctcatgatcccctatactcaagctacacccatagaccaaacctacaccaaaatccatttacactatacatattcatacggagtaaatctaactttctatcccacaacacttatctcgagactatccaggaatgccccgtacgttactctggactaccccgaatgcatac

SEQ ID NO: 487202 - DNA, 342 bp, Homo sapiens
accgggtgcacacaggaataccccagttctcatctcctcaccctgggctgcgtcaatagactccagagtaacccaaaccacaccctgctgcccagattcctaaatgacacgtgaaaggccgttatgacttggcttcctcatgccctatgcacggctgggctccagccaaggatcctccttcatcaacccccatattagctacgatccttcatgctaatgtatcgctcagagctcaaaagactttgaagggcctgtgccttcgctatcgagcgcttaagttctttgccctccgcgtacttttgacaaatagtgggcatcaaccatgttccaggaactacccta

SEQ ID NO: 487203 - DNA, 154 bp, Homo sapiens
gtatccggcagctatcggttcatgtgtccttcatatttgactgtggttcacagtattgcgttgtcagactaagaaagctaaacgaaccaaatggttagttttgcttggagactggccttattaatgggccgctttcctaaccaggaattattaa

SEQ ID NO: 487204 - DNA, 500 bp, Homo sapiens
aacttaaatgcatatttactaggtaaaagaaaccaatctgaaaaggctgcatactctgattccagctatatgatattctggaaaaggcaaaactgcggaaacaatagaaaggtcagtggttgccaggggttgtgggcagagggaggagttttaggacagtgaaactattctgtatgatactgtcatgttggacatatttgtccaaacccatagaatgtacaacactaagaatgaatgctaaaatcagtccctggactttgggtgataatgatgtgtcaacctaggttcattgatggtaacaaatggaccactctggtgggggatgttgacagttggggaaaggagtacttgggaattctgtactttctgctcaatttttctgtgaacctaaacctgcttcttttttaaaagtctagtaaaaacttattggaggtaaagaaatcaattaggaatctattgcaatcataaaccaaaatgttctgatagagccatattatcaa

SEQ ID NO: 487205 - DNA, 125 bp, Homo sapiens
aaaaacaaagatacaagtaagagcatgtaaacataataacaatattagctacactatcatcgaatagtcgagaggtgtatgaccgagtatagatagaaactaagaggggatcctactagagtaca

SEQ ID NO: 487206 - DNA, 329 bp, Homo sapiens
  misc_feature (135)..(135): n is a, c, g, or t
ctttgagccccttgatgccgtggaaataggcagggatgtcttcataactcaggacgcatctcttcacctgtgcttgatgctgtacccagaatcaccctcgagagaaagaagtagttctgcatcttctcctgatantgaaatgactggctttatcccatgaagctccattcaatggagaatgcagcgtctggtgtcttcatccatggacttatgagatgggtcatgggactccctacgaggcacagcctagtctggttcctctcctggagatgaaagattatacctagaacgccatctagaagggataagcgaatgtgattcttccccat

SEQ ID NO: 487207 - DNA, 740 bp, Homo sapiens
  misc_feature (36)..(36): n is a, c, g, or t
  misc_feature (79)..(79): n is a, c, g, or t
  misc_feature (221)..(221): n is a, c, g, or t
  misc_feature (244)..(244): n is a, c, g, or t
agatagcagatgactggtaggaagatgaggcaagtntgcggtccattgtcatggatagtggagacaacactgggccagnaagtggtaagacctgaatccaagactcagctctgccacttgctaaatgggactttgaataaaccatttctctgcacttaagttccttaccaacaaaacgagggaagtggcctacatgcctagatatcaacatttcatgtcangtagagatctagcatcacaagantccaagtcatcctctgttgcctttaagaaattagaattcaaggaatcagaattgaagtgaatctgactacactaagcctatcacttgtgacagccatgggaagatatcattggttgctgaggagcagaaataagcagagacctattgtgttaggttatcattcatttcagacaaaaagcagatcagcaagttttcatattgcactattttcaatggctggagcatcaacattttacaacaagaaaaaaattaaaattcttcaacatttggaaaagaagtgttagtaaaacttttcacatccattcaccatccggaaaagcaaggttttacagtgaggcctgatgatgtctagagtcaccatgcatcttggaaaatgacctcctatttatttcttctacaggacaccatggtgttcacctttctacaactttacacttgctgaggacatattgtggaaaattaagagaaatatatatggatggccaaggctgtaaaa

SEQ ID NO: 487208 - DNA, 597 bp, Homo sapiens
  misc_feature (36)..(36): n is a, c, g, or t
  misc_feature (79)..(79): n is a, c, g, or t
  misc_feature (221)..(221): n is a, c, g, or t
  misc_feature (244)..(244): n is a, c, g, or t
agatagcagatgactggtaggaagatgaggcaagtntgcggtccattgtcatggatagtggagacaacactgggccagnaagtggtaagacctgaatccaagactcagctctgccacttgctaaatgggactttgaataaaccatttctctgcacttaagttccttaccaacaaaacgagggaagtggcctacatgcctagatatcaacatttcatgtcangtagagatctagcatcacaagantccaagtcatcctctgttgcctttaagacaaaaagcagatcagcaagttttcatattgcactattttcaatggctggagcatcaacattttacaacaagaaaaaaattaaaattcttcaacatttggaaaagaagtgttagtaaaacttttcacatccattcaccatccggaaaagcaaggttttacagtgaggcctgatgatgtctagagtcaccatgcatcttggaaaatgacctcctatttatttcttctacaggacaccatggtgttcacctttctacaactttacacttgctgaggacatattgtggaaaattaagagaaatatatatggatggccaaggctgtaaaa

SEQ ID NO: 487209 - DNA, 101 bp, Homo sapiens
cttctagctcggtaccccgtcatcataactttcgggaacaactgcagaggcaaccataggaagctctcctgagtgcttcactgctcggaaggtccacaact

SEQ ID NO: 487210 - DNA, 147 bp, Homo sapiens
gaaggcgcacgatgtgcgcgtcctaacgttttcacgtgtagaacgggggtgtggctctcggagttttggggaaagaataaaggagatgggcctgtctctgatgtgggaaagggctactggtacgggctccatgtacgtgactagagc

SEQ ID NO: 487211 - DNA, 380 bp, Homo sapiens
gaggccagccgaaccccttggacttgcgaaggggaggtcgtattagttcgaggtttaactttagaaacgcgggagggccccttggccctatttttaatagcggaagacgcaaccattattataataaaccccttcaccaatacattcttcctaggaacaacatatgaggcactttcccctgaattttacacaacatattttgtcaccaagaccctatttttaacctcccggtttttatgaattggaacggcataccccggattcgggtaggaccaattcatacacctcctatgaaaaaacttcctaccactcaccctagcattatttatatgatatgtttccatacccattacaatttccggcattccccctcaaaccta

SEQ ID NO: 487212 - DNA, 311 bp, Homo sapiens
  misc_feature (26)..(26): n is a, c, g, or t
  misc_feature (62)..(62): n is a, c, g, or t
  misc_feature (154)..(154): n is a, c, g, or t
  misc_feature (157)..(157): n is a, c, g, or t
  misc_feature (310)..(310): n is a, c, g, or t
tcgtcccaacaacttaaaggaggctnaacacctgttgcacgcctgctcatggcagcgcttgnagaaatgactgggggagtccagcgaggtcggggacgcagcggtctccaggctccagaaacctccttagccttttgtggtaactttggtccgncgncggggggccggtgagcaggaactggagggaggcggtggggaaaccgtggatccgtccggctgagggtgcgtggatcagactgggctgagcaggcaagtcatcgtcgggtcacagcgaggcgacccaggagcgaacttccagggcagcctcccnt

SEQ ID NO: 487213 - DNA, 175 bp, Homo sapiens
aaagtcccccccattggcttcaagtaaatatacggtaccagacccagtttagaaggctacacggttaccacgtgagcttataattttcactcagtctacaaacggcttcttggaatccgggcaatgaatttcataaaaatcccttccggttacatataagggggggtaccgagct

SEQ ID NO: 487214 - DNA, 1223 bp, Homo sapiens
aacgattctacagcccaaccacagctcattgtacacatcccctcctgctagtgcattgactgactttaacacctacttttttacctgttcttttgacgggacacactcggacacacgtttaaacaacactgactggtacacacgacagacctactacaccccctggtcggagggcacacgacgacgacacttaatcatgtacgacggtctgtgttctacgaccactacgcacacaaccttaccttttactaccattttgacgggactggcttttgacacacctacttacggcacacttctactttaactttacacttataactcaacactgggtgtacccttgctctcgtgacacacaccaacctctggcaggtttcctcacgaacgggctaacaaccctacgacgttacccactaatgacttccacgcaacatccccaccgcctaccccactaataagtctactacttatgctctccctcacgtaggcttgccccgtacacggacagaaacgaccccaaaacgcttggggtcgggtatacacacaccaccaccacgaacactcgttgtatatctcctaagggagggctaggacacggtaccccaaacagtcacacggttgttgacgccacgggactttgtcgtttcttcatcttgagttgaccctcctcagtgacggaaccaacattcttatccctcttggccctatgggactacagccttattccgcgatgggtttaccgactacggggcacacattcctttctatgcatcggtcaatctgggtgggacttatgcgacatgacacggcacctctcaccctccccttctggtgggccattaaccttcccttgtggaaggtcgtcgcttggttatatcactagtatactacccaccaattatgtataaacccccttctctgacattctcaagatgcacgccagctcacagagtacacacttcttttaatgccctttggtcccggcccctaccccccaccccaaggctgacaccactcccaactgttcataacactgggggacatcataacttactactggattacaaaatcacctctggtaaattttcccacaacaacgacgaagagccaccctttacattgcatggcaggcttctggagcgacttctgtccagccctacatccatcaaggaatggggggatcccatcgttcgcaaaaccatcaccaacctgcccaaagacag

SEQ ID NO: 487215 - DNA, 504 bp, Homo sapiens
  misc_feature (245)..(245): n is a, c, g, or t
tctcaaggcaacaagggcacgcccacaccctgggaaacagagcatgggccaggtaaatggccaccctggagatccgtaactgcattagcaaattataaaggatagaggtacttacaaattagctgtttttttccgctttaaaaaagagtatctccatctctctcctctccaaagctttctaatcatagaaataattacagaatcacttgggtaaaagaaactcaaagaagcattcgactgacatngactcagatttaaactgggtgtgatgtgtgaaggtaagcaagggatgctggtttaccttttggaggacacgcttctgtaaatacggtaaagaacgtggggaagaaaggcaattgggggagcatagtttccagtggttcacaggctaccagaaggattcagacagcaaacacctacacctaagataatttcctgcttctattttaggagagggtctctgcctgggttttggcgcttactccgagttaatgagtacagacc

SEQ ID NO: 487216 - DNA, 500 bp, Homo sapiens
ccactgctttctcttgatccgcttttttatcctccggttctatttattctggccgcatcgctgtttatttttatatttattaagcagtaagcaacagagttgggggagatgacctaaaatggttttctttgtggaataatattttttaaaaaatcaaataactggtatcactttaagttgcctgaggctgttactgctcccggagaggaatttaacctttcatggacatgcccaactcggtaggcggcgaactctttctctccccctttcccttgaacgcgtttattaactgggagggggggggaattctattctgaaactccttcaaaccctcttttttttctcacgttgttacctccattttcgtgctctgagttgcgggaaagaaattaatctatattctctttgttcccttttaagcgcccaccgggggtgttttgcccccctccccacaccacgccccggtttggggctttcgttgctcctcttagaacgacttt

SEQ ID NO: 487217 - DNA, 182 bp, Homo sapiens
tatgcctctggatatcattgacctgagctcaggcttgaatagggctttatcccctccatcggctataatttgcccgggaagtgtctaggaccagtccacatttggcccatcatgaagttttccaaatatacccaagagtccactatgggatcctagaaattcaacagacatgtgtcttgctt

SEQ ID NO: 487218 - DNA, 431 bp, Homo sapiens
tacctctatttgccctctctgtagtgcaccaataatttcacctcgtgcatcattactagttacctatggttaaacacgcgtacacgtatttggtttagatcacttaaacatatgagatgacatcatatatactgatttgcactggtatactccccctcatgcaatagtatatgggccatcatttcatatcagcacatatgagagcaacctcattttggtctccaatggttgcacagatttacattgcctggatgtatcaaattatttaaccaggaacatttcacttctagtctttcactgttaaacaatgctggggaaaaaaaaaaccccttctatatgtgtcactggacacataagcgagagtactcttaaatacacctagaatatgaagtgcgaggtccaaaaatatgtgccctttcctattaagtaaa

SEQ ID NO: 487219 - DNA, 162 bp, Homo sapiens
agctttggggcttctgactgcagatcttctgagtgtgctgctataccagtggatcctgtgccaggagcctgccaagttttcctcagtgaggccttttgatggattggttgaggaacaattctggctggaggtggaagaggatacctctaaacttctcaagga

SEQ ID NO: 487220 - DNA, 334 bp, Homo sapiens
  misc_feature (54)..(54): n is a, c, g, or t
atccttatgtgggagaaagtttcaaatatccctgtcaaagatcgagacggggcngtggtggttcacgcctataatcccagcactttgggaggctgaggcgggcggatcacttgaggtcaggagttcgaaaccaccctgaccaacatggtgaaacctcgtctctaccaaaattatataaaattagctgggcgttgtggcgggtgcctgtgatcccagctactcaggaggctgaggcaggaaaatcgcttgaacccgggaggcagaggttgcagtgagccgagatcacgccactgcactccagcctggaaaggaggggaaagggaaaggaaagggg

SEQ ID NO: 487221 - DNA, 664 bp, Homo sapiens
ggtgctgcccgagtttgcccgaaatggccctgaatgattgtgagcttgagcccagtgtgccaccattgatgccacccagggacctctgggaccctttggagcctggcggggggtgccatctggcccccttccaagccccgtgtgtgcgtggactctctctgctggggtctcgggcgcaaaccaaagccaaggtgtgtgttaacagatgcccccaatgaaatgtggcttgtgcccgggcctgtccccttggttattggcgccggggaacctggttcttggtggtgatcctgggtcctacattctgggggacggttttcccaaccttcccaaagggcctaattaaccaaagattggtgtgttaccaggggggcccaatctcgattgctatctgtgggaccctttctctgtgtgtttggtgccccccccctttcaaaagattttccaacgtccaaaaatatccaccgggggtggggctacctttgaatgtttaagatggaagcataacgcagtcgtcctcacacgtgcacatacatagattacgacatccgtactcaacgattcatctacccacgtgttgactgtagggcgggcgcgtgcattcggagggtcgccccctactctggacgaaaatgagaccgctgttctcacgtagacgcacaccgtt

SEQ ID NO: 487222 - DNA, 864 bp, Homo sapiens
tggttggagctaaaatatgaacctttttgctcagtggtgtccagttgactagatcatagcagagcttactatgctgatagggtgtagtctgagctgtctaggatgtacatacatggaaaacagtttcttgctttagaactagaccgcatgtttgaatgccattgtctggcactttactggcttgtgattctgtttccttgtttataaagtaggagtaataatgcctatcattggaaagtgatgtttgggatttacaatgagcatgtcctctgtttgtttcccatgatcttataatagagactcaggtgcgagctattgtacctttattggttactactgaattgttacatgctcttaattcctgcattcggtgacaagcactggaccaagatcttgcgaggcacttcagaactattctcacgtgctgtcatgctatggtcttgtactcggaaatcatgtctgtgaaacttgaacatcaggctttagatatcgttgatcatacattcatagtaccatgtatgcttaacgtttatacgaatacacaaatcaacaattaacccaaaatattaatagctgacatatctccatatttcccggaaataagtgattcagatacgtaaaatcagcattagaccgaaaatgttaatacctgactctatttcccagtgttgcacaggtacgtaacccgttttctcgtatgcgtccgtctgtgcaattaaccagtgctacaggactgtcttctaaggccattccacgtcgattgcttaatgaaggtctaaataaggactacttggctgatccatctaattgaccattggcgcctgaatttgtcgctacaaatcgtcgttcatacaaactttcata

SEQ ID NO: 487223 - DNA, 521 bp, Homo sapiens
tcggagcaagcggggatcaccaccaaactcacctatttcattcaatttcttcccagtctttctcaggtctttacccccagcccccggggactctccggtcggtcccagctactctaccaccaagcccagattgcagggggactcagcctcctacactcgggaatcacctacagactcacaaacctcacgggggtcctccctggtctccctcaggtcttggccctcagcccacagtatctctttcagctactctgaatacttttctagattccagcgggagtcagttccgggcacccacgacacaccaccaaggtcacccatatcacggactcaggtattcaccccgcagccctcagggactcttcggtctctctcagctattctccaaccatctccagatatcagcgggagtcaacttcccacacccaggagttaccggagaaactcacagaacttacgggcaccctcccccatatcactgactcaggtgatcaccccgcaggctcaaggactctcctgtc

SEQ ID NO: 487224 - DNA, 507 bp, Homo sapiens
  misc_feature (420)..(420): n is a, c, g, or t
aatctctaaaatacattgtcccactgtctgcgctttctctgcctcccagaggaagagaaaggctaaggcttacgttctacaaagttcctaccttatatggaactcagagatggtcttctttggcaggcacctccaaaccatagatctgcggggtaggtagagagatcctgagtgtgttgtttttattattactactaatgatgaagacagacgttgccattttattgatgtgtagcagggctaggcacagggctataagcctgatatgtttcatcttgctcatcagcacagcaatactaagaaggaggaactattgcgaccgactgggcgacatgtccgaagtcccacagctaggaagtagcagggagaaagaaaccgacaatgaagacacagggcttccgataatccatgctatactgnctccttccagaaatttaactggttccatccaagttatggaatgcttttttatgattgtggttgctgttaaatcagtcaagactgcag

SEQ ID NO: 487225 - DNA, 1121 bp, Homo sapiens
gcccagcctgcatattaatcctgtgtgttagaatcccacccaggtgttagagccactcagcaggcctggctgccttgggtctcggcaaagggcctctggggtgctccggcctttgcgatggacacaggcagccttgagacaatgtgcctgccctggaggccctgtgccctccacaccgctggcatcaggctcccactgcccctcccacccagactggccctcggatggctgagtgtgtgggcacctgatagtgctctctgccccaggccaagctggagaggcatgaacccctagaaagtgtggccccaaccaaagacctggctcatgccttccctgaccccatttacccaggaaggcagtgccctgcagtaggcagtgacctaggccttgagccggttgccaacccaagctgctcagggatgctgccaggtggtccccaagaaagacagcacctgatgcagtgtccccatggtgagcataggtcagccaatggagctgaggagcggcatggtgctgacggttccctgcggggccgacgagtgtttgtcagctccccgaagtagacctccgcagacgacgagccctagaaaggccatcaaccggggccttgacatggcaccagaccatatgtaccatatggtccctttcaaacgcacaccaatacatgttacgtggttcaaacctgagacaggcaccccagtgatgtgggcaacggatgcaattcccggtaaatcagggaatgtacaggcagaaatgtgctggtatacagtgtaggacatcccaagggtctcccatggtgggacaacgcaaacctgccattccatgggaggtccatccttggccaggtaagccaagacacagagctactcccgtggggacagcgaagtgctgcgaccgcccgcgtcatggggagggaagagaaggctaggagcagcagaacactaacccagggtaaacagttgcagaaggcactgaaaatgaaggaactcaaagcagccccagcgacaacacggagaactagcagacggggtgccacggagtacaatctaagacaggcaataatgaggaaaaggagatagtcgtggtcagaagatgttgtgtatctgaacggccaccagtga

SEQ ID NO: 487226 - DNA, 100 bp, Homo sapiens
gagcctaaccctagaaaaaagttgtggttccctgattttgtcttgagcaggcaccatccctgtccccttgcttgcgggtagaattggcacagggttaagg

SEQ ID NO: 487227 - DNA, 1898 bp, Homo sapiens
  misc_feature (1704)..(1704): n is a, c, g, or t
gcacacgcccctcctcgtggccggaggacccgccccctccttatgactccgagaatctctcctcccatcgcccggcccgccattctcatggaattaggggaggcgatgcgagacagggtggcaacagcacagcagccatcctgacgccccatcaccattcacacatgagaggaggatgagggacagcacaccacaatatttatccaccggagacgctagaggacacacgtccaccatccgcctaggggggaccccacacaccacactatcgaatgccgaccaatgcctttacaatgcatttcatgcggagacgcgacgagcggagacatgagatcacacagcagaacaaagacccagaaaacaaccattatcggcaccacgcaacacacgaggacccaacaacacacacggaagagccgcacacagcctgctatccgcaaggccgacatccccatatgggaggccacgacatcaccatatatggaaatacacagagaagcaagagccccccatacgcgacctccccacaatcctaccccaacagcccacaaaacacgcgagcacagagttcggcaaataccaatacaaacacatgcagacgacacgaaacacccaaacccacgagacacaagaagagaaaacgagaaaacacgagaggaccactagacaacaaccgaacgaataaccgccacaaaacggcgcacaaataagacacaccacaatataaatcgacgagaatacttgacccagaggaccaattccgcagtcacaaacacccacacgacaaggtacgaccacaaaagcagatacctaacacagacgccaccagaccaactgacaaacatagaacacagtaacagtacacacagaaccaactaaaaacaactacataaaacggatacgccgccaatcaaacataccacactcaccccaactaacacgagagcgacacaatatagagcacagacagaggataacaaaaaggaaacacacactacacactacgtgcgacacacaaagcatccacagacaagacaacaacaacaagccacaagagagcgcaagaccaaccaccccacaaccatcaacacaacaaccacaacaccaaccgacaaacacgaaccgacacaaacgcaacaccacaacacaaacacaaaacaaagaacaacaacataaaactaacgcaattcaaactagatacaacattataacacaccaaaccaccaccgacaccaccaatatccaacacgaacccacaccacacactacaacataacaacacagacaaaaccaacaaaccacacccatcaactcacaaccaaccacaagtaacaaatacacacaccacaactcacccaatacataaacacacaagaacaccaacacacaacaacaacaccaaatataccacaatacctccacaacaaacacacaataacaacatccacatatattcacaaacaacagaaacataatcaaccatcacgcaaaacatccacccaacacaactatctacacatttactcacaacccatcacgacgtccaacacaaacgtacaccagcagacagcagacacatccatcacaggcgcgaccagacgcgtacgcacagaatcgcacactccagccccgaaggcgcagaacaccacagacgctcaacaacagaacgacagaggtcgtcgacggcccacatcgaagccagcncatgatcacacccaacaggacgcgacaacgcctaacacaactacacgaacgacaaagccagacgccaagtccagacaccactcactgtcggcaactcatagacagacaacagagacggacccaagccagacagctggcacgagaccaccacgagacacaaacacacacgaaccactcacagcagcccaccgaaa

SEQ ID NO: 487228 - DNA, 206 bp, Homo sapiens
atccagcctgtatctcaactcctggtctcaagcaatctacctgcctcagctctcaaagtgctgggattataggtgtgacgcaccgtatgcagctgggcagtggtatttagaaccaagaagcggcgtggcagacttcaaaaatctcatatggagtcagactaatggcccagccagttcagcaagtggcaattcacttaaggccattt

SEQ ID NO: 487229 - DNA, 832 bp, Homo sapiens
attacatcatctgccataagacgtcttctactcaatcagatttatagactgtattacattcagaggttgataaatgacgactctgtataatttgaccgtgaggtgagtgtctaaaatgtctagtatgcatgagtctaaaattagagatccttatctatatatcaaaagttttatcctgaagtttcaggatccacgtcttccttaataaactgtgtaaatggaaagcgagctttatgagacatttaacacaatgttgctgctgctttgttacttaaaaagaaagttgccaagagagacttcttagggaaaatatttgggtttttatttccaaaactgtggtgaaatatgtgtttgtgccattttaaaacaagtctcaggttattaccactctgcgcattaaatattgtatgcctgcatttttaaaaattctgtgcatgtcttttatggagtacattctattttgttttcagataccctacaaccaatttttttagtaatcttttagaattgaaaattatcataaatgatcgagaataatcatcacattagttaagatggtatatgtggaagtagtttaaaacaatcttgtgcaattttacagtaacgactcaaaagtccctttcaggtgtgccttggttcagctaaatattgtgaccagcaatgacaaccttgcgagttatttcttcacaatattattgctatgaattatgggcacacagaaccgggttggaggataagcgtcttgatgtaaatttaatatactctaaggaaaattggggggcaaaacaagcttacatattttctgcgcctttaaaagtggctgaccatggtc

SEQ ID NO: 487230 - DNA, 910 bp, Homo sapiens
  misc_feature (144)..(144): n is a, c, g, or t
  misc_feature (153)..(153): n is a, c, g, or t
  misc_feature (171)..(171): n is a, c, g, or t
  misc_feature (271)..(271): n is a, c, g, or t
  misc_feature (307)..(307): n is a, c, g, or t
  misc_feature (322)..(322): n is a, c, g, or t
  misc_feature (358)..(358): n is a, c, g, or t
  misc_feature (380)..(380): n is a, c, g, or t
  misc_feature (448)..(448): n is a, c, g, or t
  misc_feature (542)..(542): n is a, c, g, or t
  misc_feature (564)..(564): n is a, c, g, or t
  misc_feature (581)..(581): n is a, c, g, or t
  misc_feature (692)..(692): n is a, c, g, or t
  misc_feature (701)..(701): n is a, c, g, or t
  misc_feature (705)..(706): n is a, c, g, or t
  misc_feature (711)..(711): n is a, c, g, or t
  misc_feature (715)..(715): n is a, c, g, or t
  misc_feature (720)..(720): n is a, c, g, or t
  misc_feature (729)..(729): n is a, c, g, or t
  misc_feature (732)..(732): n is a, c, g, or t
  misc_feature (741)..(741): n is a, c, g, or t
  misc_feature (754)..(754): n is a, c, g, or t
  misc_feature (759)..(759): n is a, c, g, or t
  misc_feature (764)..(764): n is a, c, g, or t
  misc_feature (770)..(771): n is a, c, g, or t
  misc_feature (782)..(782): n is a, c, g, or t
  misc_feature (788)..(788): n is a, c, g, or t
  misc_feature (796)..(796): n is a, c, g, or t
  misc_feature (798)..(798): n is a, c, g, or t
  misc_feature (832)..(832): n is a, c, g, or t
  misc_feature (837)..(837): n is a, c, g, or t
gcttacctcaagtaatctgcccacctcagcctcccagagtgctgggattacagagacaggactccagcctgggtaacagaggaagaccttctctctttaaaaaaaaaaaaaaagtgtggaggcacagtgggggctatttcactngtccactanaagtcttaagacacggtngcagtcttcaagattagctctccggacagtctactatcctcaggttcatctggggaccattagtggagctggaatggtgagaccaacatccgtgacaccnggactctttcaggttctgaagttggtctttcttatnattcaggtcgatctnggagaaagagggaccaaagtcactttttagaggctngggtccaaattgggtgggagtngcaccatcaagcttttatcacaaattccttaatgaatcctatatggatggttaaaacccgaatgcagntagaacagaaagtgaggggctctaagcagatgaatacactccagtgtgctcgtacgtttaccagaccgaaggcattcgggttctatagaggatnaactgctcgtatgctggaattnccgaaatataatctgtnggctatttatgaagagtttaaacgaagttatcttgaaagaagctccattaaggctctttctgcaaatggggactgagaaaaaattcccaccaaggttttttgtggacttanggcagctgntgcnncttcnaaangggtnggctcctgnatntgttatccnccacaaagtcaanggacnaggcncgggannagggcccagtncagttntttgtccnanggggccctgggtccggagaggtacctgctttaanaggangttgccgttttcggcatcccaatcgcctgggtgtacttaagagtggtctttgaaaacacgcaaaaggcgaaag

SEQ ID NO: 487231 - DNA, 153 bp, Homo sapiens
gaatcaactgtcaactgtctacaaataactgattttaaaacaaagtcaacatttaaaaacattttaacttgtgaaaaaacaaagaattttttttaattgtggcacaatacagacaatataaaatttaccggcaggacgcagaacgcgcctaat

SEQ ID NO: 487232 - DNA, 799 bp, Homo sapiens
gcccgacggacaccctccgggccccggcagacacaaccgtgacagggtgcccgtaggaccgtcaacaaatagctgtccgcgcgggccccactaacatcgtacccactcaggtacgcacgggggcctcaccactaacagggaaaaaccgctgtgtcacaaaaacgcccgggaaagacagtgtgacaccggcgcctccccccgccctcatagaggatgccctccacctccgcgatccaccccgggaagagttttggtggcccccacgcggcgacaagcacggaaccaccccttggcgacaacacgcacacctccgcgggggcccccaccccccatggcaccgggataacgcctgtggttccgccaaccccacgttttttttttgtttgtgcgggcccctcccgcagttctcccctttccaaaggcgccactccggggttctcctggactcgccgctcgccagtgatccctccttaggcgtgccccctccacgcacgccttccggggtgtctctcttgtctgtgcccccgccacccgctgccgccgtgtgtctttcagttgtggcagtactgctccgcctcccgccccccgcagaagaagtcccgcctcgcgcccactcctctcgcccgcctaaagacaccccgggctggcgcgcgtgcgagcgagggcccgccggacagccgagcgtggcccgccgcaccaccgctcttctcgtagggtacacatacagagacgagcgtaagtgctccctcccgaaggaaaaagaaaggaagggccacaacgccccaacaatgtccgaaac

SEQ ID NO: 487233 - DNA, 303 bp, Homo sapiens
taggccgcactcttggcaatggttgattcctgactcccaactgctgaaatatacccatgggtaatacacggcgctctgaagacccagagaagacattactaatgatgtgacttcaggagccacagaagatccttaccagcttccctcaaagcagtccttatcctctttctatcttcactccgatcatcatctattgtcacactatccagctaagcagagattcctggaggctgacttgtatcttcagactcacagagcgaattcagctcttctgaatcacgacccacccaggctctttcattc

SEQ ID NO: 487234 - DNA, 354 bp, Homo sapiens
tctagaggatcccaatcagtttaacagactgagtaagagtacaaaagaggcatagttggagtttcgcccagcagggagtgggggattagcaggagactggtattgggcatgatgtctaaaatgtatagcgaaggaagacagaattaaaggtgactaacagagatcaaagtagaggatttagggactgagtacccctgtggtaaaaaaaaaaaaaaaggcaacacagggcacaaatacggagtgagagaagggaagcggggatcacagtaaaaggcttaattataaaatattagataaatcacttctatgccaggagcccttcctggtgtaaccggatggggtaccggagctcga

SEQ ID NO: 487235 - DNA, 147 bp, Homo sapiens
aatattcccgtgagcaaagctgtagatgaaaatatgataggcataggcagaagcaggaagcggcagaagcaggaagcacaggagcccttttaagtatcttttgttacgcttttcaccccacccccaagtcctggtagaagcaggaag

SEQ ID NO: 487236 - DNA, 309 bp, Homo sapiens
gcctgggggacaacggcgagacttcctctcaaaaaaaaccaaaaccaaaaccaaaacctgctttgttcttctgtcatcctgaccccacccctttctgggctactcttgacatccacagtcatatacacatgggagaggccacagagcctcgaatgccatacctaggattcatcatactctagataaaaagtttgcacacagagatggtgaattctgaaccctctaagactgcgaagtttatgcctgtctggctttcatgggtttcttaaagatgtccaaacacacaataaaagtaaataaacactgtta

SEQ ID NO: 487237 - DNA, 1112 bp, Homo sapiens
ggggtttggggtgctgtttccatacaacatggtttatttccgattcctcagaagatcctgtatatatgaataacctcagggtaatgttaatttcctgtcccccatgtcaaaatggtcaccctaagccttttttttggtttatgttattattttggggaacagcggtgcctacactctgtgttcgagtcgcacggcgtggatggtgcagaggacatgtggatctgtgactgcaggggcaggggtagacatctgcgtggggcgtcaagggtacacacgtatccaaagatagtcgtgaaaccactggtgttgtgcccgattcaacagccgggccagattcatagttgaagggaacaaaagtggggtgtgctccgaggtggggtcctcaagactccgtgagacgtcaagcaagggtgccacgcctgggcttaccacaaaggggcggggatataaaggcggtttaaaaaccacagtggggcaagggcgaaaggtatagccttctggcggcatgtttaagagagagtgtagtgtattattagattaaaaattatgtgtgcgcaagtcagagtgggggggctgtataaacctcttgcgtgggcgaaagggggaaaagttccgagaaagcgcgtggtatttttagagcgcttcaccatagagacttatcaacgacacaactccccgtgaaaaactgggcgcgtgtagcccaaaaatgaggtaaatctctcaaaatgggggggggcacacccccataaggtggcgcctgtaataacgctgttctgtgggcgcaaacggggaaaaagaggaaggggcaccaaaaacctgactaaccaacctttaaggcacggggggggccaaccaaccgctgtgggaacaaccaggaagcgtctacgagacaccccctttaacacagacaccccgccaaggaaaaaaagagaccacccggtgtggggcgcccccactcaccgtcagcttcaggagagggggacccaacgtggacgcgaggtatacgcaccccaaactggggcctcctggcggcgggcaacatatcaaccgtcgacacaaggggagaaaacaggccccgcggatgacacagtggcgccacaaggtagaacaac

SEQ ID NO: 487238 - DNA, 179 bp, Homo sapiens
  misc_feature (19)..(19): n is a, c, g, or t
  misc_feature (47)..(47): n is a, c, g, or t
  misc_feature (49)..(49): n is a, c, g, or t
  misc_feature (73)..(73): n is a, c, g, or t
cgttaagaggaagcaaganaacgtttagaagaagagaagcgtgcttntnaagaagcaaggcggcaaatggtanatgaagatgaggaaaaccaagacacagcaaaaatttttaaagggtaccgccctggtaaactcaaactcagtttagaagaaatggaaaggcaaaggagagaatatga

SEQ ID NO: 487239 - DNA, 170 bp, Homo sapiens
acaaaaaaaaaaggatgggcgagctggggggtcagggaaagatacctggattcttttaggaatcaaagcggggtaaataccctgtggggatgactaatggctgggtctggccctcattggatcctaagtaaataataggtctcaaaagggaaatatgtagggatgctccg

SEQ ID NO: 487240 - DNA, 282 bp, Homo sapiens
  misc_feature (68)..(68): n is a, c, g, or t
atagcattagattgttgttctgccagaagaaccctgcaagctgcttccacctccgggccttgtgcggnctcttccctcgtcatgcagttcttccctctgacttttgaccaaacccccctctcacccatcatctccgtgggtcacctcttggggacacttccccagagtctttctcccttaggcctcctcatctgtctctcatttatgggcttttctcatttgttatcccaatttttggctctgtgaggggtttttctctgagggggtggaattaatcttcat

SEQ ID NO: 487241 - DNA, 137 bp, Homo sapiens
  misc_feature (38)..(38): n is a, c, g, or t
  misc_feature (46)..(46): n is a, c, g, or t
cttatgagacagatcacgtctgcgaggttgctcagacncctccagntgcggcaggttgtctgggtgcgctgtggtgctccgcaggtgcagggtctgcagggccgtcatcgctgggagctgccggagctgtgcatgca

SEQ ID NO: 487242 - DNA, 213 bp, Homo sapiens
attggactacgcggactacgggagctggaggctggggcctggttacttgtgttgacgtgcagagcctctctctggggggctgcagctcatcttgggggagagctggactcagcatgccccgtagatgcaaaagccacatccacatctcactcctcccggtgcttaatgcggcactccctgacagcgcttcctccgccaccggatctcccacta

SEQ ID NO: 487243 - DNA, 400 bp, Homo sapiens
ggcacgaggcacagcacagaatcgtcgggaccagactcgtgtcaggccacatgcagacttctcagagcaaacgccgaccaaggagaaactcactatcatgagaattgcagtgatttgcttttgcctctctaggcattacctgtgccataccagttaaacaggctgattctggaagttctgagggacccatcttagaagcagaatcttctagacccacagaatgctgtgtgctctgaagaaaccaatgactttaaacaagagaccctttcaagtgagtgcaacggccatgaccacatggatgatatggatgatgaagatgatgatgaccatgtggacaggcaggacttcatatgactctaacgactctgatgatgtatatgacactgatgtctcaccgtct

SEQ ID NO: 487244 - DNA, 149 bp, Homo sapiens
cgatgaggaattgatcccgcggctgagaactggtataaacatgagtgtaggtagaatgtatttaccagtaccaacagggaaattatttaagttattacatgtactgtattgggacacttgaggagaactcgtttagttcatacaagctt

SEQ ID NO: 487245 - DNA, 148 bp, Homo sapiens
aaggggggggggggggcccccccccttgggggttttttctttctttccccccccccctggggggttttttttgggttttttttttaaaaggccttttaaggtcccctttttggcccccccaaaaaaggggggggggggggttttggga

SEQ ID NO: 487246 - DNA, 170 bp, Homo sapiens
gaccaggcagaagatttcactcaagtcagcactaccaggctgcacaaagaggcgggcctgcacagaactctacactaggcagcacataaagaatggagcagtagactctgtcgcatctttgttcccagcaaaggctacatgttacctcgttcaattgataataaaccttt

SEQ ID NO: 487247 - DNA, 430 bp, Homo sapiens
cctcctctaccagaccatttaccacactgctagccaggcataaaactaaaatagtgaatctccgccatacccctgatataaaaacttccagtgattccctacagccaatggggcaaaggccagtcatacagcattacacacataggccctctccaatctacatatcctgctgctttcccacttcccaacgcccctgaacctataagctccattacaactatctcaagaaaatgacaataccccacctactacagcgtggtacatgctgcttctagaaacatagctccttgatacttctccatatagagtagaggcaactagcacgctcttagaagactcaactacaaaacgccagtcttcccagaccaacccccacagtccaaattaattcgaagcacccatgagcagtttgtgcaggagggttgcaacg

SEQ ID NO: 487248 - DNA, 322 bp, Homo sapiens
ggtctcactttccctccaaactccccgcgcggcaggtagtgaacccgggcttggcgaggtgcccggagctccctatttggctcgctccctgcacccagaggtggagaactctcccactcttggcaggtttgtgtccctcttagcttgatgaccctgaggcccttaactctgtgtacagttgtacatgtgatttgctccacttgccgtaccctactaatgtgtgttacagaaagaagaaaacaaaggccgactaatgctgagtagttgcccaccattcacacagcgtcagatctgtgagagactcagagcttagccagccagg

SEQ ID NO: 487249 - DNA, 175 bp, Homo sapiens
ccctgtgctacttaagccgctcgcaaggatggccctctacttgaggggtgaaagaaacctcatcgttacaggccatggtactgtggcgctccgtgaaattagacgtactcagaagtccactgaacttctgattcgcgatcgttcccttccagcgtctgtgtgctgagaaattgac

SEQ ID NO: 487250 - DNA, 949 bp, Homo sapiens
cggtcaccagggattaactagggttagctgtttaacacattatctgtattatagtagtggattatttatttacaagtggggggtaattcagcagtcaggactctaagctttaatagttggaattggaggaaatctcgcttttattcatttagctggcaactgggctttatgggagacctcggggtgctgggctttcaaggaagcctatgagagtgccaaaatcacacctttagaagagcacctgggctctaataggggatgcatgagcaaacagggagattggaaggggtttaaacattaatttagaagtggtgaaaaaaatatcaattcatatctttcaaggtactaacccctcaaaaaagcccacacattacaaaatagtggtgagtggtgataccacttgggtctttaaggtctttaagtaactggaagttaagcacgagaaaaaaaaatcacttcagggaaatttcagtaagaaacccaaattctaaaaatgggtggcagatgagctaaaaaaaaaaaataaaaaagaggccacaaaataacctgttacatagagaggctaaagcgttgtgggaaatgcgggaagtatagggtatcccaggtgtaatttaggggaacattttagggccttcagggaaattttaagggcaattctaagcgcgacatccaacttaaggcgggcccaatccacaagaggggccccatacccaagggcagggaaccgcgggggaacacccacggtgggtcccaatacggaactgcacacgatccctaagagcacacatggtcccctaacagggcgcccaaaaagctgtgctacaacaccagggttaaacccgcgaaccgggggcacacaagacactgcgcgcccaaaacgcgggaaataccgcccaacacacatttgtacacacccgcacacaacagggcaccgcaccaccaacgccga

SEQ ID NO: 487251 - DNA, 325 bp, Homo sapiens
tactaatcgagccggtaccacgatctgggagagtgctgaattgagcaagctgagatgaggtataggaggtcgaagttactgtttctttgctgtcttctgtccctggtggttaattggttatccctgaatgagccagattaccgctctgggaggtgtcagctgatccatggagtgcagggtctgcaaactatctcaagcactgatgttaagttttacagtagtgatgttatctccagaagcaatttgtggaggttcagactcttgcagtttctgacccctaaaccttaatttctaatcttgtagctaatttgttaggtctacctgg

SEQ ID NO: 487252 - DNA, 259 bp, Homo sapiens
agcgctgtggggaggctgttgaaaggcgtagccactgtttatcaccaacattcattgtcccctgcgaggcgtgagaattagactgacgggtgctatgccgggtgtttaactgaaggtgaaacacttgaccagcccttggaggagctcacaaccacataggacacatttggacttggtccaccccgagagtgactttgtacaaagaaatgactgagcgctggaataactaaatgcaattaaaatgcgtctttcagtccca

SEQ ID NO: 487253 - DNA, 956 bp, Homo sapiens
gctccatgctttctttctctgtcgttgtgacacacacacacacacacacacacacacacacacacaccacagttagtgacatcaggggccccagtcccgagatatgacagattggacaccactcacggtcataatgtgtgtctaatgtgtggttgagaaatcatgaagtgtatatgtactgtgtgtacccagagaaagggagatagttcacattatagaaggaaccgtgagaagtgatctcacagagatgtgtcatagtgtgtgcacaccctaagagagggggcggcccctagacaccatctctgcgtgacggcgatcttgatcatcaaccagtagtgtgcgtctcaccacatgtgtctctctgtgcgcggctgcatcactatatgaatctactaggtgaatttgcgccaatatctcgtgcgtgccgttgattaagaggtgtatgaactatcaggtatattcgtgctataacatatactgacgtgcgtactagtagataatagcagctgaactataaaaaaagagtatcatctattagtgctcatcatattgtgctaaagtggagaggcatgactatcatcggttttggcaccagcacagtcagtagcagaagtggagaaaaaaaaatatataggcggagtattttgattaagaaagcgaagtcgtcgctgtattcacaaaccaacttaagcataaaacacagagccacagggcccaacacaccgtagcaaggacacacggcacaactcacccggcaacaacgcgggatcgacacgagacaaacaccgacaaacaccaaaactaaaacgagaccacacaaaggaacaacacatactaaacaacaaaatacatacagacaccaaaccaacacacccaacaccccaccaccccacgccaaacccaactgagaaaatgaaaacaacacaaacaacaaacacccacagcgaagggcaacg

SEQ ID NO: 487254 - DNA, 111 bp, Homo sapiens
aatggacggcctcctctcactcttgcctccagacatggaaggtgatcccatgtgacagctggggtgcactgtgcggcggccgcatgtgagggccgccattggattctcctc

SEQ ID NO: 487255 - DNA, 528 bp, Homo sapiens
ttcagagtatctgagtactggagttgggctttatatgattctctgtgtagttcctcttcattttcagcaggaaactgcttctccttaataaattgataactgtttatgcttttctctcggactgattgccggtgtgtgatcatgaatgctttcagttatgtgaataataaaagaatataagaagaaaagtgaggggccggagaagtggctcagtcagtaaaggtttgctgtgcaagcctgaggtcctgagttcagatccccaacagccacataaaaagcggggcatgacctgagacgcagagctggggaggcagagacaggaggattccccagcttgctgccctgacagtctggctgagtcactgagcacctggttcaggtagagagcaatagaggaagatgtagaacataaatctctggcctcaacaggcaagcacatgtgcatacacccgtttgcacacacatacaaataccaggtacacttgcatgcatgaccgtacaccgaacaaaacaaaaacaacaaatttg

SEQ ID NO: 487256 - DNA, 1203 bp, Homo sapiens
  misc_feature (283)..(283): n is a, c, g, or t
tgtgtagtggttttgttgtgcatgttgtatttagtgattgttttatattttgagtagtgatggctgtttgtttctgttttgtagtggttgtgttttttttttgttatgtatattgactgtttgtgtgtgtgtatttagtgagttttatgtagggttgagtgagtctatttattagttgttagttttgtttttttttgtgtttttttgttttgttcgtttgttggtttttttttttgtttgcttttttgttggtgtggttttgtttttgtgttatttttttttnagcagacgcgacagcgcgaggaggacgccgaggaaagagaggagaggctccccggaggggacacagacataggcgtctggcaaccaaagtgtgctcgcgacagcgaggggcccagaacagtggggcaccacacgcgcgaaaccttatgtcgcgcccccatccgcacccccatggcgccacagccgtgggtttgccgggccccacggccgtttcagccctttgccggtacaccgcgccccccactcagcgcagatgatcgctctatctttgccggcccctgggcttctctgcacgatggtccccggaagtagattctccgccctgcgtacatgtacacggtcacatacacgggggcagaatcactttcccaaagaagactctgttttacgaaggggattcactacagggacttagagcaccagtctcttttcggccctttaaatgagagttccccccagttgacccaaagttggacacgcacaccatttttcaggggcatgcccaattgcgtaaagtgaggctcgcctgcatagctaatcctggttaaagaccaacttcttccaaagcaaccacgtgcttgtttcctatcgggctccctgcggggcatttttcttccactaccaagtccagcttgggctctccaagccctgcgcctgttacccccggatgcccccagggcctgggccagttgctgtggcgaccaggaagagctaatcttcagagagctccagactctctaatgatgctgaaggacgccaaggctgagtccagaaacacacttaagagaaaaggattggcccgggcgccggtggctcacgcctgtaatccccagccctttgggaggccgaggcgggtggatcatgaggtccggagatcgagaccctcctggctaaaccaggtgaaaccccgtctttactata

SEQ ID NO: 487257 - DNA, 105 bp, Homo sapiens
cacataattagtacagcacatactagtacgcacataactagcacgcacactactagtgaaccactatcacgaaaaaaactctacctctctatactaatctcccta

SEQ ID NO: 487258 - DNA, 1632 bp, Homo sapiens
tacagataaacttttaaattggattaattattttcattttcaagaactctttttggaaattcgccactggttacgtgtcactattcaacagccaagaggcaataagaaaagtttaaacacccaaaaattatctcgtgcactatgacaccacgtgtgcacgaggaaacgcgcgtgcttgtgctaaaggttaacattatcagtgtgtcttcccaagagaaacaatgtgattatttattagagagaagattaatttcatctctttaaccattgttgcaagggaccaaatttgtgtaatttcaaagggcttggaaagaaattattattatttcaggtgccgtgtctttctataaacacgtttatattttaacacatctttacaatctacagcgatatttattctcttcatatataaacaacaaaattccgcgagaaggtgccttaaccttccaagggggtctcacatattacccatatatgtgttccattgaacagagtctgtgcacaaagaaagagccctgtgcaccaagagtgttccgtggaattgtatacacgagttttttgcacaccaccctctattaaagccgtggggacactatcatttctacgtgaaatctccaacacacacaccaaacaacaacacacacacacaacacctactcacacaacaacacaatataactaaaaacaatatatatatatatacacacaatactcacaacatcacaccaccctccatcccctttatcactaactatcaacctagaaactactacccaatatcataacaatacaaacttactatctctacattccacacacactctcatcgctcctttcccatcttatctcaactcttcactccttctccctaccacatgcgccccgccaatcttctacatctgacgcactctcgcatctggctctcctggcacgccattgagcgccagtgtgcactcacaggacatatggcgtctcatatatattctatccatactcacgtgtctcggcgtgcacattaaaacacataatagacttatgaaggaagcaaaacaaccctcgtgttgttgcttacttcttatatcgtagcgacgacaacccactcattcatgtaatacgcgaccacgcctataatcacacacaagaaaacgtacagcatacagacagcaaagcatcgagcagtacgctcgctgtactagaggtgcggcgccgaatcacctacatcaacaacacgatgcataagacatgctgatctttactgactgtgatggactcagcacacgcacagcgttgacacagcagcggcggccgcacaaccgaacgatccgcagcgcgcctaacggtacattcattgcgagcacacaatatatacgcagcggagcggaaacgcgagtagatcgatcagaacgaggcggaacaacgagggaggaggaacgccagcacagcgagaaggcgcagcgcagcgagcgcggcagaggacgtgaggaggggaactgaaaccacacgatgctggcgaggatcagcggcacgcgagcgtagtcggcaagacagttccgactgaccagtgagtcgaagcgcgagagccacgagagatgagcacagataaacggacgaggacacgcaagcatgcctata

SEQ ID NO: 487259 - DNA, 815 bp, Homo sapiens
  misc_feature (43)..(43): n is a, c, g, or t
  misc_feature (64)..(64): n is a, c, g, or t
  misc_feature (66)..(66): n is a, c, g, or t
  misc_feature (79)..(79): n is a, c, g, or t
  misc_feature (91)..(91): n is a, c, g, or t
  misc_feature (99)..(99): n is a, c, g, or t
  misc_feature (126)..(126): n is a, c, g, or t
  misc_feature (143)..(143): n is a, c, g, or t
  misc_feature (154)..(155): n is a, c, g, or t
  misc_feature (161)..(161): n is a, c, g, or t
  misc_feature (175)..(175): n is a, c, g, or t
  misc_feature (181)..(181): n is a, c, g, or t
  misc_feature (202)..(202): n is a, c, g, or t
  misc_feature (211)..(211): n is a, c, g, or t
  misc_feature (215)..(215): n is a, c, g, or t
  misc_feature (283)..(283): n is a, c, g, or t
  misc_feature (289)..(289): n is a, c, g, or t
  misc_feature (292)..(292): n is a, c, g, or t
  misc_feature (298)..(298): n is a, c, g, or t
  misc_feature (307)..(307): n is a, c, g, or t
atgcgctacccggccggccgctggataccgcggccggctgcgncccggccgccctttcccgccntntttgccctgcccngttatgccgcgnccgccccngcgggcttctcggcgcgagggctcttncggaccctgcgccctangaactggggtnnccgccnctgaccgcggccgnggcggngggcgcggcggcccgccgccnctcggcggntggngccccagacgcagaggcggggctggcccctggggagctgcagcagctggcccaggggccggaggacgngctggnggntctgcngctctcagnggacgactgaggcagcccatctggggggcctgtaggggctgccgggctggtggccagtgtttccacctccctggcagtcaggcctagaggctggcgtctgtgcagttgggggaggcagtagacacgggacaggctttattatttatttttcagcatgaaagaccaaacgtatcgagagctgggctgggctgggctggtgtggctgctgaagccccacagctgtgggctgctgaagtcagctccgcgggggagctgaccctgacgtcagcagaccgagaccagtcccagttccagggggaggcctgcaggcccctggccccttccaccacctctgccctccgtctgcagacctcgtccatctgcaccaggctctgccttcactcccccaagtctttggaaatttgttcttttcctttgaagtcacattttcttttaaaattttttgttttgcatccgaaaccgaaagaaataaagcggtgggaggcagggccattgtgttgagtggtgg

SEQ ID NO: 487260 - DNA, 86 bp, Homo sapiens
gaatttgctggtgcagtacaactaggcttaatagggacatgcctctgcactccagcgtggcaacagaacgagactccatcgcaaaa

SEQ ID NO: 487261 - DNA, 249 bp, Homo sapiens
agctcgaagagatgatatttgtgaagttactggtacataactggggctcaaaaaatggtaacttgattctccccaggatccccctgacttctctccccaactctgctcccatcaccagttgcataagtcaattctatctggtattcctctgagcattacaccacttgcggaaatgctatctagtgaaatcatcatttcatcatctgagaacttgagagtctatgtggaggaatagcatttccagagatg

SEQ ID NO: 487262 - DNA, 1194 bp, Homo sapiens
  misc_feature (43)..(43): n is a, c, g, or t
  misc_feature (64)..(64): n is a, c, g, or t
  misc_feature (66)..(66): n is a, c, g, or t
  misc_feature (79)..(79): n is a, c, g, or t
  misc_feature (91)..(91): n is a, c, g, or t
  misc_feature (99)..(99): n is a, c, g, or t
  misc_feature (126)..(126): n is a, c, g, or t
  misc_feature (143)..(143): n is a, c, g, or t
  misc_feature (154)..(155): n is a, c, g, or t
  misc_feature (161)..(161): n is a, c, g, or t
  misc_feature (175)..(175): n is a, c, g, or t
  misc_feature (181)..(181): n is a, c, g, or t
  misc_feature (202)..(202): n is a, c, g, or t
  misc_feature (211)..(211): n is a, c, g, or t
  misc_feature (215)..(215): n is a, c, g, or t
  misc_feature (283)..(283): n is a, c, g, or t
  misc_feature (289)..(289): n is a, c, g, or t
  misc_feature (292)..(292): n is a, c, g, or t
  misc_feature (298)..(298): n is a, c, g, or t
  misc_feature (307)..(307): n is a, c, g, or t
atgcgctacccggccggccgctggataccgcggccggctgcgncccggccgccctttcccgccntntttgccctgcccngttatgccgcgnccgccccngcgggcttctcggcgcgagggctcttncggaccctgcgccctangaactggggtnnccgccnctgaccgcggccgnggcggngggcgcggcggcccgccgccnctcggcggntggngccccagacgcagaggcggggctggcccctggggagctgcagcagctggcccaggggccggaggacgngctggnggntctgcngctctcagnggacgactgaggcagcccatctggggggcctgtaggggctgccgggctggtggccagtgtttccacctccctggcagtcaggcctagaggctggcgtctgtgcagttgggggaggcagtagacacgggacaggctttattatttatttttcagcatgaaagaccaaacgtatcgagagctgggctgggctgggctggtgtggctgctgaagccccacagctgtgggctgctgaagtcagctccgcgggggagctgaccctgacgtcagcagaccgagaccagtcccagttccagggggaggcctgcaggcccctggccccttccaccacctctgccctccgtctgcagacctcgtccatctgcaccaggctctgccttcactcccccaagtctttggaaatttgttcttttcctttgaagtcacattttcttttaaaattttttgttttgcatccgaaaccgaaagaaataaagcggtgggaggcagggccattgtgttgagtggtgggaaggttgccgtcctggctgcaggacgcctctcggaaagagatgttcacgtcccagtgggtgtggactcttctcttcatgatacggatgtgcggaccatcctcctgcttcaagcctgccgccgccacaggtggggccactcccgtcgctgtcaccatcgctggcagagaagctgggagttcgctccttcttcaggttccgggcggcaggcagggcgactgtcctcttgtctgccagccgcaccggttcaccggggaggatattcggcagcccgggcagtcgcagatcggaggatgcacctgcaggatccccttggacataagcgtcttcagacttttcccttccgagcggagggagcggcccgcgagccccaagcgctg

SEQ ID NO: 487263 - DNA, 977 bp, Homo sapiens
ctgctcctcactggaggagcagcttccttctgggactggacagacttgctccgctcccagcggcctgacctagaaaccagagcaaacagtagaccgaaacgaggtgaaacccgatcgggccagcggcgagctcaaaatcagacttcaatagaaggaacagacgggggagcaacaccatggccgcgtgaggaggaggctgatggaactagaagcgtcgctcgcggcgcaagcaacaagagctagcatgcccttctacgagcacgcgcacgacgggcgcaccagaaactagccaccggccatgacggtagccgagcagggcgaaggccaggcacttacgagcctcggaatacactcgatctacccctgtctctaaggagcaggtgcaagacgtcagagacacggcatagcgcgacacggaccgccggacactgacgagcgcaccagccacagacttgcccgaagagacgacagccgtcccaacagactgaaagtcacgagcacctggaatacgaccgaggacaaacagaaaccaaacacaacgcagataacacaacaacaacactacccaatacaaaataaattaccaaacaaaatgcaataacaaaacataaataacaccaaacaatcaaaaaacaacaaataccaaaacagtaggaacacacacaagaaaagagaagcaagacagaacaaacaaaaccacacaaaagcgaccacaacaactaaagttacaaacacaaaaagcaaacaaataaacaatagagaaagcagccaaacacaacagaacagcacccaaaatacaaacacaacgcacaaaacaaaactaatgaaagcaaaccaagcgtagaacacatacatgacgactagaaaaaaacaacaaaagacataaataaaacctagaaaacaacacaaagtaagaaaagacacaaaacaacacacaaacacaaaaaaaaagaacagagacaaaaccactcagagat

SEQ ID NO: 487264 - DNA, 202 bp, Homo sapiens
cattcctcctcctccttctcctctgcacccagtgcacctccagccagctttttttccccgacactgcacccagaccttcacccggacagtttgaagccagaggcccgggagcccccaccacagaaaatgtcagaggaggtcagggcggagccacaggaggaggaagaggaggaattcgcccaggaggaggagaaatccgccc

SEQ ID NO: 487265 - DNA, 1332 bp, Homo sapiens
  misc_feature (43)..(43): n is a, c, g, or t
  misc_feature (64)..(64): n is a, c, g, or t
  misc_feature (66)..(66): n is a, c, g, or t
  misc_feature (79)..(79): n is a, c, g, or t
  misc_feature (91)..(91): n is a, c, g, or t
  misc_feature (99)..(99): n is a, c, g, or t
  misc_feature (126)..(126): n is a, c, g, or t
  misc_feature (143)..(143): n is a, c, g, or t
  misc_feature (154)..(155): n is a, c, g, or t
  misc_feature (161)..(161): n is a, c, g, or t
  misc_feature (175)..(175): n is a, c, g, or t
  misc_feature (181)..(181): n is a, c, g, or t
  misc_feature (202)..(202): n is a, c, g, or t
  misc_feature (211)..(211): n is a, c, g, or t
  misc_feature (215)..(215): n is a, c, g, or t
  misc_feature (283)..(283): n is a, c, g, or t
  misc_feature (289)..(289): n is a, c, g, or t
  misc_feature (292)..(292): n is a, c, g, or t
  misc_feature (298)..(298): n is a, c, g, or t
  misc_feature (307)..(307): n is a, c, g, or t
  misc_feature (951)..(951): n is a, c, g, or t
  misc_feature (963)..(963): n is a, c, g, or t
  misc_feature (972)..(972): n is a, c, g, or t
  misc_feature (990)..(990): n is a, c, g, or t
  misc_feature (1087)..(1087): n is a, c, g, or t
  misc_feature (1141)..(1141): n is a, c, g, or t
  misc_feature (1166)..(1166): n is a, c, g, or t
  misc_feature (1168)..(1168): n is a, c, g, or t
atgcgctacccggccggccgctggataccgcggccggctgcgncccggccgccctttcccgccntntttgccctgcccngttatgccgcgnccgccccngcgggcttctcggcgcgagggctcttncggaccctgcgccctangaactggggtnnccgccnctgaccgcggccgnggcggngggcgcggcggcccgccgccnctcggcggntggngccccagacgcagaggcggggctggcccctggggagctgcagcagctggcccaggggccggaggacgngctggnggntctgcngctctcagnggacgactgaggcagcccatctggggggcctgtaggggctgccgggctggtggccagtgtttccacctccctggcagtcaggcctagaggctggcgtctgtgcagttgggggaggcagtagacacgggacaggctttattatttatttttcagcatgaaagaccaaacgtatcgagagctgggctgggctgggctggtgtggctgctgaagccccacagctgtgggctgctgaagtcagctccgcgggggagctgaccctgacgtcagcagaccgagaccagtcccagttccagggggaggcctgcaggcccctggccccttccaccacctctgccctccgtctgcagacctcgtccatctgcaccaggctctgccttcactcccccaagtctttggaaatttgttcttttcctttgaagtcacattttcttttaaaattttttgttttgcatccgaaaccgaaagaaataaagcggtgggaggcagggccattgtgttgagtggtggctcctggagatttgtgtggccccacccctacccccggcaacctcaacacagaggctgggaagggtcgggggcccctggaagtagagccaaggtcccattctcctgcttgggtgaagtttgaccggcaagggcgtgnccccctccatanggggacgtngccgtcgtgggggacaanggctgctctcctgtgccgagttctcgctccggggcccgcagggttggtggctgcagtggcagagccacggggaagctggccacgtagaaaactcggnccaggcgcctggccacctgggcccggatcttgagggcgggcccagcttcagccnccatgttggtcagcaggtgctcctncngtcagcagtggcaggatctccccgaatcggagtcccctggctctcctgaagaaccccgagttgtaagtacttaaagcagccagaacaggaccacccacgaagcatgcagcacgtcatccaagggtacacttagagaacttctacggggctggggcctcctgcgc

SEQ ID NO: 487266 - DNA, 441 bp, Homo sapiens
gtgtgcctgtagtcccagctacttaggaggctgaggtgggagaattgcttgaacctgggaggcggaggttgcagtgagccaaaattacgccactgcactccagcctgggcaacagagcgagacagtctcaaaaacaacaacaacaacaaaaaccctattccttgcctttgtaggagtcaaaataaatgaacttcttttttctttttttttattattatactttaagttctggggtacacgtgcagaatgtgcaggtttgttacataggtatgcacgtgccatggtggtttgctgcacccatcaacctgtcacctacattaggtatttcccctaatgttatccctcccctagccctccatcccctgacaggccctggtgtgtgatgttcccctccctatgtccatgtgttctcattgctccaaaataaatgaatttacacaa

SEQ ID NO: 487267 - DNA, 123 bp, Homo sapiens
ctagaggatcctttcaggcagcagagcactgagaaaaaggaggttgaagtctgcataactgtcataacctctgcttctcctgctctgtaacaaaaccacaagcagtgaagagtcatggtcttg

SEQ ID NO: 487268 - DNA, 1105 bp, Homo sapiens
agcggggcagtcgctcaagcgaccgcggcggtagacacgagcggcggcggcggatcccagagggcggcgagaaatgcgggaaacgtgcgcgcgggcttgtggcctgcacgcgggtatggcgtccgagtggtgcagtgctgggcggtagggtgggcatgtgccgttggggtccttagtgcagccagtggctgtggccgtctccggacccgggcctcagtgcaatcgtgcattcgggcgaggctgcatttcggcgtgtcatggctcaataggcagctggcgtctcgtggccggttgcttgaggaagcgttggcgtgctagacgggccggagtgaaatctgccggcttgactaggagcgagaactgacgagtgactctcactgtggattccctcgactctggggaccctacgcttaggattattcttggaggcaggttacttacagttcttgtactagaaagggcttgtcgtacgagagaatgtgcccctcgcaggtaaagtaattacctcccacaatggggttcaggtcccacggggttgaatgctccggtatcaagtccttgggacgtgccatgcgcgatggtgaaggccccaaaggatggatggttctatggctcctcgcctaatcgggtgtaaacagaatgtcactgcgtaggatgcccatgaggtttctgtaggatccctcacaaggtagccccttctcttcttatataacctgtggcgccaacatcctccttgctgaattgtagtctcagcttctcgggctggaaagacgtcaaggggaaatcccgcgggatcgagaggtaatctgcatgcttgataaacggaatgtttcagttctatacacctgcgaaagaaaggcaagggaagcaccctaacttccgggcgaggaggtaagcccgatggacgtgggtgggaccttgcttggtgaaacgccagtgtggacctggcgaccaaatcgagggcgctagggttttatataggacgcccggggaaacgtttaggtgggcctgactaggatacctgaaccaaggggttgctccttagcaaatcgttatttttcgcccggagaaacaccttgagtgccctaacgggaggtcccaaagg

SEQ ID NO: 487269 - DNA, 139 bp, Homo sapiens
tgaaggcagtgagcaaaccatgttcgtttagggctcagcagccaagtacagaccaagagggtaaaaattcacacacacgcgcacacacacacacacacacacacacacatatacacatatactccttctacataaccta

SEQ ID NO: 487270 - DNA, 1506 bp, Homo sapiens
  misc_feature (23)..(23): n is a, c, g, or t
  misc_feature (346)..(346): n is a, c, g, or t
  misc_feature (433)..(433): n is a, c, g, or t
  misc_feature (1182)..(1182): n is a, c, g, or t
cccaagccctcctggtgtgggangctctcgtgggaggcggtgggtgccagacatcaccaccacctccttctattgcgggggggtccgaccctgcttcgactgtggcggggggcctcgctgcgctggaacgaacccagccgtgttatggcagcttctcgggggtgctttcgataagggagaagttgctgtctctccagagcagggtttgtacacagaccaccgccgtctttgttagaaactgtgtggtccaccaagaccgtcttttttgaggccgttgtttgttaatgtaaaaaaagtgtgtattgtaacgtcgggtgaaataatagggcagaattctgctgctgtngttgtgatggggccacgttgtagggggggtcctccgcccccccagcagaggcccgcccttgtgtgatgtagagctgcgtctgtgtcnggcgcctcattttgggggcgcttattttaaactattgggggggtttctgaacccgcaggaaatgggcccctggccctattgtgtggcccaccacccccattgtgcaaagagctgtaggggctcccccccagagttttaggggcacctcgtccttcgtggaaagagccccttgttggctctttttgaaaccacactatggtgttaaaggagcacatttgtctcccgggacaccccacataggggtccttctctctctgcggggttttccgacacataagtgtttacacacagagacatccccgccccttcggggggcccgaaagagggtctcaagaaagactttgcgcctttctttgggggggagaacactcgtggggtctcataggggaacgagagggagagagtgcgccacagcccccacagagactctctgtgccataagccgcgtgttctagacacgcccacaaagagtgttctgtgtggccacatgttcgctacacacaagcccacacgcctcttgctgggctcgggtgtattttccctacttcgcctcttggggataattgtcgcacccataatttctggggagggcacacagtgtcttccataatgtggggagagccaccttgttcttctgtgacacacaggggataaagctttgggggggtatttcacacagggagacgcctcgtataaggtgcgcgcctcccttcttttgtcttgttctctctcacaatcttatatgcaanagcgcggcgtctctgtgcccgccgagatctacatctctccctggagaatgcacacagagagggcggcgcctctcttccacagcggcgcttgggccggggagaggggaccacactccacgttcttctagcactgggcctcgagggtatatggggtaatgtgacacatcgtggagggccacgggtaaaggtgaaatggggaaggactgggagggaactggtcgttgccctttggaagcttggtgaagagagagggtgggcctagggcattggcgagtgccacatttgcgcaggtttggaaatttccccactaaatccttttgttta

SEQ ID NO: 487271 - DNA, 1247 bp, Homo sapiens
aagcatcgcctgacaacctcagctacacctgccggtccaacctgtgactgccagatcgaccagcaccacccgggaaccatgtgccagtactgcctgtctcaatgaagtgcttcctgggtgtggcatgaggaagtgaggctggtgcagctgctgtgcctgcatccctgcactcgctgccttgggtgcctgtggcctgcctcctcgggcagcccccctgtgtgctctgtgctgctggctgtgcagttggctgagctggtgtgtgagacctccttcccgtgtggcatgcctggtgtccgaacttgatctgctgcagctagcgtgcgctgctagatgccactaaccctttgctgtgctgtgcactggtgaacaggctattctgtgcgcaagtggtggttggctgtgcttgctgtgctgtgtgactgcggtgttgcttgtgtgccattctgaccaagccgtttgtgcggatgccttgggcatggggcgcgggctttgctctttacaggcacactggttggacgttggggcgcgaccacaggcggccctttctatccccgaggattgcctgggtgggcctgaaccaggtaggctgctaggtagcggcacttgagcttggaggcagagcctacttcagttgcttagaaaccggcgggtggcaccggcggggcacggcttgccacccgtgaagcaccacacgtggcgccggattacacattggcacggtcagaccggggagccgtattcacagcgtgccagatgtccactattgggcccgcctgaaggctgcaggcccctgatggggcgtgtctcaagtgcggaacaccaggtgatgccggctgacgctttacccaaggtagtcgaacttgtttgtgaccacaacgccgttgtggtcaccgcccattgcacaggggtagcgaaactccggtgcacatggacagtaagtggcgcttgagcctctagcggggccaatacgggtcgtgctcagttcaagagagccgcggaaacgggccctggctgtgtgccatcgtacaagaaagcccgggcacagaacgcggattgaagaaggccctgccaatgcgaagaaaagtgtgcgcagggctggagcacctcaacacgaaaggtaatgttttgccgagggcagtgacagacaagcccaggtcacccaatgccacagaggacaggcaaaacccggggcggagcagatgatatgtatttaggtgtcaccctagggccgcttgcggacagcaggg

SEQ ID NO: 487272 - DNA, 746 bp, Homo sapiens
  misc_feature (406)..(406): n is a, c, g, or t
agcggcttgccaaaatggcagcctccagtcgcgcacaagtgttatctcgtgtaccggggcgatgctgagagagagcaagcgttccagcgcctacgattacagaacatatgctgtcaggaggataacgagatggcttcagtagcaaaatgaaatatgtagaaggatacctgttacaaattcgaacgcctagtggataaagcgaagagagagcttggagtaattcgtcgagcaggtccacattggccaactgtattcaatctgatcaagctagatcatggcagaatcagagacgattgcctcgagcgatctaggcaaagtccgtgggaaccagcgcaccgagtggcggccaggacctacttcagcatccactctcgtgatttgagctgggggctcccaaagacgcagnctgttacaagtagacctatcttgcgctggctgatccgtggtggagagcgtgagtataaggcaaggtgcagcattgtgcatgtctgtgtgcagggcgttagtgaaagaaggaactgctgatcgtatcctagggtatcaaggtgtcagaatggagagactggagttcgtctcagaagtagtgctgtgatgttaccacggtctcccctgcaccccattcctaccttgtagctcatgaccatggtgtatagcatttctacacttcggtatcttggtccttggcaactacaaacgaatgatctccccggaccacacgagaaacacaaagcttcttccgaccgccg

SEQ ID NO: 487273 - DNA, 143 bp, Homo sapiens
ccatagaaagaaggaaaatatttattccaaaagagggcagaaagaagaaattcatcctgaaagaatagtttggtgcgattctgttaagatggctcttccctctgaacgtgctctcctactgaccacccttcggtggtcttctc

SEQ ID NO: 487274 - DNA, 205 bp, Homo sapiens
tgatagagtgaatgagccaccatatgatgatatgaggtaaaatatagtagagggagtatagggctgtgactagtatgttgagtcctgtaagtaggaaagtgatatttgatcaggagaacgtggttactagcacagagagttctcccagataggttaatagtagaggggtaaggcagacggttagacgaggcttgctacgaagtca

SEQ ID NO: 487275 - DNA, 173 bp, Homo sapiens
gcacggtaataattgtattaatagtagagacggttgtaatagcatgttcagccagcctggtctcaaactcttgacctcgtggtgatctgcccacctcggcctcccaaagtgttgggattacaggcgtgagccatcgtgcctggccagattggtagtttgcaagtattttctcc

SEQ ID NO: 487276 - DNA, 449 bp, Homo sapiens
gcaaactcttgctcttccttgaaggcttcttcctccaccacctcctccaggaagccctccctcctcagcccagctggaggagatcgctccatctttcctgccgctcccactcctagctttgggtctcaccaggggtgcctggtggtgcagccgtgagcagagctctgttcccacaagccgggccgagctcccaaggccatggctaccacagctctcttgccgctggccaagttggtcagccctagggcgagggttccagtgccttgatccaacccccagctggttcggtggcagaggaggacaagggtcacaagcacacacacaatcctgagcctgggattcctctctgaaaaagggggtggtgctgaggccacaaaagcagctgccagagcctttttgaaggggttgagctctgggcctggtctgggtcctgggtctggggaggacct

SEQ ID NO: 487277 - DNA, 229 bp, Homo sapiens
ggtcctacttttcacagggtattaagacctgaaatgcagaggttttcagatggttcttgtccaggatggaatacatggttatttcctgaaatcttcgttgcattattttccctcacactggtagataatcagaaagattaccacacctccatgcataggatgctgggttattaatctggggaagaaattttttctctcccttttatttgcttaaatccagaggtagata

SEQ ID NO: 487278 - DNA, 283 bp, Homo sapiens
  misc_feature (147)..(147): n is a, c, g, or t
agagatccccccgcggtagtagctgaaggaatttgaggggaagactttagctgtcacgtcaccaaatgaaggccgtgaaacttccagaggatgaagaagagaaaaagaagcaggagagagaaaaaaacaaagttgcgagaacctctngcaaacatcatagaaagacatacttggagaaacaaagttgaaataggtgagttgtgtcaacacctggtctggtgacgatctccattgctggtattggtcacagagcacattatggctgggacatgcaaagcatggc

SEQ ID NO: 487279 - DNA, 343 bp, Homo sapiens
cgatctaatgaccaggaggagggacacttatgaacacattccaagtaacaaggcctggagtgccattggctgtggactgttcaggcagggaagaacaagaccactcttgtattcggggcaactaaggaaagaatcactgacttgatggatgcacactgcactccagcctgggggacagagtgagacttcgtctcgaaaaaaaaaaaaaaaagttgacaggatggccagacccaagtgggcgtattgagtggtggtgctaggattggaacccaagcgtgattaaaaccctatgcaggccctttcctctatattgtactgcctccttaacaaaggaagattgatt

SEQ ID NO: 487280 - DNA, 427 bp, Homo sapiens
gctccggttcacaacaccgaggagctatcgcctccattgcatgaacaggcaggcaagctacaaagcctagaccttacatccgctgccgaaatgacctgtagaaacacccccagggacctcctgtaccgagactgaatgtggcgggacaaactgcagaactgacgaaggagagaggaagtgtggagagcctggctagtgaggactaggttactagttgcacacaacgcctggacaaaagccatggacttgagactcaacagatgtcctgagtgccctggctgaagtaggacacagatctccaagatggtctctgcagcaaaactgaggacagatgaggcaaaacaaagtgctgaagccaatcctgtagacgacaaatgctaccaaaggaaaactgggccacgagcaatgaggagctgagcaatcttat

SEQ ID NO: 487281 - DNA, 274 bp, Homo sapiens
atcgatctattgtgatatatatctctctattcaagtaacagaccgtgtaaacagtaccatggtggtttgttgcacctatcaacccatcacctagtgttaagcccacatgcattaactatttttcctaatgctctccctcccccgactccacctcccgacaggccccaatgtgtgctgttcccctccctttgtctgtgtgttctcattgttcagctcccactcataagtgagaacatgcggtgtatggttttctattcctgtgttacgtctaggt

SEQ ID NO: 487282 - DNA, 128 bp, Homo sapiens
tgctattcattacaatctatcagatttctttatataaaagacattagaacatgagaagacagataattattatgttgagggtttcgatgagggtttcgagacagggtttcgatgaagggtttcgatga

SEQ ID NO: 487283 - DNA, 347 bp, Homo sapiens
  misc_feature (71)..(71): n is a, c, g, or t
  misc_feature (85)..(85): n is a, c, g, or t
cgtctgctccttggtaggctaatcactgctctctctgagttgtatgctttccaaaaatcagttgtatttgnccgggcatgggtgntcacgcctgttgtcccagcactttgggaggctgaggtgggcagatcacttgaggacagtccaagaccagcctgccaacatgatgaaaccccatctccactaaaaatacaaaagttagctgggcatggtattgggcccctgtagtcccggctactcaggaggctgaggcgggagaattgtttgagcctaggaggcgggggctgcagtaagccaagactgtgctgctgcactcctgcctgggcaacagagcaagactccatctc

SEQ ID NO: 487284 - DNA, 119 bp, Homo sapiens
ataccaagagattgatcatatacgggtagagctgtggaaatcttgaagtttattctatttgtagtgtgtttaggttcttcttcttcttcttctttgattttgtttttttttgtattttt

SEQ ID NO: 487285 - DNA, 164 bp, Homo sapiens
ggttagtggctcactgtctagtaatcccagtttctttggtgctagctgcaggctgaatcgattgcttgagctcaggattcttgagatccagcctgggcgatacagcaagattccattgcaaaacataaacaaagacacagatttttaagttaaggatcccctag

SEQ ID NO: 487286 - DNA, 280 bp, Homo sapiens
tgatagtcttggttctgtctttgtaaacagaaccacatcgtaaggctctggctctggtgtcgataactcagatatgtgtggtgctcattggccctgaagtgtgggaagccttggttctggtgctcagaactcttgtgacttcctcttccgcttctcccaactctgaggcccagggactgggaatcagtggcctgtgttgggtttggacccggccctgccacggctggcagcctgaccttgaacacatttcctaacgtagctgagtttcggttttctcttc

SEQ ID NO: 487287 - DNA, 789 bp, Homo sapiens
gcggctgagcgcagagaagggccgcctggaccgcaccctcacgggggctgagctggagctggcagaggcgcagaggcagatccagcagctggaggtgtccacactgaagggccagctgcagcaggagcttcgaaggagctcagcacccttctccccaccctccggccccccagagaaatgagctcctgctggcatctggagaacacccctgatgcctgggacaggggaggacccttcattttggacagccccaccacccccagagacccggatcccattgggggacatcaagctggggatgggactgaggaggacgcatctgcgtggacagtgactgaggaccgggtactccagctccaggcctggcagaggcttcccagcaacaccttgacaggtccagccacccctcttcataggagtgagccacaggctaagatcatttaaagttccatcacttgagaggctgagccgtagccacggatgggggagagccctggatctcgtggtcagcccttggagcatgggatcgacgggaaacgacggagggggaacagtgcccagggcaggggtacacgaggccccaggcccatgaacttcggctacccagagaatctcatcgcgacgttagtctacagagccaatgtgatcgggaaaattcctacagcagtggctcaggagtcccaggtactatgactaccattcataacaacggtaacatggtacagaaacgtggtatatgggagatacaaaaccactgatgtacaacgacaatacagcaaaaacgagcgc

SEQ ID NO: 487288 - DNA, 235 bp, Homo sapiens
ccgccacgacacccagctaacttcttgtgtttttagtagagatgggtttcaccacgttggccaggctggtctcaaactcctgacctcagtgatccacctgcctcagcctcccagagtgctgggattacaagcatgagccaccgcacccggtctatcatatatcctaatcagcatatcaacattagtaatatgcatgatgcataccatctagatttattaatagatgatactcact

SEQ ID NO: 487289 - DNA, 312 bp, Homo sapiens
tatgcacacctagggtcagttctgcaggtggtaagccatttaccaagatagtgtaggtaaagaagggcagatttattagagaaatgtgaagatatgttgcagtgggcagctcagcagagaaggggctacctgcaaagaggcaagggctggaggaaagttttatagggtcctgctgaagggtgctacgtgtggaatgaggtcattgtgcccgcaggttgtttgtgattagctgtctctaacaattgttcatacaataattgttcattattgttctcaacttggggctctccccaacctggggacccttcctta

SEQ ID NO: 487290 - DNA, 448 bp, Homo sapiens
cgccagcagcatcagagcataagagcgtgcgtcaccgttcaatcatgccagctgacagcgacctagacatgtgagcaaagtctgtctggctgacgtgtaacctgtcgaagagatagcgcgacgcatgagtcatgtgagagtggaatgtggcgcgagctgctgagcgcgtccggtcagctgtcacagtgtcaggggatgactcgcccgagcgcagtgttccactatcatttcttgtgccgccgttggacggctccgaagggtgcaaccaggttgcccttaccggtggtcgcgctcgtcggggcccgcgccggtgtgtcgcaggctgaccaaccgctgaagtagcggcgttcagcgcatcagttcgggcgaagcgagcgttcgcttacttgttggggtgacttgtgccgcccctagggtgcgtcgccgcggttcagtcgggctgtgtctg

SEQ ID NO: 487291 - DNA, 1127 bp, Homo sapiens
actgtggcattcagccaggccccagtgttaatcgcgtgtttctcctcccccgactggccactggatgggagcaggggctgaagagtctgggcagggctgctagggtgagtagacagaacaggatgagggtcaccgctatttggtttccatcacatgccggcatggatcccatgaaggacccagtcagctgcatgatgaacgctcaggctcatggtcaatcagtcatacaagcgcgagtcgggggacggacgaacagacgcgcattaacactgatggcactgtcgaggcaggccccatgtcctcgtctgtggcgaggctctcgtgtctcgacgatgcccgcgagcaagggccctgtggagccgacgtacacctgcttcggccttctcggcagcctcgtcagcacgcttccctagaaactcggtgacgcaccggctcgaggctcgtctgcgcatctccacgatcccccggcgccgagaacgggcgcacgtacactgcccgcgctcgcattgagcacccgcaatgccaggtaccgacgtgcggcgcgccaccaagcccgccccgtcgaccatcccgtgcaccggcgtgccaccacaaggcccgcgcactccgacagcccagtaccgaccagccccgcgggaaaaccacccgccccgtggccacagcgcgcacattcgatccgcctcacgcgacgaccacagatggcacagctcgccgcaacagcgggccgacgagccaggaagcctccagcccgtcccacggcaggacgcgcagcaccctgtcacagcctcgcctgcacgcccctcacgccaaggccgctgaccggatcgtccgcagtacaccgcgaagccggacccgcacacgtgccacgcacgaccggcccgcgccccagacggaatgacgccacgagactcaagcggcgcgaggagacgatacccccgatcccgtcccccccactggcacgccccctagaggcccagcccgcacgcaccagcacaccacaacccgtgccggcactcgacgcaccgacgcgcacgcgacacagcgcgcagcgacgccgcacaagcgtccgcacgcgccacggtatcgccggacacaccacactgcgagcgccaacacgacgcacgcca

SEQ ID NO: 487292 - DNA, 715 bp, Homo sapiens
gcatatttgccggcgggcgcggtggctcacgcgtgtaatcccagcacttgggaggccgaggcgggtggatcacgaggtcaggagatcgagaccagcctggccaaaaaggtgaaaccccgtctctactaaaaatacaaaaaaaaattagccaggcatggtggcgggcgcctgaagtcccagctactccggagactgaggcaggagaatggcgtgaacccagcaggcggagtttgcagtgagccgagatcgcgtcactgcactccagcctgggtgacagagcgagactcagtctcaaaaaaaaaaaaagatgccggtttggccaaattgaagtagccttctggtcactgggggcttctggtgctgaaggcggctagggggtggggtgggagatgctgcctgagtacaaaacatgctgtaccgcgcacggtctggtgtcacttagatgaactggtgcctccgagtcttcctgtgtccagtcgttaaggtcaccgagttagtccatgtaataggcataggaaaggagctggcccacaataagcggctcatggaaggctcattatttgaggtacagaaggagattttccgaggttaaatccggttcttcctctgggtgggttttcctaccactgtgattccttcgtggtggctagataatgttctgatccaccattttccatgtctagcacgtagttgcatgaggggcagctttttgaag

SEQ ID NO: 487293 - DNA, 755 bp, Homo sapiens
  misc_feature (195)..(195): n is a, c, g, or t
  misc_feature (200)..(200): n is a, c, g, or t
gaagaagtcagaggaataattatcagataaacctctttctctctgatcaccctcctttctccttctggatagccttccacctggccaaactcagcccataacactcaaaagagcgaaggagatcgattcaagatcttctttgggcagctagagtccaacgtgattagtagaattgttggtgaactgaatcttggnatagnggctagtagcatgatgcaatcatctccatcgatgagaaacctcatgggtccatctgtcattgtctactaactagaaatagatagttgactaggcataactctttgtcaagaccaaattgtattagtagctagtggtgtggggcaacaaatattcattctgcaatgatttgaatgaggaagatggatgagcaatatatggatgaatacaacggtctagttctgactgtgaaagtgagagagtgatgggacaatagccagaagagatgtatggcgcaattatatggcgttgttcccgttatagataagatcttatgatgtctataaatatccaatctatattacagctgattgacgcaaccatgaatcgcatctctaaaagggtagacgctaggcatacaggaagtacttattctgtgttacccgctgattagcatgggttccccatgtgcgtgaagatatggtcctctgcctagcagggtttgccattacctctttatctgtgtgttggtctttcacttatcccctgtttctgtgttttgtggtgggccccgtctc

SEQ ID NO: 487294 - DNA, 2332 bp, Homo sapiens
gtagtggtagcggctgctgtggtgaaggaggaggagcagagcggacgctggtaccaaggcctgatcatggatgaggaatacgatgtgattgtgctggggacaggtcttaccgaatgcatcctgtctggcatcatgtctgtgaatggaaagaaggtgctgcacatggaccgaaacccctactatgggggtgagagctcttccatcacacccctggaggagctatataagcgctttcagatactggaagggccccctgaatcaatgggccggggccgagactggaatgttgacttgatccccaaattcctcatggccaatggtcagctggtaaagatgctactatatacagaagtgactcgatatctggacttcaaggtggtagagggcagctttgtatataaggggggcaagatctacaaagtgccatccaccgagactgaggccttggcttctaatctgatgggcatgtttgaaaaacgacgcttccgaaaatttttggtgtttgtggcaaactttgatgagaatgaccccaaaacctttgagggtgttgatccccagaacaccagcatgcgtgatgtctaccggaagtttgacctgggtcaagatgtcatagatttcactggccatgccttggcgctctaccgcactgatgactacctggatcagccctgtcttgagactattaaccgcatcaagttgtacagcgagtccctggcccggtatggcaagagcccctatttatacccactgtatggcctgggtgagctgccccagggctttgccagattgagtgccatctatgggggaacatacatgctgaacaaaccagtggatgacatcatcatggaaaatggcaaggtggtgggtgtcaaatctgagggagaggtggcccgctgcaagcagctgatctgtgatcccagttacatcccagaccgtgtgcaaaaggctggccaggttattcgcatcatctgtatcctcagccaccccatcaagaataccaatgatgccaattcctgccaaattatcatccctcagaaccaggtcaacaggaagtcagacatctatgtgtgcatgatctcctatgcgcacaacgtggccgcacagggcaaatacatcgccattgccagcaccactgtagagactgcagaaccagaaaaggaagttgagcctgcattggagctgttggaacccattgaccagaagtttgtggctatcagtgatttatatgagcccattgatgatggttcagagagtcaggtgttctgttcctgctcctatgatgctaccacacactttgagacaacctgcaatgacatcaaagatatctacaaacgcatggctggttctgcctttgattttgagaacatgaagcgcaaacagaatgatgtctttggagaagctgatcagtgattgctgactcccctcctccagcccctgttcccctctccccaacttgtatgtccttctctagggcaggggagatggtatggctaggcatccttgtttccagcatcttctgcttcccctaccacattccaaatcacccaccttattgattttattcactgaccatatccttaaccttagggatggtttgggagatgggagttggatagtatcctctttcttggtctgtccttgttctagggaaagagaactttgtgtgtgtgtgtgtgtgtgtgtgtgtgtgtgtgcgcgcgcgcgtgcgtgtgtgtacgtgtgtgtacgtacgtgtgtgtgcgtgtgtacatgtgtgtgcatgtgtgtgtgcatcgtgcacccccaattttgctgtttgggaaggagtggaggaaaagctgacccccacccccactgctcttagtcccaaatgtagtggcctttggagatacccatctcctcccccaactcttaggtgttggagagaagggaccctcccagcacaaaattgcattcctcctcctcctcctcctccttataatttattctaatttattaactttggagtaattgtctgagccctcagcctttctgtgcagcctagggctgtagagtgagctgccctggcctctcccagtgctggcaaagcctgggatgggagaagatttaggtgtgaccccctctggaggttgatctgttttgaatttcttttgtgttgtgttcactgagaaaaagtaatgtgagcaaagcagaaggaggtaggaaagtggatccaaaccccagtgtaccctgccccatgccttttcctttagtggtgggaaacccttaccttgcaaagtgaatgtgtccccttccccaagctctagtatatttcacagaaaacaaaaacctcccaataaaactattgaaactt

SEQ ID NO: 487295 - DNA, 293 bp, Homo sapiens
ccggtcaggcccagctcgtacaccgcgcgctggccgcaggagctgtcgccgtagacgtagccgacgtaggcttgctccacctggtcgtaggggatgccggcgtcggccagggccttctgcccggcttcgcgcgccatctcgtaatactcggcgctggcgccgggcttggcgaacttggtcatgcccacgccgatcacattcactcggttcttcatctcgcgctcctcgtcatttcgattcggtcagatcagcttgctgaacacggacagcccgtgcgccaggcgcacatcgcc

SEQ ID NO: 487296 - DNA, 98 bp, Homo sapiens
tggttcttagaaaatctgagacacgtgaggccagacaagcaggccggggctggtgggatggggtgcgtcagggggccggtctgcacgcagctcttgcg

SEQ ID NO: 487297 - DNA, 400 bp, Homo sapiens
tatccatatcacccgtgttatggtcttctcaaagtaaggctgtcttttattcctggttacgcaatgagaaaagcccctaatcctaacaaagccccttagcagcttctgaaattttagcttctctcagaagtgaagatattttagttttaacttgaattacctataaattcatttccataatgtataacaaatctccttgagagcacagatctgtcttatgcagccttctacttactaccagtagtatccagtacagtgtcttctacacaccagacgatcacgactgatggttcaagtgtataacaagaaaaccattttaccaaattatgttgctagaccaaccaagaactcaaacaaaagcagaaatgaaaaaggcgaatttacaactgacactaacaga

SEQ ID NO: 487298 - DNA, 475 bp, Homo sapiens
gatacaattcactcgtacccacaccactgagtcaaagcaggaatcaaaagagaaattagaaaatgttttgaactgaataacaaaaatactacataatttgtgagatgcagctaatataatgcctacacaaaaatttaaaactataaatgtatatattaaaaaaggtccaaaaatcaatgacataaagatctaacctaagacgctagaaaaatttagtcactgccgtgtattacagctaaaaaagggaagctagaaaaagatgactaagttaaaacgaagtgaaaagaagaaaatagtaacaattaaaaagagaaagaaataaaatccaagtaacagcaaaaattaacgaagtctaaaaatggattctttaaaaatatcaacaaagttgataaaacagaacaattaggaaaaaagagaaaacaaattatccataacagaggtagaagatggaccaccccctacaattcttatagac

SEQ ID NO: 487299 - DNA, 494 bp, Homo sapiens
  misc_feature (11)..(11): n is a, c, g, or t
  misc_feature (80)..(81): n is a, c, g, or t
  misc_feature (369)..(369): n is a, c, g, or t
  misc_feature (374)..(374): n is a, c, g, or t
  misc_feature (383)..(384): n is a, c, g, or t
  misc_feature (481)..(481): n is a, c, g, or t
tggtaacaganactcttgacttgttcatcatgactatgtatcctagaatagactcaacactcaagaaactatcacccatnnagaacattttccaactgtggctcaaaacagagactgagatttgacaacaaaagaaggatcagacagatgtgatgttgctggttttgaagactcaagaagagccatgagccaaggaatgagtgcaacacctaaaagctgaaaacggcaaggagccggattctccccggagcctccagaaatgatcacagccctactgactcctaaatttagctcacgaagacctttgttagatgtctgatgttcacaattacatgaaaacaaatttgtgtttgctaagccaccaagagnacagnaatttgttnnatcagcagtgaaaaccaatagatttatcttactttatttttacagcttgtgatataatttaccatttctttcttgaattgatctcccatatttattntatatttccatag

SEQ ID NO: 487300 - DNA, 961 bp, Homo sapiens
cccagctcatgggggacaccgttgatccgtcacatcgccctggctgggcgtttgaatgaaagcgcttcgtacccaggcagcactatgtgtacatgttcctggtgaaatggtaggacctgtcgagagaaggtggatcataccggagctgtcagcgagatctacgagttccactagatagccttaagacagatgatgttcccctattgagagcgacgggggcgtatcaagtccaggagaacaggatcatcccaccattctcctgagtttccctaagtggatttgacgaggcatgtcgggccaagtgcgagtaaccgtgcagggctaccacgttaacgcgagtgtactgcagggacgcgtcattgatgctcgtgtgcctacccaaggaatctcgccctgtgtgatctccacactcgtctcctacgatcgtgtcttgcagaggatgacgcctcgtgatgaaccatccaagtttgcacccacggagcaaaccaggaccaagaacagccagtacgacatagcttgatgctccacagatggcgaagagtacgcgctgaccagagcatcaaccgagccccgagtcatctctgcagaacggtaccagcgccaattcgccaacgtacgcatgaaggacctcgaggctccggacatggctctggtccacgggggcgacgtggaaggcaggatcgtaaggacgatacgaggcgaggaggcgggtcaaggaaccttccacaaacgtgtacggggggctacccatgtgcccgctgtggtggcctcagcggaattcccagcgaggcctacaaagccccgcctggtccaaaggacttcgagggacaaggctatggcccccttggggaaggaggaacttcccggggatactggatagagggggggccttacagtgtgccttcgcgctagactggtggggtacagccctttcatgtcgttaaggtggtaggacacactg

SEQ ID NO: 487301 - DNA, 482 bp, Homo sapiens
  misc_feature (357)..(357): n is a, c, g, or t
  misc_feature (362)..(362): n is a, c, g, or t
  misc_feature (371)..(372): n is a, c, g, or t
  misc_feature (469)..(469): n is a, c, g, or t
tttttttttaggagatgatctggtttattcaagtaagttctatctaattacatgaaaccttcaaattgcagaacattttccaactgtggctcaaaacagagactgagatttgacaacaaaagaaggatcagacagatgtgatgttgctggttttgaagactcaagaagagccatgagccaaggaatgagtgcaacacctaaaagctgaaaacggcaaggagccggattctccccggagcctccagaaatgatcacagccctactgactcctaaatttagctcacgaagacctttgttagatgtctgatgttcacaattacatgaaaacaaatttgtgtttgctaagccaccaagagnacagnaatttgttnnatcagcagtgaaaaccaatagatttatcttactttatttttacagcttgtgatataatttaccatttctttcttgaattgatctcccatatttattntatatttccatag

SEQ ID NO: 487302 - DNA, 405 bp, Homo sapiens
atatattaggtacataaaatatgaaagtacatcaaatatagattatatactgtacatataatatcaatgtacccgaaatatatattttatactctacatgaaatatcaaagttcaaaaccatatattatatactgtgcataaaatatcaaagtacccaaggtatatattctatactgtacaaaaaatatcaaagtacccaaagcatgtattatatactgtacataaaatatgaaattacatcaaatatatattttattctgtacataaaatatcaaagtacaccagatatatattctatagtgtacataaaatatcaaagtacccaaactatacattatatactgtacataaaatgtgaaattacatcaaatatatattatattaggtacataaaatatgaaaag

SEQ ID NO: 487303 - DNA, 190 bp, Homo sapiens
acatatgtgtgtacgcgtaacgcctgtatgtgcgactgcctcagacatgcacgtgaaaggaggaggcttctgtgtaaatgcactttcttcctcccctctttctccataagaccccaggcagaggtgggtgcctccccatcccctactttgtcactattggtttcactataaaatcatgtcatgtatctgt

SEQ ID NO: 487304 - DNA, 869 bp, Homo sapiens
  misc_feature (30)..(30): n is a, c, g, or t
  misc_feature (123)..(123): n is a, c, g, or t
  misc_feature (125)..(125): n is a, c, g, or t
  misc_feature (127)..(127): n is a, c, g, or t
  misc_feature (129)..(129): n is a, c, g, or t
  misc_feature (131)..(131): n is a, c, g, or t
  misc_feature (134)..(134): n is a, c, g, or t
  misc_feature (139)..(140): n is a, c, g, or t
  misc_feature (174)..(174): n is a, c, g, or t
  misc_feature (177)..(177): n is a, c, g, or t
  misc_feature (200)..(200): n is a, c, g, or t
  misc_feature (207)..(207): n is a, c, g, or t
  misc_feature (209)..(209): n is a, c, g, or t
  misc_feature (212)..(212): n is a, c, g, or t
  misc_feature (233)..(233): n is a, c, g, or t
  misc_feature (236)..(236): n is a, c, g, or t
  misc_feature (239)..(239): n is a, c, g, or t
  misc_feature (307)..(307): n is a, c, g, or t
  misc_feature (375)..(375): n is a, c, g, or t
  misc_feature (558)..(558): n is a, c, g, or t
  misc_feature (567)..(567): n is a, c, g, or t
  misc_feature (569)..(569): n is a, c, g, or t
  misc_feature (638)..(638): n is a, c, g, or t
  misc_feature (656)..(656): n is a, c, g, or t
  misc_feature (701)..(701): n is a, c, g, or t
  misc_feature (713)..(713): n is a, c, g, or t
  misc_feature (785)..(785): n is a, c, g, or t
  misc_feature (845)..(845): n is a, c, g, or t
aaatgtataagaatgtaaatatgaattttntatgataaaatgtttcattcattataacaaatttccaataatcctgttaattatatttctaaattttcccgcgcggagagtgtgcgtgaagcngngnangngantgggnngtgagagcgtgtgagtgcgacgcttaagtatgtnaanaagcgtgtgtggaggtggcaagngattgangngtncgagaagtctggagccaagangtngangtgggataagagaattctctgctccccacctctaagttgccagcgctccgtagagcggagcctgtggngcaacctgctcagatacatcaaacatggagagagcacgtgaaagtagaattataaagaagatcatgtncatgttaacattattataaccctacattttgtgcataaagtgtaagtgtataagcatatcaatattaaaaagcaagcaagcagaatttggaattcatccaatccaaatgcggcatcttcaaacctccatgatgctgcttacatgtttcgatcccacttaactatcttgggctgtgacaaagtnacatggttnanacggcagggatactcatctttttcagtgggggtgaattcagtgtagtacaagagatagaaagaccagtncttgctgaaagacaagtntgaatgctccactttttcaattctctctccattcttcagtaagtnaacttcaatgtnggatggatgaaacccagacacatagcaattcaggaaatttgactttccattctctgctggatgacgtgagtnaacctgaatctttggagtacgctggatagcctccaggccagaaagagagagtagcgcgancacagctaaggccacggagcgaga

SEQ ID NO: 487305 - DNA, 112 bp, Homo sapiens
gtcggaccacatgattgtccacgctccttttcttctccccttaggagcggcaccgctcacatcatgtgctgtctgctctgatcagattttaaactattccaataaagctgga

SEQ ID NO: 487306 - DNA, 322 bp, Homo sapiens
  misc_feature (5)..(5): n is a, c, g, or t
gcggnaccctggagtctatcggcgtcgcaccggggagaagcgcggagtagcccgaagtctggtgaacaaaaatcccaagcgaagggtggtcggggcaccctgatggcctgatgcgcccggaaccgacaaaaatggttaggggaatcggatataggcacggggcgtatgcgagggccagagacacgtacgagtccccagacacacgccggcctgggaggtcgagtttcctcccaggccggtttacgtcaggcacgcttgtcgagtggtacgtaatctcgcttgtcagacccggtgaagatctgacgcggacgccaaatcttgt

SEQ ID NO: 487307 - DNA, 278 bp, Homo sapiens
ttgattagataatagttactggattgaacattgtttgtaggtgtatatattgtacattgaaattgctcgagggcaataggttatgtgattaggagtagggttcaggatgagtgggaagcagaaagagaggaagtaaagtttaattatgcctttttgggttgaggtgcatgcatggcaggtggcagcatttggtgctgtgcaaattgtttcaggtcaatcagcttttctcagtcaggttcaggtctcaggataccagtagggcagagggtcaccgagct

SEQ ID NO: 487308 - DNA, 705 bp, Homo sapiens
  misc_feature (27)..(28): n is a, c, g, or t
  misc_feature (68)..(68): n is a, c, g, or t
  misc_feature (241)..(241): n is a, c, g, or t
  misc_feature (258)..(259): n is a, c, g, or t
  misc_feature (267)..(267): n is a, c, g, or t
  misc_feature (464)..(464): n is a, c, g, or t
  misc_feature (690)..(690): n is a, c, g, or t
tttttttttcttttatttaaaaaaatnncccccctcttcgggcgggggagggagaaaaaaaaataaanttttttttttttttaaggggggggggggggggggggcgccccctctctttcttttttttgtgggggcgccccccccccccgcgcgcgatttattttctcttcttttccccccccccccctttattttttttttaaaaaaaaaaaaaaaaaaattctttcctttttataatatnaaatatataaaaaaaannaggggggngtttggggggcctcgcccaacaaaaaaaaaaaaaaataataatttttttttgttgttgtagaccaacacccccacccaccgggggcgggggggtgggtttttcccccccccccaaaaaaatatttccccccctcttttttttaaaaaaaaaagggggggggggcctttttaaattttttttataaaaaaccctcttntttttgtgggggggaataaaaaatgcccccccccccccaaaagattttttccccgggttccccccaacaaaaaaagagaaaagggggggacaccccccccaaataaaaagggcggggaaaaaaatttttcttttccccccccgggggggaataattttttttgggcccggggttccaattttctttgcccataacctttatttggggaaaaggttttggttaaggnttttctgtactaaag

SEQ ID NO: 487309 - DNA, 276 bp, Homo sapiens
  misc_feature (86)..(86): n is a, c, g, or t
  misc_feature (133)..(133): n is a, c, g, or t
ctttcatctaagtgagtcagactctttcatttcaaatagaggctgaactggtttggaagcccaattcttaataaataatgtatatnctgtaaaatacagacttagtagtcccagatggagctgtagaattttntagctcagagcctatagacatttttaatctctgcattcctttgggaaattccctaggtggctaaaagttccctcttctgaatgttggtacatttgtttacagttttgtctaggtgaacaaaatcttttatttcccaatagagg

SEQ ID NO: 487310 - DNA, 252 bp, Homo sapiens
cagatcagatgtcatgcccaggcattaggagattggttttctgtctgtggtgaatagcttggctacagagaaggtagacaatatttaattaggttgttttacccaaatattgtcattttgtgtttgtgattgaagagttactttttggggtccatgtatgttttttctttcattgtttaaaaaatttattgaagtagagttgatgcacaacgtgaccatcttaatcctggggcccacgcctgctgggccgga

SEQ ID NO: 487311 - DNA, 355 bp, Homo sapiens
  misc_feature (140)..(140): n is a, c, g, or t
cgctatgtggggcccacggtccgagacaccaacactgcaaccatgcgcagtgtggagcagtccacccaccaacagccagaagaggtagaaagagggcgtggagagtggatattatagagagatgaacgaggacaatgcanatgcccacacgaggccatatgcccagtcagtagccaacatactgcaagcatggtagaatctgggcgtatgcacagtgtaggcaagcgaagtaagataaaggatgagactccccagccagtagctcgaagcaggtgccaaatggcttgtgccccattcaggggtggccctccccggaataataagttgtcaagacggtctatcatacccaatggga

SEQ ID NO: 487312 - DNA, 185 bp, Homo sapiens
ggcatgcaatccttttcaaaacaagctatgacctttatgacacgcaggcaagatgaattaaacatgaatcaacgtatttacaacagttatcacggcaagatgagacatccacaagtaggaacttctcagtaggatgacaatacttagttggatttaggagaggaatgagatctctgaaggacaaa

SEQ ID NO: 487313 - DNA, 466 bp, Homo sapiens
cagtggttgatctaggtagtctacataacttattatagtctattggtattgtcattttatcagttcaaaagatgtatgggaatatctcctttccatgcttcttccttctctgtttgtaattgtcttaaatgtctcttctatatatgcttagagccgtatcagtattataatttttgcttaaaatgtaaaatgtgatttaaagaactcaagaggagaaggaagggcttttgtatttaccattatttttgcttatcttgttctttcttcttttctgatgctccaaggtttcctttttttatagttttttttttttttttttgggtttggaacacttcctttaaccacctttctttcagaataggcctgcgggtgacaattccctttggtctttctccatccaagattgtctggatttcctttccattttggagggatactttggcgggatatgggatcccattggggg

SEQ ID NO: 487314 - DNA, 769 bp, Homo sapiens
ggggcatccgggtgctacagaccggacccccaggagcaagagaatgtgcagtatgctgggcttgactttgacgcaatcctgctgcagactggcagccctccaagtataagacccaagtgcccatggtggtcatgccccacggggggccccattcatcctttagtcacatgcctggatgctgttcccaggccatgcgttcgcgaagatggtgctttgcaggtacgtacgtagtgaagctatcgtggcgtccacgggctttggcctaggacagcatcctctccctcccaggcaatgtgggccatcaggatgtgacggatgtccagtctcgcagtgggaacaggctgctccaggaggaacactgttgatgcaagccatgtggcccttatggcgtggttcccatggtggctatcatttccgtgccacttgatgggtcaggacccagagacctacagggcctgcgtggcccggaagcccgtgatcaaagatcggctccatgttgggctccactgacatccctgactggtgcgtggtggaggctggcgttgccttgtcagcagtgacgtgcctgccatgaccgtcagcgtgtgggctgagatgctggacaagatcgcccatcagatacatccctcaggtgaagacgaccacgtgttactgatgtagggccaggaggaccggcgtgtgcccttcaaggcaggggcatggagtattaccgtgccctcaagacccggaatgtgcctgtacggctgctgctctattccaaaagcaccag

SEQ ID NO: 487315 - DNA, 244 bp, Homo sapiens
catagtgaaactccgtctctactataaatacaaaaattagccaggcatggtggtgtgtgcctgtagtcccagctactcgagaggctgaggcaagagaatcactcgaatccaggaggcggaggttgcagtgagccaagatcacactgctgcactccaggctggtgacagagcaagactccttctcagataaaaaaaaaagaaacacaattaaaaatacccacagaatttccaacaatttagaaga

SEQ ID NO: 487316 - DNA, 406 bp, Homo sapiens
cctttagagtttaagaacatggattttaaatgtgagacataccccgaattcaaattgccaaattcactgtagaatatcactgtaactttgggcaagttatccaacattctctgcaccttagtttcctcacgctgtaaactatggaatacttaccataccattacattggattactagtacacatatgattataacgttaccttgtataagacgcttaacaacatggttatacttgctcttattattaaacatatatcaactatttctgaaatggtctgtatcttatacgtgttacgtagttgggttatttattccttttagtgacacatagacataacggtgcatttaaaattcgatggagtacgattcactgatatagtgatactatgttaaaagtgcatggtca

SEQ ID NO: 487317 - DNA, 273 bp, Homo sapiens
atagtttcgtgtttatatagttggttttcttttttgtttgtttggttatttttgacggcaggttctcactttgtcacccaggctggagggcagtggtgcaaaaaccacccactgaggcctcgacctctcgggctcaggtgttcctgtcactttagcctcccaagcagctgggactacaggccatgccatcacacacagctaattttttgtattttttactagagacagagttttgccatgttgcccaggctggtcttgaactcctggacacaa

SEQ ID NO: 487318 - DNA, 133 bp, Homo sapiens
agatagaggaagcgaatcacttgaggtgaggagttcaagaccagcctgggcaacacagaaagaccccacatccactaaaacaaacaaacaaataaaagttttcagaaccactgaagctcctaaaagaaggcca

SEQ ID NO: 487319 - DNA, 776 bp, Homo sapiens
tgcagaaatgaggctgaggcacgctgactagagaagctggcccgcgtcaacgagaaccgtgtgcacggcaagattgcctctcgcaacggagttcgaccggactcatctgcggtagatcggtagggccgcctacctcaacgagtcctggagagctcgccatggacgttggctcatgcgttctcgaagtagggaaagctgtggaaccctgatccaagggctacaagccccctagtagccaggaacacagtaggcggcgtgcatgggtacagctgagcctagaccgaggggcagtggcctgcctactcggggtgcccctcagcttcgagccccagacaagtgtgtgctacggagcatctttgttgcttcacggacagcagctactcttcccttcacgtgtctcaggtgccgatgagggcgcgagcgtgccgagccttccactgagcatcagatgacaagcccgagggcaatgagccaaccggggggtcctcgcgttcatgctcacacagtgctatggggatggtgggctccaggttcagctctggtagggggcttgtctctgtgggtccacatcctgtcctgcaggcaggtcttggttgtctgagcccatgggggcccctcacttgtcctcctcagacagcaaaggccagggcagggacggaggacagggttcccttaaccacgaaccaactcgggttaccctgtgcgtgattgactagatatttgtcaacaaaaaaaacccgggcaatgcgggcggaacgctaaggagctcgccctca

SEQ ID NO: 487320 - DNA, 288 bp, Homo sapiens
gggagacgaccttgaagaaataactaaatactactagattgccaatctatgggtgttctcttttattggtaatggggaccattttagaattagctagagagatgaggtggacaagcatggatgaagtgcatcaccacataatagatggtttcttgggcatttccttttctatctgaccggtatgaactatcttttcgatgtacagcctagtgttggttgccagtgagtagtataataccgtaagtgacggcccttcctaagtacgggcctgactataacttcgccttt

SEQ ID NO: 487321 - DNA, 677 bp, Homo sapiens
ggtggggtctccagagaaactcaaaccagtgggatagaaagtccaacggatgaccatgtacagatggaccaagctggaaacaggtgtccataaatgcatcagtctgagcagctatagacacctgtttccagtcaggtggggtctccagagaaactcaaaccagtgggatagaaagtccaacggatgaccatgtacagatggaccaagctggaatgtgcggagacatttttgagagtgttcattcatcatataatgttgctacaggtaacattataagcaacagtttagtagcagagacagtaactcatagtttgttacctcagaatgagcctaagactttaaatcaagatattgagaaatctgcaccaattataaatttcagtgcacagaatagtatgcttccttcacagaacatgacagataatcagacccaaaccatagatttattaagtgatttggaaaacatcttgtcaagtaatctgcctgcccagacattggatcatcgtagtcttttgtctgacacaaatcctggacctgacacccagctcccatctggcccagcccagaaccccggaatcgattttgatatcgaagagttcttttcggcctcaaatatccagactcaaactgaagagagtgaacttagcaccatgaccaccgagccagtcttggagtca

SEQ ID NO: 487322 - DNA, 112 bp, Homo sapiens
tatatgagttggagggtggtgattagtcggttgttgatgagatatttggaggtggggatcaatagagggggaaatagaatgatcagtactgcccaactcatatcaatacatt

SEQ ID NO: 487323 - DNA, 682 bp, Homo sapiens
gcccgcagttcctcccagccacaagctgtagcactgcgccatcccctccaacgggtcagcttatgcccacccccgagttctaccggcgccgcctgggttcccattcccagcaacagctcctgcagccagttccgagtgccccggggaagcccattcccccacccccccaggtcctcccccaggctgacccgggtcattggtgggcccgcttctttttcgggaagtcccaccctcccgttcatggcaccacggtgttggagtccccagagcactcgggacctcccccggcctccagcagcatgaccgcctgtggcctggctcgggacgccccgagggagcagcccggcggtcagtccagcacaccagccctgggcccccgtcctgacctgagcggttaccaccagccccaggccttcggaggcgctagtccaccagagcccctcctccgcccctcctcccccctcgcgcatccctctgcccccctccccacctcccaccccccccccctgttaactgaggcggctgccagcaaacagacacttctgcatcaaccacagcaggacaacccaaaacccgtgagagccccgctttttaccgcccggccccagcactcgtagctttcctgacacctggaactgtgcacctggcaccaagcgggaaattaactcccagcagcccagta

SEQ ID NO: 487324 - DNA, 1823 bp, Homo sapiens
  misc_feature (1)..(1): n is a, c, g, or t
  misc_feature (233)..(233): n is a, c, g, or t
  misc_feature (1395)..(1395): n is a, c, g, or t
ntttttgttgttgtgtttcgctgtctctggtggttggctgtggcgtctgactttgtgatgtctattgtgtttggtttgttgttcgttatgtgatgtgtgtcgtagtctggctggcttgctttctgtcgtgttgtcttctgtctctgttttgttgttttcggttcgttcgttcgggtctagtgttgttgcatataatagccgtgggtgtttgtactacagacacgtggtttggngcagccatcgtatgattgttgcaggaggtctcagcatggttgttggctccatactagccgtcggctgtttgttttattctggcgcgccgcccatgatctcatttgtcctcgtgttcttatagggttgtcaggtgtcgtctggtgtgcgtcgcaattttccggcactcaggtgagacacccagtacacggggccacaccattggttgttgggggggtggacctcacggggagcccattgtggccgagaccagagtgcgtggtgtgttccgccagacgttgtatgtccgtgcgtgagtcgggcgcctcctatggtggtggtgtttcctccgcgttgggtgacgttgtcgctgtcgatagtcccgccggggtgtcccataggtgccgtcagttggctgaacccccgcctgatttgctggggagaagggggtttttcgcggagttccatccgcaacgagggtgtctcccttctctggtgggtcgccgacagcagtcgttcgtgtgggccggacgcagaagctactgagggtcctcccttggattttgtatgggggggttaatatgttctcgtccgtgtgtatgtgatgggctcctctccgtagaagtggtagcggcgtttcctcacagggcgcttctctgggcggtcatcaatgagatgtccccaatcgagtgggcagcccctcttgtgaagtggagggccggtggcgtcggcaccgagcaaattgattaggggttctttcttggtgaagaggggataagttcctcgcctcctccgagcccgcaagcttgtgtaagtttgtggtgtgtgcacgacccgcagggcggtcacgcgccccacatttgcacgtgttcttggggaagacgcactttgggttggtcccccacctgtgtagttgtaggcgcaccccaggagtgtctgttgccgctgttccacgggggaccacttacaactattctggggggaacaacttgcatcacacacgacgcgttttggacccccaagtgtggagaaattgtgaagctttgtggtaatacacgcacacgttgtgcgctataagaaatatttatgagcgcctcttgaggcgctgtgtattggcgccatagtgtgcgctctcaaaggtgacactctctgtctcgcagaacacgcgttctgtacacacaagtnggggcgtctatcacagaactgttcacttcacagtcacgtcacgtcgtcccgaaggtcacacgaggttcgcacactaagagtcttcgtggcttcacttctggcacggcctctccttctgtgagactccccctctttcttctttctcgtgccctcccttgccccggaggccggcacactgcactgttctctggacacccctcccctgagcaccccttctggttgtgggcgttggaccaccgagcgccttatgcccgggaaaggctggttctcccccacgcctataacccccacgcccctccactgtctattgctccctctgtgttatgaattggctgaaggatgtttttgtgccagctgacattttttgacccctgttcaccttgttcaccatcccctgtagaaaaattaagatgccccggaggaggttg

SEQ ID NO: 487325 - DNA, 930 bp, Homo sapiens
tttttgtcttctgtttctcttttcgtgtgtgtatttttcgtgttgtgatgtttggtgttttcattgcattcatctggttgtatttgttttttgctttagttgctaagttgggttgttgcgtgatgatattttcatgtattgcggtttttcgcctcgagttgtgctgcgggcgctcgatgtgtgtctttttttgtttttttgtgggttgggtgtgtggcctgtctctgcttcggtcttctctgcgtggttgtgtttgtgcgctggtgggttggtttgcgtctcgatgggggtgccgtcgtttgtggacgtcgtcttccatgcttttgtggtgtcgccgtgcgttgtggtaatcagttggtttcctgctcgtatcacgcccgtgtttgtgggggggtaaagcggcttgttcgcccgcctatacgggcgcgggttaacggccgtgccccccctgattcctcggttatcggctcccctatattgggcgcgcttattcttctcgcacatccgggataagcgtcctggggtggccgccgcaatgctcactggtggccgcgcggggaaccgccgcgcgccaataatattcttcggtgttggcactaccctctattatcgcagtgtattccacttgccgcggtctcgcggatacaatatttctcgcgggatttctcgccccctttccgcccccgcggggtataaaatcttgctgacaagcacctgtctctaatagtaaattgctaactgcgttttcccccttatgggaccacaccctcgttctccgataaatatgtcccacctttttctttgttgtggaaaaagaggaattctcccgttgagatttttaaccacactttctgtaagggccctgtggtgaaataaacccttttttgttaaattaaacccgaaataaaaaaaaattaaaccccaatttga

SEQ ID NO: 487326 - DNA, 473 bp, Homo sapiens
  misc_feature (170)..(170): n is a, c, g, or t
  misc_feature (196)..(196): n is a, c, g, or t
  misc_feature (285)..(285): n is a, c, g, or t
  misc_feature (337)..(337): n is a, c, g, or t
  misc_feature (378)..(380): n is a, c, g, or t
  misc_feature (399)..(399): n is a, c, g, or t
  misc_feature (420)..(420): n is a, c, g, or t
  misc_feature (429)..(429): n is a, c, g, or t
  misc_feature (444)..(444): n is a, c, g, or t
gaattcggcacgaggggacatttagaatatatttgtgtacatattatatgtatgtatatttcaaagtaccacactgaaaattagacatttattaaccaaatttaacgtggtatttaaaggtaatatttttaatatgatacattacatattgtgaatgtatactaaaaaancattttaaatgttaaaattataattncagattcatataaccacaactgtgatatatcctaactataaccagttgttgaggggtatactaggaagcagaatgaaaccacatttttnggtttgattaatatgcacttattgactccccactcattgttatggttaattnaaggttattattctggtctccttgttaattttggtttacannnatttttgattatccctggngttaggccggtttactttttnccagtaccnggttaactccctaanagctttttaaaccttattaccaaattggg

SEQ ID NO: 487327 - DNA, 264 bp, Homo sapiens
tgagatgtttgatataatgataaggcaattacgaagtttgaagagaatgcaggatgaggcgtggagatgtctgaatgtcaaagtcagtccagaaaagggaacacgtggtggaaagcaagacaagagaacagtacgacttaatataagtggaggagtggttgatggggctcgggaaacagaaattgtgggtgactctagtagtgaggaggaaagggacacacatccacaggccgatccacaggcaccattgcttcccttgtcgac

SEQ ID NO: 487328 - DNA, 650 bp, Homo sapiens
  misc_feature (48)..(48): n is a, c, g, or t
  misc_feature (61)..(61): n is a, c, g, or t
  misc_feature (66)..(66): n is a, c, g, or t
  misc_feature (68)..(68): n is a, c, g, or t
  misc_feature (79)..(79): n is a, c, g, or t
  misc_feature (84)..(84): n is a, c, g, or t
  misc_feature (93)..(94): n is a, c, g, or t
  misc_feature (98)..(99): n is a, c, g, or t
  misc_feature (107)..(107): n is a, c, g, or t
  misc_feature (122)..(122): n is a, c, g, or t
  misc_feature (125)..(125): n is a, c, g, or t
  misc_feature (153)..(153): n is a, c, g, or t
  misc_feature (156)..(156): n is a, c, g, or t
  misc_feature (203)..(203): n is a, c, g, or t
  misc_feature (207)..(207): n is a, c, g, or t
  misc_feature (251)..(251): n is a, c, g, or t
  misc_feature (255)..(255): n is a, c, g, or t
  misc_feature (263)..(263): n is a, c, g, or t
  misc_feature (300)..(300): n is a, c, g, or t
  misc_feature (317)..(317): n is a, c, g, or t
  misc_feature (401)..(401): n is a, c, g, or t
  misc_feature (413)..(413): n is a, c, g, or t
  misc_feature (416)..(416): n is a, c, g, or t
  misc_feature (421)..(422): n is a, c, g, or t
  misc_feature (441)..(441): n is a, c, g, or t
  misc_feature (457)..(457): n is a, c, g, or t
  misc_feature (503)..(504): n is a, c, g, or t
  misc_feature (506)..(506): n is a, c, g, or t
  misc_feature (508)..(508): n is a, c, g, or t
  misc_feature (512)..(512): n is a, c, g, or t
  misc_feature (643)..(643): n is a, c, g, or t
tggggagatcttgggggacaaggtgtggcaaaagctcccaggtaaccnctgttcttcaganttgantnttttgtttttnagttnttgagggtnngatnncctccgcncgctgctggctttcncancagccaggccgtggtggccccagcaggntcngcatccctacttttggacaggagctccgaaagcaagggctgcttgantgtncagagcctgaggcccaagaacaggtagcagggctcccttctttncttntgcaggcncctggagacctccagggcttctggggcctagcttgcncctcacgaggccacgtnttttgctttttttaaagcggaactcccaggggtctgtggctggcttctctctttctctcacgttgttgaaggcctgaattcctnagggtcctgtcnttncctgnncctcgtcttgaagggagcnaggcattcagcagggnaacagttggctaataaatagagggcaggtaccagcaggagtcactnnanantgtnacggtaataaatacacgagccgggtgcggggtctctctcctccaaggggtgggttacctccgggggaaagcatcgccgcacaggtggcagtctgtgggtctctgcttctctctcctcctcttccccctgcncttgggt

SEQ ID NO: 487329 - DNA, 330 bp, Homo sapiens
caggtcaacatgctatacttgggtatgatgtacatgtggcgaatgtaagacggacatgtagatattgcatacatctttggcaaaagtgtgttgagctgtgaaggctatgactactctgaagaccagtatgctactaagaggttcttgtggcttggagtataattgagattatacagaagctatggcctgcagaaactgaacgagtctggatagctaggacgcgctttgcctctttctctgatttcttattactacagtggtcctcggcggattccgtttaacatgagtggattgattaccatcgtggtactccttgggatcgcctttgta

SEQ ID NO: 487330 - DNA, 272 bp, Homo sapiens
ctcagttttataattaatcgcactgctcagcccccagtttatcagctggcacggatagttcatcatttcctgcagtcacaaatacccggtgccccatgtgcttttgcaatctgaattgcagcaacaccgatgccggaagtcccgccctgaaccagcaaagtttgtcccggtgcaagtcctgcacgatcaaacacattactccagacagtgaaataagtttccggcagcgatgccgcctcaagcaaactcaaaccatcaggtatccgcagaca

SEQ ID NO: 487331 - DNA, 201 bp, Homo sapiens
  misc_feature (8)..(8): n is a, c, g, or t
acggttantaacagcctggaatatgatggcctaaatgcagagaaaaccgctccttggctgaatagataagtaaaggcagaaaagattatatcgtcatacctaccattggggaataagcataaccctgagattctatactactagatgagaacattcatctgcatatagccacaaaaattttaatgcaaattgcaagctacc

SEQ ID NO: 487332 - DNA, 104 bp, Homo sapiens
  misc_feature (7)..(7): n is a, c, g, or t
aacaggnccaaaatcctcaaacctttgacattgattaacgggagggaaggtgtttcattttacttggcaattgggaaatgggaatttagaccattatgaggggg

SEQ ID NO: 487333 - DNA, 160 bp, Homo sapiens
cctacgactatcggcatggggctgtagcagccagagatatgggcagaggttgttagatagggatagacagaaaaaggcaatttaaatatcttgtcccatatctgttttagcccatttcctagttctgaggctaaactctttttaaaaaattggctttgct

SEQ ID NO: 487334 - DNA, 428 bp, Homo sapiens
  misc_feature (416)..(416): n is a, c, g, or t
  misc_feature (422)..(422): n is a, c, g, or t
taagtcatttggtgccatttttccaacaggacagtgtctctgtgtcaaattttggtaattcttgaaacatttcaaaccttttcattattataatatctgttatagtgatctgtgatcagtgatcttagaggtaactattgtaattgtttttggggccacgaaccgtacccatatgaaaggataaactgaattgataaatgctgtgtgttctgagtgctccactgactgtcccttccctgcctctttctctctcctgggggtctccctattttatgagacacaacaatattggaacttaagccagttaataaccctgcagtgggccggtaagtgttcaagtggaaagggaaaagtaggcatgtcttctcactttaaaatcataaggcaaggaatggaggctagtgagggaaggcgtnttcagnaggcca

SEQ ID NO: 487335 - DNA, 749 bp, Homo sapiens
ggcgggcgcagtggctcacgcctgtaatcccagcacttttgggaagccaaagtgggtggatcacttacggtcaggagttcaagaccagcctggccaaatatggtgaaaccctgtctctactaaaaatcaaaaaagtagccgggtgtggtggtgcacacctgtaatcccagctactcgggaggctgaggcaggagaattgcttgaacctgggagatggagattgcagtgagctgagatcgtaccactgcactgcgagtctgggtgacaaagcaagactctgtctcaaaaaaacaaaaaacaaacaaacttttgtgaaattgaaattgcaatatgtctgctacttgtggcttgggcttggaccagtttatctaataagcaaggcaggttcttgtgtgctatggtaataagccttcttaacaaggctaagcttccctcataagaactgtggtgttctctttatatacaagggtaggggaaggattagggtataaggagtatagcgaatggtaagtgtcctaaaatcaggtatccaagggtttagtagggggcaaagggtaaactttcggcacatatccctggtaggaaagcggacattgtatttgcctaggtacgcagggcacaagggtggttaagggctacccttgatcaaacactcgacttcgaactttttataacattttctcgctccttatatctctttttcccggaaatcagtttggtggctaataaagaagtgcacccagtggagc

SEQ ID NO: 487336 - DNA, 442 bp, Homo sapiens
cactgtatgtagagctaataaatataaggacagattcacaaggctcaaataaaaaacaataataacacacacagagaacattaactaaaggagaagggactcaaacaacacggacggcgggagaagagaggcatgtacacctgctccacttaaacattcttttagacttacaaatatcatcttcaggaatacaaatattgcaaagcttagcacggttggcacatggcctcctgcagcaatcacagcaacaaatgtgcttcgcataaatcctgtgctttagtgaaaagagaactaataacgacctccaatttcagtagcaattttatcaacccaaaatataatgtagaagatgaaactaaacaatccatctttcccgcctcccttctctctctcacacacacactcacctttctacatcaagctacatttgggcgtacgggga

SEQ ID NO: 487337 - DNA, 380 bp, Homo sapiens
  misc_feature (33)..(33): n is a, c, g, or t
cctgcaaggggacaggccccttcggttttgtgntggtacgcctcatccctgcacccaagggcactgggattgtttccgcccctgtgccttaaaaactgctcatgatgggtgggatcgatgactggtcaccctcaggccgggggtgccctgcccccctgggcaactttgcccaggcccccttttatgccctttttaagaccttcagctacctgacccccggcctttggaaggaggctggattcccccagtttccctatccggagttccctggcccccttgtccagacccccccccgagtttccgtgcaacgggctccgggtcccgctgtgggttccacctagggtttttattccagaaaaataaagtgaatttagcgtgga

SEQ ID NO: 487338 - DNA, 455 bp, Homo sapiens
caaacggtctgcgttccagggcaatatctttgttaaaaaaaatttggcaatagtgtgcacagaaaaattatatcaaaggtggagcttctctcctttcttaatatggatctgacaagcatttatgtgaaatataagtgaggggaatgaaccaggagtattctttaactgaatgggccatataagagagcacttgaaatctgaagaatgtctatccctaccaagaaaacggagtcaaatggcaattaagtttacctttggttatatggaagcaagagtcatgcttctcatcatcaagtgcgtctctttggtagccaataattccatctgtaatcatgacagcaccttaagtattgcctaacgagagcgctcgtgcaaaattcctgcagcgcgggggaaccactagtatatacggcggcccgggaggtttcaagtctcaatgttggagtggggatctt

SEQ ID NO: 487339 - DNA, 1850 bp, Homo sapiens
  misc_feature (706)..(706): n is a, c, g, or t
  misc_feature (710)..(710): n is a, c, g, or t
  misc_feature (716)..(716): n is a, c, g, or t
  misc_feature (732)..(732): n is a, c, g, or t
  misc_feature (778)..(778): n is a, c, g, or t
  misc_feature (782)..(782): n is a, c, g, or t
  misc_feature (791)..(791): n is a, c, g, or t
  misc_feature (1144)..(1144): n is a, c, g, or t
cgttgtcgtgtgttctgtgtgggttcttgcgtgtctgccgccttcgtcgatgccgggcgtcgcttgatccttcgtcgcgttggttgtctttgcttgtttttaccattacgtgttcttgttccaggctgttctctggcctttttgtctgtgactgtaggacgtcgggtcgtccagcgcgcttaccccgctcggttatccttctcatcctccttctgcctgtgtcccggtttgtctgcgtagttggcgttgatcgatcgttgccccccttctctcgttcctcaacaggggtctttgtgggggacctccatgattgtcgtggattgttgcagtgtcagttttgctgcgcctgtggagtgcaccctcgccgtcctggatatcatgggcagctccctgtccggacccttggcgcttgaccggtcctccgcggccccatctccttctctggtcgctgctctgtctctcccttctgccattcagggacgcagcgtgactttcatgcgagttcctcgtgcatccttgtttatgacaaggtgtactcagcacgtcctgtccaggcctgaccagcccaggtttgggagggggcttcctgccccccccacggtgttccagcccctcctctcttccgccccctgagtctcccacccttcccttccccgtagtgacccattcctatctgcttccctgtccgcaggctcctatgaatcgnatgnatgtgnacttcttcatctgtgnaaaatcttttttttttccatttggttctgttgggggcttctgtttngttngcgagagancgatggctccgtggggagtactggggagccctcgcggcaagcagggtgggggggacttgggggcatgccgggccctcactctctcgcctgttctgtgtctcacatgctttttctttcaaaattgggatccttccatgttgagccagccagagaagatagcgagatctaaatctctgccaaaaaaaaaaaaaaaacttaaaatttaaaaacacaaagagcaaaggcagaacttataaaatttatatttattttttttaaaaaggtctctattcttcaccccccagccttccttggaacctggcctctctgaggataaaggcaattcattttctcccaccctcggccctctggtntttcaaaataaccttttacaaagggaaaaaaaaaagtcactctggcttatttctttttttaagtaagagggggacactttcctgggcccaggtgtggtattggcagggacccctttccccaaagaaggccaaaaggccaccagtccttgtacttcatccctccaagggcctcgggctatcaagaattcccgaggggctccggaccgagatcacccaccttccacaggacaggctcgggataggtcttagcattatggttcacaagagggagattagaaacgtcgacaacccaatcgttgcggaacagcgcagaaaaccacttgtttgccaagttaaaacatatataagtggcacgccttcaaaagctgcaccaagttagagttgatgagagaaaacacccccgccggtacggcgaggatgatatgtgaggtatatccccccccgtttgccttcaccctcacccgaaggtcttggaacgccgaaggatatggggcctacatagacatgttggtcaaacaaagcgccggaaaatgtggagactgacagctgcaccaacctgcgggctctcatgctgtaagacacaacataaggcaagcgtgtctacagaccacacaggggagtatcataaccgaggccacccgcgccatatggtgttgggggacaacacggcgtcttgtggaaaaaccacaaaacgagagggacagaa

SEQ ID NO: 487340 - DNA, 507 bp, Homo sapiens
cccagggtacaaaacagccacagaaggccacaggttccctgcctaggaaagccaggcattgtccaaggtttctccccatgtgatagcctgagatgtggcctcgtgggaaaggaaagacctgaccgtcccccagcccgacaccggtaaagggtctgtgatgaggaggattagtaaaagaggaaggaatgccctgttgcagttgagacaagaggaaggcatctgtctcctgcccttccctgggcaatggaatgtctcggtgtaaaacccgattgtatattccatctactgagataggggaaaaccgccttaggcctgaaggtgggacatgcgggcagcaatactgctccttaaggcattgagatgtttacgtgtatatgtatctaaagcacagcacttaattctttacattgtttatgatgcagagacttttgttcacgtgtttacctgctgaccttctctccactattatcctatgatcctgccacatccccctctcccccggggaag

SEQ ID NO: 487341 - DNA, 1765 bp, Homo sapiens
  misc_feature (706)..(706): n is a, c, g, or t
  misc_feature (710)..(710): n is a, c, g, or t
  misc_feature (716)..(716): n is a, c, g, or t
  misc_feature (732)..(732): n is a, c, g, or t
  misc_feature (1059)..(1059): n is a, c, g, or t
cgttgtcgtgtgttctgtgtgggttcttgcgtgtctgccgccttcgtcgatgccgggcgtcgcttgatccttcgtcgcgttggttgtctttgcttgtttttaccattacgtgttcttgttccaggctgttctctggcctttttgtctgtgactgtaggacgtcgggtcgtccagcgcgcttaccccgctcggttatccttctcatcctccttctgcctgtgtcccggtttgtctgcgtagttggcgttgatcgatcgttgccccccttctctcgttcctcaacaggggtctttgtgggggacctccatgattgtcgtggattgttgcagtgtcagttttgctgcgcctgtggagtgcaccctcgccgtcctggatatcatgggcagctccctgtccggacccttggcgcttgaccggtcctccgcggccccatctccttctctggtcgctgctctgtctctcccttctgccattcagggacgcagcgtgactttcatgcgagttcctcgtgcatccttgtttatgacaaggtgtactcagcacgtcctgtccaggcctgaccagcccaggtttgggagggggcttcctgccccccccacggtgttccagcccctcctctcttccgccccctgagtctcccacccttcccttccccgtagtgacccattcctatctgcttccctgtccgcaggctcctatgaatcgnatgnatgtgnacttcttcatctgtgnaaaatcttttttttttccatttggttctgttggggggcatgccgggccctcactctctcgcctgttctgtgtctcacatgctttttctttcaaaattgggatccttccatgttgagccagccagagaagatagcgagatctaaatctctgccaaaaaaaaaaaaaaaacttaaaatttaaaaacacaaagagcaaaggcagaacttataaaatttatatttattttttttaaaaaggtctctattcttcaccccccagccttccttggaacctggcctctctgaggataaaggcaattcattttctcccaccctcggccctctggtntttcaaaataaccttttacaaagggaaaaaaaaaagtcactctggcttatttctttttttaagtaagagggggacactttcctgggcccaggtgtggtattggcagggacccctttccccaaagaaggccaaaaggccaccagtccttgtacttcatccctccaagggcctcgggctatcaagaattcccgaggggctccggaccgagatcacccaccttccacaggacaggctcgggataggtcttagcattatggttcacaagagggagattagaaacgtcgacaacccaatcgttgcggaacagcgcagaaaaccacttgtttgccaagttaaaacatatataagtggcacgccttcaaaagctgcaccaagttagagttgatgagagaaaacacccccgccggtacggcgaggatgatatgtgaggtatatccccccccgtttgccttcaccctcacccgaaggtcttggaacgccgaaggatatggggcctacatagacatgttggtcaaacaaagcgccggaaaatgtggagactgacagctgcaccaacctgcgggctctcatgctgtaagacacaacataaggcaagcgtgtctacagaccacacaggggagtatcataaccgaggccacccgcgccatatggtgttgggggacaacacggcgtcttgtggaaaaaccacaaaacgagagggacagaa

SEQ ID NO: 487342 - DNA, 1082 bp, Homo sapiens
gagatcatgaccccctatgctgtgggagaagcagtgtgactttcgcaggttcgggcaaggagcaaaatgctcaaaggtgaagcattgtagcaagcattcatcctttgtgcagcaagtggcatgcacagcagcgccagtgcacacagcaacatctcgcatggtgccatgtgcattcctcccatctaagatgcacaaagcaggaactcccagtccagcatatgctccagtgaccaatcacgaagaaggagaccagttgtcgacaacgcaggcatgcaaaggcacgggagagcagcagtacttcacatgacagcagcacagtcagcatcgacaacgaaaaacttcctacttccattcaaaacaacaaggagacacggcaacatgggctcctccaaaaaaatattctagcacatcaaacaacatcatacattgtgacaacctaccaaaaatgacaagacataccggaatcaatacagatacacccgttgccaagacacagacaccaactttgacattccactaacaagaagacagcaccaaacacaaaacatcaacaggcaagaataacattccagcactaaacttttcattaccagcaacaacttacattgccaattatatcgaaacgacattgggttacctggggttgcagaagacaatagcaacccctcaggagagttccagataagacaacaagcaaattgaccaaatttagataagagacaccaagaaatataccattacttcacattgaccacccaagaacaataagataaccacaataatgcaacatatgtagaaatacacatacgtaaacctacacacaaatataacacaaagaatcaccataatttgaacacattcatatcaaacacacacacattatacaatcaaccattaaaagacacgtaccacacacatatcaatcagacatggacgaatttcacacacaagaaaacacgaagaacaaaaaccccctatcaacaacagaaacaaaactacacaaaggaaaacaagacagcaacagaattccattaacaacaactatcagaatacacaaaccaaacaaaaaaataaatcactaa

SEQ ID NO: 487343 - DNA, 81 bp, Homo sapiens
  misc_feature (16)..(16): n is a, c, g, or t
  misc_feature (36)..(36): n is a, c, g, or t
  misc_feature (47)..(47): n is a, c, g, or t
ctgctcgcaattcaangcttctaactgatgtacggnggacatggaanataaagctacccagcgctgccctgggcccttgca

SEQ ID NO: 487344 - DNA, 792 bp, Homo sapiens
atagaacatcctctgccttctctgcctcattctgctgtgatggaggtgacaactacagaatccatctcctggagcgtctcacactttggcctctttttggatttgacggatggaagatgttcataggaaatcagaggacagtgggaaaccaaacccagggattttgtaatatttttcccttaattatctcaacactattttgccagttgctgcattcttctacatttataactcctgtttggaagtgcctacctcaaccatcacctttcaactgggttcttataaaatgatccttcctttgacacttctgacctaggattctaaaagttccctgctactgcacctaggtacttgttgatagcttattcctgaacatgcctccttaaatatttgctacattaaatgatctttgctaccttgttaaatttgcaacattaaattcttttgagtatacgttgtcttatgctaatatcttgcctaatacatagactctgccaacatttatcactgagcagttcatgaatggaggtcaatccaaaagatatctattacattgtaatttttgattgaaagagttagcattggaaaaactttaaaatgccccagatatttgcaatgtgttcaaatatttctttaataatatcgaatatatagctattatttggtggtattgtgttaacaggatgaacaatattaatcatatatatactaatcctatcactaacattcttaattacatgtgctacttccttctcgttataaaacatcttcctatgaaatgtataccatatg

SEQ ID NO: 487345 - DNA, 865 bp, Homo sapiens
  misc_feature (865)..(865): n is a, c, g, or t
gcttctgctgcgaggccgcgtgcatcgtagacgaggccatgctcactggggtgagtccgtgccacatgatgaagaggagcccatcagaagacctcagcccagaccgggtgctggacctccaggctgattcccggctgcacgtcatcttcgggggcaccaaggtggtgcagacatccccccagagaaatgccatcacggtgcctgaacgccgggtgacagcgggtgcgtggcctaccgtcctgcggaccggattcaccacatcccagggcaagctgctgcgcaccatcctcttctggcggtcaccgagggtgactgcgaaacagcctggaggaccttcatcttcagtcctcttcctcctggtgtttgccagtcgcgtgctaggctgcctatgtatggattgaaggtaccagcggaccccagccggaaaccgttacgatgctgtttctggagtgctgctcctgatcctcacctcgtgtcgtgcctcctgagctgcccatcgagctgtcccgtggccgtcaacacctccctcatcgctcctggccaagctctacatgtacttgacagagcccttgcggatcccctttgctggccaggtcgaggtgtgctgctttgaccaatgacggggacgtggatccagtgacagctggtggtgcgcggtgtggcgggctgagagacgggaacggaggtgagcccagtgtcggcgtcctgtggaacctagcgggcctggctcgtgccactcgtcatgccgcttgggagccgggcctcgtggtgcctttggaacgcctgtggcggccgtgtttggcctgcccatggatgtgtcccggattccgggggttcccgtttttggggcccttcgttcctctan

SEQ ID NO: 487346 - DNA, 178 bp, Homo sapiens
tagttttacttttgcaacatacgtatgtacctctaagtgaaatgttaataatgtgatgtttctgaattgtatgtaaatggcaaaatgtttactggtgtgactgttcactcatgtgtcttgctatctagttttatgtaaatttgttacaacttattcattcttgatggacccatcatga

SEQ ID NO: 487347 - DNA, 96 bp, Homo sapiens
  misc_feature (52)..(52): n is a, c, g, or t
  misc_feature (74)..(74): n is a, c, g, or t
aagcagagtacgcacgtcaggcccttccacgcccaccccaacactttaaacntactgggcgatggggccgtttngctggcagttcaagataaaaca

SEQ ID NO: 487348 - DNA, 187 bp, Homo sapiens
aattctcctcctctggtatgatgcagaccaatatggggggcctcccatgatgccaatgatgggcctcctcctacctgggatgatgccagtgggacctgctcctggaactgaggccgcccatgggacggcatatgccacatgatgcctgggcccccaagtgatgagaccatcctgcccgatcccatga

SEQ ID NO: 487349 - DNA, 276 bp, Homo sapiens
cgtccccatgcctttgcagcagcatggatgcagttggaggccattcgtaagcgaattaattaacagaaagccaaatactgtgtgttctaacttccaagtgggagctaaacactaagtacatgtggacacagaggggaccaagagacaccaaggcttactcgagggtggaggctgggaggaagttgaggatccaaaaactacctactgggtactatgctcactatctgagtgacaaaatgatttgtgctctaagcctcagcgacacgcaatgtgccc

SEQ ID NO: 487350 - DNA, 159 bp, Homo sapiens
agcacccagcaaataataggcactgtaatatatgcttaatagtaacgtagctatgaatttatgcccacatttaggcggacgggaaaattaacgcccgaatatacccgaaagtcaaatttgtcatctaaacactataggaagttacgttaaaaaatactc

SEQ ID NO: 487351 - DNA, 346 bp, Homo sapiens
ggaaaagcccccaaaacccaaaccccctttccccggggggggggggattaaaaaaaacaaggggccccccaggttttcccccgggaaagggggcagggggggccccccaattaatgtgggttagcccccccaaagggcccccccgggtttcccctttatgtttccgggtcgaaaagggggggggattttgaggggataacaattttccccagggaacagtttttcccaaaaaaaccccaagccaaaaaaaaccccccccaaaagggaacaaaaagggggggccccccccggggggggcccctttaaaaaaaggggaccccccggggggcaggaattggggccggga

SEQ ID NO: 487352 - DNA, 326 bp, Homo sapiens
ctttaagaggctgagatgggaggatccccttgagaacacatttcccactaaaaaaaaattttttttaaatagccaggcatggtggcatatgcctgtggtctcagcaactcaggaggctgaggcaaaaggatcacttaagcccaggaggtagaggctgcagtaggctgtgattgcgcgactgcactccagcctgggcaacagagcaagaccctgtctcaaaaaataaacaaacaaacaaaaaccaacaacaacaaaaaataattaagccaggccaggtgcagtggctcatgcctgtaatcccaacactttgggaggcccgtcgacgc

SEQ ID NO: 487353 - DNA, 240 bp, Homo sapiens
  misc_feature (86)..(86): n is a, c, g, or t
ccgtgctccttaacagctgctgtaactagtctggcctacaatagtgtgatccatgtaggacttctttcatcaattcaaaacccctngaaaacgtttccggtttttttaggtgggtttaagttttctaacttttctgggctctctgccccctgcgttggactgtggaaggggggtttttttgggtttcccccccctgtccctttttgggtttctcttgggggcccttttggtccccccttt

SEQ ID NO: 487354 - DNA, 303 bp, Homo sapiens
ggatgtacaaaatacttacagttatttaaattgcattctgcccagccttatgctgtatggtgaaaccccatctctacaaaaattagcttggcgcacagtggctacacgcccatagtcctagctattcacctatgctgaagtgggaggatcacttgagcccagggaggtcaaggctgcagtgagctgagatcacgccactgcactccagcctgggcaacagagtgagactctgcctcacaaaataaacaaacataaactgcccttcccagctggggacgatggctcatgcctgtgatcccagca

SEQ ID NO: 487355 - DNA, 330 bp, Homo sapiens
gtaatctataaataaaatatagctccatctacaaaggaacagagaaaaaatagttcagttacaatgaagagttctgcttaccgtcctaactgtggagccctggatttaaattagcatgtcaaactaccctcgtcagtctgtggtttagtcccatataacgataaaagagggagcaacaaagaagatatattaggaagtagcatttctaaggccactagatgggaccaccatgtaatatcatcaaagccaagttgcgagtgatgataaaataagaccattcacccacttaccactggagaattgcgaaaacctttgattgcttgagagata

SEQ ID NO: 487356 - DNA, 124 bp, Homo sapiens
ttattagggggtttagaaaataaattcgtagggtttaaacattgaataaaactacaaaaaaagacacacattcaggtagcgaggctctgggggtaactctttcttagttctttggacacatccg

SEQ ID NO: 487357 - DNA, 199 bp, Homo sapiens
cactcgggaaactgctataccggccgcttcgtttatcattcggactgcgctttactcggacgctctctaaaaccaagaaactcacaatgaccagatccctgtcctataccagccagactccagcagcaccccctcctccacgacgtgctccgtgaccctcctcgaccgacgtggtatcctcgtagacgtcgacctcgca

SEQ ID NO: 487358 - DNA, 1124 bp, Homo sapiens
aggtcctctattcctatggctaaacgcagccatggctcgttggtgcccaatgaagcatctagaagctgggtggcagctcgctaaagcattggatgctggataaattgagcggtgtgttagctccatcgtccatccacgcggtcgccgacaagttgagagagtgtctcccgcctcatcattttcctgaggaacagacttaagtatgccctgacaggagatgaagtacagaagattggcatgcagcggtgcattaagatcgatggcaaggtccgaacgtgatataagcgtaccctgctggacttcatggatgtcatcgagctttgacgaagcacgggagcagaatttccgtctgatctatgacaccaagggtcgctatgctgtacatcgtataacacctgaggaggccaagtacaagtgtgcaaagtgagagagatctatgtgggcacaaaaggaatccctcatctggtgactcatgatgcccgggcatccgatacccgatcccctcatcaaggtgaatgataccattcagatagatctgggagacttggcaaagattactgactttcatcaacgttcgacacgtggtaacctgtgtatggtgactggaggtgctaccctaggacgaatggtgtgatcaccaaaagagagaggcaccctggatctttagacgtggttcatgtgaacagatgcgaatgggaaaagcgttggcgatcgagtttccaccatttcaggtatgggcaagtgaaaaccagggatgtgttacccgaggaaggtattcggctaacaattgctgaaaaaacacaaaagatggggccaacaaagccaggggtgcaaaggggcccccggggcggaatggtcgacattagggagggaacatgacacagaaagtggcggcaatcacaggcacaacaaacacacaagagggcgcgacaacagggaacaaccagagggccacaaaagacaccgcgcaattgaaccaaggacccacagaggcgaaataaagacgagcgagcaacaacgaacagcgaacgaacaagccacaagaaaacagttggactgcaaacacataagcaagaacaaaagcaagagcatgtatagcaatgaacaatagagagagaacgaga

SEQ ID NO: 487359 - DNA, 593 bp, Homo sapiens
tacctagctgcaatttgcagctattaaccagcctgttttcctccccgaccccccccagcccttcccagcctctagtaaccacagttctactgtctacttctatgagctcaactcttactagttcccataaatgagtgagaatatatgatctcggtcttaattgtacctcatttatttcacttaatgtcctccagttcatccatgttgctgtgcaatgataggctttcatttcttttcatggctgaatagtattccatggtgtatatatgtcacatttgctttatgcattcatatgttgagggacacttagattgactcctgtatctgggctactgtgaatagtgctataacaaacatgagggtgtaggcatctcttgctcatactgatttcctttcttgggataaattcccagtacatggaatggtaggcagtgtggtagttccatttagaggttctggagaaaccacgatacgtgtgtgccataatgggtatactactgtacattctcaccaagggtatataacaatttcactttgctcgaaaactctacttggtcatttgccggtcttttctatcactaaccataacctcg

SEQ ID NO: 487360 - DNA, 113 bp, Homo sapiens
tctatcccgcagacgtgctgctctttaagggatcctggccttctactcccaggaggtacgagaccggttccagatgaagctttcctggctcaggatgaccacctgcttctggc

SEQ ID NO: 487361 - DNA, 164 bp, Homo sapiens
agcgtctaccagatacgtaatagagtacctggacacgaaactcttctgcccgaggcccatttcttttccaaagctctccctactgggcatattaccttacaggtttttctagcctataccatagtatgctatgtagaggaatacggcgagtgtactaagcaact

SEQ ID NO: 487362 - DNA, 416 bp, Homo sapiens
tgaagcctctagctgttactgcggtggagtctggctctctctttaactctaataatatttggtttatatatctggatactacaatggtgggggcatatatatttaaaggtgttatattctcttgctgagttgacccctttatcattatatgatgacctttgtctcttagtataaatttcgtcttgaaatctggtttgtattaagtgtagctattcctgctctttcttgctttccatttgtatggaatatattttttcgcatccctttattttcagcctacgtgtgcctttatagtgacgtgtatttcttgtaggcaacatattcgctgggtcctgtttttctttacccattcaaccgatctgtcttttgaatggagagtgtagtctgggtacgttcaatgctgttattgataagta

SEQ ID NO: 487363 - DNA, 1705 bp, Homo sapiens
  misc_feature (1372)..(1372): n is a, c, g, or t
cgaagcaggatgtgtgtattcattgccttggttctctctggctagggcggtgtcaccacaacaaatacatcctagtaagtttcctgtggtgtgagactatcgaatgatccatgtgctgtccgaagtagttcagattgtttgtgttggttgattcacacagcaactatctattgtggtgtgctcatatatatgggttgatacaagaagttgtggtgatatactacgagtggtgctggtgcgcacagcatgatgatgtattgcatatgagaggatagagcggggagcgttggtgtgggctgctgttaaatgcatacgattgatagtgtgtcttggtcttggtgttatgtgcacccctctggttatatggcagggttttgtcctccctcggtattggtgtgtggtttgtgtctcctctcgtggtgacgacaggtgtgtgtttgcgtgtggtttggtgctacgtggctcccgtgttatgggtgtggttttttgtggtaagtggagttttgtcgggtgtctgttgtcatctgcgtagtgtttggtggttgtcggtttatcattagcgctgtcttttgtgttgtgtgggtgttggtggtggttttactacatgcgacaggcaacacaactgcggtgggggtgtgtcctctttcgtgaggcgccagctagtattgtttccgccgcgtcccctctatggtagctcgtttttgttctctgggggtgagttccttcctcatgttcgtcgcggggtgtgtccgccccctcttctgtgtggtagtactcgccatcttttgtttgtgtacccacacgtctgtgtcgtgtggtgttgttttgtgatagatacttttcctcgcggagggtgatgcatttcttcatctcgacttctcgctgcgttagcgcctccgctgtcgtgttgtagtagagattaggacacccaccaacgacccgccacctgaagacacagtgtgtgttgtgctccttcgtgtgcgtactctgcttctgtgttgtcatacagcgcttgtatgagtacgccccccttttttcgtcaacagaagagatgagtagttcgtcaattagagtccgccacagcttgtcctcctgtgtggtctccgcaataaaagtggggaggatatctattttcttcaccagcggaggccaaaggagagtggagaatattaggtgtggtacacagttactgccccccagcgtatgtgcgcacatgctacatgtgacacacttgtgccacttcgctctcccgctcacagctttgtgagacatcaagtgacccacacatagacacacagcgggtgtgtctctcacacacacccacacaccctcgtgtgttagacgcgtgaggtgagacacacaccacaccacncgcgtgtgtgtgtgtctcacagcggtttgtctccacacacaccacaccccaggatgttggtgtgcgtgtggatatctcccatactcatacagtgtgtctcagagaacctgcgtgttgggaggttctcccgagaggaccctgtatgtgtgacaacaccacaggacagtgtctctcaccaaagaacaccctcacacctggtctcagattgtttgtgttttcttgtgggagaggaggagatccacccctcccgcgagaaaagaggacacagttttagcccacacgcatctcacccaaatatatatatctcaaattgttttgtgagagaaccccaca

SEQ ID NO: 487364 - DNA, 152 bp, Homo sapiens
aacatgtcgaggctgtcaactgaaataatttgttcattcaactggcagtgaaaatcaatatagatcaagatgcataaagttcagtaactattaaatggagaagcaagcaataagcaacagagaaaattaaatcacggatgctagagggggaa

SEQ ID NO: 487365 - DNA, 103 bp, Homo sapiens
ggatttgctggtgcagtacaactaggcttaatagggacatgtacattatttccaaagtcttaggatgagggaaaaaaaaaggaaagaagatagatgggtttaa

SEQ ID NO: 487366 - DNA, 994 bp, Homo sapiens
  misc_feature (144)..(144): n is a, c, g, or t
  misc_feature (200)..(200): n is a, c, g, or t
  misc_feature (221)..(221): n is a, c, g, or t
  misc_feature (313)..(313): n is a, c, g, or t
  misc_feature (349)..(349): n is a, c, g, or t
  misc_feature (430)..(430): n is a, c, g, or t
  misc_feature (445)..(445): n is a, c, g, or t
  misc_feature (455)..(456): n is a, c, g, or t
  misc_feature (459)..(459): n is a, c, g, or t
  misc_feature (473)..(473): n is a, c, g, or t
  misc_feature (478)..(478): n is a, c, g, or t
  misc_feature (481)..(481): n is a, c, g, or t
  misc_feature (486)..(487): n is a, c, g, or t
  misc_feature (491)..(491): n is a, c, g, or t
  misc_feature (500)..(500): n is a, c, g, or t
  misc_feature (558)..(558): n is a, c, g, or t
  misc_feature (564)..(564): n is a, c, g, or t
  misc_feature (574)..(576): n is a, c, g, or t
  misc_feature (918)..(918): n is a, c, g, or t
  misc_feature (920)..(920): n is a, c, g, or t
  misc_feature (986)..(986): n is a, c, g, or t
cagcgcataacattgatcaaatatttaccattatagtatatgaaataatctattaacgaagaagcccaatacagtactagaacaatccaccagagtcatgcaaattacatgagacataaatgtcacagaaaaaaagtaaaaganaagggaatacatggtttactccagtcatagttcaacttcttaacaaaatgtgagtnttccctttggatatgtctganatgtaagtctgttttttgcactaagacagccttctataatcatgtgataatgaaatcataatgacaaagttcatcttcccacagtttttgcnggccaatctctctaacctcagcctaggtaatttggnggcttgccctcaacatttccttaactagaataaacatagagaaatagaattagtaatactccttttacataaataccaaanatcatggcataacanctccccaaannggnaaggtataagaganatgantgnggggnnagcnaataaaganaagtaggcgagatgtctcagattctccctggggtagatcttctcagggcgataaaganaacgtncttcccaaannncccctttagacagaatctgagatggcttaaaatagctgctccagggcaaagcaatgcctgcttaaccaggaataacatactacttctaagtcctgtatagaggtgctcctgcggcagcgaacagctcgtctaccatctgactaggtaccacaagagtttttgcttttttattttaaagaaaagatctgcccatcacctatatttttatttatctcatgggattttcgtattttcctgggaatgcaggcactctgttcttatcatggctgaaatacggtaggcttaatacttcacaattatatagcacctttcacccaagggcctgttgtttggttttggttnangtgtgttttaatcagcttccagaattgccatgccttcactgtgaagtgggataggcaggtccccanaggtgata

SEQ ID NO: 487367 - DNA, 319 bp, Homo sapiens
tcgtggggtcgtatggatctgtgactgttacactccttcttcttctcatccatggagacacccccaggcccaggccaccaccaagagccacacgaagagcctcaccaagagccacacgaagagccctcaatgagcccacgatgcgccacgcaaagagccacacaacgcgccacaccacgagccggctctttgcgtggcacttggagtggctctttgcgcggctctttgtgccggtatttagccttagatggagtttaccacccgcaacgtgccacaccaggagccccgccacgagccacccaacgagccgggtaccgag

SEQ ID NO: 487368 - DNA, 146 bp, Homo sapiens
atctaccacctgactcatgagggacacccggaacggggcaccctccatactctcccgagactatccaacatggggactggacgtaggctccgctcccccccataccccctccatgatatccagcgccttgtgacacccttttcacc

SEQ ID NO: 487369 - DNA, 314 bp, Homo sapiens
atgtgtggtgttatgtacaacttgtattatttatataaatgtattgaactctctagaaaaatgtaattatttggtattacaaaaaaacaaactacggtactacataaataacaaacttagatattgtattcttatgtgtcttaaaactacatattagtgtaagcatgatatttatcatttgatatcaatttatgctttattatgacacacagggtaattatatgcatgatatctatcatttggtatcaatttttgaagttatatgcatgatttttacattgaaacaccaaattccaatctactaatatgatact

SEQ ID NO: 487370 - DNA, 175 bp, Homo sapiens
ggggctgcttcgtgagggctggccacgcgggcagctgcaacctgtggcatgtacgtctgtgtggcagtgtgggcttctggactgggggctcggcaacgaacccaggaagggggagctgttgagccaaggggacattctggcccctaagtctcaggagcaacattcccttgtaaat

SEQ ID NO: 487371 - DNA, 492 bp, Homo sapiens
atttgactgaggctgcgggtgtttgctgctatgctccggagcttgcaatgccgcttaaggacgagcagaaccactaaggacgctgtgattgatcggtccaaagagaatgagcatagtacccagtgccagacaaatcctggggagcataggctcgaacaggagaagaagtggtccaactggcgcaacgttcgggacaagctcataacttagtcttgttggagaaagctacctatgataaactctgtaaggaagttcccactataaattataacccgcagcgtgtggatctctgagagactgaagattcgaggcgtccctggctcagggtcagccccttcaggagctccttagtaaaggacttatctacactgtgtttcgaaagcgacagagctcaagtaatttacactcgagaaataccaagggtggatgatgctccagctgctggtgaaggagtgcatgaataggtccaaccagctgtacattgggaaaaat

SEQ ID NO: 487372 - DNA, 421 bp, Homo sapiens
tcaggttatgttaacacggagagagatgctaggaaatggaccatggaattagactagtttcaaatgagggctgctgagaaagccacacttctcattggtttcagcactgctctgctttctatgtgaaatacagttcagggcctggggcaacagggtggtgaaagtttaactttgtttgtctgttacattcttggtacttcagtacctgccagagatcctcttgaacacttgtttctttagcactttggagatataaaccactttataaaggcactgttattatttgcctcttacatttccactgagttgggggttaaaagtaatttacttattatcttttctaatttgttactttcaaataccaggactttgttgaagagacttctttttaatgtataaaaattgaatgtttcctaagcaa

SEQ ID NO: 487373 - DNA, 310 bp, Homo sapiens
  misc_feature (87)..(87): n is a, c, g, or t
gaagaaaaatcttaacagtataattgatataaataagaaaaaagacctggtttttaagttaactccaaactgactataagcctagangggaaccataatgggccaaaggtgccagtgaaatactggaaaattatgtcatataaagaataattgaaaaaacagatttattctaaaatagaggaagatgtgtagaggtgggtgattgaaagggtgacacctctgataagttgactaggtcttaaaaagatatctagggccatattatgttgtagtgggctgaatggtggccctcaaaatgatacgtctatgt

SEQ ID NO: 487374 - DNA, 266 bp, Homo sapiens
  misc_feature (35)..(35): n is a, c, g, or t
  misc_feature (185)..(185): n is a, c, g, or t
  misc_feature (191)..(191): n is a, c, g, or t
ctataactaacccactcccactgtgataatgacantagtccattcatgaaggtcaaaccctcatgacctaatcaccgcttaaaggctgctcctcttaatatcagcacagtgtcacttaaatttcatcttgagttttggaggggacattcaaaccatagtactttgttgcaattcaggcaagcttntagttnatgtacccatttatttccaatctcttctttaagggaatacagaactcttttcaattataacccatatgcagctag

SEQ ID NO: 487375 - DNA, 101 bp, Homo sapiens
aagtagtgtgtatagactgcttgatattatccttcatgtctctgagacactataccgttatatttattttttcagcctatttagtatgcagtgtgcttccg

SEQ ID NO: 487376 - DNA, 685 bp, Homo sapiens
  misc_feature (13)..(13): n is a, c, g, or t
  misc_feature (82)..(82): n is a, c, g, or t
  misc_feature (187)..(187): n is a, c, g, or t
  misc_feature (189)..(189): n is a, c, g, or t
  misc_feature (273)..(273): n is a, c, g, or t
  misc_feature (285)..(285): n is a, c, g, or t
  misc_feature (307)..(308): n is a, c, g, or t
  misc_feature (325)..(325): n is a, c, g, or t
  misc_feature (327)..(329): n is a, c, g, or t
  misc_feature (456)..(456): n is a, c, g, or t
  misc_feature (474)..(474): n is a, c, g, or t
  misc_feature (477)..(477): n is a, c, g, or t
  misc_feature (492)..(492): n is a, c, g, or t
  misc_feature (498)..(498): n is a, c, g, or t
  misc_feature (500)..(500): n is a, c, g, or t
  misc_feature (552)..(552): n is a, c, g, or t
  misc_feature (614)..(614): n is a, c, g, or t
  misc_feature (682)..(682): n is a, c, g, or t
gtgtgcgtgcatntgtcatttgctaccaggtgaatgtttcagttctggtttctgtttagtcttcctttggggtcgtgggtgntgcgggagcggaaaaggaggggtccttttagaaagttcaccaggaaaccagctcccctcccaccacgccgggcaggcgcacagccatctttttaaaatccgggcngnttttccctcacacccccaaacaggaactcctcaggatggcctcagaaggctggagtctctccctgtctggcgggacaccctggnggcggtgaaggnccctctggcagggggggggggnnggggggggggggcagtngnnngttttgttttcttcctgtcttctaattaaaaaagacattcctgggtgacaggcacagtgcaggagtgtgagctatcgaaacaacctggtgaagtctcgcaaggcccagcaaacttgtttacattccncagcactagtgacttgcntgnggaagtctgtaagtngtttgngngtcactgtgacggctcccacggttgtttcctttggcaaaccttttaaggaantttctaaccatcgacaaaaagtcggtctgtcaacctgcatgatctcccagagcacttcagcnacatctggtagggtatagggggggaggcaaaagcagcaggtgtgcagcagctggctgacaagctgctntcc

SEQ ID NO: 487377 - DNA, 188 bp, Homo sapiens
tgctgtgtcaggcatggtcatgctgtattcagcactttggaggccagcagaagatgcctgaggtcaggagtcgagacaaactggccaacatgggtgaaaacccatctctactaaaaaaagtccaaaattagcccggcatgatagcatgactggccaggcgtgggtggctcacacctgtaatctcagca

SEQ ID NO: 487378 - DNA, 791 bp, Homo sapiens
cccaacaatttttggggtggaagccccacctttagttttattctgagaagaaaaaaggtttttttttaataagattgttcttggctataatccaccaaaatttaaggttccaaaaaaatctccttttttaagaaaaaggggtaggaaaatatgggaatgttttaaggtcttaggaggtttggcaccctttttcggattctaaggtagctttatatttcggaaagaaagttcccatatggctttcccctacaagaaaagggctagaggcttgacaaatcaaagtgtggagaactttttactccccattcaaattccagaataagtattaagttaacagctatgcgcgtccttaattgacatggtgggtctcaggtagaaactcttcgagccccctttccttgggtgtttggattattaatcttctgggataccatggaccccttgggcttggcatgttggaaaatgttttttccttaaggcaaaacatcttcaaagcccatgtcgtaagccatcggaatctagccatgcattgaagggtcaatacattttggggttagctctgggggagtgggcccctttcattcctgaaaaaacatggatctttggcaaaatagtctttagagcagccactgaggggctgtacccctatctagggctgtggaaggagcagaaaggttcttgactatttccttcctcctgtccacacacatcaaaagtatatttccccccccgagtagtgagtgaataataaacccgcgcgacttggtgcccggtgtttatggaataaagga

SEQ ID NO: 487379 - DNA, 865 bp, Homo sapiens
ggatgaaacagtaatgtgttcttgtcagattttacaagccggcagagagaaaagaagccaaatgccacgagagctgtaacgcctccaaggggtatgatcacaaagcaagcagagaaatagatgtcgtttggacactgcctagtcgggacttgtaagatagagtatataaccttcatttttaagactgtaatgtgtacggtcagcttgctcagatagatctgtgtatgtgggggcccttccttccatttgagatttagtgaatggcattgctggttataacagcaaatgaagagactcttcactccaaaacagaagaagtgtctggtcttttaattctcgtgtacctttgcagacaatttgaatgatggggttaaagctgtacagcccaggacagtggatcctgtctgaggagtaagtgtacaataggatcttatgttaattcagtacaaaccataatcatgtaaatgctcatatactgttaggacataaagagagccctagggtgctctgaatctgtacatgttcttgtgataagaatgcatactgttgatacagaacatgtgaacatgatttattagagaattgggtatcacagggatgcttattaccgtctcattgtcttgttatgtacaagactagattcacatagcgtatccaacattagtgagtaactattcaaccttgccgagcatcaactggacatgacgtaataatacaaatgcaacgccacaacagtaaacaccgaacgggattactgaacaactgaccacaagccaaagccagcaaactcataggtgaacactagccctaaagcccaaagagacaggggaacgacaggaacgacacaacaccaaactacaaaaga

SEQ ID NO: 487380 - DNA, 391 bp, Homo sapiens
cactccggcatggtactcaggctccacatgcctgccacgaacgggggccacgcgacaatgctgccacgcacgggggacacacgacaatgcctgccatgcatagtggccacacaacaatgcctgccacgcgtgggggccacacaacaatgcctgccacgcatgggggacacgcgacgatgcctgccatgcatggggacacgtgacacacacatacacacacgggcctcacaggacatgaatgtttgcaaccccagcacccacccagcacactcaggcacaggctccctgggcgggtcacaacttcacaccttgagctactccgtgtgccaggctcttcacccacgttcccgtccccggtgctagctattgagccacactgtcttctctgtgg

SEQ ID NO: 487381 - DNA, 859 bp, Homo sapiens
caggcttctgagcacatttccttctatcaacaagatgctcgcatcgcgtcacctccctccttggcaccatgagcacctgtaagccagaccagttcacctcctccaggctccatgaagggctcctgcggcatcggagagcggcagtcggggagcggctccagccgcatctcctccgtcctgggccgagacgggtcctgtccgatggcccccagacacctacgggggcggtctgtctgtactcctctcgcttctcctctgggggagtcctgcgggctggggggcggtctatggcgtgtggcttcacgcagcagcagtcagcttcggtagtggcttcgggggacgatactggtggtggccttggctgctggccttcggatggtggcttgggtgctggctttggtggtggttttgctggtggtgatgggcttctggtgggcagtgacgacaggtgaccatgcagaacctcaatgaccgcctggcctcctacctggacaaaggtgcgtgctctggaggaggccaacgccgacctggaagtgaagatccgtgactggtaccagaggcagcggcccagtgagatcaaagactacagtccctacttcaagaccatcgaggacctgaggaacaagatcattgcggccaccattgagaatgcgcagcccattttgcagattgacaatgccaggctggcagccgatgacttcaggaccaagtatgaagcatgaactgggcctgcggcagactggtggaggccgacgtccaatggcctgcgccgggtggttggactgagctgaccctgggcaggatgacctggaaatgccgatcgaaggctgaagaaggaagctggctacctgggggacaa

SEQ ID NO: 487382 - DNA, 390 bp, Homo sapiens
gtgcagaccccactccattcccgctcctggaacacttcgtgcagctgtgcatggagccagtcggccttcagtgccagactgtgagccaagccactggggccatgtgtattactggtgcagggaggcaaggcccacattctccttcagagacaggccctggcgccagagtcttccttgggccggggggaggtcacttcagcccctgaatgcaaccagccctgcattgtctataatggagacccttacccggtgcggtggatcctttctgtctttcctgcgttttagcagtttgagtgcatttgatatttttaggtttgtttttgcattccatcctgttcatcctgcttttgctctttctctccttcattcactaaagacctgtgcaagcca

SEQ ID NO: 487383 - DNA, 330 bp, Homo sapiens
ccccaaaaacccatttggttgtgggagggccccgttttttttggtggtggcccgaatttttttcaaaaatcaattttccgggcccaccagggggcggggcccccttttggccccctccccctttgggtccttttgggccattcccccctggggtcttggtggtttgtccttatagggatattgggccccttcccccgggggcccggggtttgggggttttgccccccatttgggtcccttggccccccgggccgggtttttgggccccccccggggccgggttttggggggtttttcctttttcccttaaatcccctgggcgccttttta

SEQ ID NO: 487384 - DNA, 989 bp, Homo sapiens
ggctgtcactgccatccattggagcccagcaccccctcaaacctaaaaaaaaaaaaaaaaaaaaaaaaaaaaaaaaaaaaaaaaaaaaaaaaaaaaaaaaaaaaaaaaaaaaaaaaaaaaaaaaacatagggggtgggggccggcggcgccccccaaacaaagagatctttccacaaacacaccatgtcggtgggtggcgccgccaggcacccaccggagttataagaacaagagcgggtcgactatagcgtcaccctcataagagaaatgtcgcgcggcgaaaacgacgggggggtggggtgctccccaccaacaaaaaagaaacaccgccgcggcgggggcaacccaaggggggtcattaacaaacacagcacgccgcgatgggggttcagaggaccaatatacagtgtaggggacaacaacaaaaggagagagactctcccaaacgtaaggtcgccatataataatataaaaatatccccccccgcggtccggggcgttggttaaaccaacgacgaacagaaactccaatacaataaacaacagaacatacaaagcaaaaactaaaatcaacaagatacacacacgaacaccgaagacctacaagtacgaatatatatacaagctggaactactacaaacaggcactacaaaacactccacctatcacactctaaactcacattaccactgaaacagaacatgaagaagaaaacataaactatcaacatcaactatacgatatcctatcaaaaacttaactcaatcaaatcccaatacaatatatccaccgacgacacgacactgcgactcacacagaaacacagacaagacaaaatatatatacgatcatcaacattatatacaattatcggaatcatatatacacgcaaacaacaacataacactaaactatcacacacaactaaacaaccaaaaaccctcccacaccaacaaacacaaactaactaaatcaaaaaactaatca

SEQ ID NO: 487385 - DNA, 743 bp, Homo sapiens
  misc_feature (2)..(2): n is a, c, g, or t
  misc_feature (56)..(56): n is a, c, g, or t
  misc_feature (100)..(101): n is a, c, g, or t
  misc_feature (110)..(110): n is a, c, g, or t
  misc_feature (118)..(118): n is a, c, g, or t
  misc_feature (127)..(127): n is a, c, g, or t
  misc_feature (148)..(148): n is a, c, g, or t
  misc_feature (150)..(152): n is a, c, g, or t
  misc_feature (155)..(155): n is a, c, g, or t
  misc_feature (159)..(159): n is a, c, g, or t
  misc_feature (163)..(164): n is a, c, g, or t
  misc_feature (167)..(168): n is a, c, g, or t
  misc_feature (172)..(172): n is a, c, g, or t
  misc_feature (183)..(183): n is a, c, g, or t
  misc_feature (194)..(194): n is a, c, g, or t
  misc_feature (242)..(244): n is a, c, g, or t
  misc_feature (257)..(258): n is a, c, g, or t
  misc_feature (260)..(261): n is a, c, g, or t
  misc_feature (279)..(279): n is a, c, g, or t
  misc_feature (281)..(281): n is a, c, g, or t
  misc_feature (305)..(305): n is a, c, g, or t
  misc_feature (312)..(312): n is a, c, g, or t
  misc_feature (317)..(317): n is a, c, g, or t
  misc_feature (319)..(319): n is a, c, g, or t
  misc_feature (324)..(324): n is a, c, g, or t
  misc_feature (393)..(393): n is a, c, g, or t
  misc_feature (424)..(424): n is a, c, g, or t
  misc_feature (454)..(454): n is a, c, g, or t
  misc_feature (459)..(459): n is a, c, g, or t
  misc_feature (471)..(471): n is a, c, g, or t
  misc_feature (478)..(478): n is a, c, g, or t
  misc_feature (506)..(506): n is a, c, g, or t
  misc_feature (587)..(587): n is a, c, g, or t
  misc_feature (643)..(643): n is a, c, g, or t
  misc_feature (651)..(651): n is a, c, g, or t
  misc_feature (656)..(656): n is a, c, g, or t
  misc_feature (670)..(670): n is a, c, g, or t
  misc_feature (720)..(720): n is a, c, g, or t
anggcagcccggtgcagccctggctttcccctcgctgcgcgcccgcgccccctttncgcgtccgcaaccagaagcccagtgcggcgaccaggagccgganncgcgcccgnaccgctcncgggaacgngaccccggccgcccagagatnannnacnaacnaaannctnntgcncgtcctcttgntcctgctgagnatttaggccacagcacctatggggctgaatgcttcccggcctgcaaannnaaaaaatgagaannanncaaaagaaaaaaaataanangcaagagatgcaaaaaatgagaanagaaagnaatananattanatacaaaaaaaaaaaaaataaaaatggcgtgcctttcacaggacatctgtgggagaaccccggagcagntgcaatttgcaccagactggcatggagacgnggagagctcctgtgaatagagaatgttcgnggccntgcatccctcgngcccccntgttgccaaacaaacggtgaccctgcgntgagccttgtgacgaatggccctctaatgaaatgcctccctggtgccccccgggggtacctcggggaaaagggaactgccnagtaaaaaagcgcacggggccccctggtggtgtatcaaacgggcctcccaccctgnccagccangggtnggccaccctgtcgntgggatgcatgcagagggccggggccctccccatgccctccctgccctgntgcccccccctggcctttctcca

SEQ ID NO: 487386 - DNA, 152 bp, Homo sapiens
tgctgtctcaaaagatatgttagtatataactgatatagtggtttaatgatgggcaaagctgtggggtgtcttagaggctgtggaggagttatcagaaaaaggatagaattccagatgatggaatagtggaaatagtggagacagcatatca

SEQ ID NO: 487387 - DNA, 263 bp, Homo sapiens
cggcacgaggttttggataatttatttaaaatcctctcttaatagactgtgggttgtattaactgcatttaataccagaatattcttacaatgtactgaaaatccagagtgcagggagtatactctctctggtcttcttccccggtgggaaccacctaagtatgtggcctgtcattgttcttcttgatacttgctctcataatttgtttgaaactggctgactttgcctgaaaaaagtaataaatacaaataagcaactttca

SEQ ID NO: 487388 - DNA, 170 bp, Homo sapiens
aagtaagcttgtatgagaggtcatgactttcatgaaggcgttagagctgtttaattgataagcccagagtccaaaatggaaccagctgatctaaaggagtctctggggaggtgtgaatactccctttaggtctttgggacgcaggatttgatatttgaggcacaggcttt

SEQ ID NO: 487389 - DNA, 99 bp, Homo sapiens
agggtggtcaggtacaatgaaaccaaactggcgggatggaagcagattattctgccatttttccaggtctttgagtgcacgtcaaatctggggctgatc

SEQ ID NO: 487390 - DNA, 750 bp, Homo sapiens
  misc_feature (569)..(569): n is a, c, g, or t
gggatgtaaagaaattggaacatttgaaggctgttggtgggaatggtaaaatggtgtaactgctatggaaaacagtataatggttcctcaaatagttgaaaatagcaccaccacagggtctagcaattccacttttgggtttatacccaaaagagttgacagcaaggtctcaaagagatggctgtatatctatgtttatagtgttattcacaatagccaaaaggtggaagcaacccaaatgaactggtaagtaaaatcaagtatatacatacaatggaatattattcagcttttggaaagagagggaaattctgacacatgctaccacatggacgaaacttcaggacatcgtactaagtgaaataaaccagtaacaaaaggctaatatgtatgattctacttatatgaggtacctaaagtagacgaattcacagagaaaaagtagaatggtctttgctaagactgctaggagagggaaatgtggagttatttaattagtatagaatatcactttgggaagatgaataaagttctggagatggatggtagtgatggtggaacagtaatgngaatgtacttactaccattgaactatataattaaaatggttaaatttcatacacatattatcacattatttaaaaaggcccaatgcttaaatgtaggcctaacttacaaaactctttgagtaaactaagggacttattatcttggatttgcgatgaattctttgtatgaccccagcaccgt

SEQ ID NO: 487391 - DNA, 139 bp, Homo sapiens
ttgcagccgtcatgcttgtctctgcccctccctgtttgcggcggtcgtgtctgggaacccccttcgctgtcaggctcccggccagtgactggcagtgtctgcagtcgctccgctgcaacggggaacgtggcggtgagca

SEQ ID NO: 487392 - DNA, 201 bp, Homo sapiens
  misc_feature (72)..(72): n is a, c, g, or t
  misc_feature (88)..(88): n is a, c, g, or t
cataactatgcctgatagctgggcatgagtcaggctcacattcatgaggtgattccccccaggccagaagcncgacatcttcatcgantttgcccgcgccttcaaccaggacagctaccccttcgacgggttggggggcaccctagccatgccttcttccctggggagcaccccatctcccgggacactcactttgacgat

SEQ ID NO: 487393 - DNA, 252 bp, Homo sapiens
cctgtggagaggggtctcatctcctctctcactcagactgcaagggtgagaacatgattcatggggaaataaacacaaggtcctgggctcaaggtgtcctcccacctcagcctgctgagtagctgggaccacaggcacacaacaccatgcctggctaattttttttttttttttttttttttaatttggaaacaagatctcattatgtggcccagggggggtctgagaagctctgtgggctacaggagcaac

SEQ ID NO: 487394 - DNA, 176 bp, Homo sapiens
ttctagaggatcccatcaagcgcgttctgcgtggggtgtgtgcgtcgggtctgcatgatgagccaaaatatcggacgggaaacttcgagagaggatgcagctattagatggtcggattaatctttcggccgtatacccaggtcggacgacgaatgtgcatgctgaatgcgcctctt

SEQ ID NO: 487395 - DNA, 211 bp, Homo sapiens
ctttctcagagatattttagtcaacagaagactttttaggtctggagacaagcgtagacaatgttactaacccagaaaaaggatacacttgggatgatacattcacaggaggagatagagataccggtttctctatagaacagggaagcatagtagactcccctgtgatgttagagtgtggttggcggctatagatcaagagaaggtctgg

SEQ ID NO: 487396 - DNA, 1241 bp, Homo sapiens
gatccgcgccgccgccgaccgccgccgcgccgccgccgcctccgccgcggaggaagacagcgccgcccgcgcaccgccagcgacccacgaccgaagagtccaccgacacaggcctcgggccagcggccaggagctgcctccaaaagagaaaaagaaaaaaaaaaaaaaacaagaaacaaaaaaaaggagaaaaaaaaaaaaagaagaaaaaaaaaaaaaaaaagacagcagcgaaagagcaacgcaagcagcgaagaccgacaagagacgacaaggggccgaggaagaggaacaaggagagacaaggacggaacacgagaaagaacgaaaaaacagcaaacaggaagacagcccacagagaagaggaaacaacacagccgagcagtggagaagcagggaggaagcgcaaccaagaagaccaagagagaaggagaagcgaaatacgaaagaaagagagagaggagaaagagataacgaacaagaagccagagaaacgagaacgcagagatagcaggagagcgagacagacacgacgcagagccagaaaggcacgaacggagacaaccagcaagagcagaagaggaacgccaaagaagagaagagacgagaggaacaacaagaacaacaaagaaacacagaggcagaagcaacacaggacaccagagagagaccaacccaacagcgaaacagacaaagcaagaaacaagcaaggagaagaaacaaaaaagcggacaacacaagagaaaaggaagaggagcgcgaagaagagcgaagaagacaaaaaacaaacaaagaagacgaagagaaaaacgaaaagaaggaagaacaaagacagaaagaagagaagaagaaaaacaagaaagaggggcgcaacagcgagaacagaaaccgagaagaggaaaaagaacagagaagaggccagaagacgcgaaaaaggaacaagaaacgacgcgccaagagaaataaacaagacaagcacaaggcaaaaggagaagaccaaaaagaagagggatcaacagcagaaaagggaggagaaagccagaaagacaaacgacaacagggagcccgagaaaagaagaagagacgtagaagaaagagaagagcgaacgcagaggcggaagagagagagagacagagcaaggcaaagagacaaaacaaccaagccgggacgaagcgcgaagagcatcaggtaagaagccgcacgaaagaaagagcacgaatagacacgacagtaagacacc

SEQ ID NO: 487397 - DNA, 514 bp, Homo sapiens
gcggccgcctactactactactaaattcgcggccgcgtcgacctcctaaagtgctgggattacaggcatgagccaccacatctggcattattattaaattttattgacaatacacatcagtcaagttatggaatgggagatgttataaaaggtgttcccataaggaaagaaactgaaatgcattgatttgactctgccatgacactctaatgaaatcgaggcctgagcccatgcctaggaaaaatggagtttctaggaggcaaacaaaccatgtaggggttgagagtcaggaggcagacacaggggcagatgcccacatttaaacccaaggccatcagggaaacacagatctgagaaatatatacaaggcacaacgtgacagcaagcatcccttactctaaacttttttctaagcttgacccagtcccaatttaaattactatgtatagtacgctatttaattaaattacagattaaattgaggttgtcgagcgccgtcgatttagtagtagta

SEQ ID NO: 487398 - DNA, 686 bp, Homo sapiens
  misc_feature (526)..(526): n is a, c, g, or t
  misc_feature (587)..(587): n is a, c, g, or t
aactcaaagggaataatctacagcaggaggtcaaatgtgccattgaaaagggggttaactaaatggtcctaataattttaatacctataataatgcttttttcttctaggaacttcagttccaatctggactaaaagccattatagaggtccagggtggcctagctatggatatttcaggtgcaagggagttaacctgggggaatcgtgagtctaaaacccgagtgaaaaataggtaagggttaatgcattatccattaatgaattacatataggactatatccagagaacttccgaaatatgtttggggaattaatcttctgacttttcaaaatctatgcttcctattgggaattataaaccgatagagttggaagtgatcataggaaataattctgcctatagcttcttatgagcaggtcagtacctattatgactcagccaggaattttcctgcttttaaggacatccttagacaggatgccctgtgaatcagatggttaatcttctttgggaattccaccangagaggaaatttcactttaggtaacctttccttcttggtggcctcaactggggaaaataanattgataattcatctggcgagaactaccttttaatggtaagaggcctaagctttcatcagattcctttttcaaataaaacctttaggtcctttaatttt

SEQ ID NO: 487399 - DNA, 198 bp, Homo sapiens
gagtcttagacagtgaggagatcttatccacacttacagcagagaggatgttgaccaggcacatgtgagacggttaaaaaatatagcagatggtggtacatctttgccagaactcgagaggctgagatgggaggatccggtccgccccaatgagtcaggttgcaggagcatatgtgtacgcaccagctgacacaagca

SEQ ID NO: 487400 - DNA, 310 bp, Homo sapiens
gacaacccataattgccttaccgtttcctttcaagggtccatattcaattgaaccaaaaactttgtaggcctggcttccaatggagattatatagcttgtggaagtgacaataactctctctacctgtactataaaggactttctcagactttgctaacttttcagtttgatacagtcacagtgttctcgacagagaccgccaggagatgatacagtgagtttgttagtcctgtgtcctggacggccctcccgcgtggggtgtccatgtcctgattgctctaccatcaggtccatcaggtctagattgat

SEQ ID NO: 487401 - DNA, 866 bp, Homo sapiens
  misc_feature (86)..(86): n is a, c, g, or t
  misc_feature (89)..(89): n is a, c, g, or t
  misc_feature (628)..(628): n is a, c, g, or t
agcggggcgggcgctgcccacccggcggagccgagcggcgtgcagaggctacaagtgccgtagctggtgattgggggactttctcnggnaaccgtgccgggagagcgcgcggtgctggagccgcaccgggtggccgaagcagaagactttccggaagctgctgggggatgtctgactagctctcatggagctccactaccttgctaagaagagcaaccaggcagacctctgtgatgccagggactggagttcaagagggctgcctggtgaccaggcagatacagcagccacaagagctgctctctgctgtcagaaacagtgtgcatccaccccaagagcaaccgagatggaagggtctaaacttagttcttctccagcatccccctcctcctctctgcaaaacagtactcttcagccagatgcctttccaccaggacttctccactcagggaacaaccaaataacagcggaacggaaagtctgtaactgctgcagccaggaattagaaacttcttttacctatgtggacaaaaacatcaacttggagcagcggaaccggagctcgccatcagcaaaagggcataatcaccctggggagcttggctgggaaaatccaaatgagtggtcncaagaggctgccatatctttgatatctgaagaggacgcgatgcatcaggttcagaagccacgtcttcacggaagtctatagactatggttcaatcaggccatctggtacttgagtcctgggatcctgctcgtgatcatctcttacatcgttccaacggaaagtgaaggtgagcccaacactgttgcagcccggagactgggccgcctgcgcaacgcaactgcacaccgggggaccctg

SEQ ID NO: 487402 - DNA, 711 bp, Homo sapiens
  misc_feature (318)..(318): n is a, c, g, or t
tcttgtcctccacttctctccggtgtaggtctgtgtttgtgtttgtgggagaagacatctagggcactaattattaatattttgtggcttgtactcacttttcgtttgggagggggatatttttgtctcttaaaaaaattttaaaaggattctgggggtgtccgggcgggtgggcaccttctttttttgtttctggggggtttgtttaccccattttccccatgtttgttgtttgaaacggtgttaatggaatttattgggttggtgcaggcacaacagggcttgggcccaattgggtgtttttttatgggccgctcnagggaatttttgaaagcctttgccccctttattggtttttttaaggccgaaagttgtggccagtgtcccccatcccgtgagggtttggattggattaacaaggttttggccctttttttaaggggggatgcccggccggccgagtttgatttcttttgggggtttagcaagcaaataaaaggccattcatttttttttttgggtgagggggccgcttggcttttgcagggtttttttccccccttttggccggaggttaagggggggaatcaacggtttttcccaaaagatttggggcgggggggttgtttttttgcccccccccctgggctgtttttttgggttttttcttttggaatgttgggcattaaagggggtgttgcccccctttca

SEQ ID NO: 487403 - DNA, 325 bp, Homo sapiens
ctatagttggctgacattatatattctctaccaaattaccagactaaaaaatatgtgactatcgggcttaacaatttcacatttattttctcaaaagaggtttggcttttattacacataatactgaaattttccatcatgttgggcggagaatgcctactttgctattcctgtggcttccttgggcacgcttttaatttccccgcgctttaaccgttcttttcgcagaacacatgatatgcatgagtgtatactctcacaagaccatagggcgaattagataatgcctgcaaatctatctatctctcacacactcacacacaca

SEQ ID NO: 487404 - DNA, 834 bp, Homo sapiens
  misc_feature (746)..(746): n is a, c, g, or t
  misc_feature (762)..(762): n is a, c, g, or t
  misc_feature (781)..(781): n is a, c, g, or t
gtgacggcccgtttgcagccgccggagctactgcaaggcaaaagccggagtggacgtgtcttttgaaactgctgctctttcacttctcaggcgtcaccgagagctcagcacccaggctgaactctgtaccattgtgaagaatggaagctgatgcatctgttgacatgttttccaaagtcctggagcatcagctgcttcagactaccaaatggtggaagaacatttggattctgaaattcaaaaactggatcagatggatgaggatgaattggaacgccttaaagaaaagagactccaggcactaaggaaaagctcaacagcagaaacaagaatggctttctaaaggacatggggaatacagagaaatccctagtgaaagagactttttttcaagaagtcacggagagtgaaacactgtggtttgccatttctacaagagactccacattcaggtgtaaaatactagacagacatctggcaatattgtccaagaaacacctcgagaccaaatttttgaagctgaatgtggaaaaaagcacctttcctttgtgagagactgctatcaaagtcattcccacactagcactgctaaaagatgcgaaaaccacaagattatgtgtggcgtttactgacctagggaaatacagatgacttcaccacagaaactttagaatggagggccggttctctgacattcttaattacgtggaatttatggggccccatttcgaaccaaagaatgtggnccacttccacagtggncagaaacatcgggaaaatnttcgacccgtgtgtaggccacaatggaaaggttcgtgaaaagggggacattat

SEQ ID NO: 487405 - DNA, 999 bp, Homo sapiens
  misc_feature (342)..(342): n is a, c, g, or t
agaagttgcagtgagctgagatcgcgccactgcactccagcctgggtgatagagcaagaccctgtttcaaaaaaaaaaaaaaaaaagagggttttttaaattaagggtagttcctatgattttaattattagcggctggtcaagtagaaggtaagaattacatagcgggggttaattgattttccaaagaatggtaacttgtgaatgggacagtttttcgggatgcttttagacgtgggccttagacgtgagcagacattgaggggatctaaatcgcaagcaaaggttcgggggtgaaggagattattttgtgcctccgagcttgtgtgagggcataaaagnggaccgtaatgaatctcttgagattgctgggagaactttttgttttgcggaaaggggcttacgtgggttgtgtctctttttccatgggcaccgctggaatgtattggctcgctggcgtgcgagcattcatactctggttcccttgatgtccgaggatgtctcattttccttcccaaagtgttttgaagagatcagcggcttttcggccggggcgagacgacgcgtgggcgcattgttgtatctcctcggggccgtgggggtgctttcgggggcctttcaggggttcatcgttccgacgtggggggtatgttctccccttttccacgaggtggggactttctccttttgttggcgcgtgcgcccaacggctgtggttcaattttataaccctcttggcattcggacattcgccctgcagagaggggtttacacgttttttccgcgggacccagcgggcgtgccgttgttgtgaccgcgcagggattggggggtcccttgttggaccactgggtccttaaccaggagggcgggcgtgtagaaccttctccttttgcgggagacaagggctcggctcccccagggctggccccacaggggggggggcctgcagataaggtttatccctcctgcgcccaggcccttgcgtcacaggggctt

SEQ ID NO: 487406 - DNA, 314 bp, Homo sapiens
atgcgctgtgcagcccggacgggtgccaaactgcgcttggcgcgtactttagcgcgcgatgcgtggcaccttaagcagagataccgtatactgcattagtacgccacgactgcttgacgaatgaaaatacttttaccgacttgaacgaacacctacaccagattaagacaagggatttttaaaataagggtgcctacgcatgtaaataaaattaacaggatgcctgcttttgggaaccgtgttaggctaaacgattaaccacgaacgcgccgagcacgagttgaacgtgatggcgaggcatggccgctgacata

SEQ ID NO: 487407 - DNA, 134 bp, Homo sapiens
  misc_feature (22)..(22): n is a, c, g, or t
  misc_feature (27)..(27): n is a, c, g, or t
  misc_feature (32)..(32): n is a, c, g, or t
  misc_feature (52)..(52): n is a, c, g, or t
  misc_feature (85)..(85): n is a, c, g, or t
  misc_feature (108)..(108): n is a, c, g, or t
tatagaaatgatcagttcattncggtnaactntaataaagaatggtatttcnatacaaggcaagaacatttattcattataattntgtggtgattagaaataaacatntgttttaatgccaaatctagtagttg

SEQ ID NO: 487408 - DNA, 739 bp, Homo sapiens
  misc_feature (328)..(328): n is a, c, g, or t
  misc_feature (345)..(345): n is a, c, g, or t
  misc_feature (557)..(557): n is a, c, g, or t
tggggagtggggagaaatgtgcggactagagtggaagataggggcagccgctggggccttgccacgtcccatgacattagggaaccagccattgacagaccttgggtcagaagcagagataagagacatgaataagaacatgatctcccctcaaggagatcctgggcttgttgagggaacagcctaggaaaaggcctatcctcttgagtcctgggctcgaggcaccactgcacattccccaattctctgagcaccaacaaagtctgtgcagaagcatctaggaccactgctcacacaggaccactccaggcttctttctcctccttgngccaatctttcctttgntctcaagatggcacatctgtgccaggctccagcgctcatctcccgggtttggaggggaagcacagtttacctccctacacagcccactctccaggttctgtgacccactgctttagctgtggtctcaacaccttgctttgtccctcacacccctgcccatgctaagggtccagggaaagaatgttgccaggggcaccaaacaagcaattggncctgaatctgatcaaggattactgctaatctcttccttgaggaacatttaatacaggatgccaaaaaagagaaatctttagagaattctctcacaagatcacaccttaggacttgtactcggaacatgcagggccctgacccagggagcagcaggaatagtactcactctgagcccacattg

SEQ ID NO: 487409 - DNA, 193 bp, Homo sapiens
  misc_feature (50)..(50): n is a, c, g, or t
  misc_feature (52)..(52): n is a, c, g, or t
  misc_feature (170)..(170): n is a, c, g, or t
caatgatgtcttggtcaagtgaagaaacaggtgcagagagttgagtcctngncaaggtatgccattagcaaggggttggaccgagagtcaaatgcagactaccgaagcatctgaacaagtcaaagatatggaggcttaatgggagtcagcacttgtggcctcagcatgangggcaaggcgtcggctaactttt

SEQ ID NO: 487410 - DNA, 161 bp, Homo sapiens
ggacgatgtggcgcccctacgtatcatcagtgctgccaaggttggcgctacatgacgtcggaggcccgctgttcgtgctggagaagagcttgccattgacacgcagaattacctggagcagcagctgggcaagcccctcctgcgcatcttcgagcccatcc

SEQ ID NO: 487411 - DNA, 426 bp, Homo sapiens
tagactcaaataaatagactccaaataatagaacattttaatacctccatgtcagataagtataaaaatcctggcaacaaaaacacccaagaaatactggttgaaacatgtttataaaaacttctcaaaatataaaagcgaatgcttatacactgttgatgggaatgtaaattagtacaacctctatggaaaacagtatggagatttctcaaagaactaaaagtagaattaccatttgatgcacgaatcccactactgagtacccaaaggaaaataaatcattatattgaaaagacacccacacttgtatgttaccacagtaaagttcacaataacaacgtcatggaatcgatctaagtgtctatcaagagatgactggataaagaaaatgtggtatataaacaccatggaatatattgcagccat

SEQ ID NO: 487412 - DNA, 162 bp, Homo sapiens
gggtacgcatacatacgtatgcgtgcgcatgtacacattttgcacatgtgtacgtgcacaatgagcggcacatgcagcacgcgcatctcgtctggtggcaaggctcacggcttaaactgtgacggctttcaccgtcaccgtactgtatacctacgtacactg

SEQ ID NO: 487413 - DNA, 219 bp, Homo sapiens
gcaattctcctgcctcagcctcctgagtagctgggattacaggcgcccgccaccactcccagctaatttttgtatttttagtagggacgaggtttcaccatgttggtcaggctgttctgaaactccttacctcaaaatctgacctccttgctctttcatactgctgggtttactggcatgatttagatcatgctctcttatttaaaagtgtgtcgagtg

SEQ ID NO: 487414 - DNA, 736 bp, Homo sapiens
  misc_feature (582)..(582): n is a, c, g, or t
ggttgtagtgttgtggttttcagcctgttgctgctgctgctgtatgctggctaggggaagcgtcgtggggaaggatggtgtgcgaaaaatgtgaaaagaaactgtggtactgtatcactcccagtatacatggaacgatggtgctcaggaataccacagaaagtggtaggcagagaataggctgagatgaatatagtaaagctttgacttcaaaaaaagcgagattttgatccatatgggaagaattagtgctccactctgtagaattgtgtcaaaaagattctgtgacacggcacatccaggttcctcattgactggcacgggctgtgacctagaataaaggcatctgtgcgatgtgtggtgaacacaaggtttaggaaagtacgcaaaaaaggtgaccaagcagaacatctgtcgtagatgtatggatggaatgtctggctttctaaatgatttgacttgctgccttgaaatgtgacaacggccttgatgttcacttagcagaataacctgtctgagagatgcttgagtttaacaccagaggaatttgattgtgtactcatattgctcttcatgtacganataagcaacgggtgtaactaggtcgtattgcggtaaactggttggtttgccctttataagaaatttaaagaactaaagtggggacatttccatgagaatattgctcagttcgtggattgcaggttgatttaacctttatcatttaattgtcccc

SEQ ID NO: 487415 - DNA, 471 bp, Homo sapiens
aagatttcgggctatcttctctagcttagatttcccccccaccccaatggcctgtttccagattccccatccccagtggtgtttccttactccaggcccccagtggaggttttttgcatgaagattccccacaatcttaccaaagaatttaaatatgctctggtttggggtctctttgttaaaccccatcctcaaaaagtgggtaaagcccctacgttggaggatgaggatgtcattccaattgtgaaaaagtgaaccctttcccttttcccatttgccgggggaacccccacagggttccccatggtcaagccccccacccccgttctttttggttttggcagtccctggatcaggatcccggggggggagatggaggccccccaactggaacttcttttgttttcccttggggtccccctgtatgtcgaactgcctaaaaaatttggtaggctggtccgctccctgcca

SEQ ID NO: 487416 - DNA, 224 bp, Homo sapiens
cctcacagacggcccggctaatttttgtatttacagtagagacaggatttctccgtgttggtcaggctggtctccaactcccgatttcaggttatccgcttgccttagcctccctaagtgctcacattgcaggcgttagccgcgaagtccggccagatcctaggtttgtgattacgagattggctaggtcagcttgttgtcttgagcgggcgcaggctgtgagg

SEQ ID NO: 487417 - DNA, 82 bp, Homo sapiens
aggtgatgatctcatcgccatgcttgttgacagtgcgagtctgagttgccgtcagctgcgattgttcctgggctgcttctcg

SEQ ID NO: 487418 - DNA, 398 bp, Homo sapiens
ctgggattatgaatcaggacgagccgtgtgtgttagacaggaacttttaatttttttgagacaggatctttctctgtcgcccaggctggagcacagatggtgccatcatagctcattgcagccttgacctcctgggctcaagcaatcctcctgtctcagtctcccgagtagctgggactacagacgtgtgccaccacacccagctaatttttgtatttttttgttgtaaagacggggttttgccatgttgcccaggcgggtcttgaactcctgggctcaagcaatccgcccacattggcctcccaaagtgctgggattccaggagtgagcccctgcacccagcctagacagcaactgttactaagtggccaaccagacctgcagcaaaggggctgctc

SEQ ID NO: 487419 - DNA, 721 bp, Homo sapiens
  misc_feature (29)..(29): n is a, c, g, or t
  misc_feature (66)..(66): n is a, c, g, or t
  misc_feature (78)..(78): n is a, c, g, or t
  misc_feature (89)..(89): n is a, c, g, or t
  misc_feature (98)..(98): n is a, c, g, or t
  misc_feature (115)..(115): n is a, c, g, or t
  misc_feature (121)..(121): n is a, c, g, or t
  misc_feature (132)..(132): n is a, c, g, or t
  misc_feature (151)..(151): n is a, c, g, or t
  misc_feature (171)..(171): n is a, c, g, or t
  misc_feature (186)..(187): n is a, c, g, or t
  misc_feature (214)..(214): n is a, c, g, or t
  misc_feature (218)..(219): n is a, c, g, or t
  misc_feature (236)..(236): n is a, c, g, or t
  misc_feature (241)..(241): n is a, c, g, or t
  misc_feature (243)..(244): n is a, c, g, or t
  misc_feature (254)..(254): n is a, c, g, or t
  misc_feature (257)..(257): n is a, c, g, or t
  misc_feature (277)..(277): n is a, c, g, or t
  misc_feature (283)..(283): n is a, c, g, or t
  misc_feature (285)..(285): n is a, c, g, or t
  misc_feature (299)..(299): n is a, c, g, or t
  misc_feature (301)..(302): n is a, c, g, or t
  misc_feature (316)..(316): n is a, c, g, or t
  misc_feature (318)..(318): n is a, c, g, or t
  misc_feature (333)..(333): n is a, c, g, or t
  misc_feature (355)..(355): n is a, c, g, or t
  misc_feature (363)..(364): n is a, c, g, or t
  misc_feature (372)..(372): n is a, c, g, or t
  misc_feature (380)..(380): n is a, c, g, or t
  misc_feature (435)..(435): n is a, c, g, or t
  misc_feature (475)..(475): n is a, c, g, or t
  misc_feature (710)..(710): n is a, c, g, or t
cgggatcggatacttcgtcttcggtcgcnatgtttgtgctttggagggcttcctgggcactgtagnaggtctggttanaggatggtcantggccttcntggcctttgagcgctanattgtnatctgtaagcncttcggcaaattccgcttnagctccaagcatgcactganggtggtcctggctanntggaccattggtattggcgtctccatnccanncttctttggctggagcnggttnanncctgagggcntgnagtgttcctgtggccctgantggtanancgtgggcaccaaananngcagcgagtactanangtggttactcttcancttctgcttcattgtgcctctntccctcanntgcttctnctaaaatnagctgctgagggccctgaaagctgttgcagctcagcagcaggagtaagctacganccagaaggctgaacgggaggtgagccgcatggtggttgtnatggtaggatccttctgtgtctgctacgtgccctacgcggccttcgccatgtacatggtcaacaaccgtaaccatgggctggacttacggcttgtcaccattccttcattcttctccaagagtgcttgcatctacaatcccatcatctactgcttcatgaataagcagttccaagcttgcatcatgaagatggtgtgtgggaaggccatgacagatgaatccgacacatgcagcncccagaaaaaa

SEQ ID NO: 487420 - DNA, 415 bp, Homo sapiens
tccagctactctaagactgagcaggagaatggcgtgaaccaggttggtctcaaatgcctggactcaagtgatcctctcgccttggcttcccagagtgctggaattacaggcgttgagccccacaccaaggctaaacacttttaaattgggcaatttttctttttattgttgagtggcaagagttcttttatatattctagatacaagtccctaatcagatctataatttgtaaatagtctctcttattcagcggattggttgtcttttcactttcttgatagtgtcctttgaagcacaaaagtttttaatttttataaagtccagtttattcatttttgttgttgttgttgtttgcacttttggtgtcatatgcaataaagcattgcctaatccaggatacaaatatttacccat

SEQ ID NO: 487421 - DNA, 108 bp, Homo sapiens
  misc_feature (37)..(37): n is a, c, g, or t
tgaggatccaatgcttagtaggcaacctcaaaacaanatgataaccattacacacactaaaggacgaacctgatctcttatactagtataagagatcaggtgcctact

SEQ ID NO: 487422 - DNA, 919 bp, Homo sapiens
tgcgattgagaatatcgctaccttgttcaaatgccatccatgaggcacctgtaggctacccaagagaagccttggatctcgaggtggtacacgtgccatatgtttgagcccaagaggactataattacgtctcggattatgtgcgcgttcccctctgaaattagcctctggcgcccagagatagtaggccctcgacattcgtttgtgtaattaccacggtctggcgggtaaggcctcgcaaaaaggtaggatatctgcctatggtccagtaagaggtcatctatgcactttatcaagagatagacagagagggctcactatcggagatcaatactcatacactagtgccctatggaatgcttgaattcttcttcagcatgcattatggacggtaccgtactaagggaaatggtgttatgagtttccgctcagataggggaactcaaggccccaggtaaggtagctaagtttgaacgaatccgcacttttccccagacattgttgttatcacactctggtcctggggaatattcaaaccccgtttttaaccgactctagatgttctgcggctaagaagtaatcaatgcttcatgttcatggcgtggacagaattgcttacctgtttaccatggacttgctccagagtttaattcgcgaatcgtctccagagtgaggctatttgagtccaggccttgattgaatagccccttcggtttttctcacggccatgtgacaggtgcacgggcacttgtccttaagggcttgtgtccatcctgcattttgccgttgccttgcgatatggcgcagtatcccaaaaatcaattatcaggtgcccggttaccgaccagaaggcaagaattttacgcccacgggggtggaatttgacatgtggacctacacagacaacgaccgtgtacgg

SEQ ID NO: 487423 - DNA, 192 bp, Homo sapiens
agagtagtaatagtacgaacataaaaataaaatatgtaatctatcacaaacagtcctatatgcagaataatagtaatataccctatacataaaaaagcgtactagaagtatataatctaagtagtaaaaaaacaatagtacgtaacactagaaataatactacacaataaaaatacaataaaaatatacaga

SEQ ID NO: 487424 - DNA, 169 bp, Homo sapiens
actgtatttgggaaattgtttaaggcaggatgcttgcttgtgagaggtctcctcttgtgttgactctgagatgccagagtcacgttgcttcgtgacaccaatttgaactggggttcactgttggcaccccatggctgccccaggtcagaaaaggaaaggccaagattcc

SEQ ID NO: 487425 - DNA, 84 bp, Homo sapiens
actgaagacagtgccacttactactgtgccttttcctttccctctactgggggatatattgaggcggacaccgataaactcact

SEQ ID NO: 487426 - DNA, 253 bp, Homo sapiens
agccccggaaaactagccgacggcttctagactggacagggttattttttattttttatatatgaaagtattggggaagtatgtaaattctttatatgaaactatctagttcataaatcatagatttcatattactcagtgcaactgaactgaaagttcagaagagtcattcatattgttccaagtttgtaatggttgtcacatgtcacatctgtcttttcagtaagtgccagagtgttttccactgtttctg

SEQ ID NO: 487427 - DNA, 129 bp, Homo sapiens
tgggtcgaccgtgcttacaggctgtctgtcatcagcattgtgtgcatttcagtattacacatgctagcgatcccattccagtgagttcaccctctaaatcaccacggtcaacccacaagccacggtcaa

SEQ ID NO: 487428 - DNA, 679 bp, Homo sapiens
ccacgaatgtgcgtgaccgtggcgccatcgaagacatcgagcgaccgcggtagcgccaaggaagccacgatcaagcgttgtgaagacaacaactccaccatcgccgcctacctggccggccaggtcgacctgatcgccagtggcaacgtggtcatggtggccatcagcgaacgcaaccccaagcgcgtaccggcactgaaggtgaaactcaaggattcgccggtgtacgtaggcgtgaacaagaacgagccggcgccgttggaaaaggtcaaccagatcctggtcgcggccaaggctgacggtagcctggagaaaaacgccatgcagtggctcaaagaaccgctgcctgccgacctctgacgcggagctcaacgatggcctatcaattcgactttgtgccggtgctggccaataccgacctgctcctgcgtggcgcgctgttcacccttgagctgacggccattggcgccaccctcggtgtggccctgggcactgtcggcgccgtggtacgggcgtggaagatccagccgtttgcgtggctctttggtgtgtatgtcgagttgatccacaacacgccgttcctggtgcaactgttcttcatcttcttcggactgccgtccctgggattgaaaatcaccgaatggcaagccgcgtgctggcgatggtaatcaactggggg

SEQ ID NO: 487429 - DNA, 233 bp, Homo sapiens
cacccctcatgtgtaatggaacttgcgttccgccctacatgcacccatggtggcaatgtgatctgtgcttggaaatcaactgtggttgtaccctgccagtgctgtgcaatgttggatgcatgccccagtgatggggggcactaaggtgtacatatgtgccctgatgtcaaggctccccatgcatggaagggatggctccatgtggtaatgacatgggcttggcatgtgagcat

SEQ ID NO: 487430 - DNA, 220 bp, Homo sapiens
gacgaagccgcttgcgaacaaggcggcgagcatctctacatagaactgtcccacgttgtaggctacgtcgcgcgcgcgcgcgagaaacgtcttcatgctagtaccccttctgtacgttcacgagcttccgatcgtcgctgatcttccacacgtcgaggggcgcgtcctccttgaggacgcccacggcgaaaatttcgaagccttctttggggttggggca

SEQ ID NO: 487431 - DNA, 91 bp, Homo sapiens
agggggggggggggggacccccacccttctgcaccccagctgagcgcccctcgcggctccccacttgttacctgctttataaatatttctt

SEQ ID NO: 487432 - DNA, 352 bp, Homo sapiens
cgtcgcgtcatatatggttcacactgcactgctcgccctcttaagcagaatggctttcccccctgggtgtggtctgctccacgtgttctcctcacggactcctgcctttctgccggccttcctgtcgggtcgtcactgagttggtgattgctgactagttttcccatactgtgcgcttcaagttcaggctcatttcaggtaagccaaggtatatgcagagtgacctcacctgagatgtgcttaaactgagtcaccctgggactacttagtggacactaagtgggtgtgggtgagtcagagcccagtagtagggagcggacgttaatagctgtatacaggtgacatgccttgg

SEQ ID NO: 487433 - DNA, 883 bp, Homo sapiens
  misc_feature (118)..(119): n is a, c, g, or t
  misc_feature (127)..(127): n is a, c, g, or t
  misc_feature (129)..(129): n is a, c, g, or t
aacagcgcagccgcctgagccgagcccgccagaatctcagccaggtccctgaagctgactcagtcagcttcctgcaggagctgctggcactaaggctggccctggaggatgggtgtgnncctgtggncntggacccccgagggagctcagcttcaccaaatcatcccaagctgtccgtgcagtgagagacatgctggccgtggcctgcgtcaacctagtgggagcagctttgagggggcctgggtggcaacgagggatgtggccacatgaagctgtcactcggaagctgatgctgagcccctaagacctcgagagtacgagcctcttggagagtgaagctcccaggcactatttcctcaagtttgcctatattgtggatttggaccgcgacacagtgagacaagttcctgcagctgtttggaaccagaggtgtcaagagggtgctgtgtcctatcaagataccccttgtcggcccaccccgcttcacccattgtgagctaggtgctggggcgagggtgcctggaccgaggcagctacatactgtgaggtgcacgattatctgacgggctggtcagcatgggggtcatggccgacgatttctcccacaagaggcctatgaccggcgggcggcgtggtgccgccgagcccactccgttgctggccttgcgaggtgtcacttggaccgcagctttctcccgtgcttggtttcatggcgctggaggtcccccttgcccagcccttctcggccacgggtggggtctgctggaatacgctgaccgggccttgggcttctatgcttgtaccgggacgggaggatgagcttctggggggggttggggggcgctccgggccccgccggggttggtcccgggcctcccctttc

SEQ ID NO: 487434 - DNA, 109 bp, Homo sapiens
tctcatactccactaagtaggccacatctttcataagctgccagctgatgggctcattccacatactatcttgtgtgttattcttctaagttatactttgagggtttaa

SEQ ID NO: 487435 - DNA, 971 bp, Homo sapiens
tacgggggtcgatgaatccggcccctcgagtctcttcgtagtgagcacctgtacacaatatctaatgacgaagggtttcaccaatatactgtatagacgatgtactattgatgacacactgcaagaagcagctggagaaggacttcaagagcatggaagaagtactgccagtcatccgcatcattgcccacactcagatgcgtctgcgttccatctacagccagaagaaggcacacttgatggagatccaggtgaatggaggcactgtggctgagaagctcgactgggcccgagagcggctggagcagcaggttcctgtgaaccaggtgtttgggcaggatgagatgattgatgtcattggcgtgacaaaaggcaaagggtacaaaggggtaaccagtcgttggcatacaaagaaactgccccgaaagacccatcgaggtttgcgcaaagttgcctgtattggagcctggcaccctgcccgtgtcgctttctctgtggcctcgagctgggaccgacaggctaccatcaccgaacagagattaacaacgcaagatttacaagattggtcaaggctacctcatcaaggatggcaaactgatcaagaacaatgcatctactgactatgacttgtctgacaagagcatcaacccactgggtggctttgtgcattatggtgaggtgaccaatgacttcatcatgctcaaaggctgtgtggtggggaccaagaagcgagtacttactcttcgtaagtccttgctggttcagaccaaacgtcgggccctggagaagattgacctgaagttcattgacaccacctccaaatttggccatggtcgcttccagaccatggaggagaagaaagcatttatgggaccactcaagaaagatcgcattgccaaggaggaaggagcttgattccaggaccactttgtgcagatggtggggtcacaccaataaaatatttctactca

SEQ ID NO: 487436 - DNA, 1141 bp, Homo sapiens
atctacgacgcgaggacgcccgatcaggtggtggtggccctgtatgcgccctgagggattctacatggcctccggagatgtgtctgggaagctgagcgcatctgggtataccgacagccagaagggagcacctgtcgaactaatgagtagccagtcctgtatcgctgggacgatcgatggacattgcgttgtggctgaagacagtgaaggaggatcgtcgcgtggttcgggggaagagtaaggtgcagagacgtattgcgcagtcgagtacttcgctctgggactcagtggactctctcgtgatggagtcggacgatggtaccaaggagctagcaaatcaaagattactcaaagctagcgtgtgacatcaacgcgagagccgggccatatcccggcatggggccatggagaagcatatgagtgcactgcagtcggcatgctttgacgggacgccccattcgaatgtactacgttcgacatattggcgagcaacatggcgctattgtcaacatggtgtagcgatttcctctacctgatgggaagcaggactccggcaccagccagtgcttgatcggccgatgatagtgaccatcctagtgagcggggacagaactgagggaggcaggggtgtggcgccgctggtgcaggaccgcgagggcccatggactggtgcgggatcttacgctaggtatattgggcagtccccgaagaagcagaccatgtaagcctggctgcttgctggaggaacaatggtgaccaagattgggacgtcagcgtgacttctgtgagtggcgacctgccgcgtgggtctctcacggtgttgggccaacagatgggttgcgtattggctacgggcccctgagcaaggggtcgcggcgcggacattgatattgtggccagaacaaccctcgaatggcgtgcggggaagggcccgggaacccggcacggttggccgggtaaaaaggcgaggcgtacttgggtgggacccgcagagacctagttctcggttcaaaagggagaaaattggtgaaagacgacacaggagggataggctaggacggacagtagagcgagagacaccacaggcgggaagaggatcacaagaaacgacagagatatgatgaggacacacacggaggaa

SEQ ID NO: 487437 - DNA, 1007 bp, Homo sapiens
  misc_feature (1007)..(1007): n is a, c, g, or t
cacaatgtgtgatcatcgttcatggtcgcaaccaagaggccactccaatcatcatgggcgatagtgctgtacatcagccttgtggtggcggaatatgatatttcatatgtcgtaccatgcctatatgtccttagatataccacagttgaggatgacattgaattgaaacgtcgacattctagccaaggtgatggtgtagacttaggatctcacattgtctacgctctcttacaattctttgtacacggcaaatttagcatggcttgaatctatctaagggaatagaatggatgctcttagcagtatggagaagatttcccaaagatggtatcacagggcgggttgatataagaaaaggaacgggagtaactagaaggaactgagtggtacgtagagaagctacagaggatgtgcaagatggcaaggactccctacagaatgtcctagtggctttataaacggaacctaaaaggaccatgaaaaaagttctgatgttcggacgtagtgattgaaaggagagaaactgaggtgacagaaatgttgaagacttcaattaccctgaacttataagcgaagacggttgcaacatgtgcattgtgacgagtttgtggagacgattccgggtgaggagaatggattggaagtgaattcgaagggactgttggcggaacatgaaacagacagaaatccctacatatgaacgcggtagctgggaattgacgaactcgagagactgaaggtaaagtagggtcgcatggagggaaacttggcctttttcattccagcacgattcgccactgttccgtaaagaatatgggcaaaactagcttagttgccttggggcaatgttgttcaatggtagagtttttgtcccttcacttgggcaatattccactccccagaagggctctattgtttctgggactggattatggcaagattcgcataaatccggaacttggtagcggcggaaagctataaggggggtaacgtggtggaacactggn

SEQ ID NO: 487438 - DNA, 305 bp, Homo sapiens
  misc_feature (61)..(61): n is a, c, g, or t
ggccgctccggtaacacttacgcattagaattggtgaagtcagagttaaacattcacatgntaatgagtgtgtggaaagacaataaaccataaaaaaataaatataaacaaaaccatttttacccaattttaaaagcaagcttatggtttaaaaccttcaaaaaaaaaaaattgagaaaaaaattctcatagcctctagaacccttttccgattccattactttttctctttggctcttccctgtgaattttgggctcgtaacaatcttttttcccttatacgctttttccaatgtgttattttg

SEQ ID NO: 487439 - DNA, 431 bp, Homo sapiens
cctgcttgggtgtcccagcgggcgccctccatgaagagtccgtggaggtatgcaccttcccttggcgggtgtccataatcttcctttgtttttttggtaacatcagcagtcaagcgcgttttatccaggggccactcattttttcgagccatcgtctgcatgattgcagttaagaaggactgagggttgaagaagccggatagccacacgacagccggaagggtaaggtcttgtgtccaagtatcgagttctcgggcatcgcaggaggaggtcattgaaccactggctaggccataagtagaaggataagccagtttgctccaagtgtctggtaccgtgtcataactcaatgcaaactgctgggcttccacagcaggagataatgccaattcccccttcaaactaaggtccagttgttcaagtgatatacg

SEQ ID NO: 487440 - DNA, 173 bp, Homo sapiens
cagatcagtatacagatctctgtctactgaattcaccgcagctactgagttcactgacaggtgagtgcagtggtacctgtcagaggctgtaggcattgtgacacaggcagttcctcatagtggaaatgacgatgagctccaatgagacacagttgtcacagaacctgatgctc

SEQ ID NO: 487441 - DNA, 926 bp, Homo sapiens
  misc_feature (273)..(273): n is a, c, g, or t
ctcatgatcactatccatccacgattagatgcaactcgaggccccgttctgtttagcgctttatcaccagtagccccccaccactgtgctggtaaacacccttctcacaaaattttgtgtccacccggactctttggcccccgaactttcctatggcccagttttttacgcgccacgtgtgctctgggactccccttgtacatcagcaggggcacaaacaccagacacccatgggttggaccccgaacccatcctgggttgaccagccgacgnccccttctttcagagctacgggcttctagagctttccaggctcttcttcagaggcccttttccacccactgataaaaagggtctctcttccgcgagccctctgttcagcacgcccccgctgggcgcccccccttggggcatcctgaccctttttcaggtattctccagcgcgtgccgcgcaatcgttcgatcgcaatacaacaaggggacacgttggcccccataaggtgtggttacacccggccgcttgagatccaccccgaagctcgtgaatcccccaaaagcgaccacatcgactgttgtcctcccgcaccgatatgtgtggcacgtcgtggtgccttttatcgcccccggctcgggtggggcccccagggcgcaccaaaagctgttctcagattgttgtttcgccgcatgaacacaaccacaggcgtcccatagtcccgccacgacatttcgtgagtgtcttcaaacgggacgccactcttcccaccaggggtgtgagcaaccccccccttgtttccactgttggaacgaaatggcacgccggagtcgcgcggcatacggtgcgcgcggaacagcggtgtcgcataacgcgaattcggcaaggggcgacccccccatccttcgctgtcaacaaccgcccccaaaaaaca

SEQ ID NO: 487442 - DNA, 963 bp, Homo sapiens
  misc_feature (382)..(382): n is a, c, g, or t
tgtcgaggctcgggtttaaatcggccgatgctgttgtgcttgccctggtgcccgagactggaccttctggctgtagctggaacatcatgtggccctatgtctattgtgctgtgctgtggcctgggcctgaactgtcctctgagcctgccctgcatgtgcctccgtgtgtgtcctggggatgtgaagatgacctgagaactgttgtggtgtgtgctgctgaacctgccaccccagtgactgtcccctgaatgactgtcaatgcttgctgtgctgtctgtccacctgtgcctgtgaactgtgtgatgtgctcttgtgatgaactgatgccctgtgccgctcaatgtgtgactgcttgtcttgtgtgtgcctgtgtgatgcctgncagtggtgtgttgctgcctgtgtgttgcatgatgcactgaaccttccctgtcctccctgtgcacaatgaaccctgtgctgcctgccctgattgtgcaatgcccctcctccctgtgtgatgtgtgacttgcctgtctgatgtgtgtgtgaccatgtgcagtgctgtgtgagttggaattgtttgatcgcatgcatggtgatgtgatgtgaatgacaactgaactgattggatgtgctgtgccagctggggcaggcagagccggccgcctcgttctccaagcctgtcttcagtgacagccgcagcctaggacggggcttgaggcgaggctgtgcggtggcgccggggtcctcagtggaggtgccgagtccggcgcgggcgggcggacgccgcgccaccatctccagtcccctggagctcgaaggcacagtgaggccgccacggtcgaccttacccacttttgtcgccaacaacctgcaactcaagatccgtctgagcggggggccctccaccccggtttttgccctttggggccttccaaggcctggacccaccacacgggttcccctgaccgagggtgggga

SEQ ID NO: 487443 - DNA, 605 bp, Homo sapiens
tgaggttaggagttcaagaccagctgggccaacatagtgaaaccgcatctctactaaaagtacaaaaattggccaggcatggtggtgagagcttgtggtcccagctacttgggaggctgaggcagtagagtcgcttgaacccaggaggtggaggttgcagtgagctgagatcgtgccattgcattccagcctgggtgacagaccgagactccgtctcaagaaaaaaaaaaaatagaaaaaatatactcttaagataacaactaaaaatatagtatagtgaatacataaaccagttatatagtcatttattatcgactgctgatgtactatacataattgtgctgtatttcggtgtgactggcagtacagtaccttggtttacaccagcatcaccacaaacatgtaatgtgttgtgcagcaatgttacgctgtctgcgatgtagacttcactgggtaaataggaaattttcactctccatgataatcttatgggaccaccatcatttatgccggtccatcgtctgaccaaaatgtcatgtgtagtgcctgactataaaacctttttctacatttaataatctcagcaagcttagaaccaacaccac

SEQ ID NO: 487444 - DNA, 209 bp, Homo sapiens
  misc_feature (1)..(1): n is a, c, g, or t
ncgttgcgggttggcggtgtaaagatctgggcctcttgtttcatgaataatagaatctcactatgatgtaatatttgtttgaactggagtgctgattattgtaatgcctttaggtgagaaaagccttattatataagtgtatctggggtaactagcttaaatttgacactccagtcaactttttgtccctgacttcagtcctgcattga

SEQ ID NO: 487445 - DNA, 90 bp, Homo sapiens
gctgaggacactgccgtgtattactgtgcgagagacgctgctgtccttccggtaggctgggctgaatacttccaccactggggccagggc

SEQ ID NO: 487446 - DNA, 182 bp, Homo sapiens
ggactacccagtgtatagtgagtgagtttgagaccagactgtgccaacatggagaaacccgtccctactaaaaatataaatcatcagccagtgctgtgtgttgtgtgggttgccttgctaagtcccaagcctactcaggagagtgctgagtgtaaggaagaatatactctgcaacccaagtg

SEQ ID NO: 487447 - DNA, 168 bp, Homo sapiens
tgttccgatgggaggtgtacacactaactctttaagaaactgtccaactgtctgtcagtgtggttgctactagtttacagttcccacccaacaatatatgagacttttcactaatcccatattctctgcaacatttggtgttgtcattttctttttgtttttttgaga

SEQ ID NO: 487448 - DNA, 1615 bp, Homo sapiens
  misc_feature (1615)..(1615): n is a, c, g, or t
aaatgttcgctctatagccctaccatcaaaacccggggagagagaaagaagaggaggacgacgactatgaaggagttggagaactgggctggagtccatggtaatggaggtccagtcgctggactgggcccaagacagacatgtgggtggccatgctgctagtcgagctaggctgtgtgcagtgtgtggaggcaggcatcggatgtggtgcaggcagtgtttcctagtcgcgtatgtcgtacttctcatctcctatagagcatggtcatgggccagcagtagcttgctcaactcatctgccatatgctgtgcgtcctggctaccttgcgtgtaggcatggggctggcgggcgatgggggaggcgaggtcggggatggtggacatcgtgccattgtctgatattatgaagtggttgaaagtttgcgtggtagaagattggagacgtgatattatgtgcgaacactcctacacgaggtttgaagcattcttggaatgatagcagcttgaatgatcccaacgatgcgtgaagtccatctattgggaggaaaggggctctgaacttgccgttgcaatgctttcgtaaaatggacctggaaatatgtaatgcccttccttgtaatcttgggtaaagtgacatgttttggagtgggcctcgcaacaattctgccttttgtagtaacctattgttggcttgggtgactgtggacaggcaaatcgaggttcagtctattttacaagaaacgtcctagtaagggccttatgtctcactatggcccccatttaagccttgttcaatgtaaactggccagttcttggaatttctttggacctttttcccctacctcgaggaaagacggtgggagcgtaatcattggttcctaggtcactctggtttgttagttgggtgcccgtggtggcatgaataacccccaactatcttggtgggccccaaacgtcctcttcaaccagcaccttttggtcattcaccccctggggttctgaactggtgaagagtgtctggtgccaccgtttggcgtttttggcacactgtgcgacatgggggtgacgaaccaccgttggtaggaaacacacacgatgcacgacattggtgtctcgaagactttcacggtatgccaaccacgatatatactggagtttgtcacataaacacataggagcacataaggggacacactcgagtagcccaggagtgccgaaacaacccgggacagtcgaacaaaaccccatcgggtgaaacgaggccgaacaaaatcagaattccacgatgcgagaagagacagcggaggaacacggggcgcataacatagagagctccgaagaagaaaagcagaagagaacagaaaaggagcgggcggcgcccacagaagtccacagcccaggggagaccgcgaagcggacacagcacagccaggcagaaggggccaaaactagagaagcacacgaagcatcagcgacgccggaaaacgaagcaaagagcgacacaagacagcagacgaacagaagacgtcaagagagagagcagcagtcgcagcacacacattcgccgccagcccgacgcacacaagtagaagagcaggaacacacaacgaagcan

SEQ ID NO: 487449 - DNA, 119 bp, Homo sapiens
cagccctgcttcttcctggatacagagaaccagtcagtcattctagtcttctagtccttaaactgatctcgatgacttggaacatagcgattacactgcaagtactggctagacccagg

SEQ ID NO: 487450 - DNA, 1061 bp, Homo sapiens
tgagcggagtggcttcatgcgatcccggtgttggctgtgccgttggtcctgtggtggtcacttagccaagatgcctgaggaaacccagacccaagatcaaccgatggaggaggaggaggttgagacgtacgcctttcaggcagaaattgcccagttgagtgtcattgatcatcaagtactttctactcgaacaaagagatcttactgagagagctcatttcaaattcatcagatgcgttggacaaaatccggtatgaacacgcttgacagatcccagtacattagactctgggaaagagctgcactattacaccttataccgaacaaacaagatcgaactctcactattgtggatactggaattggacactgaacacaggctgactatgatcaataaccttggtactatcgccaagtctgggaccaaagcgttcactggaagctttgcaggcctggctgcagcatactctctatgattggccagttcggctgttcggtccctcattctgcttactatggtctgctgaccacaagtaactgtgatcaccaaacatacacgcatgatgagcagtaccgctctgggcattctcagccagggggatcattcccagctgcacggaccgacaacagggtgaaacctatggcctcgctggaaccaacaggtttatcctaacacctgcaaacgaatcacccaactgactaccttgcgcagtgcaaccgaatgaacttaaacggagcaatctgctgcacctcaaccacttaccttcacctctactctgccactatcccccccttcctccctccacactcgaccaccaacgcgacccggttgcacttcacggcacaggttacgcagcgcctgcacttcaccggcccgaacgcaaccagggaacaacccccgccaacaagcgaactcacggcccactacgcgtgccgcaacgagcttccctccagcacaagcacccgaccaccccgccacccatgctcaccgacctcgcctacaccaccccaccaacacccacccaacacccaccccaacaacacccccacaccccacgcca

SEQ ID NO: 487451 - DNA, 406 bp, Homo sapiens
  misc_feature (319)..(319): n is a, c, g, or t
  misc_feature (371)..(371): n is a, c, g, or t
tcgagtacattgttctcttttggcatcaaaaagctttattccattgggcccaaggctggtgaggatagttaaaaaagctgcctatgggctggagggagaggcttaggcagaagccctattacttggcagggggcccttcagaaagtcgcgtgggctcaaaaggctcttagtcgggctgtgagagtgagcctattcgaagagatacgtcgcccagcccagcctcggtggccacccagccgggggaggtgggtcagggtggtcaccgcatcttctgtgataaaggctctacagctatacgcacaagtcttaaggagacagngtggagctcttccgagggaaatgtcaccgagaacgaagttaggggagctccngcgtgacgggggcaagaacaccacgagggtgcagt

SEQ ID NO: 487452 - DNA, 512 bp, Homo sapiens
  misc_feature (1)..(1): n is a, c, g, or t
  misc_feature (116)..(116): n is a, c, g, or t
  misc_feature (142)..(142): n is a, c, g, or t
  misc_feature (177)..(177): n is a, c, g, or t
  misc_feature (216)..(216): n is a, c, g, or t
  misc_feature (259)..(259): n is a, c, g, or t
  misc_feature (270)..(270): n is a, c, g, or t
  misc_feature (275)..(275): n is a, c, g, or t
  misc_feature (279)..(279): n is a, c, g, or t
  misc_feature (285)..(285): n is a, c, g, or t
  misc_feature (308)..(308): n is a, c, g, or t
  misc_feature (313)..(313): n is a, c, g, or t
  misc_feature (333)..(333): n is a, c, g, or t
  misc_feature (336)..(336): n is a, c, g, or t
  misc_feature (355)..(355): n is a, c, g, or t
  misc_feature (360)..(360): n is a, c, g, or t
  misc_feature (373)..(374): n is a, c, g, or t
  misc_feature (399)..(399): n is a, c, g, or t
  misc_feature (417)..(417): n is a, c, g, or t
  misc_feature (443)..(443): n is a, c, g, or t
  misc_feature (448)..(448): n is a, c, g, or t
  misc_feature (455)..(455): n is a, c, g, or t
  misc_feature (461)..(463): n is a, c, g, or t
  misc_feature (468)..(468): n is a, c, g, or t
  misc_feature (488)..(488): n is a, c, g, or t
  misc_feature (496)..(496): n is a, c, g, or t
  misc_feature (499)..(500): n is a, c, g, or t
  misc_feature (502)..(502): n is a, c, g, or t
nggaaatcccgggatcttgagactttcctaggtggaaaggaaagcaagtctgcagttccttgctaatctgagctacttagagtgtggtctccccaccaactccagttttgtgcccnaagcctcatttctcatgttcagaccncacatcttctaagccgccctgtgtctctgaccccntctcatttgcctagtatctctgcccctgcctcccctaanttagctagggcgtggggccagccacctgccaacccctgccctnccccacggaanggcangganggaaangaagacctgccctcctccaagangcaanggcccacgcatgggcacganggnggtgaaaaaaagaagaaantgttnagcactcccgcannccccccaaccaaccccccgccccangccccctattgcccccanccctccccctgcccctccctgaaatntgtgntctccanccccannnaaacnatattttatttttttttatntataaacnagnngnggcaattaac

SEQ ID NO: 487453 - DNA, 238 bp, Homo sapiens
gagctcctacccatatgtcctgaagcttaggggtgctacaagttgaccactgcagcagtaaagatgactctgaagaatggcgtgggatggatcctttcaaatgcacttgagcagcggtctccaaccacagggccacagtgctggagctggatctaccatgaaagacttgtgaatccaggaagagagactgactgggcaacatgttattcaggtacaaaaagatttggactagagtggt

SEQ ID NO: 487454 - DNA, 1007 bp, Homo sapiens
aaaaagatatcactgcagtaggtgtaagtcttcggacagtcagcatggataacagactgagttggcactctttcctgcccataagcaaagtgttgaacacttcacaaaatattttactgaggcaggcttgacagagctttcagaatatgttcgggaatcagcaaacgcatcggcagctcgtaaggagctcccagaaaggaacttcaagcaacagatgtcccgtgttgcatccaatttaaggcatatacattttcatcatgtcaaggcaggcagcatgcaaacaaaaacaacatcccagcagccagtgtcatcggaaatcagtctggtcaagtgtaatgagccactgtggaatggaacaaaaaagaggagcttgtagcagagcaagccatcaagccacttgaagcaatacagccctctacttgctgcctttactactcaaggtcagtctgagctgactctgttactgaagattcaggagtattgctatgacaacattcatttcatgacagccttccagaaaatagtggtgctttataaataacagctgaagtcctgagcgaggagcccaattttgaagtggtatcaagatgcacatgttgccacaacggggcacgagtgtattcctttgagcaacatgacaacagtagtagacatggctcaaccatgctgaagaagactctgactctgaagctgacggaaggtgattgagtttgagactagaccctcagaaagcaaacaggagtgtagattacactgtcaggttcatgtgtccggtcatagatcttccaaactccctgatcagctgaatagggtcaggaacaataatgacaggacacagaggaagaacggggaacgaaaccagataagaagcaggacaaaacgaggagggagcagagaaaccaccgaaacgacagaaagaccacagggacagcccgagacagaagaagggcaggaaaaagaaaaacgagacacagtcaagcgccaaaaaccagaaaacacacacaact

SEQ ID NO: 487455 - DNA, 120 bp, Homo sapiens
cctataagacggggaaaataatacccccctttcaagattgttgagataactaagtgatataaaacatgtaaaggttaaggtctggccacagtgtagctactcaataaatgataatactac

SEQ ID NO: 487456 - DNA, 1545 bp, Homo sapiens
  misc_feature (1413)..(1413): n is a, c, g, or t
  misc_feature (1545)..(1545): n is a, c, g, or t
gatagggctggctgtctgttgccaataggtcgattgagagcgttcgcggatgagcgggactggcgtcgtgcgtgcgcgaaaccaggcagacatctaatatcgtgcacaagtactaccaccaaataatcggtatgaacagatgctctacaatagcccttgaggccttggctactcagtcctggtccgtgagatgacgctcatatacgactgagattaggcggtaagtttatccatctttcatcgtcgatcccgactcattaacgcaaaggtcacaggatacaggataatggcgtgcctcacctgtagatagactgggtgagtcgaatcatgcctagctgaactgaacacggggccgggacctctttgtggccctgacgtgtacatattcctgatgaagatatttcccatagacgtatctgaggtctctccaatatcatggtgcaacaggttaacttgtctgggatgacaaacaaagctcgtaccatggtacagtgtcacacaagattcacacaatcttggtctaattgtgacactggtagctgttggggtcccaaccggcttgcaattgtacgcattaggcacatagtcgttgggccttatgcctcgtttactaatttgaggttcaatgtggttgcccctaggctttggttcaggcaacacaccgttactctcggggatcgatttcgtgtgccagactacctctaataccattgactgcgtcactcactggggaccttggggtcacttcgccgtcgcgtgccaactagttattacttgttccttagaaactagatcagccccatcgaaaaagtgggatttcctattaggagcatgatccatcctttgtttctgggggcatttagccctgagctctttactttaaccatttcgctcccacagggaatcacacttatatcggataaaatcccatcggtaccataattgaacgaaaagggataggcggagaggtgggctacaagactttggcgcacgcaattcacccgttcgcacatggagactttgcataacttgtgggcaggacatcggggttgtccggactgggcacttcttcataatcgcattcgccttgaatgcacatagaagccctgccacggatggtgttggcattatcataggtccataacaatactggatagaagtgcacataattctggaaggccagcgacccttattgaggcaggttagcttaaccccacatttaccgcatcttacactggttgaccggacatccaaggatttcgagaacctaagaccggaaacgcacagatggtacccgacctaagagggagttccaggcaaacacaatacctgcgacggtcacgcaacagggccccagacgggagcacccacaaaccgaaccaacaagcaggggcaatcggcaaacactcgtcnggttccacaccactccctgtgtaccgacatggcacaccgaaacatgcaccactgcggttggacaatcgaccgacgcacaacactcacgcagtcgcgcactgcaacccccgtggcaacgtacacaggacggan

SEQ ID NO: 487457 - DNA, 587 bp, Homo sapiens
  misc_feature (555)..(555): n is a, c, g, or t
aggctcgggtgtgcgaagagagcaccggggctgaacgggccggtttgctgttcaggttacgtggaaacctccaacgtcacgtggcggaagagctggtcaacatgatccagactcagcgcgcttacgagatcaacagcaaagcggtatcgacctccgatcagatgctgcaaaagctgacgcaactgtaatctgtcattgacgggcccggcttgccgcgcccgtcattctctttcgtgaaacaaaggcgatacccgtggtaaccacatattcgatggcaatcctgccgcggcagggacaacgctggctggcgggaatggtgatgctgacgctaagcggctgcgcctatatcccgcacaaaccgctggtggacggcgcgaccacggcgcagcccgcgccggccagcgcgccgatgccgaacggctcgatcttccagacggtgcagccgatgaactacggctaccagccgctgttcgaagaccgccgtccgcgcaacgtcggcgacaccctgaccatcgtgctgcaggaaaacgtcagcgccagcaaaagctcctccgncaaaggcaggcgcaaagggccagcaagttcgg

SEQ ID NO: 487458 - DNA, 155 bp, Homo sapiens
cagggggccactagtagcattgcaacatcatccgccgtatcaggtgtactcgtaggctcagtagcattaggtggccaattgatttgatggtgagggagggatcgttgacctcgtctgtatatgtaaaggatgcgtagggctaggagggcgatgag

SEQ ID NO: 487459 - DNA, 893 bp, Homo sapiens
  misc_feature (244)..(244): n is a, c, g, or t
tggcgaaagaggaaaattttaatgatagttggtacgttacaaatacccaaaaaactattttctttacaccatttatggtgccagtgaacttttgggtggacagttttcacatataacgtggtaaagtctccgaggcgtgcttcgggttcgttgaccccttacgagaaccgttgccagtgtttagaagccccgagctatttctgcgctcccccgcacgaggtacagaaagcgtggcgtgaactcnttcgtgacagaaaccgcgccagtgttgtggggccccaagtttccccaagcgccaagtgtcagaaagcgtggctcaatcttcgtggcacacgagggttttgggcgcccagttctatcgaggggccgaatttgccctcagagcaaagtggaacttttaagaaagccgcgtgcttcggtggttgccctcgtgggagccaagggagtctgacagaaacgggtgtggtctgtggctcaagagtcttcatagccagggtgagggtttcccaagggctaaaaccgtagaaggtggtctcacagaacctccggggtggacccatggccatgatgtgcagaagcagtggcaaaaaccccgtggggtgtaaacaaacagggctacccggggtcaggctcctgctcggggtcctgaaacccaagggccagcgtgccgtgtatcgcccgtgacctgagtccaggaggcgggtcagacggccacacgaggagtctggaccacgtggtcccacgccttcccagaggaacgccaatcacgacagcatacggctgcagcagaaccgtggaaagtcctcaggaagaggacgcccacgttgcacctccgggcccaaggggctccaggtgaccaggggcacacactgactatatccaggccaaacggc

SEQ ID NO: 487460 - DNA, 226 bp, Homo sapiens
  misc_feature (33)..(33): n is a, c, g, or t
ccccccccccgggggccccccaacacctttttntggtttcccccctggggaaaaaggggaaaaaggggggggggggaaccttaaagggggccaaatcccctgtcccccccgggggggaaaagccccttaaaaaaaaaccaccccccccccccccccctttttggccgggaaaaattttgggggggggaccccaaaaaaaaaaaaaaaaaatcccttttttttccca

SEQ ID NO: 487461 - DNA, 299 bp, Homo sapiens
gccattgcactgcatcctatcaacaagagcgaaactccgtcacaagaaagacagaaagaagaaataaagaaagaaagacagacagaaacacgcaagaaaggaaacgaaagaaaagaaggaaaagacagcagaaagaaagaaagaaagacagaaagaaagcaagacagaaagaaagaaagaaagaaagcaaagaaaagagaaggaagcaatagacaaggaatctggctcttccactgcagaagagggagatttctccaaggtctgtcttcgctgtgaccactgtggctactataccaata

SEQ ID NO: 487462 - DNA, 974 bp, Homo sapiens
ggatttcaaaattataagcataggatttcatatcaggggtgaaagaattatctggcacattaggtattggagggtacacaagaaaagccaaattcacgaagtcttaataacttgttttttaaaccaagaactcaaaggcgcttcatgtccagtgtgtggcccttctgaaacttatggtcatctctcccactcaaacaaggtctttcaaatgtggctaaatggggatgaggaaccgggtaggacttcttggtgtgtgtgcatactttaaagagccaagtagcttcggggaaacagccaggaaaatggtcaagattatattctagaggttatttattggggatttaagaactaataacatcttgagtattataacacaatatcagggggatgtggaaaggtttgcaccactgtcacgtgtacgttgtagcttagtatccataaaggggaaacttagactatagacataactacaaagccagcgcaagcttatgtttacatgaatgtgtagggagaatacactttcacacatagcaagcacatggccctccctgatgtcaggatgcctagtaaggatcctgaattgccctataatttagtagaaatctttttcccttcttcctcttgaaaaagcttccaacatatacgtgatggaatctatcacaactaaaacttggtcccttattacctatgggcagtcacaccaaggcaaaaagcatgaacacagggagagagagagcataacttgctgaaaatcaccacttggaagttcagcagaccacacagagtaaactcgcgagtatagacaacaagcagataagaaaagcaagacaacaaccaacacgaacaaacaacaacagccgacaatgacagaacaacgcaacacacacagaaaaaaagagaaagaaacaaccacagagacacaagatacacaaacacaaaacaagaagcaaacaacaacacacaaaaagcaaact

SEQ ID NO: 487463 - DNA, 204 bp, Homo sapiens
ggtattaaaatccccatatacccataaggtccacctattcatttttaggggaataaaattacaggtcctatgaaattccaattttagcactatggtttttccatgacccataatttatttttaaaaaataaattaaaaggttaaattaataatgcatgtatgtatttctaataattaaaaatgtgttcatcctgaaaaaaaaaa

SEQ ID NO: 487464 - DNA, 357 bp, Homo sapiens
agctctctcgtgtggaggcacgctcaccggtgtctccatgcagccaggcctcctgaggaaggcatcagagcagttccctgagaggacccccaaatggaactatcaggcagattccccaggtatatgctaggcgagattacatgatttcctgcctagttgaagggcttaagaaggcagcatagcaaagcttttaattatagacaaaattaaaaactagccgaggtaaagacgaaaacccagcccaggtcatggccctgcttagcagcgaacccttagacgctttaccgccctagacccagaggggccggagggccgccttattctcaatatgcattttattagccagtcggctcccga

SEQ ID NO: 487465 - DNA, 101 bp, Homo sapiens
ggcgcagtgctgcccagtcctccgatggcgaccatcacgcgcgcctcgcgtgacttggtcaacgcatggcgtgcagccacgccctggtgagctgagttacc

SEQ ID NO: 487466 - DNA, 1218 bp, Homo sapiens
gcctttatgaggagcagtgtctgaattgctgaggagatgtgggaattgcacacgggaaagctgtgtggtttccttttacctttcagctgaccatgaactcctgagcccgaccaattaccacttcctgtcctcaccgaagggaggccgtgggggctctgcaaagggcgcaaggatcactggcatcatctctcagcaaggtgacattattgtgttttgtgaccttggagacctcaggtgtcgctcccttgttgttggttggatgtagggaagcatcccagggagacttcagtgacaatggtttcctcatgacttgagaagacacgaattatattattttaccctttggtggagcccacaagcaagaatgagttggagcaatcttttcatggtgacctctttaaagatattagtgaaggaatctaggttgtattcaggtggacactgggaataaaagcattctaaagcacggatggagaaggacggccacagagacaaggagagaaggcgagagacatgtttgcgtgtggcaagcatcttgagggattggccctggtgacgagttgtacctgacctttcagggggggtggttaaccaggaatgtcttaaaaagcgtgcggggtcctggcacgtggccgggctgtgtttatagggcttacattcaagtgttatgggagttagcatgttaaaaaatgcgctcggtctggcgcactgaggctcggggggcattgacgatgcgggtgagcaggaagatcacaacagtgggaaaacaacaatggggtcacagagaggaccttgcgtctttctcttttttctttctcatctatcatcacgaagttgatacgatcagtgaagagaatgtagcaagagacaaccagaagcataagaggaagacgaatgagaaatggaagagaggacgagaacgagagcgtaagaaagataagagtgattgaagaaatggatgatataggagtgaaacaggacgacagatattagagaatggaaattattaaaggagagatgagatggaaaagaagacaaatggaagaaagagaggataggagagaagatagatatagaagaaggaagaggaaaaagcgatggtgaaagagatggaaagtcgacgaagaagatgagaagaagagtaagagagaaggaggcggaaactagaatagaagagagagagtagaggaggagcggatgtaggaggtggagagaaaa

SEQ ID NO: 487467 - DNA, 401 bp, Homo sapiens
gcagcatatatattaccgcaaggcggaaatagaaattataatcaagcataatatatcaaggactaaacgcctagtaccttctgctgtaatgaattaatccaggaaataactttgcaaggagagccatagctaagacccccgaaaccatacgagctacctaatgaacagctaaaagagcacacccgtctatgtagcagaatagtgggaagatttataggtagaggcgacaaacctaccgagcctgttgagagttggtttgtccataatagaatcttagttcaactttaaatttgcccacagaaccctctaaatccccttgtagatttaactgttagtccaaagaggaacagctctttggacactaggaaaaaaccttgtagagagagtaaaaaatttaacac

SEQ ID NO: 487468 - DNA, 109 bp, Homo sapiens
tgggttaccgtgctgtaacgtccttgttgtcagtgcagaataagttacgctatttagaacaaaggattagtatcaaattttgcgtgaaattgaacaatgccacggtcaa

SEQ ID NO: 487469 - DNA, 240 bp, Homo sapiens
tgaacattctgtgtcccgtgtttattataataatgtttgtgtattcaggctatgaagaattgggcgaaggggcctgcggagtattacgatgttgaatcctgagactagttcggactccccttcggcaaggtcgaacggggtacggccgggcggtgctagtgtggagataaatcatattatggccaagggtcatgatggcaggagtcatcagaggtgttcttgtgtggacacgaatgttca

SEQ ID NO: 487470 - DNA, 331 bp, Homo sapiens
gcaggagcaggcgagggcaggtgtggccaccaccctagccatctaatcacttatacatattcattttaggatagaaagagtggtagagcagagcctgaccctaaaaagaaagccacatttagggctatcacctccaccctggcttccagcttcaagaggcgtaggtcctccaaagacacgagcaccgggggtggacgcggcgctttgcaaaaccaaaaagacacagtgctgccgcgacgcgctattgagagggaggagggccagctgcagctgtgttcccgtcatagggagagctgagactcccggtgcgaatgcgcgtcgcgcgcgcgag

SEQ ID NO: 487471 - DNA, 250 bp, Homo sapiens
tactcggccctcttcagaggtgccccgggctgtgctggcgtgtgcacccaggtgggaggacaaatcccctccatggctgagctcatgaatctgatttacagaaagcccaccctgctccctcacggtcttcagcatggaaagcggctcagctgctgtgtgagttcccacggctcacccttggcatcgttccacggcaggtctcggtcacccacaacagtccccggttctcttcctgctcccagcagctcag

SEQ ID NO: 487472 - DNA, 247 bp, Homo sapiens
gaattagtcgaattagcccatcatagccgatatgtgctacttatcagcaagatgatggatatctcacatcactgatataaacaactagagcacgctgtcaacaaacttaaccaggtacgtttgttggcatggtggcatgtatgcagagtcacagaaggtgaggagagtggcacctgcacattttagtaaatctcttaagtcttgctaactggaaaacagctgtattcacctatccgcttccggtcga

SEQ ID NO: 487473 - DNA, 1013 bp, Homo sapiens
  misc_feature (34)..(34): n is a, c, g, or t
tctagaggatcctcgagtgggtcctgcaggtgtnagcgcagtagcgcacaaaccgggatagtctggattgtactcatggaccgtgatgtcggcactgcatcgactgcactcgccaccgatcgtttccttacatgcaaagcaaatgctcatttctccattctcgacataggcgtcggcgctgcattcggggcatgtcgcgatcggtgacgagtcaccgttcttggcggcataataggcgtcgatctcgtagctcgccgacacgaccatctcagcaagctgccgctgatcgtactcatggccacactggaagcatttggcatcggccgcttcgctctcgatattgtcgcggtcggtctgaccgataagagacgagccacaattggtgcaagacatacgatccagttgcccgatctcaccgggccaattcaggcgcagaaggctgtccatgcagctcttctggaccttattgaaggcattcgtctcttcaaggattgtatcccagacgtccgccaagacgtcttgcggatcttctttcagcgtctccaggaagtcgataaccatcggaaatgaggcggcgatcgcctccttcagcgctccaacgggttcggccaggtgataatgctcaagattgtttcggaatcgttgcagcttttcgatgttcacgtcaggccaggacaagccgaatttcttgaatcggctcttgagctgggcgagatctaccgtcgcatagccgacaacctcatggtcaacgccgccgtcaccatcggggacgggttcgaatttcgcgccgatgatctccatcggatcggcgtcaggggcggcacggacgaggcattccttgcccagtaacagcacgcccgcatagtagttgcgcgccgcactcaacatgcgcgcgtcggaaccctctcggaaatcttcgataccgagcacaatcgaagttaccgcattctcaaatatatccgccatgcccccgccaacaggcaggacccactcggggacctctagagcaccgc

SEQ ID NO: 487474 - DNA, 257 bp, Homo sapiens
gaatctggaagcccacttcctgccccacacggggataccggggcagcaccacactccctagccgccctgcctactgtgggataagaaaacgggctcgactgcctggacctagacccggactcggaacccggggtacttcgtctaccacacaaaaaaccacgtggtaggccagtgtcacgcaccccgggggcatgccggccgcccatcgggggggtggttagccgcgtcacgtgacgggctcagcgtcccagtcacgt

SEQ ID NO: 487475 - DNA, 99 bp, Homo sapiens
ttttccgccccttaaccccggcccccggggggggggggggggctttttgggccccggggcttaatttaacccgcccgggggcccccccgggccccccga

SEQ ID NO: 487476 - DNA, 130 bp, Homo sapiens
agaacgttagaagacatatggcaagtttgtgggcaacataaccagtctgtaaactacttcaaatgacctttatgccaaggataagcgttttcaagcctttgtaaagaagaagatgagcagttcaggtagg

SEQ ID NO: 487477 - DNA, 373 bp, Homo sapiens
cacagcaaccaggtgaccatccacacgctcaacgtgcttcaggttgtgcagacggacggtaccgccattcttcacctgaacgctgtcggctgcggaagtacggcttgccgcaccaccaatgtggaacgtacgcatggtcagctgggtacccggctcaccgatggattgggcagcgataacgccgaccgcctcaccaatgttcacctggtggccacgagccaggtcacggccgtagcacttggcacagatgccatagcgggtttcgcagccgatcggcgaacgcacgatcacttcgtcgatgctgttgagctcgatgaattcaacccacttttcgtctaccagggtgccggcaggaacgatgacgtcctcggta

SEQ ID NO: 487478 - DNA, 225 bp, Homo sapiens
cggagccttacctgcccaagtccagatgcatagcgctccaagttgacactcgtcaaggccacaggatcaaggcacggactccttctatggcggcaggttctcagatgctctgtgtaaatcagccagatctccgtactggtccatcagtaaagatgaatgaccaccgttcacgcttgtccggccgaggacttgtcttgaagctttgttcaaggtatgaaccttcag

SEQ ID NO: 487479 - DNA, 728 bp, Homo sapiens
tatggccttcagctactacgccagcaaaacgctggacagcgatgcgatcccggaaggcacgccggtgaactattacctgctgcacgggagaaaaacaacccctacctgaaggccaccgagtgaaactggcagatcgatccgctgggctttcgctccatcatcacccgctacgccaacgactggcggatgccggtcttcccgatcgaaaacggcatggggtgattgagtcctgggacggcgtgaaccctattgaggacacctaccgcatcgactaccaccgggcgcatatcaatgccatgaaggaggcgatgttcgaggaccggggcagaggtaatcggctacctcggctgggggttaatcgacattctcagctcccaggcgacatgcgtaagcgctacgggtggtctatgtcaacccgggaaaaccacgacctgaaagacctgaagcgcgtgccgaagaagagctacgcgtggttaaaacaggttatccataccaaacggaacgcgagatgtaagcggtaccgctgcgggcgcgttttgtggactgatgtgatggcgaactatccgtatgtctgaaacaaaaaattacaccgcacatgccagtcctttgtgtcgataaattgtgtgggggttctccgggcgcggctgtgtaatccgggtggcacttcgctcctgggcgaagccttcgccacggtgattcccacttttcatcctcccccggggggggga

SEQ ID NO: 487480 - DNA, 425 bp, Homo sapiens
  misc_feature (10)..(10): n is a, c, g, or t
  misc_feature (12)..(12): n is a, c, g, or t
  misc_feature (102)..(102): n is a, c, g, or t
  misc_feature (123)..(123): n is a, c, g, or t
  misc_feature (173)..(173): n is a, c, g, or t
  misc_feature (184)..(184): n is a, c, g, or t
  misc_feature (189)..(189): n is a, c, g, or t
aagctggatncngaatcgcggccgtcgtcgacacggctgcgagagacgacgagggcggtagggttacaggaccttgtagattcagaagaccctgactcatcnttgtggcgtccataattggtnctagcagatggtttccacatttagatccggtttcataacttccgtactgnagtctaaagcngaaantaaggaagcagcttcctgattttaattgtgaatcgagttttaaattgataggagggaacatgtcctaattcttctgtcctgagaagcatgtaatgttaatgttatatcatatgtatatatatatatgcactgtgtatatacatatatattaatactggtatttttacttaatctataaaatgtcgttaaaaagttgtttgtttttttctttttttataaataaactgttgctcgtt

SEQ ID NO: 487481 - DNA, 145 bp, Homo sapiens
tgccagaggaaaaagtacaaatatacagcattgaagtgtgagaatcaaagaagctactgacaataattctggaaaatacagtaaaaattagccaaagagaaggggaagaattgcttttgtattttgacgcatcactagaaatcac

SEQ ID NO: 487482 - DNA, 888 bp, Homo sapiens
  misc_feature (42)..(42): n is a, c, g, or t
  misc_feature (113)..(113): n is a, c, g, or t
  misc_feature (132)..(132): n is a, c, g, or t
  misc_feature (181)..(181): n is a, c, g, or t
  misc_feature (187)..(187): n is a, c, g, or t
  misc_feature (194)..(194): n is a, c, g, or t
  misc_feature (211)..(211): n is a, c, g, or t
  misc_feature (216)..(216): n is a, c, g, or t
  misc_feature (218)..(218): n is a, c, g, or t
  misc_feature (220)..(220): n is a, c, g, or t
  misc_feature (223)..(223): n is a, c, g, or t
  misc_feature (248)..(248): n is a, c, g, or t
  misc_feature (253)..(253): n is a, c, g, or t
  misc_feature (260)..(260): n is a, c, g, or t
  misc_feature (273)..(273): n is a, c, g, or t
  misc_feature (276)..(276): n is a, c, g, or t
  misc_feature (279)..(279): n is a, c, g, or t
  misc_feature (302)..(302): n is a, c, g, or t
  misc_feature (305)..(305): n is a, c, g, or t
  misc_feature (327)..(327): n is a, c, g, or t
  misc_feature (335)..(335): n is a, c, g, or t
  misc_feature (345)..(345): n is a, c, g, or t
  misc_feature (384)..(384): n is a, c, g, or t
  misc_feature (394)..(394): n is a, c, g, or t
  misc_feature (401)..(401): n is a, c, g, or t
  misc_feature (408)..(408): n is a, c, g, or t
  misc_feature (410)..(410): n is a, c, g, or t
  misc_feature (413)..(413): n is a, c, g, or t
  misc_feature (425)..(425): n is a, c, g, or t
  misc_feature (428)..(428): n is a, c, g, or t
  misc_feature (436)..(436): n is a, c, g, or t
  misc_feature (447)..(447): n is a, c, g, or t
  misc_feature (450)..(450): n is a, c, g, or t
  misc_feature (453)..(453): n is a, c, g, or t
  misc_feature (470)..(470): n is a, c, g, or t
  misc_feature (476)..(476): n is a, c, g, or t
  misc_feature (482)..(482): n is a, c, g, or t
  misc_feature (510)..(510): n is a, c, g, or t
  misc_feature (532)..(532): n is a, c, g, or t
  misc_feature (535)..(535): n is a, c, g, or t
  misc_feature (538)..(538): n is a, c, g, or t
  misc_feature (540)..(540): n is a, c, g, or t
  misc_feature (551)..(551): n is a, c, g, or t
  misc_feature (571)..(571): n is a, c, g, or t
  misc_feature (577)..(577): n is a, c, g, or t
  misc_feature (588)..(588): n is a, c, g, or t
  misc_feature (608)..(608): n is a, c, g, or t
  misc_feature (615)..(615): n is a, c, g, or t
  misc_feature (622)..(622): n is a, c, g, or t
tgaatacagcgtagtaatgtaaaatactgtacactgtaaaanatctagaaaactagggcttcaagtcatgttttaaaaaagccattaagcttaattgaaaaaccaagtatagngtacaaaactgcaacaagngccacagtgattccatggcatccagaccccgggtccttcatgcagagcngcagcnggtcagnggaagtatcacattggngtgcngngnggncacaagcatgtctagcctggggggngggtngggggcngcatttgggtccngcngtngcttttattcttgaacttgaacnggnggcagaatatcaagaaccaggnggtatganggattacgcngcaacattcccccctcttctaccccgcccttcaacctcnggctattgtnactttcngggaatngngtngggttcttgtangtntacttgtnaaacactgtcngtngtngggccttacagcttggnctaaangggggngatttctctagctcgctcatgtactacngcctcttatttcactgtgtgcngcngangngccatttagcngaccttctctcaccatcccngcggangtaccccttgnggggatctcacatgtcagtngcttganatattcnggaagatcggcatagtcatctccataggagatgactttaatccccttgtccagcatgttttctcgaagctttttgaactcatctacgtctcctctccgaaccagcatgaaatgttctaggtcagatttatgcttgacagcctccaagaaaagggcctggaaagtggtgtcatccacagtccagccacagcccaggaaaagaaatgacttgttttcgtagagtttctgaatttctctcatgacttcagtgttcctgagcacgttctg

SEQ ID NO: 487483 - DNA, 287 bp, Homo sapiens
gcgacctgaggatccaggcgttgtagtgaggcgtccgttgtcagtggggtcatcttgctgatggcgtctgcagcatcagcacgtcttcacatcgaagccctttttggagttcctcagggagggactcgtagacctcgacggggtccaggccgccggggccgagccgcttcttgcgctcctcctcctcgtactccttcatggccttctcgatgcgcagcttggcacggccccgcacacgctccttgaaggcttccagctcgtcgttgaagccctccatgcactgacaa

SEQ ID NO: 487484 - DNA, 279 bp, Homo sapiens
aggctacggccggagaatcgctttaactggaggtggaggtgcagtgagctgcaggttgtgcccactgcactcccagcctgagcgacaagagcaaaactccaccttaaaagaaaaaaaacagaaaaaaacacaaacaaaactcttgaatttccctgtggataccttttctctggcagccttttacaatgagggctaaatttactccaatactaatatagacctgcagaaccggtcagatattcaattccagtagaaaatttccagaaaaaattatgaatc

SEQ ID NO: 487485 - DNA, 519 bp, Homo sapiens
tgcaagctatggcagcatatatagcaaacactaatagatctgaagagggagatagagtaactgcaactcaataatcgtagggcactttaacatcccactctcagtaatgaagaggtcactcagacagaaaatcaaaaaagaaacatcaaagtgaaactatactgtagcccaaatggacttaactgattttacagaacatttcacccaattgctatagaatacattccatctacacatggaacattctctggaatagagcatatcttaggccaaaaaaacaaggcttaataaattcaaaaaagtagaaactatgtcaagtatcttttctgatcacaatagaataaaactagaaattaataacaacaggtcctggaaacaatagaaatatgaggaaattaaacaacatgtaatttaatgaccaatgagtcaatgaagatactgagaagattattttaaaatgtattgaaacaaatgaaaatggaaacaaaacttaccaaaatctatgggatatggcaaaag

SEQ ID NO: 487486 - DNA, 195 bp, Homo sapiens
caatattgacgtgaggtccgtctggctgtgaaacaatgtaatgtggagccttcgatgccgacggaaatggtgaaggcagactcgaagtactctgaggcttgtagggaggttaaaatagagacccagttgaattgtcctaggcagggcttagattgatttggttggggtagttttctataagagtagtggtgagct

SEQ ID NO: 487487 - DNA, 180 bp, Homo sapiens
cccccccccttttttgggggggggggcccccggggggcttttttcccctttttttgggaaaaccccccccccggggggggggtcccccccccccccccggggggggtgttttttttttccccccccccggggggggggcccccctttttttttttaaaattttaaaacggtttttttcca

SEQ ID NO: 487488 - DNA, 674 bp, Homo sapiens
tggaagttagcgtaaaagtgatttagaaggaaatgtaaatccatatcaaggagtaaaagggccagagttaattcaaaacaagcgcaaaaagtggaaagagtttcaagcggaggtgaagcaaaggaaggaaccagaagggggaagcataagaccaggggttccaggcatcacgacaggtcatggaggtgccatcatcatcgtcgtgaaaaaatgcaagtaggcagaggtcaaataaggtgagcactatgatcgcaaatatacgttatgtatcaagctctacagggcatgaatcacccaagataagggtgaaaatgggggtcataaaccacaaaatttgggagtgcaagtctaggagaagcaagccatgccctgaaaccggtgcagggatggaataatcggagcaaagacaagtaattcaatggccatcccagatgcgatgtccacataagatcatgggtcaatggctactttggacagatgcgaggcaatgagggcatggagcaggatcgcagagaccagtatacgtgacagttggtaatcggcgacgcagtagacgtatatgggacgcagcgtgagtcaacagcaccagtaagtgggcagcagtcacactcagtcgctgactctctctctctatctctctctctctctctctctctctctatctctctctcctc

SEQ ID NO: 487489 - DNA, 106 bp, Homo sapiens
cgatattatggtagcggacggtgaaagtatgccgtgtgtctacgtctattcaccgtaagtgaccataatcatcgctatccacaccggcgtcaaagtatttatgctg

SEQ ID NO: 487490 - DNA, 908 bp, Homo sapiens
tcatttgtgtactcgtcgccgtttgtccggtgtgctagtcgtgtgtggcgcccatgtgcgccgctcgcgcgcgtgtccctagagacactggggtttgtcactgtttcgagagttggttaggcaccccccttctgcgcgcgtttttcgagtggagatgccctctccttcaagattggacgaccctcctggttggaagagattatcctcgttttttgggggatctctttcccctggtattcagggcgaacatcgtccacccggtgggctcgcccaatggtggtataactacgccgtggcgccgaattaggtcgccgtctggtgggcttctcccaccgcgttttccccaggcgggtgccccctttgccccagaggggccacctggttgttcctccgttgtgccaccccacaatcccccttttgtgcgtcagaaggaggagttgttttcacataggcagcgaacggagcgggttgaaattttgatgagggctatggtatctctttgcctgctcgctacccgctgggtgaatcaagaccattagtatgttcccccgcggttagcatggtagagatggcttgtatcaccggtagaatattccgctgtaatatggtagatcctccggtgaaacgacgagctactgcggcaatctttcagagccccccctagcagttagaagttctgggtgccagcgcgcacttgatagcagcatttgccccgccgcgacgaggcttgctcccgctagcacactacccaaaaagcggttggtcttgccagttgcaacaatttcttcacaccggatagtgacaggatttctatactttggccagtctcagaagattctcttgcttgtgatagagagcaggcaataggaccctgtaaggaaacagaaaaaacagaccccacataacaa

SEQ ID NO: 487491 - DNA, 156 bp, Homo sapiens
cgagcacagtgtaggtccacgtggaaggaagcctgaaccccaggtataaggagggggtggtcattagggttctgttccaggtctgccccagacccccatcccagccattgccccaggcagtaacttggcaattcacggtgtgcaccttgcaggctg

SEQ ID NO: 487492 - DNA, 335 bp, Homo sapiens
gcggccgcctactactactaaattagcagccgctcgacgctgaatcaaatgatctgtgggtccgggggcgatggctcatgcctgtgatcccagcactttggaaggccgaggcaggcagattgctggggtcaggagttcaggaccagcctgaccaacatggagaaacccgctttctactgaaaatacaaacttagctgggtgtggtggcacatgcctgtagtcccagctacgtactgaggcaggagaattgcttgaacctgggaggcggaggttgcggtgatccgagattgcaccattgcactccagcctgggcaacaagagcgaggctgtgtgtc

SEQ ID NO: 487493 - DNA, 484 bp, Homo sapiens
ggtatagtctgtggttcctgggccataaacttgtgcagcatgtcactgtactgaatactataactgtagacaattataacacagtggtaaattttcgtgtatctaaacatagaaaagatacagttaaaatatgatataaaagattagaaaataggccaggcatggtggtgtgcacctgtaattccaggtactcaggctgaggtgggaggatcacttgagatcaggagttctaggctgtagtgtgctatgagcacatctatgaataggcactgcgttccagcctgggcaacatagtgaggccccatctcttaaaagggcacacgtgtataggacagctccattataatcttatgggaccactgtaatatgtgtaatccattgttgactggaacatccttatgcagcacatgactgtgtacataacttaaaatttatcatttaaaccatttttaagtgtacaattcggtggtataaagtacattta

SEQ ID NO: 487494 - DNA, 178 bp, Homo sapiens
cagtccgaggatcccaagcttctcacgtccgaaatccgaaggaaaactatcgattcttgtagaaaatggtggacgaattaatttcggggataggaataacgatttgaagggaatattatcgaatgttactatcgataatgtggttgtatcgttgagaagcttgggatcctcaagagcg

SEQ ID NO: 487495 - DNA, 426 bp, Homo sapiens
  misc_feature (197)..(197): n is a, c, g, or t
gagtatcctactaatgctgtaggatcatctatctctctttcatattgcatccttagcaggagaactcacactcccttacttcaggttttgtttgctcattaacacaaactttattggtttatccctggttgtttactgggcccaactatataagtctctgtgcccaggtctttgtcttaaggtctgccttagggaanaccaaacgcagatagctcccagcagtttccattgttaaattcgtttcgtaggatatattcacttgggccaaggactacacccttcttttggtagctgtgtagctgtgtattgcttggcatgttttgtggacctgcactcaataactacttgctgaataactgataggttatgagaaaatttttagtatataccaagaatctaagttataaggtaagttaaattagagga

SEQ ID NO: 487496 - DNA, 669 bp, Homo sapiens
  misc_feature (26)..(26): n is a, c, g, or t
  misc_feature (84)..(84): n is a, c, g, or t
  misc_feature (100)..(100): n is a, c, g, or t
  misc_feature (103)..(103): n is a, c, g, or t
  misc_feature (117)..(117): n is a, c, g, or t
  misc_feature (130)..(130): n is a, c, g, or t
  misc_feature (135)..(135): n is a, c, g, or t
  misc_feature (137)..(139): n is a, c, g, or t
  misc_feature (146)..(146): n is a, c, g, or t
  misc_feature (148)..(148): n is a, c, g, or t
  misc_feature (176)..(176): n is a, c, g, or t
  misc_feature (183)..(183): n is a, c, g, or t
  misc_feature (185)..(185): n is a, c, g, or t
  misc_feature (187)..(187): n is a, c, g, or t
  misc_feature (190)..(190): n is a, c, g, or t
  misc_feature (192)..(192): n is a, c, g, or t
  misc_feature (197)..(198): n is a, c, g, or t
  misc_feature (208)..(208): n is a, c, g, or t
  misc_feature (222)..(222): n is a, c, g, or t
  misc_feature (234)..(234): n is a, c, g, or t
  misc_feature (249)..(249): n is a, c, g, or t
  misc_feature (277)..(277): n is a, c, g, or t
  misc_feature (296)..(296): n is a, c, g, or t
  misc_feature (305)..(305): n is a, c, g, or t
  misc_feature (315)..(316): n is a, c, g, or t
  misc_feature (322)..(322): n is a, c, g, or t
  misc_feature (328)..(328): n is a, c, g, or t
  misc_feature (333)..(333): n is a, c, g, or t
  misc_feature (340)..(340): n is a, c, g, or t
  misc_feature (345)..(345): n is a, c, g, or t
  misc_feature (439)..(439): n is a, c, g, or t
  misc_feature (504)..(504): n is a, c, g, or t
  misc_feature (583)..(583): n is a, c, g, or t
  misc_feature (664)..(664): n is a, c, g, or t
tcacagttttgccccagggtccaggngcgcccggaaggcagggcccccaggcctcttcacctcagcctgggcacctataatctnagggaccctgcccggnggngggggcagctcggnggcacagcctgcngccantnnngccaganantggccggctcagtccataggatgatgtnagtatangntngangnaaagnncgccagatancccgatgcagtgcntgttaagacttnggggggatcaaagtncggccggggtgggcggagatcctcgggnagctgcacagggcatcttntgctcactncattgttttnngaggtntgtgtnaaggngctttgnctggnctgggaggtagaccaaggccaaagctcgtggccagggcctgggcactgagtccccactgaatttggcacaggaagggggcactcccagcctggnccgtcctgcatggggagccaacacaccgggactgcagtgtttcaccttgggggggaggaagcctnggcccaacggctgaacgggacaggccaggctcacccgaggaaggggacgcaggacccacagcccctgtggtcaggcctntgggccacgtggagagaaggttccagaacagtgcttgttgacgagcctctccctacaagtcccttcagcagcaggcccatncctgc

SEQ ID NO: 487497 - DNA, 284 bp, Homo sapiens
tcaccctgcttacactagttgtctctgcactgaacgcttgattaccacgcgctctcactgcgcccgtgcagtgtacacccgtcagacaggtcagcacctctcgggcaggcggaggtccgactgcggtggtgacacctctcccactgtgaccaacaaaccctcatactcaacaagacgcatgcacctctggctataaggatctaggatgctcactggcaatatcttgtactgtatccaattgtcattcatccagctttgcacagaggcagcagcagcatggtagg

SEQ ID NO: 487498 - DNA, 253 bp, Homo sapiens
ctatgattgagctcctttcatgttatatagcttcaagataaagacttcttagaaacaaagagttcattctcactttgttcaatagtaggcttagcgtctcatggtaatcacgtggaaagcagaacttacattagactatacatctatgtcaatcagatgtatagtctgtgctattattggacgtacagactttagaatatattcttaaaaatacaattaacacatccccaactttctattgtgtaaactgatt

SEQ ID NO: 487499 - DNA, 258 bp, Homo sapiens
  misc_feature (70)..(70): n is a, c, g, or t
  misc_feature (238)..(238): n is a, c, g, or t
agactatgccgagaacccggaagggtggtggcgcagtgaggcgagattgtgccactgatacccagcctgnacgacaaggtgagactgctatctcagaaaaaaacaaaacaaaaaacgacaaaaaaaaaaaaaatctctaatttcccaattcataaacggattaaattaaattacttattacaacaaaattggggcggtccctgcaaaatttagtggcaataatccgttctaagatttncaaaattcaacacatgcata

SEQ ID NO: 487500 - DNA, 100 bp, Homo sapiens
  misc_feature (32)..(32): n is a, c, g, or t
aggtaaatctaacagcatactgctcacgatancacagtttctcgatactatgcatatagtccaatatcacagagaatgatacattgaaggactcggggat

SEQ ID NO: 487501 - DNA, 308 bp, Homo sapiens
tgtctctagaggatccaccggaagcacactgcaacatcaaaagtctactcctttaagaaataaaatcctggccaggcacagtggctcacacctatgatcccagcactttgggaggccgaggcaggcggatcacgaggtcaggagtttgagaccatcctggccaacatggtgaaaccctgtctctactaaaaatacacagaaaaattagctgagtgtggcagcatgtgcctgtaatcccagctactcaggaggctgaggcaggagaatcgcttgaatctgggaggcagagatgttgcagtgtgcttccg

SEQ ID NO: 487502 - DNA, 889 bp, Homo sapiens
atttaaacaaggtaaagtatacgtgtatcgtcgtgctaatgtaacagctctctctgtggacataatgatgtttctggattgccgtggggcactcacaaataaatactggagataatggatagaagaaattccgttgaatagtaatatctcagaaagcttgatattattggaatattggatcgtgagggtctgctagaagtagtcgggtgggccgtgagaactaatggaacaattggattgagtctatcgcgaaaatgttggtagggatgcgtctggccattattagcaacatatggtattgaatatatggagatgtacctgtggaggcttgttggtaacacgtgaaggacgggagggataacaatgattctgcagaggactctgatgacctagagaacactatattttttggaaacttgtggcaaaagagtagggtcttgaccgggtctggagcaacagtagcattgatggagggggtcaattctacttgggagaattcccttagtttaactgacatagttggtacgaggggcattagaagaagtcataagggtaatctggacggaagggatcaagggtgcaatttttccctagttgatggtaaccatcttgttggagaggactccattatatttgtaaatttgaagggtgaaattcttcaacttatttaaagggtcatcacttgtcaaattgcgttaatcttccaaaactgtaataatataaataaaaaatttgttggacacaacaatgtgtttggggcgaaaactggttcttagaaaaacatttttttgaaaccactgtttttgtggagcaggggcccacataggttacagcaacttgtgccaaacagtttgcaaagaaaaaggggggggaaaaaggggggaaaagc

SEQ ID NO: 487503 - DNA, 541 bp, Homo sapiens
  misc_feature (482)..(482): n is a, c, g, or t
actgtcagtttaagcaagctgtgagtgtgtgggtttttaaaaacattattatggtataatttacatagcataaaactcgcccactatacgtgtgcaaggcaatgatattttggtaaatttatagagtggtgcagcatcaccacaaccgggttttacgatattccaattacccaaaagttttctggcatcctttagcagccactgttcaccacctccccaagcttcaagaaactactgattcgttgtcctcataattttgtcacatccaatcatttcataaaaatggaattttataataacgaatattagtatttggtgtctttttatcttcatttagcatgtttttatacatgtcaaaatattctgtgctattatggtgtcagtctattttattgctgaataatatctcattgtatggatgtaccaccacatttggtttaccattcatcaagctgctagggatttagactgtgtccagtttnggggtattagaaacaatgctgctatgaccatctgtatgcaagtctttttttctggatat

SEQ ID NO: 487504 - DNA, 728 bp, Homo sapiens
tcccgaaaaactcctggttgtaatgggatttggtattttaatacaatttattgaattttataagcttgtacccaatatttaattagtgtgaaaggaaacaaagaatgcaaggaaaaataatttaatcaacctcagtttgcacaaggtgctcagatttattcaattcgggactccctcctttggtaaggttttggagacaaccctagacctaaacgtgtgtcacagacttctgaatgtttaggcagtgctagtaattccctcgtaatgatctctgtaaataacttctcctattcttatatccctctttctctctgaagattaatgaagttgaaaatggagggtggataaatcacaacaagggtagtgtgatagtataagtatctaagtgcagatgaaagtgtgttatatatatccattcaacaattatgcaagtttagtaattacctcagggttaactaaattacttaaatatgctgtgaacctactctgtccctgggctagaaaaaattataaacaggacttggtagttggggaagccaaatggataatatcctatgtcctaaaagtggggctatacataattcttacgaaatatggatttttaatccccaggatatggtgtccacttcatgataatacgcggatgatgtttgaagtaaatcagttcgcaactatgtacctttgtgctaaataaacatgctttgcttaacacaacaacaacacaacac

SEQ ID NO: 487505 - DNA, 258 bp, Homo sapiens
atacctatgtgcggagttcagtctggtagccacgaggagtggtgaccccattgccaatgcagtggctgacatgttgcgtgagaatcgttcaggcgaaagtgaaatcttatgaaggacaagctgaggaggctgaggactatccatgtgctgaaggcagttcgggaaaatgccacactcactgagctccgtgtagacaatcagcgccagtggcctggtgatgcagtggagatggagatggccaccgtgctagagcagtgt

SEQ ID NO: 487506 - DNA, 693 bp, Homo sapiens
gggcgtggtggctcatgcctgtaatctcagcctcccgagtagctgggattacaggcatgcgccatcatgcctggcacaattattagtgtaataagtagagatggggtttcaccgtgttggccaggctggtttcgaactcctgatccaccacgcctcagtctcccaaagtgctgggattacaggcgtgagccactgtgcccggccagacaccatgaccgggccagcacaccatgcctggacccaaaacatttttacacagaaaacccaaaagtcacgtcacaatttcatcccttggtccacaatcccccaggaaacaacaatcatgtaactctgcatctatggatttacctattctggatatttcatgtaaatggcaatcatataatatggtagcaataagatggctggatttatgaaattagcatgttatccaaggttacatcatgtagtagcatgtgttagtacataaataccacttataatgggtggataatattgccatagaaaaggatataacaagataagataatcaattgaataaagtttgataaaacaatttagaaaggagacagacgtataaacttatttatgaacaaatgatgaccataaatatcatggtatgaagaataggagataaaatatactaacatactaaaagagtaaaatctcggaataagattgaagggcaaatga

SEQ ID NO: 487507 - DNA, 830 bp, Homo sapiens
gttatcctcttcaactctcttggtatgttttacgcggtcgtgtcgctaagtctttgttggttgtttgtgctcttttttgtgttttgttgggtgtggtgtcttgtgttcgtgtttagtgttctgttgtgtgcatctgtcatagttttgcgttgtgtttctttgctttttttgtcatcgtttttagtgtattgggtgggatagtgtaaggtgtggtgttggacgtgtttgttacaggtgatttttgtggcagtttatgtcggttatgggtatgtttatggttgggttttatttagaagtaggtggagtgcgtcttgtgttggtatatgatgattggtggacttgaatgtttgatggccgtcgctgttcccctgcttggtggttcagaggaagtagggcaccagggacgccaccccgggggtgtgtaatgggaacaacgctgtgtgcttttcttctgttgcacagtcccacgggttgtccccacccggctgtggggcgccccacaccgaagtgtttcatcctccgctgtcccgctgtagggcacaacatgacctgtggaggcccacatgcccaagcgtagaccacgcagtctcaacgtgagatctaccaatctccgagtctacacttcgatgttgcgggccccagacttgggggccccagaaaactgtcctgatatccgatgagtactgccccccaagttatagcctttgcccggatggccaccacccctggtgccgccactgggtgtgcctccccccccacctggggtgtttttttgaaacaaattattttttgtttttttcaaataaaggtttaagccaacccccgtgtta

SEQ ID NO: 487508 - DNA, 111 bp, Homo sapiens
  misc_feature (111)..(111): n is a, c, g, or t
ggttttgccttagcgccggctcggggttaaaaaggccgcagagggaggcacttaggacccaagtttcttcaccatgggattgtggtccatttggtcaaggaccccttgggn

SEQ ID NO: 487509 - DNA, 305 bp, Homo sapiens
  misc_feature (99)..(99): n is a, c, g, or t
  misc_feature (101)..(101): n is a, c, g, or t
ttgggagtttagagtaaatagtaaagtattagagttgtttcttgacgaaaagagttgctggaattgagaacagaaatagtggcattgcatgcccagcantntcgggcccttacccagacagacaggaagatcggaactgaggttgctggcctcaaaaccatgcctgagtcacacaagcttgataatattaaatatttagcagggtctatatttacgtgcctaacagtagctctgggatcttatcgcctgtggatctaataaagtgtctatttaaaaaagaaaaaaaaacagaactagaatttttt

SEQ ID NO: 487510 - DNA, 107 bp, Homo sapiens
tacaccagcactcatccatcgccccattgcatcactcttccaatccagcccaccatcagcccctcgtcagtccaccagcctattctccatcccaacacccccgtgca

SEQ ID NO: 487511 - DNA, 1500 bp, Homo sapiens
aagaggagatgtgcgccgcgtgttgtgttctcaagcaacccgatatcctccttgcctcgctccacaaatagacacgctagtggagtggtggtgtcccccccctcctccgctcgcgcctcccctattttatactacacacatgtcctttgttatggaccctcccctccaaacataagggtggttacataaacgaagaggtgtcgtctctctgcacgaggcgggttgtacacaatacgagacaaaacaccgcattgtctgtgatatcattttttttcttagatggaacaccttggtgcgtttgtatcactcacgtcgttggctcagatggtcgggtcctctctgccggtaaaaaacaacgcacggggtgatcaccttgatgaataagaggcgttttttatgggcggagagaatctttgcggtgcttcgccgctggatatgagggagatatcgcttccgcagaccccccccccccccttctcgttgggggagaagaagacgccccgcctttcttgttaggaaggagagggtgtgttgcgtcaccaacgaggggttctctcgaaagtaacatgtgttaataaaaaagagagctctttgttttgtcgggttctcccccacagcagtaagatatggcccgtcttactgccgcctctatatataatgtttggtgttgtgaaaaataacaccacaaacaatataacgaccctcgtcttatatgggggtgagatggtataaataaaaaaatgtgggggcgaccatcttctctattaaaatcatctccggcgtgtccttctggcgcgttctgttcttctgcggagagagatcataatagggaaggacacaatataatagggcactatgtgggagaaatatatacccccgacagagggggcacaacactagtgagaagcggtgtgaggagacacatatatatatgtgtgtttgagaatagtgtgtatagtgagacacggagatatatataagacatcatatatgagatatcacaatccactgtatagacacacacaactcgcgcgcgtgtgtataagaataaagagagagtgggtgtgcgccacccctctataaatgatatataaccaccctctcttatgagagagagtgtcacatacacacactctatatataaaatatatattggagaaaaattatttgtgggagatttaactctcgtgtggtttctcccacaaaagagtaaagagaaaacactctcatatctcctttagaaagaggggaaaaacatattttgttttttcttggtttctcgccacatttttctccctttggtcctggttttacattagatttagatatgccccttctcttccacaaaatctcaccgtggttaaaagaataaacccaatcccacccccacatttccatcccccagagaggggcttggtgggggaacataaaacttttttgcataaaagcaggaaggatttgaggcaggtgaagatgggacaaagaagactagaaacatta

SEQ ID NO: 487512 - DNA, 305 bp, Homo sapiens
gcttagccgagcagatacttgccatgatacaggcgaggacactgaggcacagggtcgtgaaagaacttgcctaggattgcatgctcagagagcgacagagacattagcttgacacagtcagctgatactgtagttcatgcttttgaccatgcagtatgctgctatttactatgttgaatgccttctccagtatggcttgtgagtaagacaggtctaggatcaaactccatctctactacctgctaaccagtcacttaggcaagttatttcaactctctaatcctaggtctacatctgttaaatga

SEQ ID NO: 487513 - DNA, 258 bp, Homo sapiens
caagtttatagacagtggtcgaggagcaacaactcgagctcggcggtgcccgagaagatgaaatttcagtggatccgagtgaagcgcacccacgtgcccaagggctggatcaagggcaatgccaatgacattggcatggattacgactatgccctcctggaactcaaaaaaccccacaagagaaagttcatgaagattggggtgagcccacccggcagctgattgacgagagggctcaccccaagcttcatgaactta

SEQ ID NO: 487514 - DNA, 230 bp, Homo sapiens
acagaggcagcgatatacattataaatacatatactgcttgtagtataccgtcacaagaagcaagttcagtatcttcaccagaaaattacaccagttgcaacacaggagatagagaactgacaaacagacaatagggtaaatagccatagtgaataatataacagctgagagattgggggaagaaaaagtcttaatgataagattgacagagactggttggggataaagc

SEQ ID NO: 487515 - DNA, 325 bp, Homo sapiens
  misc_feature (109)..(109): n is a, c, g, or t
  misc_feature (132)..(132): n is a, c, g, or t
  misc_feature (181)..(181): n is a, c, g, or t
tacaggaccccggcctaaaaagcatcgcaaggagtgcgggaaccgctgctgtcctttagcaacagcaagaaaaccaggaggtctagagaaatcaagtgcaggagctggngagctgaagagaaaatgggcagngaacgaaggggcttacttttctgaggcataacaaggacacagagaaagngctgaaacaacgggaagaaggtttgaggaaaatctacactgaccaataaatgaagaaataaactagaaagaggaaagcaaaatcagaggaagaaaagggaagaaataaatacaaaataaaaatgatgaaaaaaaaaaaatataa

SEQ ID NO: 487516 - DNA, 116 bp, Homo sapiens
cgaaagcactgcaagtagtggactgaactgtgcctaatggagaagacccacgtgctagagggatgaggggatatccatggagtacctgttcccataccccatattgtggtcacagc

SEQ ID NO: 487517 - DNA, 391 bp, Homo sapiens
  misc_feature (25)..(25): n is a, c, g, or t
  misc_feature (171)..(171): n is a, c, g, or t
  misc_feature (186)..(186): n is a, c, g, or t
  misc_feature (204)..(204): n is a, c, g, or t
  misc_feature (216)..(216): n is a, c, g, or t
  misc_feature (227)..(227): n is a, c, g, or t
  misc_feature (237)..(237): n is a, c, g, or t
  misc_feature (239)..(239): n is a, c, g, or t
  misc_feature (241)..(242): n is a, c, g, or t
  misc_feature (253)..(253): n is a, c, g, or t
  misc_feature (270)..(270): n is a, c, g, or t
  misc_feature (309)..(309): n is a, c, g, or t
  misc_feature (314)..(314): n is a, c, g, or t
  misc_feature (342)..(342): n is a, c, g, or t
  misc_feature (370)..(370): n is a, c, g, or t
  misc_feature (388)..(388): n is a, c, g, or t
acctccctgtgggctgtcctgagcnctgtggggttcctgggatggaatcagtgcatcataaagggcattctttaagcagagaaggggccaggccaccccattcaggaactgctgcgggaataaagtgctaacttgcccccaggctgtctatgggagaccctgggcccagtntgggatgtacagggntctgggaagggggcagtnctggcggcagancccggcctgcnggggcacttngntnngaagaggggtntcgtagcgggagaggcngggaggggctgcacaggccgtggagctggttgctgtggncatcngtatggctgcttgttcaggaagcggganaacatggtgaaggcagcgaggggcttgncggtgggaaccatgtggncgg

SEQ ID NO: 487518 - DNA, 907 bp, Homo sapiens
tccccgtgatcttgacaggctggaattttctaatcctggtagtcctattcatctcaagagatcctgtgcttctgggtttccctgcagggagagaatgtgcctacctgcatttccctgaagtgcttgttgttcgctacccagattcccaaatatcgtcaagcctcccctgttgtgccagcctgcgcctctcatttagagaggagtgtgatgccgctatccatttgcagtctttgtgcacatcaaaacaaacaaacagagacccaaacacaccccagcaggcttatgtcagagaattagctcccatgctggcgcagccagacgaattcagataagaatagcttaaaataaatcctcgcaggcaaactggtcacaggccagggctgtgggataacttctggctacaaccacattctgtacacatgttctgttatcctaaaagattttattttacattttttaagggagccagaggtaaaagggaagcaaattaaaattgccttctcctcactgaagcctgaggtagatgaggaggtattggttaagaactcagacagcatggttgaacattcaagagcacctgtttatgattattttttgctccagtaaatgaaatttgatcttccactgctagaggcttctcattcctagagaaattaaccacatgcagtcagtggagtgggagttctctctaagtcaagcctggggggtcccggccctgtagaatattgggtgctcctcttattaactgtaaggatacctatgaaacccttgtacctgtgggcgcgtacacacctaaacgcgtggggggccacccgcgatttcgacggagaacctcttcctgggctaacacggaggtaacagggttatgtattacaagcactactctccggagcagtcacataggagg

SEQ ID NO: 487519 - DNA, 698 bp, Homo sapiens
tcggtggtgtcatcccagcaactgagccaagggggacgccggggtccccctcaggtacacaggagcccagtggtgcctctgggtcctggagaagcgtgccccgtgcgccatgcctgggcctgagaaggggggccctggacctggagaagccgcccctgtcgcccatgcctgggctctgagaagggtggccctggacctgggcctgtctgtcccaggagggcgagggtggcacacagcatgtggctgcgggtggccatcgggcggtgcgtgtgcctcttctgggctgtagactgccttatgagccccacgagcccttgttgcaagcggctgacgagctcatgtcccggtctctcgtacttccagaagaaggcccttggtagctactaaggcctaccttcccgtggttgatgtggggggacgaggcttgagcgtcccggccgggagcactgtgatagcctcaactggtggctggtgcgggggcagctctcgaggacaaacccgggggctaactcactgttgcggggccgcggtacctgggagccctttcacacctccgcgtgagctcctggacaccctgggaccgccaaaggtgtccgaaacaacccttctcagtaccttcgagggtgggcctctgagagtgaggatgaagacctccttgagcagagctggaacttgcagacagggacgggcagccgggc

SEQ ID NO: 487520 - DNA, 173 bp, Homo sapiens
  misc_feature (53)..(53): n is a, c, g, or t
  misc_feature (55)..(55): n is a, c, g, or t
  misc_feature (119)..(119): n is a, c, g, or t
  misc_feature (135)..(135): n is a, c, g, or t
  misc_feature (164)..(164): n is a, c, g, or t
ggcactggaggtcgcgagcacgttgctagtgggcgcggctggcggggcggggngnaagggggctagcgtccggctgagccgcgggttcctgcacgcggacccacgctttgtcgggctgntctgctgagtgacacngccgtgcatccgaggagctgtggtcagcntgacggcgg

SEQ ID NO: 487521 - DNA, 892 bp, Homo sapiens
tgacggatacccggcgctcgtaccccaccccggacggccgcccatagccagccctccgctcacctcttcaccgcacccttgggactgccccagatggccctccgtccgtccgctccagcgccgcgctaggtctcagccgcccgaccggacgaccgtcgtcgtcacttagatcttgccggccagtgacagaccgctgtccatgctcgacatggctgttcctgccacgtatatctagccacccaaggaccttcaggtaggtgccggccagttcgagaccgacccataaatcatcgctggaagctcgtacgccctccatacgttctagcctgtccattgttcttacctaacttgttgatccggggcagtgatttgtgtgctgtgaacccaacctttagtccacaaatagctttcttcagccatattcgtcgagtgcacggagaggtggaagcatgccttgtacgcacacatctgaatgaacgccttgcataaaagccaagcagattgggtggcctagatctgtccttcacgactaatcagagggaagacccaggtatcttgctagattcgagcttgtgagaagcacgtccggtgtcctcgcaagtagcaaagtggcgaaggtcgctagccattattacgcattttcgtgtagcctggcaaattggttgcaaactccagtttcaactcatcttgggatgatctcgcacaaacttggccacgtgacaaaaaaatgaacccccatttgtgttgacctttcattgatgacacagttatctgaattgaccaggtgaaaagccatccaaagaattgtgtgaccacgtgacccaatttgtccaagaatggaacgcccaatcttgttggggaatattccttgcccagaacccggaaaagtgta

SEQ ID NO: 487522 - DNA, 363 bp, Homo sapiens
actctgataaacacgtctgtcatgatgagtcttcatgaactgtcctcccaagatatatgtgtatctttccttcctgagtttatgtaatcagatcatcagtgcaccgctcataattaacagtgcttcaacacttccagataaagtgtgggaattaaacaagaatgcatcaatcaacataaaatcaagacctgcgcaacgcaacgatggtaatttatctattgttaatgtccaactgcagattacttcagctatcaggtaaaagcataaaacaagtagacacccatgatatacatatctacacaccactagtttaatggactcactatgcaataggttcttcatatgcccttaactggggagaga

SEQ ID NO: 487523 - DNA, 139 bp, Homo sapiens
  misc_feature (62)..(62): n is a, c, g, or t
  misc_feature (68)..(68): n is a, c, g, or t
agaatatcgacccatgctgtcttcagtgatggttcacagttaccatacaaatgttagaaagnaacagncaaaaagtagggcatgattttctccatgtaatccagtgagaaaacaagccatgaccattgttggttgggag

SEQ ID NO: 487524 - DNA, 762 bp, Homo sapiens
aaagaggacacgaacaatcgaagaacaatacatgctcatgggcaggaagaatcaatatcgtgaaaaaggccatattgcccaaggctaatttataagactcaagtaccatccccatcaagctaccaatgactttcttcacagacattggaaagaactactttaaagttcactagtggaaccaaaaaagagcccacagtcaccaagtcaatcctaagccaataagaacaaagctggaggcatcatgctacctgacttcaaagctatactacaatggctacatgtaaccaaaacagcatggtactggtaccaaaacagagatatagaccatatggaacgagagacagagccctcagaaataatgccgcagtagtctacagaccgatctgatctgttgaacaagacctgaacaaagaacgaagcaactgggcgaaatggattccgctattgtagataaagtggtgctgggaaaagctggctagccagtagtgtagaaagctaaaactggatcccttccttacagccttatacaagagattcaattcaagatggcattgaaagactgtacatgttagacctaaaaccatacaaaaccctagaagaaaatctaggcagataccattcaggacacttggcatggtgcaagggactacatgtctaaaaacaccaaagagcaatggtcaacaaaaatgccatagaattgacaaatgggatctaattgaaactaaacgagctcctgcaagcagcaaagagaaacctaacatc

SEQ ID NO: 487525 - DNA, 924 bp, Homo sapiens
tttttgtttttgttttaattggtctttttttttttaaatccaaaggccccttaatcgggcccgggtcccatgattagccgtgaccaggggaaaaggggaaaggaaccacccggcacaggggagggtgtatatctccaaaaattcccatttatacacagaatctaaaccaagacaatcgcaacaggagtccctaattggcggtgttaagaatgttggcgcactcatgggagaaggggggatggcaccacgtgtggcggagacatgcggcggattgttcgtcaaaaaaaatatacagggtcccccacacaatctgggggtcggctgggggggacactgtggctcttgtcttcaggcccaagaggaatatcaaaatgtatcaaacagcatgttcggggcaagagtgccagaacacctgtcaagggatggggaggggagcaaggaaaatccgagggggtggggggggtccttgtttgggcaatctggggtgtcgagcgggtattggccctacccctctggttgggggatgccccccagcccctacgcgggttttggcgtgggaaggtgtgcgcagcttgaaaccccccagggtgcccgttgtgtgggggtctgccagttgctcccagggagggtgggtccacaaagtgggctcacaatggggcttggcgccctcccgcggggtatatttggccgtgcacttgcccccccccaagtcttctttcttgccaggggtctgcacgccggacctttggcactcccttcggtagctcgtctttcgcctatgccctctcatggttggacccccggtgcaagtccttatcagagggcggacctggagggcgtggacaaaccacattggcctcttaggggcaacactggcgcccgacgataaaccagagatccctcttgcctcgggcccaaggcgca

SEQ ID NO: 487526 - DNA, 368 bp, Homo sapiens
ctaccgccaccaacatctaaggactgtcatccatgtgcaagcagaccggggacttgaccaatgacgcacacagcgagacctaggaccatgaccgctttcagctgtctgaagcatgtgcatatcagggcagctgatttcacagaagcatgccagcaagtatggacaattgctgtgaccttagactgagatacgccactgtggttacgtgcacttatacttggacttcatgccatgcagaacctactcttccacatacccttcctgacatatcgtctgtgctatatactggagcactgacgaacctgtgccagtaatgcatgagacacgtctagactgaccatgagactgagccgcatgtgcataggctt

SEQ ID NO: 487527 - DNA, 226 bp, Homo sapiens
gatctagaggatctccaaacaccgcatctccacctcctgggtcaagggattctttgcctcggcttctgagcagctggaattacaggcgtgtgtcaccaagtccagctaagttttgtgatttagtagagatggggttttgccatgttggccaggccagtcttgaactcttgacctcaagtgatctgcccgccttgcgctcccaaagtgctggaattatgggcatgag

SEQ ID NO: 487528 - DNA, 119 bp, Homo sapiens
acctatactgtatgcggcatcaaggaagcgcctcggacatgtcaccctatgtgcggtaaaacagctgcccacgccatccctaaactctacagtttggactctgaccagaaggatcagct

SEQ ID NO: 487529 - DNA, 380 bp, Homo sapiens
  misc_feature (15)..(15): n is a, c, g, or t
  misc_feature (19)..(19): n is a, c, g, or t
  misc_feature (97)..(98): n is a, c, g, or t
  misc_feature (211)..(211): n is a, c, g, or t
  misc_feature (327)..(327): n is a, c, g, or t
caaaaaaaaaaagangggngggggccaggcacagtggttcatacctgtaatcccagcactttgggaggctgaggcagaaggttcgcttgaggtcagnngttcgagaccagcctgggcaacatagtgagacccccatctttgcaaaaaaatttttaaaaaattatctgggtgtcatggcatgtgcctatggtcccagctacgtgggaggctnaggtggaaagatctcttgaggctgggaggtcaaggatgcagagagccagcctggcctatagagtgagaccctgtctcttaaaaaaaaatggggtgtggtggtgtacacttgtagtncccagctcctgggagaggctgaggcaggtggtttcactggagcccagtagttt

SEQ ID NO: 487530 - DNA, 665 bp, Homo sapiens
ggggcgcggctgagaatggctgttactacgagggctatgtgggtgatgtgaagaggtatgcaatgagcgattttaggtctgtggtcgtgagagatggagcttgtataaggacggcgacaacaagagacaaagaagcaagacgccacgaagaagaaggagagtagggcagaggccacatgcgagagaaaagcaaaggcagaaacgaggcagcaagcatagaaaaggaacaaaaaagagaaaaacaggaaaaaaacagaaacaaaaaacgccgaaaacagaaaaaagaaagcacacgaggaaaaaaggagacacagacacagagagaagagaacaaagaacaaacgaaaaagcaccgggcacaacaaaaggaaagactaatgagaacgagacaggggagaaccgaacaatcagaagccagacacaacagagcagaaaaagggacaaaaagacaaaaaaaagaggcaaagacacaaacaagacaaaaacgagaagaaaagaaaggccacagaaagagaggcagaaggagacaaagctgcgaagaagaagaaaaaaaaacgaatacaagcaagaaaaagaaagcaacgcacgagagtcccaacatcatacaaggaacacagcgcgagaagaccgagcacaacaaaagccaaagagctaaagaacaaaaa

SEQ ID NO: 487531 - DNA, 105 bp, Homo sapiens
agcagatagccaaacaggtcatgtggtcctggtaccccaggattcccaaaggctcaatatctctaaccagctggtgctttccgaggcagccagtgcccctatggg

SEQ ID NO: 487532 - DNA, 91 bp, Homo sapiens
catggatttgctggtgcagtacaactaggcttaatagggacatgtgcttaatacatcccttactcaaggcaagcccagtcccatagtcaga

SEQ ID NO: 487533 - DNA, 1021 bp, Homo sapiens
gtcagcgcgatgcccaaggccaaggtgcaaaacccggaggcagaagtatggttacacgtgtcaaccgaaagcgtctgaatccggaatgctcgacggaagtgcagcgcctgcggatctgaatggtgagggggctgtggtgttccggagtggccagtgggcctcgtgcctgggacgggtccgcgagatgactggatcctgcgatgtctactctttgcctggtagcttcccacatcctgacatgccgtgggaccaccgctaaaatcggtacggcagaacctggcccgagatgggggttggcctgtggaccccaacagggcggtgccccctctgtacagagaaaggtactgacatggcagggtctcggtccttgtcttctttactcttcccccgccatactgacctaggtgtcagaacgtggtactagcccattccttccctcaggcccttccgagtttatcgacctcccacacagtcatgaacgctcaactgaccgttgagcaaggggtctctttacgaccttcgtcacactccctccccagtcacacattccccatacccctctactcagttcttttaaactctgacaattaaccccattaagcattctcaacggtatttttccttaacttatctttttctacccttaactttcctaattagtactccctaagagttgggcgatcttaaacttacaccttatcttggttattcaatcatccttggcctgaggcttccctaggcttacctgaactgcagatctccttatctcgggcgttcaagctaatattcctccgactttaaggcggtccccaaaaattagcctggggcaaattataaatgctgttgttggcaaaccccattgcccgtgggtggaatatggacgggttacagagtagtcaggaggtgtatctagcatatgtagtttggcgcaagcgtgcgtacataatcgtgaacaggcgtgggcccccgtgatgtgctctaagaagtacttacactgatcccatgatccaataaaaacatt

SEQ ID NO: 487534 - DNA, 155 bp, Homo sapiens
  misc_feature (128)..(128): n is a, c, g, or t
aaaattagcagcttaaagacgtacactaacctttggttggttactcctggggccagtttctgtaaggtcagcggtccagacacagctcagatgggttccctgtctccttttctctgaaggtgcagtcncaccaaacaaaaaaaccctttaaaaac

SEQ ID NO: 487535 - DNA, 868 bp, Homo sapiens
atgctggacactaactggcgcgcgtagtcccttacattcttgccactcgttcccgggtccatgtctgccccctgtccgctctgggggtcctataccgtggtcaccaggtctccggaacctctttgtcccggccgcgagtccacggaacacgttccctccggggttctaccacccctgggggcaccccccgcatttgtccggggccgattttttcccgcggttttgcgttcttctccagtagcgcgtccaggtatgttctttatctgggccacataaaccacccagaggggagtttgcccacctggcagcccataagtgacgcttcttagcctttcctctcgcagcctcccgtttggagaacaacccatgtcggccgttgttgctgggtcttctccaaactgggcttttgatgcagggcctccacacagtgtcaccacccggggtggggtgcccctccagtggccggggcacatagtggtacaccccgcacaccatgtgcacgcaacagggcttgcccctgcggcggcgtttaaatcatcgcccagactctttggggtccaactagttatcggagggccctgaattgtgcgccgcgtggccaggagcctccctttcacccacggggattaccgagagcccctttgcttacccgagaagggccacacaccctctggggcatattatcgcttttatccccgggccccccacactgcctagtgcgcgccccccactcctgtgatactggcgaggctcagctcaactgttccccccccgcgagtgccaccccgctgctgtcccgacccagcgaggccccccagggccccccccggccaacccctaaccccgcgcgccttttccccaaaataac

SEQ ID NO: 487536 - DNA, 512 bp, Homo sapiens
gagccttcaccatcttgttctaaactgccccaataaagccactaagaagtcatttataaaagaacacaggaaatatttcaggaacatagagaactgggagtggcaaacaagatttaaatcagatcagagtcatacatacaccaatttttttgctagggttctcaagcagctgtcatgtttcttgttagtgagtgtccttaactattatttaatatatttgctgatcataagtagagtagatgaatagtaaacatttaattctgacatttgcagtagatatagccacatctttcaacatttttagttttccgtatatttggttttccatatatttctgagaatgtaacacatttgtgcatttgtttgcttgatgacaatactttcagagtttttccataagaaagtctctgtagcaaatcaagcaaaaacagaaaattaaagagaagggaagtgaatccctctctcctcatattgtttaatttccatgaactgcctggatttactattttagg

SEQ ID NO: 487537 - DNA, 524 bp, Homo sapiens
agtcggttctaccatactctagtacatgatgctaataatacagcactaggcttattgggtaccatgtgtgtaagagattcaaaggcattttccaaagagaattcaatcctccccacctcccaagcaagtatagtggcaaaccctaaagtcatcaggaaacttaagagcatattccatccctcttgctctatattctgacgacatgtccagtcttccagataaaggcactctgcaatcagaactagatgtttgagtcatgcttctgttttttggagtgtagaggtattgaccaccttagatccaactcatgaaacagattaagttttcacacagtccaaaaataattgatatgcttaatgagaacttatttcacttaaaatttctaccagcatgaaaccctctgtaatatgcccatccagtttgtacatcagtagaagtgctcctctttaaattcatatagcaaggtttggcacattcccttggttttcccctaaattacctcatgcaaaaaaggaattgtacct

SEQ ID NO: 487538 - DNA, 390 bp, Homo sapiens
gctcctcgacacttgaaatgtgttgagaaattggactcagtacggagaatagcactgaaatgatgaaagaaatggaatgatgtatttatggaaaaaggttaaaggagctgaacatgtattggctggataagcaatgactaacagggctggggtagcacctttcaaatgttgacttagtgctaccccagccctgttagtcaacatttgaaaggtgtaatttccctcagagaaaagggctatataaatgtaaaataacagtaatagtattaaaatgccatgggaaagcacctaagaggggatagggcagacttagtgtgaggttagtgatttaggtaacatcctgacctcagccatactaacaatagtcctttatttgccatgatgtcattg

SEQ ID NO: 487539 - DNA, 772 bp, Homo sapiens
gcgtcgacggacgagcggaccaaagcggcggggacatgggcgcgagaatgacccggacggacagtttctcttcctcctgtggcaccattgccgccggcgtcgtgctcatgattcagtcaggtcggcctggacgtcccggactatgtgctcgtgacctctggcgcttgctggaagtccagacccagcggccgtagctagcgtctggcctgagaacctcggctgctcctggctggctgctgtggcaacacactgatgcactggatagccatctgcaatgcgtgcttcccagaaggaaggcatggctgagtgacgcgacgatccgatggtgcgtggcccgggtgcaagtgtggttggctgccggcgaacgaatgggtcgccaaaggcaaacggagtcccggtattgggccacaagagaaaagcaccacaggcagaacacttacaccacaggggcggaaagtctggcacaagagactctcagaagaatagtggccccgcagagagaagaagggctgtcgtgtagagacctcgtggttcaggggctctccttcatttgaaggaagtctggtggttctagaaatatttccagaattattcaagagtactcaggatgggcatgtgaagtgactgaccttaagaatgtttccattactccctgtgaattttaacgttgacactcattcctgatggtttgaataccctggttgaaaaacaattcagtaaaagcatcctggcctcaggaattgagaaaaagaacaaacaaaaaaacaaaaaa

SEQ ID NO: 487540 - DNA, 92 bp, Homo sapiens
cgttggggggatcaatataggcgcagggtgggtgtttcggatcatttatggatggggtttaaaaaattaaatgaaaaatggtaacattaata

SEQ ID NO: 487541 - DNA, 397 bp, Homo sapiens
  misc_feature (326)..(326): n is a, c, g, or t
  misc_feature (360)..(360): n is a, c, g, or t
  misc_feature (371)..(371): n is a, c, g, or t
  misc_feature (387)..(387): n is a, c, g, or t
gaaattctctcaggaatcttctgcacatctgttttacccacactgcaagctattttcaaattctctcggagttcatctccgtggactgctaacaagcaaaaatacagctaattttctctctagaattacatgtttctatttccacagaaacaatactgctcactgtactcacaacacagatcttgtattcggaccaaaataaacagtagtttcccttgtatttctgtaaaactcctaaaagagtttacttaataatgagaaatgaaaggaaatgaatttctaaaggctacaaacagattacaaatccacagaatttcttacccgcntgggataaggtgtatggtgaaggggatcttccgnaaaagtaaagntgcaggctgaatacanctagatttta

SEQ ID NO: 487542 - DNA, 643 bp, Homo sapiens
  misc_feature (22)..(22): n is a, c, g, or t
  misc_feature (39)..(40): n is a, c, g, or t
  misc_feature (111)..(111): n is a, c, g, or t
  misc_feature (121)..(121): n is a, c, g, or t
  misc_feature (183)..(183): n is a, c, g, or t
  misc_feature (197)..(197): n is a, c, g, or t
  misc_feature (228)..(228): n is a, c, g, or t
  misc_feature (246)..(246): n is a, c, g, or t
  misc_feature (288)..(288): n is a, c, g, or t
  misc_feature (379)..(379): n is a, c, g, or t
  misc_feature (457)..(457): n is a, c, g, or t
  misc_feature (476)..(476): n is a, c, g, or t
  misc_feature (492)..(492): n is a, c, g, or t
  misc_feature (500)..(500): n is a, c, g, or t
  misc_feature (523)..(523): n is a, c, g, or t
  misc_feature (547)..(547): n is a, c, g, or t
  misc_feature (600)..(600): n is a, c, g, or t
  misc_feature (607)..(607): n is a, c, g, or t
  misc_feature (626)..(626): n is a, c, g, or t
gggccgagtccgtcttttgaanaactgggacgtgtgccnngacatggtgggcaccttcacagacaccgaggaccctgccaagttcaagatgaagtactggggcgtacgccnttctccaganaggaaatgatgaccactggatcgtcgacacagactacgacacgtatgccgtgcagtactccngccgcctcctgaanctcgatggcacctgtgctgacagctactccntcgtgttttcccgggacnccaacggcctgcccccagaagcgcagaagattgtaaggcagnggcaggaggagctgtgcctggccaggagtacaggctgatcgtccacaacggttactgcgatggcagatcagaaagaaaccttttgtagcantatcaagaatctagtttcatctgagaacttctgattagctctcagtcttcagctctatttatcttaggagtttaattngcccttctctccccatctnccctcagttcccatanaaccttcnttacacatcaagatacacgtggnggtcagtgaatctgcttgctttcngaaagtttctggggcttaagattccagactctgattcagtaaactatagtcancgtgaanaaagagcagtatgaataanggcggcgaagcttatcc

SEQ ID NO: 487543 - DNA, 1083 bp, Homo sapiens
  misc_feature (264)..(264): n is a, c, g, or t
cacggtgtgatcacacctgtaatcccagtcactttgggagactgaggcaggctggaccactggaggttcaggagttagataccagttctggcccaacatggtgaaaccccgttctttactaaatagcacaaaaaactcggtctggagtgatgtctggtgcgagacactgtagttccctagcctatctccagtgagtgccttgtagcgtcagtgtagatactctgtccttgtaaacgctggcgaagtgacagagcgcttagcagntggagcacggagctcggtgccattgacactccatgcctggcgacaacatgcttggaagactccatctcgaggagaactacaacctaagagtagcagtaagattggaacaagtcaaactcatggtccgagagcatttgtgcatgagcccaaggtgctatgctctcctacatgcatagcttccattcataactcctgcgacgcttgtatagctccgtgacaggcctgatcattctacccgaggtcaattcccgcgagaaaaataacgcctgttataacaaaaagatgctatattcggggatcccttcaagaggcccaagagggtgttgccttgaagccccgtggtattaagctaaacagtcaatttttgccaagggtcccgagggccctgcgggctgggaccttccaggaacgctccgtggattataagttgtccttaatgccagcttccttgggggcaggctgcccccgcaaggtggccaaaagtccgaagacactttcggcgctttggagcaggctcacgggcgacgcttttgcccgaaagaataccaatggtctctttggaagcacaaaacacaattggggcgccggtaaatacacccctattgcttctttccttaagcttaaacccaggcttaccaaactacatgtttaaggccccaagcgggtgggctggcgtggggcgcgtccaactttgccctatggtgtgcaagatccccccaagggtatatacgtccaggggggcacgcggccgtttgcaagcgccagggctgtatgaaaaaactcacacctgtatgaaggccccctatgaaaaggggctca

SEQ ID NO: 487544 - DNA, 224 bp, Homo sapiens
gtgtaatacgataaggcacaaatatgaaaacttatgtaggcaaagtgttactgaatcagaaagaaaagcggctctttatatgaactgttatttataatgtgataggtaaggctcaggtgtaacatccatgggtaatagagaaacatgggtggagccaccaacaactcgttaagagaccccatcctcatgccgcaccaggctaaaagtgcagaacttagcgtcgc

SEQ ID NO: 487545 - DNA, 382 bp, Homo sapiens
tgttggagtgcttgtgtcccagttactcgggaggctgaggcaggagaatggcatgaaccttggaggcagagcttgcagtgagccgagatagcgccactgcagtccaacctgggtgaaagaacgagtctccgtctcaaaaaaaaaaaaaaaaaaaattgtttaaaaaaaaaaaaatcaccattattcctactctacaaacttattacattcattaacattttgggttgtttttggatgcaccaaatagcaaatacctctcttttctgtctcctctggtgttgtccatttttcttccacctgttccaaaacccattaaacctcaggttcttcgtgacttcacgcctcaggtgctcccttctaagacattatcaggctgcccttc

SEQ ID NO: 487546 - DNA, 875 bp, Homo sapiens
gagagcaggccacgttttagaccaggcctaaggcggcctttgtggggacacccaagtgtgattttgttgagaacagaccaatgaaattaagtttggattcctttttcaccagttgctttaaaactccctgtctcccgactgtgaacaccggggtgcacctcagacagaggaaatttcctggaccctcccccctccttggtccctactagagacctctcaacagattctgtggggccacacattggggttttatcaagctgctataatgtgaactaagttttttacttccccgatatacagcccctaccttcttgacctccccaccccccacccacccccatcttttaatatgctgtgcggcatagaactccggatgacccgcatgatattttcagagtcttgtccccggggtattagcacctctttgttgcaacacgggaattgattcacagagttggacactggtctcctctgattatcacggtactggggctgagggcattcaaaatagtaagcctccctcctcgtcccctgcctcaagaaattgcctccttatgttatcacacatctcttttcctccccttccctgagagctcaccagtacacatgtgttcagaagcccccaatttgcaccacggttttcagccaactcagaatgctctaattctttttctttgagaaaggaattaagatacactccttctgtgcccccatctttcctcccaactcctgcctgtgtttgttgtggataccccgtcccagaaccaccctgttgagttggacaccctgtaaacccctgggtaactctcaagtcatgatggagacttcaggttgttctgtataaaaagccaaattaatgtttttattaaccatga

SEQ ID NO: 487547 - DNA, 678 bp, Homo sapiens
ctcgggaaaaattgattaatgcttaaaaggggggaaagagggaacattcgaaactcagattaatgatgctttgtcctcagaggcaattggtttccactatatgctagtgaattgtgttcggacagtgggcatacaatgagacgcctatgttagcgatgatttaaaaagatccaaccaaagactctgtttgagcctaggaacataaatcatttgacggtaaacttctttgacctgattacccaggggttagaggccaatgacgggggtcgatgtcgagaaggaatattctggctactgagacagaaattttaaatacgtggctaagctcttggcgtctatgaaatggcggctcttttactgacttgaggtaaacgcatactcccaaacaaagtgctcaagggaggaagccgtgcaaaaacgagcggagacaggttcctaggggaattaaataggagtcacacaaagggtgggaggaggctttacaaattatggcagaggcaaacagaaagttggctattaagaggtttaaacagcccgggggtgcaaagagtcattttttgactagagaaaggagccggggccttttggggttccggagactttcccggtaaaagcagggctttctaaaaacaattttggacccttttccaaaaggggggacctttagaaagtttttgt

SEQ ID NO: 487548 - DNA, 611 bp, Homo sapiens
  misc_feature (115)..(115): n is a, c, g, or t
  misc_feature (265)..(265): n is a, c, g, or t
  misc_feature (289)..(289): n is a, c, g, or t
  misc_feature (296)..(296): n is a, c, g, or t
  misc_feature (312)..(312): n is a, c, g, or t
  misc_feature (322)..(322): n is a, c, g, or t
gatttccaggggcatccagagaagctgatcagactcaggaatccatggggtgaagtgaagtggtcgggagcctggagcgatgatgcaccagagtggaatcacatagaccccggcnggaaggaagaactggacaagaaagttgaggatggagaattctggatgtcactttcagatttcgtgaggcagttctctcggttggagatctgcaacctgtccccggactctctgagtagcgaggaggtgcacaaatggaacctggtcctgntcaacggccactggacccggggcnccacagntgggggctgccagaantacccaggcncctcctaggttgaatcagctgaggcagcacctgatgaagaaactcaggaagacagccccacatctctaaggagaaatgaagaaaagcaaatcctgctctctctacttttcacctcctgctccccatgttccctgcctggtttgctgttgatctgttgattgacttagactgtaagcgcatggggcagggccagtcactttcttctcatgacagagctcactgcagggctgtgctcggtgctagggaagcagcattagaataaaaccccacctggatgcaaaaaaaaaaa

SEQ ID NO: 487549 - DNA, 385 bp, Homo sapiens
tttgagaccgtgtctcactccgtcgcccaggccggacagggagtctcaactcactacaacctccacctcctgggctccagcaattctcctgcctcagcctccagggtagtggggactataggcacgcaccaccatgcccagctaattttgtatttttagtagagatgggttttcaccatgttggccaggctgggctcgaactcctgacctcaggtgatccgcccgcctcggcctcccaaaatgctgggattacaggtataagccaccacgcccagccaaaataaattcatttttaacaatcaaaatgttttttaaacaaattataatttcactatcatttaaaactttttaaattttttaaataaattttttttaattaaggcgg

SEQ ID NO: 487550 - DNA, 1362 bp, Homo sapiens
  misc_feature (744)..(744): n is a, c, g, or t
  misc_feature (865)..(865): n is a, c, g, or t
ggtggttatgtccttcatactggtccgtgttgccctctcaggcctcctggtgatggaacccatgacgcctctggcgaatctcacaatcagggtaccatctcacgaggcagatttgtgcgagccattatcaacggattttgcttgatgtagtgagcctgcttccttcatggaactaacccggcatgatttgttctactcgtgcagtcttccgagaattaaatactcaatccataagactatcggtagatagcccttgtgtgctcgtaggtgccaccaatcagcctctcgttcgcgaccagcactcgcaagaaagtcgccatcctacaaggaggtagggtgctcgttctttggcttgttcccgacatattcgtacagctctcgaaatcaagtcaagcgaaactcctgagtcacttcgtcttcctgatcggtcttgtgtgaccaaaggctgcgatcaacgggtattaggaaaccatgaggcttacctcggtccccagctaggaatggacctcaagccaacctttgtgggccaacaccgaggattactccttgcacatctaccgggtcgtaccttgctcctcatctcgagcatttgcgcacttccctcctttggtagctttccgttgggcaagtgcgacaatgcgcacttgcgccttagcgccctagtcgtctaattgcgggcattccgttctaaccgcatagtgtcgagacaccacacattcttacatacgacctcaggatttgtgnttgcgcggtgacagatatccattcccaaacgattcccttgttcgctttcggagtcaccgtttaacctgccttcatccttgggcgttggtggtggcatagtccctacatagagaccctcccnaaaggccagattccaaaccacggaattccattaagcgcggtattcttatacgcgaagccgctgcggcaccaccgaatccgagatttttgttcccacggcaaattggcacacaccttttgaaaacacggctccaattagccaataggctgtggattcccaaagggatttctctccggatgggccagaaacaccaaagggaggaccaaagggaaatccccaaactccccgaagggtttgtgccataccattcacaccccttgcggccccattgcggttcccccttgtccttgcaatttggcgccctcctacggaaccttctcgtttggtttggtggcctttggggccatgatccctaggccggtgcgaaccagaggcccccctgggcttttggctgtaggggtattgtttgccgcatgtgtgggtttgtaacccggaattctttgggtgtcaacgcagccagaccgtttatgcgtcttggtgtttgtcccttttagggg

SEQ ID NO: 487551 - DNA, 633 bp, Homo sapiens
  misc_feature (18)..(18): n is a, c, g, or t
  misc_feature (161)..(161): n is a, c, g, or t
  misc_feature (583)..(583): n is a, c, g, or t
  misc_feature (593)..(593): n is a, c, g, or t
  misc_feature (625)..(625): n is a, c, g, or t
ctcagcctcccaaagtgntgagattacaggtatgagctaccatgcctggcgttggttataagtggtgtgactatggaggccatctgtgtgttacaataagtgctatggcctgaagatttgtgcccccagtcctgaattcatacattaaattctaacccccnctgtgaggatgtctggagggggggtctttgggaggtgattaagtcatgagagtggagtcctcatgaatgggattagtgcccttctagaaggcacaggagagcttcctagtcccttctacccttccaggacacagtgagaagatggccctctatgaaccaggaagggggccctcacagacaccagatctgccagtgctttgatcttggacttctcagccttcgaaactatgagaaataaatttctgttgtttataaggcacccagtttacagtattttgttgcagcagccagaacggactaagacaacaaggatgaagtgaagcatcctggatatcctctgcctgtaatccggtctgatgtgcggcacttcatgtccgagcttatccatttggttttggtctttggaaaagacaacgttagtnacttactagntgcgatgcatggagaagaggctcactgtgggnaaggtacc

SEQ ID NO: 487552 - DNA, 713 bp, Homo sapiens
  misc_feature (229)..(229): n is a, c, g, or t
  misc_feature (663)..(663): n is a, c, g, or t
  misc_feature (673)..(673): n is a, c, g, or t
  misc_feature (705)..(705): n is a, c, g, or t
ttgaacccgttcaaagatcggcgaaaaaatgcttgagagtgttctcagagaagaaggcccaggccctagaaattggggatgtggtagctggaaacccatatgagccacatcccagtgaggtggatcaggaagatgaccagttcaggaggctgtttgagaagttggcagggaaggattctgagattactgccaatgcactcaagatacttttgaatgaggcgttttccangagaacagacataaaattcgatggattcaacatcaacacttgcagggaaatgatcagtctgttggatgaagaaacacaagacaccatgcaagtcccagactcatctgagaccttctggaacacggaagctgacattttggacacagtgagaagatggccctctatgaaccaggaagggggccctcacagacaccagatctgccagtgctttgatcttggacttctcagccttcgaaactatgagaaataaatttctgttgtttataaggcacccagtttacagtattttgttgcagcagccagaacggactaagacaacaaggatgaagtgaagcatcctggatatcctctgcctgtaatccggtctgatgtgcggcacttcatgtccgagcttatccatttggttttggtctttggaaaagacaacgttagtnacttactagntgcgatgcatggagaagaggctcactgtgggnaaggtacc

SEQ ID NO: 487553 - DNA, 761 bp, Homo sapiens
gctaggtagaggctgggtgtgaatcggccgaggcagacttcgctcgtactcgtgcgctcgcttcggttttcctccgcaaccatgtctgacaaacccgatatggctgagatcgagaaattcgataagtcgaaactgagagaagacagagacgcaagagaaaagatccactgccttccaaagaaaggattgaacaggagaagcaagcaggcgaatcgtaatgaggcgtgcgccgcctatatgctactgtacagttccaccagagcattgccgttcttattttacttctgtttagctgtttaactttgtaaagatgcaaaggaggttggatcaagtttaaatgacgtgtgctgcccctttcacatcaaagaactacgtgacaacgagaggccgcgccatgcctttcccatctgtctatcttatcttggcttggcagggaatgcgaaagaacttgctaatgttgggtgtaaggaagaagtgcgggtgcgaagaacagtggggtgggactgacagtgataatctagagtaaaaccaagctggcccaaggtgtcctgcaggctgtaatgcagttccaatgcagagtgccatgatcatgtcctcttgggttcgccttggatgttccacgttatcgggcaatggcccaatttttatcaacctatcgcaagctaagcaccgttgaaaagcctttgaaaacacctctcaagcctagtacctcagccatatactccgcccgagctaattgagccggcgtgccacagctggcc

SEQ ID NO: 487554 - DNA, 268 bp, Homo sapiens
tgctgggggtaaagttggtcaggttaagcttttacagagcaaaacccaaagctcttgtttggtgagccgcttcaagctgcctttgatctctcctgcagacctcctgggaatcagtggtccgaaagggtcacatatgaggaaatcaagaccccgagagggaacgtaacttgctcaagcttgttcagctggtttacaacacgggtgggatcagaaaccccggcatacagggaccgattctttcactctatcataaaataaaaggagctcc

SEQ ID NO: 487555 - DNA, 169 bp, Homo sapiens
agttgctgctgagaaatctcactttgatgtgtgtgtctgagaccgggtgctcagtccggctatgtattgcgagatggagccagacctgccggtggcatcttgtatcctttcgtctccggctgctcagtaggggatggagatttgaactcgtcgccaagcctctgccaca

SEQ ID NO: 487556 - DNA, 992 bp, Homo sapiens
  misc_feature (30)..(30): n is a, c, g, or t
  misc_feature (45)..(45): n is a, c, g, or t
  misc_feature (54)..(54): n is a, c, g, or t
  misc_feature (62)..(62): n is a, c, g, or t
  misc_feature (105)..(105): n is a, c, g, or t
  misc_feature (126)..(126): n is a, c, g, or t
  misc_feature (133)..(133): n is a, c, g, or t
  misc_feature (145)..(145): n is a, c, g, or t
  misc_feature (150)..(150): n is a, c, g, or t
  misc_feature (165)..(165): n is a, c, g, or t
  misc_feature (176)..(176): n is a, c, g, or t
  misc_feature (181)..(181): n is a, c, g, or t
  misc_feature (184)..(184): n is a, c, g, or t
  misc_feature (193)..(193): n is a, c, g, or t
  misc_feature (197)..(197): n is a, c, g, or t
  misc_feature (204)..(204): n is a, c, g, or t
  misc_feature (212)..(212): n is a, c, g, or t
  misc_feature (216)..(216): n is a, c, g, or t
  misc_feature (220)..(220): n is a, c, g, or t
  misc_feature (224)..(224): n is a, c, g, or t
  misc_feature (229)..(229): n is a, c, g, or t
  misc_feature (237)..(237): n is a, c, g, or t
  misc_feature (246)..(246): n is a, c, g, or t
  misc_feature (271)..(271): n is a, c, g, or t
  misc_feature (277)..(277): n is a, c, g, or t
  misc_feature (279)..(279): n is a, c, g, or t
  misc_feature (288)..(288): n is a, c, g, or t
  misc_feature (292)..(292): n is a, c, g, or t
  misc_feature (302)..(302): n is a, c, g, or t
  misc_feature (309)..(309): n is a, c, g, or t
  misc_feature (316)..(316): n is a, c, g, or t
  misc_feature (319)..(319): n is a, c, g, or t
  misc_feature (327)..(327): n is a, c, g, or t
  misc_feature (331)..(331): n is a, c, g, or t
  misc_feature (339)..(339): n is a, c, g, or t
  misc_feature (364)..(364): n is a, c, g, or t
  misc_feature (367)..(367): n is a, c, g, or t
  misc_feature (375)..(375): n is a, c, g, or t
  misc_feature (403)..(403): n is a, c, g, or t
  misc_feature (411)..(411): n is a, c, g, or t
  misc_feature (433)..(433): n is a, c, g, or t
  misc_feature (446)..(446): n is a, c, g, or t
  misc_feature (448)..(448): n is a, c, g, or t
  misc_feature (526)..(526): n is a, c, g, or t
  misc_feature (529)..(529): n is a, c, g, or t
  misc_feature (547)..(547): n is a, c, g, or t
  misc_feature (555)..(555): n is a, c, g, or t
  misc_feature (572)..(572): n is a, c, g, or t
  misc_feature (674)..(674): n is a, c, g, or t
  misc_feature (977)..(977): n is a, c, g, or t
cccgggctcgcccatgaggcctctgcccancgggaggaggaaganccgaggcanctccctangactcttcgccctctgcctggccgcaacccgctgtctgcaaantcaaggtgtgtccctaaaaantcctcangccaacaacaangccantgtcaaaaaaaaaancctgctctcanttgantantcctgtcanggantgcccancaacgaangganaaantcanccaantggggaangcaaaagancgtggagtggaaaacaaggactcangccaananctctcaaanccanaaagaaaaantctgcanctttganaanggctccanccanctcttcancgtgggagtgagggattccggctantangtcatcancgtgacggagcgcctggggagcagccantttggcancatcgtgctgcacgtctctganatcctctatgaananctgcactttgtcgctgtcatccttgcttttctcgctgctgtggccgcagtattaatcagcctcatgtgggtttgtaanaantgtgcatataaatttcanaggaaganaagacacaaactcaaanaaagcacaactgaggagattgagctggaagatgttgagtgttagccaaggctgggcctgactgcattcctacctcaagaggaaaccattctccaacaaaaanagcaagcacagctattatacccattgtgtgtggtcctgttgcagcccgctcctaacaggacagtgggagattaacaacattgactgcatggagttgaggactgtggatgggacaaagctagtattaggactcgcgctaagttcaaggagaagagtgattgaggctttgaaccaggagcttcgcttggctgcagcatcagggccgtgctgacacataaccaatgggtgagtgcaggcgttggctgcttgctcacgacacttgctctggtgtgcaggatggcctgttgtcaaattcctgtatcanaggcagaggatttca

SEQ ID NO: 487557 - DNA, 369 bp, Homo sapiens
gctatttagtaatataatttaagaacatgagttaacccatagtattgagggtccaagtattagttgccagcctaaaaactaaaatatggccaggcgcagtggctcatgcctgtaatcccagcactttgggaggccgaggcgggtggatcacctgaggtcaggagttccagaccagcctggccaacatggcaaaaccccgtctctactaaaaaagtacaaaaattagctgggcgtggtggcgggcacctgtaatcccagctactcgggaggctgaggcaggagaatgacttgaacccaggaggaggttgcagtgagctgagatcacgccactgcactccagcctgggcaacagaacaagactccatctcc

SEQ ID NO: 487558 - DNA, 667 bp, Homo sapiens
  misc_feature (255)..(255): n is a, c, g, or t
  misc_feature (259)..(259): n is a, c, g, or t
  misc_feature (266)..(266): n is a, c, g, or t
  misc_feature (268)..(268): n is a, c, g, or t
  misc_feature (270)..(270): n is a, c, g, or t
  misc_feature (286)..(286): n is a, c, g, or t
  misc_feature (289)..(289): n is a, c, g, or t
  misc_feature (326)..(326): n is a, c, g, or t
gtatatatggttgccatggaactggtgtttgtttgattacctggggctgtttgggcctctgagagtcctttatagctgattgtcttttgggagagtggagttggagccccaccctgtctcttgagtcactcctaaggtgcatggtcaggcaggtgctggggaatcggctactcctccagagctttgcgtgccatccctgtggccctctgggagtctggagcccattccctcacactggtactcactgcagctggngacntctgcantngnaagacaggacacggcntgnaagctgcctctgcccagaagccatgacattctggtcnccagcctgatgctataaaacgagtgtcacggccgggcatggtggttcacacctgtggtcccagcactttgggaggccaaggcgggtggatcatgaggtctggagttcgagaccagcctggccaacatggcgaaaccccgtttctgctaggaacacaaaaattagccgggcgtggtggttcatgtctgtgatcccagctgcttggaggctggggcgggagagtcgcttgaacccgggacgcatcggctgcagtgagtcaagatcgagacactgccctccagcctgggcaacggagcaagactctgtctcacacacacacacacacacacacacacacacaca

SEQ ID NO: 487559 - DNA, 223 bp, Homo sapiens
cttttaaaaaggggttttaaaccgaaaacattttcctttttttttattttaacaaaggtgaaaggggggggtttggacaaaaaccccccacaaaatttaatgggggaaggaaaaattccccgtggttgggaaaaaaaaattatgggggtttttaatttaaaaaaaaaagggcaaatttcccccccccccccctattcccgggggggggtttttgtcgggggga

SEQ ID NO: 487560 - DNA, 688 bp, Homo sapiens
atcgcgccattgcactccagtctggtaacgagagcgaaactccgtctcaaaagaaaaagaaaaaatatttatgaatgtccaaaacatgtaaaaagatactcaacataattgcaagggaaatataatatttttttttttttgggaaacggggtctcgctttgtcaacccaggcgtggagtgtgcttgggcggtgactcaatagtttaacgtgcaacctttgacctcgtggtggcctcagggtgactcctcttcacctttagcctcccgagttagcgtgggactacatgtgggtgggtggccatcgtgtagtttccagcgtgctcgggaaggctgaggcgggagaatcgtctgggactgggggagacagaggttgcagtgagctgagatttatgccatggtcactccagccggggtgacagaaccctgtctcaaaagagaaaaaaaaaacaaagagaaacaggaaatttcgaggaccctttaacgtttgcaaatgtatcaaaatctgtggccagagaagaactgtttaacgagaaagacctctaacttacgggggaaggatttacccatctggccatgctcttggaaagagaccccactttgtgcaaccctgtcccaggttctcccccaaaaagctccaaaagaattgggtgtctcccccaaattctgcgagggactatgggggaaacat

SEQ ID NO: 487561 - DNA, 378 bp, Homo sapiens
  misc_feature (58)..(58): n is a, c, g, or t
  misc_feature (296)..(296): n is a, c, g, or t
agccgagggttgttcccctccagagcagaacccggcagccgcaggggttgcctggggncgtgtgtttctcggccaccgcggtaggactgtgtgtggggctgtgtctcccattctcccttctctctctgtctctcaccctctgtgtgcttctttccctctgtgtgtgtgtgtgtgtgtgtgtgtgtgtgtctttggacgaatgtgccctgtgcgtcaaaaagggatgtcttttatgtggaccggtctttggtgagcctctttctgcgtctctccctgggtcctgcggccagctgtcnatcgtcttcgcggcggttccactttgggtctgtgcaggcctcgataacgtgaggggatgcatcgggcccggagcaatggaag

SEQ ID NO: 487562 - DNA, 346 bp, Homo sapiens
gaaggtccatttggatctctggcatggagccaagctctatgctgtctatattgttatgattaatacgacaatagatatactaagaagacaagtaggatataccaatgttcttcggtttagtaagtttgtttaatctgcgtgctctttatggccaggtttctttttacttcattatactggatctgaggacttcgagtttcccaataacgttctattaatgtgcattatctttcatggccttcttggaacagtacgtctcagagttcctgtggttgtggggctgctttcttacctcatcattgatatgcacacttgcactaagccttacaatacctctgtccatcat

SEQ ID NO: 487563 - DNA, 310 bp, Homo sapiens
ctaacaatctaacacccatagtaggcctaaagcagccaccaattaagaaagcgtcaagctcaacacccactacctaaaaaatccctacacatagtactgaactccatcacacccaagttggaccaattctatcacctctatagcacgaactagatgttagatatacagtaacagtgaaacacattctccatccgcaacgtggccccaacgagcccgacacagggccatgtgagagcggacttctcggaccgccgccaaagctcgtctcggagaaagctggcctccataccagcgctgcgcgcacaagaca

SEQ ID NO: 487564 - DNA, 963 bp, Homo sapiens
tggacttgccgacggattccaagtccccaggagggctttattttttcttttacaacatccggtgcgggggcattcctgggctcttttggcccgtatgccagaaaagccggggcgtgggcacggggccatacgggagactagcgaaggtcttggaaattcttctcttcctcaggggatagactcgagctttctccttcttatagacgtcccggacgggcatgaccgggtccggtcagctgggtggccagtttcatgttcttcagcaaaacttggtctcccttctggggggccgagggctccctgggggaagaggatagagtttggagagcgggtactcattcagccgatgaactgtgggcctgcagggactccgtggacttgtccagcctcctgcggatccacagaaatggccgagggtccgggacacactttctgggagaatgccggaccaccctgagctcctccaggctgaagccgaaggccggagcagacaccttacgagggggaaccgaaccgtggggcagcgcacagaggggccgagatgggacccaaagcggggcaccagggagaaaatgcggacgcgccaatggaatagacagggcctaaacgtcaagcgagatctaacgggccggaatagatagaacccaagttggccacaacgcagcccagatgaccaagcactatagatagagaagcgagggagctatcaaagacccagtggccatctaccagagatggggggcgcccaatggattagcctaaagaggacccctgaggcgaatacatgaacaagggcacagggagatagagataacacgcgggcatataaaatcgtgacaatatgggccttaaacctacagagggtgacacacgggagaaactatgagacccccgaaaaggacgtcggagataacacaggggagtgcccataagtggggcactgttaaagccacagggggcaca

SEQ ID NO: 487565 - DNA, 941 bp, Homo sapiens
ggaggacatactgaatgccggtgacaaattaacagaggtccttgaagaggctaacactctgtttaatgaattgtcccgagcaagagaagcagtcctggatgcccactttcttgtttggggcttcagatttggggcaatagagaaatgcaaagcagggtgcgcttaagaccgtgaggtttccttgagacatgtctaaagatatgttgaaactctactcacactatattgggtgtaaaatccggtagaaagttgaagaactcatccgtgatgaagataggccctgattttgaatccataggtctattgaccttcctgaaaagataaccgaggcaggaaacagcgagaaaaacaccttttaataaaaagccataaattccactttctggtgggggttcaatataccggaggagtgccctggtgccaaaagcccacgatgttgactcgtccagggaaaagttcctgtgatacaaggaggagagggcaatgcctgcccagttaacgaacgcatgcaacgactctccattcaagaaggcacccagagacagacgtaggaacgacatcttggggatggtccgcacacatatttgcgagaggatcctgatacccaaaattgtctttctttgactttggggttgatcctcattctttccccccgtacagttgaaaccattcttcaatgttccttcataatacgggatgggtttgcaagaatacgacttgccaagaccggtgcaggaataaaagctgtagtatactggaccacatgggggtttgacctacaccagttgacttcaggataacttggtacggccggagaggtgtgaactggggttaaggggttcacgcgagcggaccacgcttctctggtcctcgttgccacacgagggtgtttggaaaggggaagtcggaagtgttgcgcccaaaaagccccgggcgcgccc

SEQ ID NO: 487566 - DNA, 758 bp, Homo sapiens
atctttcaagccagtaatgcagaattgtcttcatgatcactgtgatctacaagtcagtgccctgtatgctctcacaggtggatgtgctataacagcaagttcccatgaaggtgtgtaaaatgtcggtttttagttggcacttctatgatatggaaattattgaagaagaagcttgcttggcttggaaagaagatgtagaggccaagagtttccgggagaaggcgaaggcttgttgcaggtgaatcagtggctaacctggttagaaactgtgaagaagggaagaatcagaggacgacgctgactaaagaaccaggcaaagccttacaatgggtgcaaaacatactgtggctatgatgtaactgcatttgacctaaccactgcgaaaattcattccgtgtaagtgtttgtcgcaatatttagagcagaagcacgtcagtgaggatttccttctgcgtaagggttcgtgtagtgtaatgtgcttaagtcattagttctaccgatcaaatattttaggagtatcttatagatgtaaagatagtatattagcagggtgcaataattacttcataagttctcaagcagaggcagtctattgcaaggaccttcttgtgctgcagttatcataggctgtgttaagttagaaaatgaatagcaacactgaatactgtagaaatgcacttggtcagtaatactggagttgtgcatatttgatatcctttggtggtacagaaaattttacgtatggaggttgcgaataa

SEQ ID NO: 487567 - DNA, 288 bp, Homo sapiens
ggtcgacggatgtgtctggagtcttggaagctatgctaccctacgttctcctacaaatggaccttgagagcttgtttggaggttctagcaggggagcgcagtacatcgtatacccttgaccgaagaccggtcttcctctatcggggatggtcgtcctcttcgaccgagcgcgcagttctaggagggacgcacatggagcggtgagggaggaaggggacacccgcctagccagccagatcagccgaatcaaccctggcgatcaatggggtgacagatgtcgcagccagg

SEQ ID NO: 487568 - DNA, 369 bp, Homo sapiens
  misc_feature (18)..(19): n is a, c, g, or t
  misc_feature (253)..(253): n is a, c, g, or t
  misc_feature (265)..(265): n is a, c, g, or t
  misc_feature (353)..(353): n is a, c, g, or t
aagtgaaagtccctgaannaggggcgggatgcgcccgagtggcattttttgtcttaaggtagatcgcgtagctgttcttcagaataatcttcagagcgttgacgacagccatcgctgtgcattcctcaagaatagaatgtgtcggaagggtggcgtcattggtgttagtcatcgcttaggatttctcaatctggcttacacgggcgcctgtaccgatatccccgcggatggcgacgtatcgatgttgaattcntcgccagacgangtgcaatgagctgcggctataggcttgcgcagccttagatagccggccgtcgcaggcgcgccggttggccgggatcttcttctgcccntcaggtgtccggtcgg

SEQ ID NO: 487569 - DNA, 1607 bp, Homo sapiens
ggcagagcaatggtgcctcatgaggaagcttcccggcagctcaatgcgagcactactgctgccgaaggcaccacacacgcaagcacgcggttcgacggtgccgctggcctgccgagcgaggctggtccaggccttcgcggtggtcctggcaagtggagagggacgtgtgcgatgagcggaacgtggtccatggtcccgtatccagcgtgcggaggggagctcggaccgccagctgggagccgtacgcaacgcgtgggtctctacgcacgcgaagaggagggcccgtcgcatgaaccggagacacggcacgtgcgtggcccaccagaaggagcaaccgagagagcgagggagagcgacaccgacgtccgatagcgccgagacacatgagggcgcgccagagaggccatcgcaggcgccgcgacctgcgagctctaacgcggcttagtcgcggctatctcaccctggaggacgggaccgctgggcggtccgaacggcataagtgaactacccgcccaacgcggccggtccataatcacaccggcgggaaactacagtggacctcaacctattttctcacccgcgtgtaatgccaattcacaagcctccacaagggcaacttagcccactggggcgcccgttggccacgcgcaacgatctggggccaaggacccaacactggcctctttgacactgagtgccctccaacccactccgcgcgaacgaaatacacacggcccaatcggctcggggaggctaaacgccccttgggggcagcgcgtgacacaggggccccgagcatggcgaccccaccgagaaggaaacatcgcccaagtcgccggtccacccccttggcagaaccgcggcaacgccgcatggccgaagacgccagcatagccggcgaggtgccttaggccttcgttagccaaaacggccagccgtcacctacgcaggcaacctagcgtgccacactgggcaagcgaaaccggcaactccccgaggggcaggaaaacgggcaaaggcgaaactcgcacaacccgcaacgacagggaccgcacgcaaaccctctcccgcaaatgccctcctgtccctgcagggccgcccctcgcatagtctgtcgaaacctccacccccttccactccccacgttcggcacacaccctctggggcaccctcaccccacaacaggcgcgcgctaggcgcagtcagacaacctgtcggagcccgtaacctggatcgccgatcctcccctaccccgcagccaaccttgatccgacacttggccatcttcgcacgacatacctgtctcgcactgcctggcagatgaccaaccgcctcacccgtcgcggcgcaacccccaacactcgacccccgacaacaccgcccagcgggcgggctggcacaccggcccgcacaaaccggccgcccccgcgccacagccccctgcgacgcacgcggcccaccgcgcacagcggcacacacctggcctgcggcgccccactccacccgcaacggccgtcacgcgcccacgcaccaaccggtcccgagcccgcacgctagccacaccacacccgcccaccccaccgccgcccacgaccgaagcgccgacc

SEQ ID NO: 487570 - DNA, 118 bp, Homo sapiens
  misc_feature (4)..(4): n is a, c, g, or t
cccntggagacttcggtgcgtgaaactgtttacggtcatatgcttttctagtcaggttcaggtctcaggagcgcagtaggggccaggttctgggctcgtcaagcaaggcctagcatag

SEQ ID NO: 487571 - DNA, 242 bp, Homo sapiens
gaaagcttaataatgcaatcgaataccaatataatttcaagcactgcttattataatatttactggcgtctcttatttttaccctcctacaaacctcagagatacttcgagatctcctcttcaccacattcccgacgagcatctacgtgctctaacattttttggtagccacagtgcttccacagtacttcacgatccttattgcgtctcaacctttccttcacctattaagactttcgggc

SEQ ID NO: 487572 - DNA, 585 bp, Homo sapiens
tcattcagctcggtaccccgcagtagttcggccccctgggggcgcgcatcgcgatgacctgggatgcccaggggtgggcaacgagatgacggtagtaggcaagcatcaactcatgcagcggtgcatcttcgatggcccgctgcagagctacgtcttgaccgagtgcttgatcgaatccgagatcgtagaggtcatccacggagtccatccgcgagtacaagctcgccggggccacctccagccgcagggccactgcccggatcgtcaaagcacgcaggccaccttcgtccaacagtttcacagaggtggtggccacctgctctatatccactgcccgagcgcgacgaactggtctccgatgctcccaataactcatacttccatattaaccgaactgtgttagttttacgtgcatgttgaatgccgagcttcttccgctccgtgacgaccgggcggtgctgcgaccgatgcgcgcagaggacgcagatgcctatgctgcagggactacagatccggcggtgcatctgtatgctcatctgcctgaacctgaatataccccggcctcggtgactgagttgatccgcg

SEQ ID NO: 487573 - DNA, 371 bp, Homo sapiens
agtactattaaaaaaacagacaaaagactaaagaattaaatatgttaaaattactaatccaaatgtaaaacaagaatacaggcatattggcaatgctaatattcaaaatgggtataccccagtacataattcctctgctcccctcctacctaaaaatctcagacaagtattcataataaattaggaagtacagaatacttaaacaagccaaactagaatgctgcgtcgtaatgctaaacttatacaggtacaatttactttaacagcaccctgtacagccaatggaaagagtcaacaccatatccaacaaaaaaaaatacaaagcacaattaggactgaggaaagggtgtcaaatatgcactggtctgtag

SEQ ID NO: 487574 - DNA, 249 bp, Homo sapiens
ctctagtcgatctccagagtatactccccttcccccaagtgattggtatttgctatcacggggatggagtgtgacaaatctttggccattgcacaacgtggcttctgccattcatatggaggaatttataatatgtcattactgtcagagaccttttcgccaaacagtatctttagttcataggctgcggatttattatgtgattatctcttgtattagtaaaatggaatatttattaaataccttgag

SEQ ID NO: 487575 - DNA, 766 bp, Homo sapiens
  misc_feature (42)..(42): n is a, c, g, or t
  misc_feature (73)..(73): n is a, c, g, or t
  misc_feature (93)..(93): n is a, c, g, or t
  misc_feature (100)..(100): n is a, c, g, or t
  misc_feature (106)..(112): n is a, c, g, or t
  misc_feature (166)..(166): n is a, c, g, or t
  misc_feature (181)..(181): n is a, c, g, or t
  misc_feature (196)..(196): n is a, c, g, or t
  misc_feature (204)..(204): n is a, c, g, or t
  misc_feature (221)..(222): n is a, c, g, or t
  misc_feature (232)..(232): n is a, c, g, or t
  misc_feature (239)..(239): n is a, c, g, or t
  misc_feature (251)..(253): n is a, c, g, or t
  misc_feature (262)..(264): n is a, c, g, or t
  misc_feature (292)..(292): n is a, c, g, or t
  misc_feature (297)..(297): n is a, c, g, or t
  misc_feature (307)..(307): n is a, c, g, or t
  misc_feature (309)..(309): n is a, c, g, or t
  misc_feature (311)..(311): n is a, c, g, or t
  misc_feature (313)..(313): n is a, c, g, or t
  misc_feature (339)..(339): n is a, c, g, or t
  misc_feature (346)..(346): n is a, c, g, or t
  misc_feature (365)..(365): n is a, c, g, or t
  misc_feature (367)..(368): n is a, c, g, or t
  misc_feature (372)..(372): n is a, c, g, or t
  misc_feature (401)..(403): n is a, c, g, or t
  misc_feature (410)..(410): n is a, c, g, or t
  misc_feature (429)..(429): n is a, c, g, or t
  misc_feature (435)..(435): n is a, c, g, or t
  misc_feature (448)..(448): n is a, c, g, or t
  misc_feature (459)..(459): n is a, c, g, or t
  misc_feature (463)..(463): n is a, c, g, or t
  misc_feature (542)..(542): n is a, c, g, or t
  misc_feature (547)..(547): n is a, c, g, or t
  misc_feature (582)..(582): n is a, c, g, or t
  misc_feature (629)..(629): n is a, c, g, or t
  misc_feature (668)..(668): n is a, c, g, or t
  misc_feature (765)..(765): n is a, c, g, or t
cttcatcaaagaaaacacaagtttaagacttaacatccactngatctacagaaagcccaagggatgggggagntggttgctaatttgactgtngtacaantgaagnnnnnnngggggggcgaggaaacaccttagaattacagaactttccatgacagtcagaganagcagtacaaaaatnctcttaaataaagtncaaaattnaatgaagtttcaaaaannccatgaagtngaatatngactgaaacaannnttttaaaannngctgtgtccctttttttttttatagagnctggntatctcatancngntnctactacatatatttttttttttttngtttccntttttcttcttcttctttngnnatanatggcagcctttgtgtccagaatagagannnctttttntaatatctttttgttatantttttncagttcctgggangcatgggatancttntttttttttttttgtggggttaacatttttggggggggcgggggaaaacatctttctcaataatcttaggccagggggnttggnacaaaatataacattaaagttacacttggggcgtngtttaaatttgatgtgatcataaaaataatccacgggggtgtcaaantcattcggccttaataagtaacgcatcaaaatgtaatgnaaacaatgcaatagttttggtcaaagaaagatttaaaaatatgaatatgactgtaccaagagctaccgttatactctcattgcagaagtcgtgttgnt

SEQ ID NO: 487576 - DNA, 151 bp, Homo sapiens
aaaaaccccccttggggaaaaatttttttaaacccggggggggggggggggggggggcccccaaaaaaccccgggccccccaggggggtttttttttggtccccggaaattttccaatttgggggggtttttttaaaaaaaaaccccccca

SEQ ID NO: 487577 - DNA, 691 bp, Homo sapiens
atcccccgggctgcaggattcggcacgaggttcccttcactataacctacatttttgtcacattaagtttttccccattccaggacaggtcaggccctttaaaaatttcaacagctttattgagatataattgatataatttaaaaaatcctgcacatgtgtcatgctggagccctattgattccaacagggatggcgccttgtccaagaagagacccagagccagtgaatgggacatagggtttatttaggacttaaatacagatgtggtccagtggcagtgggctggacaggaccgctactatttgtaaagagtatgtagtttatataacatttcctacttagcactctccacttagcaacctccatttaacccaaaataaaaggccttggttccttgcacatcctgagttccaacggacaggcagggagttcaagtgtccttcacagataagaagtgaatctctctgggttggccattcccggattccttagcttagactctgaacacatattcttcttagaccatacagtcattctcagggtatgcttgagttaatgctgtcggatgcatctgtcatacaaagtgtttaacatatacgatttcatgattttggaaatatgcatacacccatgatatcactggcacagtcaagatattaaatatatccatcacctccaaaaaaaaaaa

SEQ ID NO: 487578 - DNA, 1461 bp, Homo sapiens
cctcatgggatcaagcgattctgtagtcccagctacctgtgaggtggagattgcattgagccaagatctcaacactgcactccagcctgggcaacagcgtgagactccacctcaaaaaaaaaaaaaaaaagaatctgactatataccatggaaaagccaccactctgccacttaaataaacatcaggatcagagattccaagaggacaatctgcatcaagtcttcaccaagtgttttttaagcgaaataatgaaatagggagcagaatatgcctgttgcccatagaaacgaggtctattcttgtcctcaattaggcttttttttcttcatagttacaccagaactaaagtaaaagtggtttttctgttctttctacttctccccatgaaatgggcatatcatctcaacacttcactccaagtcgccacgggcaaccttatgaccctaggtcctccacccctaatgtatcatcattgccacccatttttatggtacttattgttcttaagcttatcctcttaatcttttcatgtaagcaaagctcattaatttctgtcttggaaatgctactactctctttaattactcaccaaatccaactttaacttttgacctggtttctctgccacaagttctgtcccactggagcccatactcacctaccgctttgccatcacatttaacagaaaactcttatcaacttacttcctgcttaacattagctccttcctatctatatccaaatttcttaaattcaaattttttagctggagtaaaaatggtcccagtaccatttcctgttcccttcactataacctacatttttgtcacattaagtttttccccattccaggacaggtcaggccctttaaaaatttcaacagctttattgagatataattgatataatttaaaaaatcctgcacatgtgtcatgctggagccctattgattccaacagggatggcgccttgtccaagaagagacccagagccagtgaatgggacatagggtttatttaggacttaaatacagatgtggtccagtggcagtgggctggacaggaccgctactatttgtaaagagtatgtagtttatataacatttcctacttagcactctccacttagcaacctccatttaacccaaaataaaaggccttggttccttgcacatcctgagttccaacggacaggcagggagttcaagtgtccttcacagataagaagtgaatctctctgggttggccattcccggattccttagcttagactctgaacacatattcttcttagaccatacagtcattctcagggtatgcttgagttaatgctgtcggatgcatctgtcatacaaagtgtttaacatatacgatttcatgattttggaaatatgcatacacccatgatatcactggcacagtcaagatattaaatatatccatcacctccaaaaaaaaaaa

SEQ ID NO: 487579 - DNA, 870 bp, Homo sapiens
cgtcgcttgggtggccaggccgcaatacaataaccgggggaacggagtaccggtaacccggggcccctcttccggggccgtcagggaccccaccgccaggaaagtgggagccaacgggaaatggtaaaacaagccgagagtgcgcgcccacaaacaagtttacgcacccgcccccgggagctcatctttagttcggggagaaaaagagtctctattgccagaggcaccaaacagtcgcgtgactagcaatccgtgcgcccgcgcctttcagcgcagaccgcctgagtgagaaaggcgcccccgccccgaggaggcatagtaaagtctggggaaaatactccgctgtgatacatttatatgatacccgtgctctcccgctcccacgcgcccaagcttgcaggagcccaccttcggctccacccctcctctgtgggaggcaatgcgcgtggaagatgcggtatcttgttctataaaacactgatgtcctcagcgcacgtgcgtgcgtgcacaccacacacatgtttcatagaatacatacgcagggggggtctgtcttgttaaagaagaccccccaccttagtgctgtatgtgtgcaacgcacttcctgttgccacataaccattggatagatttgtcttctgcggctaatcgttaacgagacgtgacttgtgttacgacaaatgggttacaaccacacggattggacctcggcctgactttcgtagggacgagagatagatacaatagaatcaccagaacatatggttatatatatacaccttttgactaattctttcgaataatagttgaatttcttccggcaccacagtctccccacgccaataaaaaagatttgccccccacaaaaca

SEQ ID NO: 487580 - DNA, 1407 bp, Homo sapiens
cctcatgggatcaagcgattctgtagtcccagctacctgtgaggtggagattgcattgagccaagatctcaacactgcactccagcctgggcaacagcgtgagactccacctcaaaaaaaaaaaaaaaaagaatctgactatataccatggaaaagccaccactctgccacttaaataaacatcaggatcagagattccaagaggacaatctgcatcaagtcttcaccaagtgttttttaagcgaaataatgaaatagggagcagaatatgcctgttgcccatagaaacgaggtctattcttgtcctcaattaggcttttttttcttcatagttacaccagaactaaagtcaacacttcactccaagtcgccacgggcaaccttatgaccctaggtcctccacccctaatgtatcatcattgccacccatttttatggtacttattgttcttaagcttatcctcttaatcttttcatgtaagcaaagctcattaatttctgtcttggaaatgctactactctctttaattactcaccaaatccaactttaacttttgacctggtttctctgccacaagttctgtcccactggagcccatactcacctaccgctttgccatcacatttaacagaaaactcttatcaacttacttcctgcttaacattagctccttcctatctatatccaaatttcttaaattcaaattttttagctggagtaaaaatggtcccagtaccatttcctgttcccttcactataacctacatttttgtcacattaagtttttccccattccaggacaggtcaggccctttaaaaatttcaacagctttattgagatataattgatataatttaaaaaatcctgcacatgtgtcatgctggagccctattgattccaacagggatggcgccttgtccaagaagagacccagagccagtgaatgggacatagggtttatttaggacttaaatacagatgtggtccagtggcagtgggctggacaggaccgctactatttgtaaagagtatgtagtttatataacatttcctacttagcactctccacttagcaacctccatttaacccaaaataaaaggccttggttccttgcacatcctgagttccaacggacaggcagggagttcaagtgtccttcacagataagaagtgaatctctctgggttggccattcccggattccttagcttagactctgaacacatattcttcttagaccatacagtcattctcagggtatgcttgagttaatgctgtcggatgcatctgtcatacaaagtgtttaacatatacgatttcatgattttggaaatatgcatacacccatgatatcactggcacagtcaagatattaaatatatccatcacctccaaaaaaaaaaa

SEQ ID NO: 487581 - DNA, 130 bp, Homo sapiens
gtagtgtggtattggcggtgagctgtgtatgttgagtgtatgtgcgtgtgaggagggagtggtgtaagaaaatcgtgacaagaaatatcgcgtggctgatgctattgggagcagatcccagagtacaggg

SEQ ID NO: 487582 - DNA, 1407 bp, Homo sapiens
cctcatgggatcaagcgattctgtagtcccagctacctgtgaggtggagattgcattgagccaagatctcaacactgcactccagcctgggcaacagcgtgagactccacctcaaaaaaaaaaaaaaaaagaatctgactatataccatggaaaagccaccactctgccacttaaataaacatcaggatcagagattccaagaggacaatctgcatcaagtcttcaccaagtgttttttaagcgaaataatgaaatagggagcagaatatgcctgttgcccatagaaacgaggtctattcttgtcctcaattaggcttttttttcttcatagttacaccagaactaaagtaaaagtggtttttctgttctttctacttctccccatgaaatgggcatatcatctcaacacttcactccaagtcgccacgggcaaccttatgaccctaggtcctccacccctaatgtatcatcattgccacccatttttatggtacttattgttcttaagcttatcctcttaatcttttcatgtaagcaaagctcattaatttctgtcttggaaatgctactactctctttaattactcaccaaatccaactttaacttttgacctggtttctctgccacaagttctgtcccactggagcccatactcacctaccgctttgccatcacatttaacagaaaactcttatcaacttacttcctgcttaacattagctccttcctatctatatccaaatttcttaaattcaaattttttagctggagtaaaaatggtcccagtaccatttcctgttcccttcactataacctacatttttgtcacattaagtttttccccattccaggacaggtcaggccctttaaaaatttcaacagctttattgagatataattgatataatttaaccttgtccaagaagagacccagagccagtgaatgggacatagggtttatttaggacttaaatacagatgtggtccagtggcagtgggctggacaggaccgctactatttgtaaagagtatgtagtttatataacatttcctacttagcactctccacttagcaacctccatttaacccaaaataaaaggccttggttccttgcacatcctgagttccaacggacaggcagggagttcaagtgtccttcacagataagaagtgaatctctctgggttggccattcccggattccttagcttagactctgaacacatattcttcttagaccatacagtcattctcagggtatgcttgagttaatgctgtcggatgcatctgtcatacaaagtgtttaacatatacgatttcatgattttggaaatatgcatacacccatgatatcactggcacagtcaagatattaaatatatccatcacctccaaaaaaaaaaa

SEQ ID NO: 487583 - DNA, 418 bp, Homo sapiens
  misc_feature (135)..(135): n is a, c, g, or t
taatttgatacaatattttaaataattttgtgcatgaaacaaagtttcgactgcattttgactgtgatttctggcatgagatcagttatggaattttccacttctagcgtcatgttggcattcagaaattttganattttggagcattttggattttcagattagggatgctcaacctgtatatatattttttaatcgacgtgaaattcacgtaacataggaattaaccattttgaagtgaacaatttggttgcattcactgatgttgagcaaccaccacctttaactatttccaaaacattttcatcactccaaaataaatgcctgtacacactaggcagtcactccctatcttcccctccacctgtccgctggggcaaccactggatctcctttttatttctgtggggctttttct

SEQ ID NO: 487584 - DNA, 856 bp, Homo sapiens
gccgtaggatttaccaacacgtaggcttttatttcttcccattacatctgttgagccacagaaagcatcgggaagaaataaaagcctacgtgtggtgatccaacagcgggggatggagactcataagagatcataggtgctatctgtggccagggatgcctaaagagactgtgctgtaagttggcagtatgaggcggctaggatagtaagtttggaaactggtacttcataattaaatttacacaagggaaagtcagccactgtgtcttatgaggaattggaccctaataaattttagtgtgccttccaaagctgagaatatatgctttggaagttaaaatttaaatggctttgtgcacatacatagatcttcatgaggtgtgagtgtaattccatgtgggtatcagttaccaaacattacagaaaaattttatgggccaaaatgagcaacgaacattgttgcaatagaatttatccacttttgatcctttatattcttctaccacactggaaagcagaccacatagacattggggggtcttctactaggaattcgtttacatgcacttactctttgtcgactaacaatgttgcgttactttctagaaacataaacaaaaggggggggagggctaagaaggaattccatcagaggggcgcagcgatagagataaccagggattttggtcaaaggggtcctatagtgagcagatttacttggaagggaggtgcgcacttttaacattttgtgtggaaaagggtatgggacatgtgaaggagaaaactggggtgggttttgacgccaaccaagggagttaggttggagataattaatgttatggtgtgagacaaatgg

SEQ ID NO: 487585 - DNA, 452 bp, Homo sapiens
gatgatcaaatcactgttatataaaacttataggagacattgttttggactagcctcctacactgcgccccagtagaccagaccaaactataatggagtcaatcatgctaggtgccacataatcaaactgaactctaaaacaggccagtttttcaaaataaataaataaataaaaagtaaaaataaaaaacaggaaattcatagcaaccaatcaaaacgggcctggtttacttgagttggcatgctaaagaagttccctctattttaaccctgtaagaaaagtaactttgaaacaaccaatctgctttttgttctctgtttctgctttcttcagcctgtttctgtctataaagccaattcctctgctcagctcatcggaacactcattcttgttttatagaatgcagtgttgctcaattataaaattgcaaataaaaggcaattaaagtaaa

SEQ ID NO: 487586 - DNA, 172 bp, Homo sapiens
aacagggaagcagagtctaactctagtcgtccaggctggagtgcaggggtgcaagtcatggctcacttgcagcctcagcctcccagcctcaagagattctcctgcttaaaccctcccgagttagctggagctactagatactcagccctccgaggaccttgcttctttcctc

SEQ ID NO: 487587 - DNA, 603 bp, Homo sapiens
cccaatcgccgacggttaagctcccgacctaattgtcagcgttttcagggcatatggcggacatatctttttggaagtcttcaaaacttccgattttggaaggctcttatggtgcccagccgtaaagccttgaggcacagcctgtcaagcaaaacccggctcccgttttctacaaatccccagtgagttctcgctgcttcgcacctcggatgcttccaatgtgcaattttgccgtccattcagcagttcacctgggtctgtagcaagaatgcccctcatgcagtatcagacggaagtgcccatgggcaatgacctggtccttcatgtgtagtcatggtttgtcgttagcaggtctactcgcagctacatgaccccaccagtcttcacccatatcgtcgagcagctacgtctgcggatattgccacatcatactgagaatgaagtcggcgttcatcggccacttctataagtagctgccagccactgtctggcaatgagatgtgcagctaaacccatgatcctggagtcctgacattccgcaaatcctgcaatatggcgctcaactctcgctccccaagctcggtctaccaaactccactgtct

SEQ ID NO: 487588 - DNA, 383 bp, Homo sapiens
  misc_feature (115)..(115): n is a, c, g, or t
  misc_feature (144)..(144): n is a, c, g, or t
aatgtgggatgttgtgagctgggtaggcagatctctgaagggtgtctgtaaataagttattattatcttaaattctcatttagaaagtaatacaatttaagggccaggcacggtngctcacactgtaaatcccaacactttggnaggctgaggcgcgtggatccctgagggtcgggagtttgagaccagcctaaccaacatgaagaaaccccgtctctaccaaaaatacaaaattagccgggtgtggtggtgcatgcctgtaatcccagctactcgggaggctgaggcaggagaatcgcttgaactcaggaggcggaggttgtggtgagccaagattgcaccattactctccagcctgggcaacaagagtgaaactccatctc

SEQ ID NO: 487589 - DNA, 354 bp, Homo sapiens
  misc_feature (5)..(5): n is a, c, g, or t
  misc_feature (352)..(352): n is a, c, g, or t
taatnaaataatcctgtgtcccccattccagataaccccacagtaaaagtgaatacctgcaataaagcaaagtcaccccagaattttttaaatttcccccagtgcatataaaagttatgtttacacctatactgtagccttattaagtgtgcaatagtattatgttttttaaaagccaatgtacataccttaatttaaaaattctttattgtgaaaagatgctaacgatcatctgagccttcagcgagtcgtaatctttttgctggtagagggtcctgccttgatgttgatggctgctgactgctcaaggtggtggctactaaaggttggagtgactgtggcaatttcttanaa

SEQ ID NO: 487590 - DNA, 913 bp, Homo sapiens
  misc_feature (913)..(913): n is a, c, g, or t
ctaatcacagccagttattgtaaggcaccagagtggagaagtctaatcgtgagtgtcaggatgtctgacaacagacctggcctatcatgtgatactcccgtaggggctagaaagaaatatgtaataaccgatgttctgagtgcgcatgctcggtaatcgcaggttactcggtaggctgaggcacgtaggatagacggtaaaccacccgggcgaacgcacgtgtgcagggagccaggatcgtgtacaaactggatatccagtctgcgtggaggtgaccagctgacccaggcaccgaaaatgtagggcaccgaagggagggataggcccgacaggccgggcggccatgtccccggactccgaaggagctggtcggggtcaagaaaagagcgtaggatggggaaccgacatcgacagtgtcatctgcacaaaatggagtcgagtgaaagtgacgactttggtccaagatctactatccatatactaaaccaaaggttgtcttatgaactgttccagagtacccttcctcccgttgattcagacttcgttacaactggaatccccttctctatcctgtttcgcccacacctctctatttgcccgctcggtccacgcatgtgaacgggttgcctctgggtaccctcaccaatgccttggcgcaagagtttgccaggtgccttggcaacgcaatcgcactgacggggccaaactcaaatccaaagatccagggattagctacgcgcacactcggacatcgttcgcctctatacgcacggtgtcatgaaacctggggagtacaaaaccatagcgaggtgtcccggcgcaacagaagcgtgcgggcacctgaacggtcaaaccgtcggtggcgcctctgcatttgagcggacggaggctacatcggttatacgccttacgn

SEQ ID NO: 487591 - DNA, 607 bp, Homo sapiens
ctggcggtttctgacttggaaaaccttccggggccttgggtgagactcaggtacatgctggcttccggagtgacccatcatatcatagttgtggtggctatgagaagaggtgccttctacttgagaaaagaagagggaagaataaatgggactttgtcttgtagtttaggtactagcttagccatagtggggaagagcaccaaccaggttcttggggtccccaagtccaggccttggctcttggacagcatttctggacctactctgagccagaggggatcccactgccctgaagggtgagttgcatgcctggcaacattcaccacaagctgactgaagagcccttgggtcttaagtgaacaacattggtgccctgcagtaatccccatggatctgtggtggtggtggacatggggagagacttctctgcctggggaaaagggaaagaagagtgggaaggactttgtcttgaggtttcggtgtcagcttagtgacaaaacaatagagcacaccaggtagatcctagggttccaactccaggctctggctcctggacagcatctctggactgtctgagccccggggacttggcatgtgctggttcagg

SEQ ID NO: 487592 - DNA, 216 bp, Homo sapiens
gagactccggaaagccgggtgctgcgtttcaccaggtgggggctgctccgagtgaagccaggccgtggagacagaacacggtccatgtcctgtagtgacaagatggcccgattggaccgtcctgggatgccaaggggcactgtgatgcactttcttggagagccatctacctgtcaagctgttgtcatttggagttccatacagccaaggaggcat

SEQ ID NO: 487593 - DNA, 350 bp, Homo sapiens
  misc_feature (166)..(166): n is a, c, g, or t
  misc_feature (228)..(228): n is a, c, g, or t
tttttttttttgtttatgtttttgagacggggttttgctcttgttgctgaggctggagtgtaatgcagtatctcggctcactgcaacctctgcctccagggttcaagcaattctcctgcctcagcctcccaagtagctgggattacaggcatgtgccaccaggccntggcaaattttgtatttttctttattagagatggggtttctccatgttggttaggctggtcncggattcctgacctcaggtgatctgcccacctcagcatctcaaagtgctgggattgcaggcattagccactgggcccgacctcttagctcattttcaatgttggttttatcttgtctaagtg

SEQ ID NO: 487594 - DNA, 226 bp, Homo sapiens
gctgcgagctcgtgtaacctggtggactgagggcgccatccagtctccctggcacttctcagcacatattcgaatgaactcacatcattgtcttgtgtctttggttggggaagaagttgttgttgtggcccgttagagaattacccgcgctgccccctacgaaggctcccagtgccagcttgtacttctctgcctcgtcagccaccttgaatgatttgtactggga

SEQ ID NO: 487595 - DNA, 494 bp, Homo sapiens
  misc_feature (8)..(8): n is a, c, g, or t
  misc_feature (177)..(177): n is a, c, g, or t
atccgggnagcatatgagacagctgttgtcagcgagggttctggcataaccaatgataaggctgcaaagactgtccaatacagcagcaggaccagccactcctacgttgcagcacctgcacaataaatttgggcagcagtatcagtgtctctgctgattgcactggtctgaaactcnccttttggattagctgagacacaccattctgggcccattaaataccggtagagccctctccagtcctactagcctctggtccgaagataacactgatgcagaaattggtctgtatgcaactctgtgatcccagctcggatcagagagggggtgcaggcgagcttggccgcagggccgaacatcttacactcttcgggactgcgcggctggagatatttgggtgacacggcgacgtgggcctccctctcccggcttcctcttctccccggggatacacgggcgtacccgagcttcgaaattcggtaaatcactgggta

SEQ ID NO: 487596 - DNA, 116 bp, Homo sapiens
gtccatacggcgttgttctggattcccgtcgtaacttaaagggaaactttcacatgtacctgtgcccttgtatgtactgtcaaatgaaggaggcaggctgtacctaagcttactga

SEQ ID NO: 487597 - DNA, 1205 bp, Homo sapiens
agcggttgtccatccgtcggcgcggctctggtgcagcggcggcggcttcctgttccgtgccgcgagctctctccctttctatacctccccagcagatcccggagatcgcccgccatggcttatacttactgcggccgaccggactcttgggaaccaaagaatgcatcttggtctcaggtgctatgcatgcccggccatgccagatgcttcctccacggaaatcttgacaatgacatattgtgcttcgacctggatacctaaggaagcagtgcccacacagactccaacgactctctccagcgcacgacaatcgcatggccacagaacggtggatgtggcccaagattcacatggtgagacatatgagtcgtactcgcgttgagcattcgagagcggccatcgcaaacgcgataagggtctcatgcatacacacatacaggtacgctcagaacatccctggacttgcaccagtgtagcaagtcccgatatactccaccagatgtgcgcattaaacacgctcaattccgcccatggaaacgtgccactaggatataacgtaggaccaatacagcccacattgggtcttcacacatgagctcttacagtcacacacacgccccctatgagactatgaagcggagacatcatcatctcattgctgcctcggcatggcggtaaagcctctggcggaccacctgaatctctcccaatcaccccacggaaaggcgacacccaccgtcgtgaatacgacctggcagccttcatcccacccacacacggaacgcttgagggccaaaaaaggcaaccggggcacacggttgccgtttgaccacctgtcacccccccacatcagcttgacaggtctaacagccactcgcgcactgccggtaaccgccacgagccatatatttaacccccaaaagactagacagattcatcgttaacacaaccgctcccaattgtgtccgctctcgacggacttttcagatgctcctgcccactgcggacgtggcatagaaaaccaagggatgctccgttatcgtagtagccaaatgtctgggacacaagcagtactcagaagttatttacggtctactcagtctgtcgagccaaatagttacgtagtgcgcatcagaagagagggaacatacatcaagcaagtgcgtcccggtcagcatgctccgagtctgggtttacattggcga

SEQ ID NO: 487598 - DNA, 213 bp, Homo sapiens
  misc_feature (177)..(177): n is a, c, g, or t
taagggtaattgggcccttggtggcgggtgaagttcactatatatgtgttattattatgtgtgcgccaggcgtgggtgcgcgcgctggccacccacaataaacctcgtctatctaacgctatctagaggttattatctctcccaaagcgcgtatatacccgctcccgcgacacagcntgcagacacggagcatgagcaacagtcagtaagacg

SEQ ID NO: 487599 - DNA, 268 bp, Homo sapiens
aatgacaagtataaaggctaacgcaatgacagttacccaatttcattctttttcttctgaaactgaataaggaaatgatcatttgaagcacataggaataataggccatgtcttgtgtcctgtttaaataacatgtatattttgaaaatctcaagatactgtcgatatcatgcgaaattatgaccaatgctggtacaagaggctccatagaatacatgtactagtcgaaaaagtttcctactttgcacgactccaatttactagtcaa

SEQ ID NO: 487600 - DNA, 402 bp, Homo sapiens
gaaaagaaatccctgaagagtagtttgttattattattatttttttggggggtggggagagtgcttaaccaacatggcaggttattttatttcccagaatagtaaaggagccataagaaccaaaaccatggttttattatcagttcatcttagaacataactccatgttggatagatcctggtgttccaaaaacacaaagagctgaaatgtttaatatggggaacccctaccttagggggctagttccaattgaaatgtgttatgtgttaaatgccccctgattcccagaccccatgtataaaaaagaatgtaaaatatactatgaaacctttttatattgattgccttttgaaatgataaaattttctatatagtatgttaaataaaaaacttttttttga

SEQ ID NO: 487601 - DNA, 134 bp, Homo sapiens
acggcatgccaagttattgtgtgtgtgaaacacttcaaaactgatttaaaagatgtaaatttaaaatgggtgtatctaatatgccccaggttcggtaaataaacaattcttttttttttttttttttttttttt

SEQ ID NO: 487602 - DNA, 1137 bp, Homo sapiens
gttcccacatggtgtgaaagggtttacaaggcccttcaagggggagagttcgccagcgccagtttggtgtggcacttccacaatggggcattctccttaacccccctgtttgccgggaacacaggtccttttaccccggctttcctgtatggggaaacaggggtaatatgtgtaacgttcacccccaaggggaaactgtgccaagatgcccgttgtgttcactggggacctgttttttaaagtttaaaccggtgtcttgtttcgtgctcacaaaacatggtgttctcggaagttctccctgggagaatttgcacgcggaggaacaaaccccgcgggaaacctggagagtgcccttccccccccccagacctgttgttccccaggcgccacgagggaactctctgccacgtagccctttgctccgctaaacatttctagtgaaacccccaaggaaattggttgataacccactgggcacctgggtgttccacagagttttctgggagttttcttccactggaaaaccttggggttaaaatttttggcttcccgaggtatcccccagagagtttaagccaccttaggggctcgccgcggttaaaatttgggatggaagataagtactccacccgcccacaggtctctccctcgggagagccacacactgggggctcgaatctatgggcaccctctctgttggcctgtgccctggcaatgggcctcaccgcccacggagaagagggaggataacgatatctcccttgcccctgcccccctccccttttggcacagggcgcttacctgccttgtgcccctcctggcttgcacgccacgccaagccccctggcacgcacggtttctcctcacagggccttgggtctttcacaaccctgttggcgacacacaggaaggccacgggcacagacactgttggagaggacacacggaatccacaggtcacgggagagggaaggccacggggtggaccgcccactgagcatgtaaaagacccgcaagccacagttgacttcttgcacatgtgcccactgttatgtttctgccaaatgagccacgatgtatccaattgatgccaatttagatgttgatacttaccataaagtttttaatgtgttttta

SEQ ID NO: 487603 - DNA, 289 bp, Homo sapiens
  misc_feature (82)..(82): n is a, c, g, or t
  misc_feature (257)..(257): n is a, c, g, or t
  misc_feature (275)..(275): n is a, c, g, or t
ctcgtcgacgagttcggccgctcgggtcacgatgtcaacgtgaccgagggtgatggggtcgaatgaccctgagaagactgcnttcactgctgctccctgcccgcatctacctccggctcaccggtacgttgggcgtaatagacaactgtctcaccgtagcgagaattccacgactcgtatccatccggaaaacggggatcccgacttctccgtgatctctcgactacgagcagaccgttgtgggcgagggccccgtngcacgctgtcaagatgangctatccatgtcgt

SEQ ID NO: 487604 - DNA, 146 bp, Homo sapiens
cgatcaactgtgtatccaggtaggagcccctcgtgagggcttgccgtcatgcacgactgttggccaatgaggtcatagcgtggtattcttgctgtacttgctctgtaactctcttcaggacacagtattctcctcagatccacgat

SEQ ID NO: 487605 - DNA, 81 bp, Homo sapiens
cagtttgttcatcgcttcctctgacgatggacatttaggttgttaccagtttttagcaattaaaaagaaagccaccataaa

SEQ ID NO: 487606 - DNA, 350 bp, Homo sapiens
  misc_feature (7)..(7): n is a, c, g, or t
  misc_feature (9)..(9): n is a, c, g, or t
  misc_feature (11)..(11): n is a, c, g, or t
  misc_feature (323)..(323): n is a, c, g, or t
  misc_feature (340)..(340): n is a, c, g, or t
tcgtcgntncntcaaaatgctgcgattacaggcatgagcacttgctcccggcccactccctgctatttttagttctatttttatttttatttttattttgagacggagtttctctcttgttgcttaggctggttggagtgccaagaccccgtctcggctaactgcaacctctgcctcccagttcaagcgattctcctgcctctgcctcccaagtagctgtggattacagggcacctgccaccacggcccggctaaatttttgtatttttaggtaggaggacaagggatttcaccatgttcgggccagggttgggtcttcaaantccctacctcagggcantccattcgga

SEQ ID NO: 487607 - DNA, 983 bp, Homo sapiens
ggttctttcctgattccgaacgggacttcccttatgtgcaacccgtcgtgatgtcttttcttgcccctggggctccccaggttgcttgcaaagtccctcggtggattcactcgttctgtggcaattccaacatagatgtgggcagcacaggagagtttgtcaagcgctggcatgtttcctgcgagttatgcctcatggcgcttacactcatcatcgctgtttccgattgagtcccttgaatggggggcgcttaagaatagggactcaccctcggtgttggctggctcacatgacctctgggcgaatcagggttaatcaggaggcgcattgttgcttgcgttaagcacgctgctaaagaacctatacgagcataatgcgagtgtggacctgtgctggatttgacatagtcataggcaccatagccagtaattataagtggagagtcggataggcacacgattagaatgtagtgtatctggagtgagcttatgtgagtggaccagtatgttgctgtcctgcgtgagacagtgtagtcattgcttgttcctaaatgtactatcgagtcgtgaagcaagaagagtgaaatcattgtaactgcagtatgcaaccacgtagaatgaatagaagattcaatggacatctaactttctgctctcactgtttgccgcttcgtttatccttccctgtgattagataaagcgacagtcagcatacagaaatgctgtatgtctcgttcttacgccagtcgagaaccaagtctcgaaaagaatgtgtgttgactcaggtttggagttatgttcaggaagacagatattggaccttttaattgataaatattcgttattatcctggaatgccagaaaagaactatgtcctgattgtctagtgttgtattccgctgacgtttctatgtgatatagatgcatttgtaatactctttttcaagtgtaaaggatttctaataactccacggataaatgttt

SEQ ID NO: 487608 - DNA, 141 bp, Homo sapiens
ggctctacaaaaaagagtttttcaaaattagccaggcgaagtggcacacatctgtggtcccaggtgctcaggaagctgaggtgggaggatcacttgagcccaattcaaagctgcagtgagctgtaattgcatccctgcacg

SEQ ID NO: 487609 - DNA, 264 bp, Homo sapiens
cttccgggcaaaattcccattttattttttgaagggttaaggtaaccttccctttatccggctaataaaaaaattttccaccaaaaaacctggttgccttgaggttttaccccttctttaagaagggttgaaaaacccttatggaagccccggtttttaaggtaaaggttaaccttgaaaaaaaatttttaatccgggggccaaaattctttttttacccccaggggttagaaaattataaaaaataaaatatttttagaaaga

SEQ ID NO: 487610 - DNA, 174 bp, Homo sapiens
  misc_feature (93)..(93): n is a, c, g, or t
ccccggaggggccaggcgggcgggggaaattgggggtttttttcccgggttttggcggggaaggcgggggccgtccgctccggggaacccccngggattaaccttccagttttttcttcttagcggcgattttcccaaaaggccccccttttttaacccccgggagaagaaaaa

SEQ ID NO: 487611 - DNA, 929 bp, Homo sapiens
  misc_feature (5)..(5): n is a, c, g, or t
  misc_feature (9)..(9): n is a, c, g, or t
  misc_feature (571)..(571): n is a, c, g, or t
gctcncccnctcagcgcacgaagagagcaagggcggtagagtgtagtaactatgctttatgggtttgccgacatggcttttcagctattttatggtcttattattcgccggctctgccgttattgccataaaccctagccggtgttcctcagattggcccaggctcaaaatgctgccctccaggcatccattggcggcatacatcggacctttccaaaccagtctcgttcctttaggaccgcgttcttcgggttcgagcacagggggcacgcccccccttcccggggatctttggttaacgcagccccctgggcggtgggacacacaattttcccgcgcaaatggggctgtccccccccgggccaaccaaggggggccaaccccccgcgctcttaaattcttggcgaagactctgccgggagaatgttggcccccagagtgggagcaccaccatgcccgggggaaacccccggggggtcactcccgaatcgtgcgagccttctaccagagaggccccgaaaggcggtggagaaaagagacccccggcggtctcaaggagaaagcccgtcgncacacgagggcacttacccggcaacaggaagcttctccccgcctcgctgtcgaacgatgttatgaagaccccgagggcatccacaatgtggcgctctataagaggataaccacgggctcccactcgtggccacgtgcacgaccacgtcccccacctgaaagagcgcggtcccgccctcaccccccccccccgagagacatgcgtccctcaagggcaccccgcacgcacagcccccgacaaagcgggacagggcgacaccccgcccgggtcagaaacgagcgtgttatcaccagggctttcacccaccgaagcgaaatgcgggtaagggaaaaaaaaaaccctccttccgaacaagaca

SEQ ID NO: 487612 - DNA, 411 bp, Homo sapiens
gcgcacagcttctccaccagcgcctgctcttttccacataggatgtacaccatgtgccatctgcctctgcccatctgtgcctggcttctcaccagcctctcctaccagctgtggcctcttgagaggaaacaggtctgtcttattcaacactgcacagtcagaagtaaaaccggaactggccatggctggtcttcaaaaagaatgaagcaaagactacgcctctctttccccaagtattatccgaccagtccaaaacgagagagaggtaaacacgtggtaataaatggtaaaggaaaataattcttctcaatcttcagtggtttgaaatgcctctggattgaaccccagttataaccccacaccatttgctcaaagtacctgtgacgaaatctcaggtaagttctcagggtc

SEQ ID NO: 487613 - DNA, 327 bp, Homo sapiens
cttcctgacgtgtcctctattaggaacaacgggtgaaaaaatgatacggttctggggcaggcccatgtatggtgcatactggatgaatattaggtgctccttactgctggcaaacgctacagccagagtacactatcgggaacacgcttcaaagatgtttgcccacatctgcaaagctaaaagggtcaatatgctgcaagctgattgatgctacagtatacgatggcctcttctggtaagccgtactgagaacgggtgggttacaattaatggtacggggaacctcctctccagtggctggcttatcgttgatctgagtagttgccc

SEQ ID NO: 487614 - DNA, 548 bp, Homo sapiens
  misc_feature (68)..(68): n is a, c, g, or t
  misc_feature (212)..(212): n is a, c, g, or t
  misc_feature (236)..(236): n is a, c, g, or t
  misc_feature (240)..(241): n is a, c, g, or t
  misc_feature (284)..(284): n is a, c, g, or t
  misc_feature (362)..(362): n is a, c, g, or t
  misc_feature (369)..(369): n is a, c, g, or t
  misc_feature (391)..(391): n is a, c, g, or t
  misc_feature (431)..(431): n is a, c, g, or t
  misc_feature (461)..(461): n is a, c, g, or t
  misc_feature (473)..(473): n is a, c, g, or t
  misc_feature (493)..(493): n is a, c, g, or t
  misc_feature (546)..(546): n is a, c, g, or t
ttttttaaaaaaagaggactttcttgccaatcctaagaaagcctagttcttaatcttgcactacttangtttagcatccaaaaggttgtgtaaaaatacatgtaccccagattcattttaaaacgagagatctggactggtcacctgccgatagatttagaaacttgccttgcatcaggtttatgctgccccattgtatcatcaacggttgngcccaattttggtcctttggtggnggtnnttttttttttttttgatggggttccaaattgatccatcatagntgccatatttgggggatccatgtgatattttccaaatttggtcttgggctaaaggtttttagaatcacccctatctgnataaccnacggtaacccattccataaaanttttcttgccagaatctggggctgctgagctatagaaccngatgcaggaaatcatagtcaggaaaccatntgacagctttangggcaaaccatgggcctggncagggacccttttggcccaagtaaagagggagctggccattaccttgggtggntt

SEQ ID NO: 487615 - DNA, 1109 bp, Homo sapiens
  misc_feature (157)..(157): n is a, c, g, or t
cgctacaggtatatagggacaggtgggaaaggaataggatggcgctgaaaaaaagacctgagagatatgcatattgcccgttggctcgtatttagtcgagagaggtgatatgtttgctggcaaatgaatcatggagtgctaggcatcgagagctagnatgtctgagtgtacgtttgagatccggtacctgttctaaaatggaaaatgaagtgttgagtaatatggcattagtaggcacgtaaatcacacctcttggaagaaggattaactaggttgtcacaccagaaggatgtggaattggaatgtatcattaatctagcacagtgcattatcggagagaagcaccaagaagttggagcgggcggactatcgtgctattggtcccaaactacctgtggaagcgatcaagttggaatctactcttaaacaatacctagtctctggtcctgtaaccctaagaggggacatgtgctaccgcctttattttcacgttgtaacggttccaacgaaaaaaggggttcgtggaaatttgaaaccggggaataaggtgaaggccaattgggaccttgacacgcaaccaaaacgggctctccattgccctttgttctctacttcgaagcatgcgggagtccaattatcctagagggagcaatttttgccaaccaatttaagagggagcatggccctatcccacacccttccctgaatatagggggccattatctaacttgttgggcgctcacacgcatatggggcaacagggacggggacacataggggggcacaggtatttgtcctctccccccaagagctttggaaacatgttccactctgttctaaggaaccggggggattctagactagggttctacactcccactgggtgagaccttagaccgtgggatatttaacccccatcttagagtaccatcgggggcgtttttaccgctgcggagcactactgtataaacagggctccatcgagatacttctatactctctaccgcgccccgctactgtggggggatccacttgcggcatcacccgggatatcttagtctaccagcatacattgcgcgggtccaccgatcacaccatttggttttccg

SEQ ID NO: 487616 - DNA, 148 bp, Homo sapiens
ctcccaggttcctgggttcacaccattctcttgcctctgcctcccgggttcaagtgattctcctgcctcagcctcctgagtagctgggactacaggtgcccaccaccacacccggctaatttttgtattttttggtaaccaagtttca

SEQ ID NO: 487617 - DNA, 744 bp, Homo sapiens
aggacggttcgtagatcatgcgtgtgtggctcgggcctccgaaagtgtgtgaacagtggtcaatatcctgtgaccttatcgtatgcaattgctgtggtgatgcactactcggattgtgacttctccgcatatgtaaaaaatcgggcgagcggtctatcctgaggcgttctgacatgacatattcgaggatcgcgtaggtcacgtcgacgcgtcattagtggatacgtatccattcttgagtacccacaacgcagtcggtacgatctcagatttagtcagagtcctgacaccgaccgtggaggcagccgatcaacagccgtggtcaatttgtacctgcaggcctcctacacctacctctctcatgggcttctatttcgacacgcgatgatgtggctctggaaggcgtgagccattcttacccgcgacactggccgaggagacagccgcgagggctacagagcgtctcctgcaagatcgccaaaacagcgtgacgggcgacgatctcattccaagcgaaatcacagaagccagctgcaagatgaggtggggtaaaaggcgcagaagaccatgaaagcatgacatggcacctggagacacaagctgaaacaaggaccttggggatctttcatggaccctggagttctagcccgaaaaggacaccacgcatctctgagaaattccattggagacctcaattccatagcatgaggcagtgaaagatagatcaaagaaaatagggtaacc

SEQ ID NO: 487618 - DNA, 130 bp, Homo sapiens
cttaactggggtctgctttgaggcctactatgtggtgtaaaattgagtactctctctacaaggttggttcctagtgtccaaagagctgttcctctttggactaacagttcactttacaaggggatctcga

SEQ ID NO: 487619 - DNA, 897 bp, Homo sapiens
tggatcactggcctaacatgctatgtgctgtaaaaatagttaacagggcaaataacttgagatgatggctagcttggtttaatgtcttatgaaattttcatgaacaatccaagcataatggttaagaacacgtgttttaactccatgtaagctggaataaaagtttcatgaatggacctttcaactactttctctacagctttccatgtaacattagtctgggttctgaaacttctctaagggaactggtccattcttggaacatttattccttattccctctgggcagctaatgggctcttaccaagtttaaaccccaaaatttatcataaccaaaaatactactaatataactactgtttccatgtcccatgatcccctcttttctcccaaacctgaaaaaaaatgagttcctattttcgtggaaaggcggggactgattcgaaccactcgtggtgtgttcccatttcaaaatttgggcatatggcaatttctaacttaggaaggcccaatgttcttgggccatccatgacattggcgtaccatcaactcgacatttgggtgctcacacatcacctttgcgggcgtctcagcaaacttccttggaaactcttttatagcctggccttcaatttggaagctttaatctttaccaataggtcaggggtccaagattaccgcttcccggtttgtaaacccctcctgtgctctggtcacacacgccaattttcctgtggggggcatgatctttggaacaaggcgcgcgtataatttatgggccccctacggtgataaggaccccggtacactgggtgtgtctccaccaaataatttcgctcaccatatactgcggagaacccctattgtacaagcacgtggttatcccaaaaggcacat

SEQ ID NO: 487620 - DNA, 108 bp, Homo sapiens
  misc_feature (108)..(108): n is a, c, g, or t
gctttagaggcacacggaggaatggcacggagggttgcgtagctggttggcagctgacacaggatgaccccactgccagagctcggcaggtcctccttggtgctctgn

SEQ ID NO: 487621 - DNA, 294 bp, Homo sapiens
  misc_feature (29)..(29): n is a, c, g, or t
  misc_feature (62)..(63): n is a, c, g, or t
  misc_feature (72)..(72): n is a, c, g, or t
  misc_feature (78)..(78): n is a, c, g, or t
  misc_feature (80)..(80): n is a, c, g, or t
  misc_feature (85)..(86): n is a, c, g, or t
  misc_feature (88)..(88): n is a, c, g, or t
  misc_feature (102)..(102): n is a, c, g, or t
  misc_feature (104)..(104): n is a, c, g, or t
  misc_feature (118)..(118): n is a, c, g, or t
  misc_feature (156)..(157): n is a, c, g, or t
  misc_feature (159)..(159): n is a, c, g, or t
  misc_feature (163)..(163): n is a, c, g, or t
  misc_feature (165)..(166): n is a, c, g, or t
  misc_feature (172)..(173): n is a, c, g, or t
  misc_feature (182)..(182): n is a, c, g, or t
  misc_feature (235)..(235): n is a, c, g, or t
  misc_feature (287)..(287): n is a, c, g, or t
tgtccatagtccacgctgagttacggctncgcacttcggcggccacatgctggcggttcctnngggggactnctttangngaggnntncccctgttgttccntnttttgttctttttnttttttgttttgttgtgttgttgggttttgtttttttnngngttngnntcttgnntcttgtttnttgttctttttttttttttttggtttttggtttttgtttgtttgttttgggtngtttttttggtggtttgttgtttttttttttttttttgtttttttttttggnggttggg

SEQ ID NO: 487622 - DNA, 847 bp, Homo sapiens
gtttcaattgtccttcagataattcatgtggagatttttggagaaaccatgacggatagtttaggatgactacatgtcaaagtaataaaagagtggtgaattttaccaaaaccaagctatttggaagcttcaaaaggtttctatatgtaatggaacaaaaggggaattctcttttcctatatatgttccttacaaaaaaaaaaaaaaaaagaaatcaagcagatggcttaaagcgggttataggatggctcacattctttagccattatgcttgttaacttaatggtttagaagcgtgttggctgttggtaacatcccagagaagattgaaaagggcacatgcttttatccgtgaccagatttttagtcccaaaaaaatgtatttttttggtgtgtttaccactgcaactattggcccctctctattggaatttactggtggaccatgtgtggtgtctctatgcccttggaaagcagtttttataacaaagaaagcccgggtctgcagagattgaaaccgggtgggaaacctaagggtccattgtgtcacgtgcaattaatacaagttatggtgcttttcaaaattgtacacgggaaatctgggacagtgctccacagatggatacattagccttggcttacatcttccggataaccttgtaccattttgaaacctttaaggatgccaagaatgcctttattccacaaaaaaacagagaccacttatagaggtgtttcaaaatagcatgtctggggcaattcaacctctgtgggtcctaggactcacattcggttcagttttcctcagtggtatttgaccagtgtcctaaatggcaaacacctatac

SEQ ID NO: 487623 - DNA, 423 bp, Homo sapiens
  misc_feature (374)..(374): n is a, c, g, or t
  misc_feature (392)..(392): n is a, c, g, or t
  misc_feature (417)..(417): n is a, c, g, or t
aaacaaatttgagttttatatattatattggggcagccctaaggatgtgaactcaattttactattgattttggcacttccaacaaatgactcaatggataagtgaatgagccagtcacaatactagacttgaacataaagtgtgggaattgggtatatcaaaaggcactgatattcaaggtgctatggataagtgaatgagccagtcacaatactagacttgaacataaagtgtgggaattgggtatatcaaaaggcactgatattcaaggtgctatggaaatgtcactacacaaattgtttttaaattttaaaccaatgccacaacctgccatgccaagagccccgacaatatgacctaactcatctctatnatttctttctttattcgnctaagtaattatatctcaagcctgnctgtaa

SEQ ID NO: 487624 - DNA, 388 bp, Homo sapiens
tgacggaacagcagatttaacatcatctgcctcatcagttcgtgaccttagaatatttgtacattacgtactcataatctgtaagaacaatgtccccgtatcatgagagctcaatgattaaagggtaagcagcttgcatcatttccaaatggagaatctacagttttatccacaccaagcggtcgtggactgacaaatctccgactcttcaaatgttttcggcacttcatggcaaaactagacggcatcatattcttaggccactcaaattctgtagtatgaattcgtatgccagattcaagtaaaagtgtagctttaaagtccggtttttgaagacgaatagggtatgtcttattatccacatcataaacattgtttactcccatcc

SEQ ID NO: 487625 - DNA, 193 bp, Homo sapiens
tctagaggatcccgcgtcatgtagtttgccagtgagatttatggtttacacttggtctctgtgacaacctctcggggtgctttactgctacgtagcattgaatatatgattatgtgaccaaaaaaacaaaaatccctagctgagataccatttgggagtctctgattctgaggtagtctgttgcatgtcgcat

SEQ ID NO: 487626 - DNA, 265 bp, Homo sapiens
  misc_feature (13)..(13): n is a, c, g, or t
  misc_feature (50)..(50): n is a, c, g, or t
  misc_feature (78)..(78): n is a, c, g, or t
  misc_feature (168)..(168): n is a, c, g, or t
caggagccatttntgtaggtaactggaccaagaatgagaaaaataatganttcttagctccctgattacacctgccancttggaatccaggactcacacttctgaccctgcctgtttttttggggtttttttgagttggagtctcgctgtgtcgcccagactggagtncagtggtgggatcgcggctcactgcaacctccacctcccaggttcaagcagttctcctgtctcagcctccccagtagctgagattgcaggcacatgc

SEQ ID NO: 487627 - DNA, 296 bp, Homo sapiens
gccaacacgccggcaggctctccctccagggcagcgccagtcccagggctgcagagcctgtgtgcttggggattcccctgatgcagcttttggaactgaaaggcaggggtctcgctgagtgcacctggtgcttcctgagcccatctgcggcggcccaccctggcctaggtgctgagtgcagatgctgcagacagcccctccctccttagtgaagcctgaagggtgagatgctcggagaatcagcgaggtgccgggtctccagagccaaaggtcagaagcagggctgagggaggggt

SEQ ID NO: 487628 - DNA, 247 bp, Homo sapiens
ctacatacttccgcatgggcaacaagagcaaaactccgtctccaaaaaaaaaagccaacggtcagggttgaaacagggaggcccctgaaatagtgatgttccaatgaacacgaaaacttagcaggggagtcatttcttctggctggaaggagatttggcataaccttcaggagacctcacccttccaggacaacagagggggtggaggttacccaggccacttttagaaatggggagagggaactgg

SEQ ID NO: 487629 - DNA, 500 bp, Homo sapiens
cggtaccggtcactctagaggatcagcaccagcacggcgctgagcgacttcgatcaggttgcgcaggctgacctgcgtggcaccgatcttccaggtgatgtcttccaactcacccagcaccatgggcatgacgcccgtcacccacagcacggtgacgatccaggccagccaggacacggtgcgttcgaccaccctcacggtttgcgattgagggaaggccacccgcagcactttgaccgtcaggcggatcacagccagagaagccagcaccgggataaccagccgaaacaccgtcaggggcagcacgcccaggaacatgcgccgggcggccagcgacagcagcaaggccagcacgggaaacagcaccccgtccacgacatgccggccaaaccagacggaatgagggtcacccttctccccacgccacaagcgcagcatcaaccaggacagtgccagacagcccagcagaatgccggcttcggccagagccgagcgctgct

SEQ ID NO: 487630 - DNA, 690 bp, Homo sapiens
tgaactgagcggcccctgagctgacagatacactgcgcagctggaacggcgagcgagccgacgggcgagtgaggggcgcatccatgatcacctcggccgctggtaattatttctcttctgtgatcgtacatgattgaacctacagcattaaggacattgcactacactaagttgaatgcagttgttattgacttctgggcagatattgccgagtccgttaccacaatcatagaggttttatacgaagtataaggttccaggagtcgtgcacgttgcagccttagtggcatctaaaggattttatcacctggggagcctacctgaggagtctctgaattattcgcccttgtgagcacggggacctcttcaatgtctacatgataactctagaattatgttgcgaaactatttatagcactaatgctttgatcactactccgatccattgtgtggacaatgcggatttgcctgaaggtagacactgaaaaccagattgaccagcgattggccggcactcgggaatgcattgttcctgcgatgtctcgatgatctctagtttatcccggctattggcattgctctggagacgcgcagactggacgtctttggggaagaccatactgggagtcgaatggtgtccccggaatgttcccttataggcttactctgcctgtgctcagcgggataaag

SEQ ID NO: 487631 - DNA, 530 bp, Homo sapiens
tggggtaaaatagatggcacctacagtatcatttatttgtgttcttttaattttatgttaaatcgctcaccttgttggctagacagttttcaatctcaaatttttcagagtctccaacaacttctccatctggtaaaatggcaaagatgaacattcgtgcaatgggggcaacgtctgactccacagggaaggataaggcaaaactgcctttcactggaacatggagagagtgagacaaaatggtcataagtgagacaaaatggtcataagtgagacaaaaaggtcataaaaatagtgtcataaggacactattgcttggtcttatccacttgagaactgcgtccattcattctaatggcttagtctctctatgtgccattagttatttggtgaaattagtaggacaatgtctcccttcagaactttaattatagcagaagttaacaaagttcctttcactcacatcttttttatttgatattccacttaactgttgcctaaatcaattaaatatcagtagctccaaattt

SEQ ID NO: 487632 - DNA, 526 bp, Homo sapiens
gacctcgtgtacaatgtgcatgactcggattgagatcgcgtgatgggcactcaccccggctgctcagcacgctgccctgccccgctcctctgcttacttttcctccttgctggatgggcaccccgggagcggggtcctggtgtactgttcacaatgctgtggagttcagagtgcaaagaaactaacctgacttttacttcctgggccgatcgggtggagggagtaccccttcaattcagccttacatttaccttgtttgaccaaagattgcccaagtctggcgttcctcccttgcaggaggtggaggtagttggtggaggaggagccatcttagtatagctggtgcccggaatggtctcctcttcttctctccctatccctccaaactgacttgtaagctgagacctggggaggaaacttctttttggaaattggtgtataagaggtgtgtggggctacctctatgctcctctgcaatgggcctttggcgctgtactggacatggctgaagcttgcttacagattg

SEQ ID NO: 487633 - DNA, 316 bp, Homo sapiens
  misc_feature (3)..(3): n is a, c, g, or t
  misc_feature (194)..(194): n is a, c, g, or t
  misc_feature (199)..(199): n is a, c, g, or t
  misc_feature (206)..(206): n is a, c, g, or t
  misc_feature (223)..(223): n is a, c, g, or t
  misc_feature (225)..(227): n is a, c, g, or t
  misc_feature (229)..(230): n is a, c, g, or t
  misc_feature (234)..(234): n is a, c, g, or t
  misc_feature (239)..(240): n is a, c, g, or t
  misc_feature (244)..(246): n is a, c, g, or t
  misc_feature (248)..(248): n is a, c, g, or t
  misc_feature (252)..(252): n is a, c, g, or t
  misc_feature (254)..(254): n is a, c, g, or t
aancaatttatagaaagtcaattcattaaaaggtatagaacctcttgttgggcatgagggcaagggacaaagctacaacttggccggggccgatggaagctgaggcaggaggaccatctgagcccaggagcctgaaaccagcctgggcaacatagagaatccgtctcaacaaaaaaaaaatttatagccaggtnttctntgagctntagtcccagctacaagntnnnannattncttanncctnnntnattnangatgcaatgagctgtgattgtgccaccacactccagcctgggcaaaacagcaagactgggtc

SEQ ID NO: 487634 - DNA, 211 bp, Homo sapiens
tccgttgggtccttggggggctgggacggcgagtatttccgggtccgccccccccagtgcatcggggcttcatttcccaatgggcggtttttcctggcggggacttctgctctatattggggcgccgccctcattccttatggactctggcctcctttcatacatgatgtttagacagcgcttcttggcgcccgggccccacccgggcgtg

SEQ ID NO: 487635 - DNA, 401 bp, Homo sapiens
  misc_feature (401)..(401): n is a, c, g, or t
gtttaaatagctttgtttcatgctcactgaagttttttttttgatacagggtctcactttgtagcccaggctgtagtgcagtgtcatgatcacagctcactgctgcctcaacctcctgggctcaggtgatcctccaacttcagcctccccagtagctgggaccacaggctagcaccaccacacctagctaatttttggtgttcttttttttttgtagtgatggggttttgccatgttgcccaggctggtctcaaactcctgggctcaagcaatccagctgcctcggcttcccaaagtcctgggattacaggcgtgagccaccatacttggccttgaagtatttgtaattgctgcatttatgatttatttaacacctggagctgggcatagtagctcatccn

SEQ ID NO: 487636 - DNA, 239 bp, Homo sapiens
  misc_feature (165)..(165): n is a, c, g, or t
gtccactgaatcggcagaaatacagctgctgtgcccaagaggccgcagccctggctcccgtatggctccctccccttcggaccccgtcctctgtagcagccttgagggggtctgcagtggagagacacactctggattgggccctgttgtgggttgaattgtcanccagaaaggtacgcgcagaagtcctgacctccagggcctcagtatgggaccttatatgggactcgggttttggc

SEQ ID NO: 487637 - DNA, 285 bp, Homo sapiens
gaacctttttttaaaaccgggaaggggcccataggttttaaatatatttttgggccggagagaaaagggtttttacccggaggaaattgggcccctttaccctttccttttcggtttccttaggaattccaaaggataatggtaaagggggaaatatggtttcctttttttaatccagcccaggtggccaccccaaaaatttggtgcctaggtttttttttgattttgggtttgggggcccctttttcccgcctccattgggaaattaaattttcccccccggga

SEQ ID NO: 487638 - DNA, 313 bp, Homo sapiens
  misc_feature (54)..(56): n is a, c, g, or t
  misc_feature (68)..(68): n is a, c, g, or t
  misc_feature (179)..(179): n is a, c, g, or t
  misc_feature (191)..(191): n is a, c, g, or t
  misc_feature (241)..(241): n is a, c, g, or t
  misc_feature (301)..(301): n is a, c, g, or t
aatatccagagagttggtacggtaggcggcgatggacaggcagaactcttccannntgtaggcgcctnggcgtgggggaacagttcatccatcaactcgatggagtggtcgaggatgtgcgcatcctgttgggtcaggcccatgacgccggagttgagggtcatcatgtcatcgtcggncacgcccatgtncagcaggcgctggcgcagggcggtgtagaggatgctttggtgattgtcgncgtacttggtgtagaaagcgttgacagcagggtgccgggctgtacgcgttcgaacaggantctctggaatca

SEQ ID NO: 487639 - DNA, 101 bp, Homo sapiens
atgataaatcgagctcgtacccgtcaaatatttttttaaaagtataattggccaggtctggctcacgcctataatcccagcactctaggagactgaggcag

SEQ ID NO: 487640 - DNA, 905 bp, Homo sapiens
gagggtgccaagaggcgcaaccagatgtgcagcaagcgttgcgagcgccagtgcacaaagaggcggtggtacaacgccgtgacccctaaggcccgtggggaaaaatgtacgcaggggttgacctcacaacgaaggtgggccctccaaaagcggggtctgggggtgaaaaaatgaggcccaaggggtgccccgcagaaaaaacggtgccccacgcggggcccaaacgcctccacggggtataaacaactactcgcgaattaagttgcgcacccgccaccatagcggttctaactttggcaccccagcaaccggggggacccgggagcataagtgtctcccaccgggcccctttgggaagtagtggcccgcccccccacaccttgggaggtgtaaaacgttacgcgaaatcaatgatgccctcctgttttccggttccccggtgtcagataggaaaagaacaaaaccctcactccggagcatatctagactaaatataggcggacttactcccgcctttgtgagaaagctgagagaacgggggggaccattagtagggaaatgccccggttataaacccacgggcccggagcctagtataatgcctcgacttcgctccccccctttgtgttccccataaggttctcctactgactagtcggagagtccaacttatgttggagacgcatgggagacgcccctcacagggtctataagtgttattttctcataccccctttggggaattagaaacacatattgtgcgggaccccacgaccactccatgatgttctgaagcgccatatttggattttccacaaaatagaaaaattatgcttcctctaaaaaaaaaatatcccaagggcgagggggaaaaaattaaaaaaagatttttcaaaccacaaaac

SEQ ID NO: 487641 - DNA, 206 bp, Homo sapiens
cacgaggccagggctctgtcagtaaatgcatttgggtccaggaggaagcgcggacacctcgcagggaagagatgaaaaagccacatcctaccaagaggaggtgctgaaggatgcattgcaatgttgtcatcagtgcagggccagacggagacaaaactccaccccctgccgcacaggacaggtcctggctgccctgggcatgctgg

SEQ ID NO: 487642 - DNA, 184 bp, Homo sapiens
tttttcataaccccattaaaccccagataaaagggcgggttttccaccccggttgggatagaaaaaaggggtttggggggcctttcaaagggaattgggttttttaaacattttaatgggatggtttaattgggcggggttttgccagaattttgtttccagggaataaaaatttttttcccca

SEQ ID NO: 487643 - DNA, 159 bp, Homo sapiens
gcagtcttctcccatcagcaggatgacaagaccccatcagcgggatggaccccatggaaaaaaaaaaattctaggaactaaaacacgattgggcgggaggctggggaaacttactaggaaggatcagggttgcctttgccaccatgacctagccacgaa

SEQ ID NO: 487644 - DNA, 281 bp, Homo sapiens
ggtttccccccccgggttttttttggtggggggggttggggtttggggtccccccgggccccatttttattttgggtttccccttcctttttccaaaggctttgggggaggggttttccccctttggggctttggtcccctttttgggaaaaaaaaaaaattttccggttttttggggggagttttttcccggggggccccccccaatgtttggtttttcccatgtttttttgggccccccatttggttcccccctttttaagggggttttccccccccca

SEQ ID NO: 487645 - DNA, 298 bp, Homo sapiens
tgcaatggtgatatccaggtttatgcaatgctagcagacccactgaggacaacttgcattgcgggctaaaatgactctgatgtaggccaggcgtgtggcttacgcctataatcctagcactttgggaggccaaagcgagcggcatggcctgaggtcagcgagttccagacaagcctggccaacatggcgaaaccccgtctctactaaaaatacaaaaatctgctgggtgtggtggtgcactcctgtaatcccagctacctggtatgctgaggcaggagaattgcttgaacctgggagg

SEQ ID NO: 487646 - DNA, 434 bp, Homo sapiens
agagaggcacgcagttctgataccatatctggctacgttaacacatatattactctctttctctcttacggttcaaaaattgcaatcttatgaccccctatgttctggagtcaaacaactcctggatagaaagtgattatgcgaagtttattctaaaatcaaaagcgaaataagacctcctacgttttttgtctagtttaaaccaacttactgaatcccctttctgatgaggaatttgccagtgcaacatgtctacatcctgtgttgggatcgccatttccgatttgccccggcggaatttgtctctctgacactgtaaaataatttcgtcctccggctgagaataaccttccctttctcatagtggggccctgcgatttctgtagcgatcacctccatctactcctctcccaaatttgctgtcttctgtttcc

SEQ ID NO: 487647 - DNA, 183 bp, Homo sapiens
  misc_feature (18)..(18): n is a, c, g, or t
aaggaaatatacaccagnatatgcattaaaacgtccaaaagagctgggcacagtgtcacatgcctgtaaacccagctattcaggaggctgaggtgggaggatcggttgaggccaggagtttgaggctgcagtgagctatgattgcacagctgcactccagcctgtgctgagacctcatctctt

SEQ ID NO: 487648 - DNA, 502 bp, Homo sapiens
cacagaccccaacaacgacacccatcagcaccaccaccatggtgaccccaaccccaacacccactggaacacagaccctaaccccaacacccatcaccaccaccactacggtgaccccaacccctacacccaccggcacacagaccccaacatcgacacccatcagcaccaccactacggtgaccccaacaccaacacccaccggcacacagaccccaaccacgacacccatcaccaccaccactacggtgaccccaaccccaacacccaccggcacacagaccccaaccccgacacccatcaccaccaccaccacggtgaccccaaccccaacacccaccggcacacagaccccaaccccgacacccatcaccaccaccaccacggtgaccccaaccccaacacccaccggcacacagaccccaacatcgacacccatcaccaccaacactacggtgaccccaaccccaacaccaaccggcacaccgagtacaaccctgac

SEQ ID NO: 487649 - DNA, 100 bp, Homo sapiens
ttttttggttgagtctctgcctggtttggtatcagacggatgccgggcagaagactcaaccaaaaaatgagaattttagaccaatatccttgatgaacat

SEQ ID NO: 487650 - DNA, 161 bp, Homo sapiens
  misc_feature (122)..(122): n is a, c, g, or t
ttttggccaggcaggaggacctctgcgtcctctcgtttattgttttgctgcaggagcgagatggaggtggacgcaccgcgtgttgatggtcgagatggtctccgggagcggcgaggctttangagggagggaggcagaacttcgatgtgaggcctcagtct

SEQ ID NO: 487651 - DNA, 210 bp, Homo sapiens
  misc_feature (10)..(10): n is a, c, g, or t
  misc_feature (22)..(22): n is a, c, g, or t
  misc_feature (27)..(27): n is a, c, g, or t
  misc_feature (29)..(29): n is a, c, g, or t
  misc_feature (50)..(52): n is a, c, g, or t
  misc_feature (71)..(71): n is a, c, g, or t
  misc_feature (95)..(95): n is a, c, g, or t
  misc_feature (114)..(115): n is a, c, g, or t
  misc_feature (144)..(144): n is a, c, g, or t
  misc_feature (176)..(176): n is a, c, g, or t
  misc_feature (190)..(190): n is a, c, g, or t
  misc_feature (195)..(195): n is a, c, g, or t
tctacggctnagcagttttttntaccngnggcttcggcggaacttcacgnnnttattggctcaactttccncactatctgcttcatccgcggacnaatatttcactttacatcnnaacatcactttggcttcgaagccgccgcnggatactggcgttttgtagatgtggtttgacnatttctgtatgtcncgtcnattgatgagggtcgt

SEQ ID NO: 487652 - DNA, 677 bp, Homo sapiens
gcattagtgttgacgcctgtaatggtactagtttggtagtgccagaggtggttgaagcagctgagtgcagagatctaatcagctgccaaatgagaaaacccgtctacactacaaaagtgccactatgagatcttgaacccgggcttgtttgacagtgcagtctagtgatccgcaggtacttgggcgacggttgaggcaggaagaacttgactcaaacccgtgattcagatcgttcgacaggtaacccgtgatcagtgaacactttcactctggccctgggccaggagagtaagactgccgatcttccaagagatataccctataatagagggagcgtcatgtcccagttttccaacaatagttttgacatttcttgaaacaagcgccttaattttgagcaccactcatttgtaggaccggcgtgctccggtgatgtagaggctgggctatgcgcactaaaaaagttaaactaccgtagagaaggaggtggtaccagcgtcgctaattggatctgtaccaatagctagataggatttggtcgctagtcacaattcaagcacgcttcacccgaaattgtattgtacgtaaaatcagggaacgtggccagagactcgatcagagtaaggacttactaacatacccgtctggtatttccgcaagtgatgagcctgccaaag

SEQ ID NO: 487653 - DNA, 130 bp, Homo sapiens
ctctcacgatactaaggccatacctcttttactattagtaacacacggtctcaacagactgtcaaagtatcagctcattagcacatctagcaatctaaacacattagggacacaaataccccaagcaaga

SEQ ID NO: 487654 - DNA, 453 bp, Homo sapiens
tcgggagcttatcctgaatcagatgctatcagatggtcatcggagcctactaccagcttgccagtgagaatcatctgggtccttgtaggtagccatttaggtccttcccaaaatgcaagatctctaagggaagggccgagatggttggatttgactaacttcctcaagcaattctggtgataggttggggaaaaacttgtccagggtgaccagtgactgagtcctggtcttctctgaagagcacagtggctgctcactttagggcaccctggaaggtgggagctggctcagcaggcagtcttataagggagtaagcttcaagggctctgtccctccaggagggaggtgcatgaccagagagggaggcctgaggatcttcttccctggcccagagggtctgcgtgactgaggctctgtgatagcgcagagagtacaaggatcaaggttgattga

SEQ ID NO: 487655 - DNA, 84 bp, Homo sapiens
tcccccagccccccccccaaaatcctcatgtttctgcttcatacttgaaaaataacaattaaaacagccagctgtactgaggta

SEQ ID NO: 487656 - DNA, 118 bp, Homo sapiens
tcgtcacgatagcatcttcagcttcaactttaaatttgcccacagaaccctctaaatcccctggtcaatttaactggtggggtccaaagagcgaacagcgtcttagcgacactagaga

SEQ ID NO: 487657 - DNA, 291 bp, Homo sapiens
aatatattccgcaggagtaaagatgaaataaacatggtctagcattatatccgtcatggactagtccctcataccgtgtctgcatatgaattaactagaaataacttggcaaggtagagccaaagtctaatgtacctccctacaaccagacgagctacctaagcaacagctatatgatcacacccgttctattttgcataatagtgggaagatttattggtagagaccacaaacctaccgagcctgcttatacctagtctctgtgctgtgataatcttagttcaactttaa

SEQ ID NO: 487658 - DNA, 105 bp, Homo sapiens
  misc_feature (5)..(5): n is a, c, g, or t
  misc_feature (16)..(16): n is a, c, g, or t
  misc_feature (45)..(45): n is a, c, g, or t
gatcngggtggcattntctccctgatgatgggagcctcattctcntctcttcatggttacttgtctcatataacatacatctctcaaagacaatcacttctctct

SEQ ID NO: 487659 - DNA, 394 bp, Homo sapiens
cgaccgaccctgacgctgcaaaccagcaagtctcccgatgcgtatgttgagtgcgtggtgcccaagttcgagaagaacggcatgacctccacggtcacgcagaactctcggcatgcgcggatcgtggtgaccagcaagatcgctgcggacaacatcctggaagtctacaaatcccaggacggcggcaaggtgttcttgtatgagcgcaaaccattggcgtcggcgttcaagccatcgcggttcgagcatgcggcgcaggattgcctgtaatcgactggcgccggtctatcggctggcggggatctaatgtgggggctgtcgagccccagcgaggctgcgatggcatcgctgcggtctgacagtgacaccgaggtgatcccatcgcagcgtcgac

SEQ ID NO: 487660 - DNA, 317 bp, Homo sapiens
cccattggatagtacaaatagctagtaatctaaatagatgttacctaaactcgctgttacctaatgcctgtgcataaggtggtgaagtttatcggggctttatcgattacagaacaggctcctctaaagggatatgaagcaccgccaggtcctttgagttttaagctgtggctcgtagtgttctggctagcagttttagttgatttaactgttgaggtttagggctaagcatagtggggtatcttatcccagtttgggtcttagctattgtgtgttcagatatgttaaagccactttcgtagtctattttgtgtcaa

SEQ ID NO: 487661 - DNA, 1446 bp, Homo sapiens
  misc_feature (404)..(404): n is a, c, g, or t
  misc_feature (598)..(598): n is a, c, g, or t
taaaaaggtaaaaataaatatttttttattattttctctccctctcctataaatattttaacactctctcttaaaataggccaatatattcttctcttttcacaagagacatctagtgccctatctcttaaaaaatattcttaccataggtcctttggccctctcacaaaaaaaaattgtgtgcagggcgcctatgtgtgttttctctggaaacaaatatttctggttatttaaaaaacacctcttatggcagatctatttcgtgggaatattattattgcgctctctctttatattatttccaggggaactcccaaacaccacacaaaatactttcacaggtggacatatatttttatgtgtgttttctttattatcccagagaagagaaaacacaaagaacncacatatggtatgtgttttttctgagaacaactgtgtgtgtccctgggtggtgttggagcacaaaagtgtttcccctctttgggctttattatttaacagagttccttttttttctaacactgtgtcgcgaggtatgtaaaggggttataaaagtgggacatatccatatataaaacattgtggaggatatccnagagtgggagggttgaacaacatgtgaagggatatggggaggaagggacattcctctaaggggcgtaacaccgcgtggtgcccaaataaacctttgagagaaaaaatgtgtggttcccaccagaacacaaaaacagcgcacacccccaaaaaaaacacccctgagatatttttttcttcaaaggtgccacccccttttttaaacaagggggtgttccttctacaacaacttgccgatgaaaaaagccgcgctctatagtgtgtggtcactctctcaaaagaggagtgtccccttgaacacacacatctctgcgacgaaaaacacacggctctttcttaaaacacattattgtttttgtcgtgccaaaacgcaagtgttagcaataaataagtggggagaggagagcagacgaaaactaatccaaaccagtaaggcgaaacaaatacaaccacatatgtgacatgcgactaaaaatagataactacccccgaacaaataataaacacgcgataagtaacaaaaagcagcaaccacgggggagcaaaagccaaaagcacacaacacggaaggaaaagtagaaaaaacacagaataattataaaacagccgagagaaaacaactaacgaataaaacaagaagaaaataaaaagaagaagaaactataaaccacaaaaagagtaactagtaagaacaaaaatataataacaaaagcgcgatagagatgatcgcagagactcttaactaaaaagataagaacaataaaagaaacataaagacaacagaaccaaatgatatcaacgtactctcctattccttcctgtccatcatctctgatgggggggggggca

SEQ ID NO: 487662 - DNA, 461 bp, Homo sapiens
  misc_feature (67)..(67): n is a, c, g, or t
  misc_feature (235)..(235): n is a, c, g, or t
  misc_feature (334)..(334): n is a, c, g, or t
  misc_feature (349)..(349): n is a, c, g, or t
  misc_feature (400)..(400): n is a, c, g, or t
  misc_feature (422)..(422): n is a, c, g, or t
catggtggcacacacctatagtcctagctactcggtaggctgaggggtgaggatcacctgggtccanaagttggaggttacagtaagccaacactgtactactgcactccagcctgggtaacagatcgagcccccatttgtaaaaaaaaaaaaaaaaaaaaaaaaatcaatgtaaaaacaagaagcttggccgggcttggtggctcatccttgaaatcccagcactttgggaggncgaggcaggcggatcacaaggtcaagagatcgaaaccatcctggctaacatgatgaaaccccgtctttactaaaaatacaaaaattagctgggtgctgnggcgcatgcctggantcccagctactcgggaggccgaggcaggataatcgcctgaatccaggaggnggaggttgcagtgagccaggancgtgctccatctcaaaaaaaaaaagctttatgagtgatt

SEQ ID NO: 487663 - DNA, 1012 bp, Homo sapiens
  misc_feature (104)..(104): n is a, c, g, or t
  misc_feature (245)..(245): n is a, c, g, or t
  misc_feature (310)..(310): n is a, c, g, or t
  misc_feature (365)..(365): n is a, c, g, or t
gcggctgatcgcagtccggaggtgaggcggaactctgagcaggtggtccattatggctgacatgcaaaatctggtagaaagattggagagggcagtgggccgcnctggaggcagtatctcatacctctgacatgcaccgtgggtatgcagacagtccttcaaaaggagcagctccatatgtgcaggcatttgactcgctgcttgctggtcctgtggcagagtacttgaagatcagtaaagagatngggggagacgtgcagaaacatgcggagatggtccacacaggtttgaagttggagcgagctctgtnggttacagcttctcagtgtcaacagccagcagaaaataagcttttccgattagtnggcacccatctcagagcaagatcaacagaagtgataacctttcgggagaagaaccgaggcagagcaagttgtttaatcacctgtcagctgtcagcgaaagtatccaggccctgggctgggtggctatggctcccaagcctggcccttatgtgacagaaatgaatgatgccgccatgttttatacaaaccgagtcctcaaagagtacaaagatgtggataagaagcatgtagactgggtcaaagcttatttaagtatatggacagagctgcaggcttacattaaggagttccataccaccggactggcctggagcaaaacggggcctgtggcaaaagaactgagcggactgccatctggaccctctgccggatcaggtcctcctccccctccaccaggccccccacgctcccccagtctctaccagttcaggctcagatgagtctgcttcccgctcagcactgttcgcgcagattgaagtcagggggagagcagtaacacatgccctgaaacatgtatctgatgacatgaagactcacaagaaccctgccctgaaggctcagagtggtccagtacgcagtggccccaaaccattccctgcactcatgaaaccccaataaatatcctcattgacaaccagaaaaaaaaa

SEQ ID NO: 487664 - DNA, 1112 bp, Homo sapiens
  misc_feature (104)..(104): n is a, c, g, or t
  misc_feature (245)..(245): n is a, c, g, or t
  misc_feature (310)..(310): n is a, c, g, or t
gcggctgatcgcagtccggaggtgaggcggaactctgagcaggtggtccattatggctgacatgcaaaatctggtagaaagattggagagggcagtgggccgcnctggaggcagtatctcatacctctgacatgcaccgtgggtatgcagacagtccttcaaaaggagcagctccatatgtgcaggcatttgactcgctgcttgctggtcctgtggcagagtacttgaagatcagtaaagagatngggggagacgtgcagaaacatgcggagatggtccacacaggtttgaagttggagcgagctctgtnggttacagcttctcagtgtcaacagccagcagaaaataagcttttcccaggaattttctgggttctgggggccaaaagccccccccccaaaatgtttccgttcccaaggggaaaaggggcccaaaggggaaaatttttccaaagacacagggaacaacacgggtttgggaacgttaaaacccctttttccggggggaacgaaagaaaccgggaggcagcaaagttgtttaatcacctgtcagctgtcagcgaaagtatccaggccctgggctgggtggctatggctcccaagcctggcccttatgtgacagaaatgaatgatgccgccatgttttatacaaaccgagtcctcaaagagtacaaagatgtggataagaagcatgtagactgggtcaaagcttatttaagtatatggacagagctgcaggcttacattaaggagttccataccaccggactggcctggagcaaaacggggcctgtggcaaaagaactgagcggactgccatctggaccctctgccggatcaggtcctcctccccctccaccaggccccccacgctcccccagtctctaccagttcaggctcagatgagtctgcttcccgctcagcactgttcgcgcagattgaagtcagggggagagcagtaacacatgccctgaaacatgtatctgatgacatgaagactcacaagaaccctgccctgaaggctcagagtggtccagtacgcagtggccccaaaccattccctgcactcatgaaaccccaataaatatcctcattgacaaccagaaaaaaaaa

SEQ ID NO: 487665 - DNA, 697 bp, Homo sapiens
ggtttttcacgaggacccctttcccctgtttgacacatgaagacccctttttcctctccctgtcccctccgaggcaacgtaattttctcgcgtttatcacccccctggtgccacattttctccacagtttgtgataaaaatacacatccctccccctcctttcgatggcgtgggcgtcgaacacaaatattgcccaccccatctcgccccccggtcattcttttgctccccaccctacacgattttctgcggtgtagagtaccacatcctaaattgtatgcttatacagtcaccctcgcccctccttcatcaaggcctctcccctcgcggaggcaattaaatttattaacgcctagtgattcttttcttggcgctaaaacaatgtttgtttcgcagctcacctcttctctccctattttctttcttctcgccccccgccgctctccttcttgcatacaatatcctctcttgtgtgattttgagattatatacatatgagcagagaatgaatatatccactcgtttacacacgtatgttgggggccacctccgagaggcccgcgcggggcccgcgcggtcgcggccctctcgtggataaatgcggcgagcgtccgtgggtcgccacccagttcgaccaccatctgtttgttgttctgtatatataaaacaaaaataacgaaggccccacaataggtaa

SEQ ID NO: 487666 - DNA, 205 bp, Homo sapiens
agagatcccatggccggtgaatcagctgattcagggaagatcatcccagccattgcacgaccacagcagccgtgtaaggcttgtgtgtctggagctgtacaaggttgtgcagggagcaccgaacaggttgactcctacaagaatggtttcctcaacttggacctgcctttctatggttactctgaaccccttgctgaacacgtca

SEQ ID NO: 487667 - DNA, 622 bp, Homo sapiens
cggacgcggtgggcgaatgataagcatacagcaacactaaaggacgaacctgatcgcttatacgtagtatccttaatcatttttattgccacagacataacctccatcggacgtcctgcctcactcattgacaccaagcacccaactatctatagaacctagccatggcacatccccttatgagcgggcgcgggatgataggctgttcgctcgtgaatgcattaaaaatgtgcctaggcgccacttcttaccatcggaaggcatcgacctgaatcgacccgtgtgatctcccataactgagtattattattcgaagagccatcaggcctactcgattaccgaacccaaatagccctggcccgtgacgcctaagccgactaaacgattactgcaaggccacctatcgtacaatgcagcgctacatcggaagcgcgccactcgctagacgatatcaacgatgaagcttccctctacgcttatcgatcgttcagcaatttctaatactagccgtgactatcctagaaatcgctgtcgcgcttaatccaagggctacggttttcacactttctagttaaggcgctctacctgcagcgaaacatagtaaaaacaatacaagaacagg

SEQ ID NO: 487668 - DNA, 186 bp, Homo sapiens
  misc_feature (128)..(128): n is a, c, g, or t
gctgctgttgctgtggtccgtgttcccatggcgcattaggccaccaccacgcgcaggtacagcagctcctcggcgatgctcatgtcgttgcgcgccaggaccctgggccgggggttcgggctgtgcgnacccctggggctcaccacggcgcacacacccgccacaacccgcgcacggacggctccc

SEQ ID NO: 487669 - DNA, 199 bp, Homo sapiens
gagaggtggagatgtacatcgtgagatgtaccaaacgggccaagtgcaaagtaccgtttggtgaagtttagtgtcatataaaacactaagtaaacgaaacgggtggtactctgtctcatatcctgaaatgttttgagaagaatattgaatttgaccctaagggcattgctagtgaatttcaaacagagatttcagttga

SEQ ID NO: 487670 - DNA, 121 bp, Homo sapiens
cgccgccgcagccgctgccgccgcaccgaagaggccatgttgtgtggtgtgtggggcggggggaggaggaggagggagtaaagcctagagaggagacgggagagagacaccacacacacgg

SEQ ID NO: 487671 - DNA, 996 bp, Homo sapiens
attgccgtctgcgcgtgtcttacgagtgctcagcctttgtgttgattcgaactctcagtggtcatacttgatcatatctcaggatccctgcatcgaccgaactatctcagaaagggtgtggagtgcagaatataacactagagacgcgaactgcatacattgctaggccgtaaccattatgggcgttgtctactattgctaccaaccttgtgcaccttcatgcggatgaggaggttcgatcatgtgttgttcgccttactcataggagtccttcgcttgtcgctgagactgcattattatgaatgcttgctctgtgaatgggactattccctgtatgcacctcacaatcttcatggatcactgggagcgctgttagatcacagttgtatgactcgactttgatagttcgatggtggcgagtgccttgcaggtacagttggcaatggtggggctctatgggcacgtgtccaggcttctcactcctcttgctgtcgcctatgtgacatatctatgcaacctattcagccgactgttggaggccatctcggcaaaagcttcgttccgccacagctgttgccggaggcacagacccttctcttcgaccttcagtacttatgagaagaacttgacttgtatggccatcattgtgctctctgccttcgtgaattgccataaaaccctcacaagtaacgggataaaatcaacaagataagtccattgagagggagcagcttgactttcttctctcagatctaaaatgcatctattttatccaagcaatctcaactactgtgggaggaaagggcttgagagggattatctcctgaccgtagtgagactagacgttgtcatattcctgggttgaagaaaaaaggcggtgttgcccccgaagtgattgatagccagtccacaagcactaacttgtaggctgctcttttccgcttgggccttgaagttcctctctcttaaggcgctagtcacctttgccgttattgc

SEQ ID NO: 487672 - DNA, 341 bp, Homo sapiens
cacgactgacgaatcctcctgagttagctgggattacaggtgtccgccacacacacccgggtaattttcgtattttcagtagaggtgggggggttcaccatgttggtcaggctggtctgtaattcctgacctcacgtgatctgcctgcctcggcctcccaaagtgctgtaattaacaggcgtgagccgctgcattccggcctccttatacatttatatccgttacctataccgttgtcatagaagccagggtgtcaggcctcaggtatgcagtatatttctgtggacccatcagcataactgtcaccctgggagctccttagaactatcaggactcgtcag

SEQ ID NO: 487673 - DNA, 362 bp, Homo sapiens
cgagctcggttccccttttggggcttgcttattcatctgtaaagaggagggggtttacacaatgagataccatctcacgccagtcagaatggtgattattaaaaagtcaggaaacaacagatgctggcgaggctatggagaaataggaacacttttacactgttggtaggaatgtaaattagttcaaccattgtggaagacagtatggtgattccttaaggatatagaaccagaaataccacttgacccagcaatcccattactgagtatatacccaaaggaatataaatcattctactataaagacacatgcacatgtatgtttactgcagcactatttacaatagcaaagaccccaaaag

SEQ ID NO: 487674 - DNA, 445 bp, Homo sapiens
  misc_feature (424)..(424): n is a, c, g, or t
  misc_feature (436)..(436): n is a, c, g, or t
gattccacatgaactttaaaatcagcctgtgaatttctacaaagaagccagctgctttcctgatagagattgcatagactctgtagatcaattttgggggtattgccatctgaaaaatgttaagtctcctgatacatgaacatcagtctgcttttgggctgccataacaaaataccacggatttggtggcccaacaacaggcatttattttctcacaattcagaagtccaagatcgggtgcaagcaactttagtttctggtgagggctctctcctttggttgcagatggccgctttcccactctttgctcacatggcctttcctttgtgtgtggagagagaaagagttggagggaggaagagagagagagagagagagagagagagagagagagaaagagagagtttagacagagggccaatgntcccccgggggntctcctttc

SEQ ID NO: 487675 - DNA, 252 bp, Homo sapiens
gtcgactctgacggatcccttcgtcgaacaccacggcatctagaagctggttccctctgctggtgtctagtgtttttttccctctcctgtccttgtgtatgaaggcagtcaactaagggtgtccagccccattccctctctactcttgacagcaggattggatattgtgtatagtggtttattttattttcttcatttagttctgaaattcaagtatgcgaaacaaagaatatgccgttatacttcgacgaa

SEQ ID NO: 487676 - DNA, 505 bp, Homo sapiens
  misc_feature (23)..(23): n is a, c, g, or t
  misc_feature (71)..(71): n is a, c, g, or t
  misc_feature (127)..(127): n is a, c, g, or t
  misc_feature (185)..(185): n is a, c, g, or t
  misc_feature (189)..(189): n is a, c, g, or t
  misc_feature (236)..(236): n is a, c, g, or t
  misc_feature (243)..(243): n is a, c, g, or t
  misc_feature (505)..(505): n is a, c, g, or t
tggatcccggctgcaggaatcgnacgactggaatattgcaggcactttggaggagcgtgggggaataatgncctcacagaggtgtactgtctagtgaaccgggcccgaggaatggagttgcctctcnccagaaagatttggtaaatgcgtgcaagatgctggaacgctaaaattgccctatcagnttcngggtttttgacagtggtgtcatggtaattgagcttcaaactcacaanggaaganggaaatggtggcctcggccttggagaccggtttcagaaagggggtccttaacatcccgaagagtttgccaagcttgtgggaatgtctgtccttctggctaaagaaaggctgctccttgcagagaagatgggccacctttgccgagacgactccgtggaaggcttgcggttttatccaaatttatttatgacacagaactaagaattttgtacctgaaatgctttatgtcaataagcttgcattttgccaaggtctcacgacn

SEQ ID NO: 487677 - DNA, 162 bp, Homo sapiens
gaggaggccagcaaaccgtggagaagcagctcgcccctgactagcgcagctcgcccctaagttagcgcagctcgcccctgagttagcgcagctcgcaatagcgcagctcgcccctagttagcgcagctcgcccctgagttagctgcagctcgcccctgagtt

SEQ ID NO: 487678 - DNA, 125 bp, Homo sapiens
gatctaagatccagctccacagactctcaacagtaatgtcttcatatcttaaattctaatataaaacgatgctctcttcatcacatgacactgacctagcttaagctcccaatgaggtgtgcctt

SEQ ID NO: 487679 - DNA, 114 bp, Homo sapiens
cgggtactcacatatcggggagagtgcgatgacggactatgatgatagcgggcaggatagttcagacggtattctatttccttagacgtctgagatgttagtattagttagtat

SEQ ID NO: 487680 - DNA, 896 bp, Homo sapiens
  misc_feature (28)..(28): n is a, c, g, or t
  misc_feature (162)..(162): n is a, c, g, or t
  misc_feature (201)..(201): n is a, c, g, or t
  misc_feature (230)..(230): n is a, c, g, or t
  misc_feature (387)..(387): n is a, c, g, or t
  misc_feature (392)..(392): n is a, c, g, or t
  misc_feature (421)..(421): n is a, c, g, or t
  misc_feature (440)..(440): n is a, c, g, or t
  misc_feature (449)..(449): n is a, c, g, or t
  misc_feature (475)..(475): n is a, c, g, or t
  misc_feature (477)..(477): n is a, c, g, or t
  misc_feature (486)..(487): n is a, c, g, or t
  misc_feature (490)..(490): n is a, c, g, or t
  misc_feature (495)..(495): n is a, c, g, or t
  misc_feature (499)..(500): n is a, c, g, or t
  misc_feature (506)..(506): n is a, c, g, or t
  misc_feature (508)..(508): n is a, c, g, or t
  misc_feature (511)..(511): n is a, c, g, or t
  misc_feature (519)..(519): n is a, c, g, or t
  misc_feature (535)..(535): n is a, c, g, or t
  misc_feature (559)..(559): n is a, c, g, or t
  misc_feature (561)..(561): n is a, c, g, or t
  misc_feature (571)..(571): n is a, c, g, or t
  misc_feature (574)..(574): n is a, c, g, or t
  misc_feature (576)..(577): n is a, c, g, or t
  misc_feature (584)..(586): n is a, c, g, or t
ccgcattgtgtgcatagagggaaacctnatattttaactgtgctatggagtagaagcaggaggtgttcaacctagacacagagcagcacctaccccctcctcctttccacacactgcaaactcttttacttgggctgaatatttagagtaattacatctcanctttgagggctcctgtggcaaattcccggattaaaaggntccctggttgtgaaaatacatgagataantcatgaaggccactatcatcctccttctgctgcacaagttgtgtgaggttcctgggctggaccgtgttcaacagagaggcttatttgactttatgctagaagatgaggcttctgggataggcccagaagttcctgatgaccgcgacttcgagccctncctangcccagtgtgccccttccgctgtcaatgncatcttcgagtggtccagngttctgatngggtctggacaaagtgcaaaggatcntncccctgagnnaantctgntaannctgaananaanaaaataancgaaatcaaagatggngactttaagaactgaagaaccttnangcatgatctngtnannaataaannnagcaaagttagtacctggagcatttacaccgttgggtgaagttgggaaacgacttgaatctgtccaagaaatcagctgaaggaatggccagagaaaatgcccaaaagctcttcaggagctgagtgcccatgagaatgagatcagcaacagtgcgacacaagtcactttcaaatggactggaaccaggaatgatcggtcaatagaaattgggaagccaagataggagtgaagaaaactcagggaaattgaaaaatgggggcttaacaaggaaatgaggagagagcgtcataacattccggaatgagtgata

SEQ ID NO: 487681 - DNA, 834 bp, Homo sapiens
  misc_feature (28)..(28): n is a, c, g, or t
  misc_feature (162)..(162): n is a, c, g, or t
  misc_feature (201)..(201): n is a, c, g, or t
  misc_feature (325)..(325): n is a, c, g, or t
  misc_feature (330)..(330): n is a, c, g, or t
  misc_feature (359)..(359): n is a, c, g, or t
  misc_feature (378)..(378): n is a, c, g, or t
  misc_feature (387)..(387): n is a, c, g, or t
  misc_feature (413)..(413): n is a, c, g, or t
  misc_feature (415)..(415): n is a, c, g, or t
  misc_feature (424)..(425): n is a, c, g, or t
  misc_feature (428)..(428): n is a, c, g, or t
  misc_feature (433)..(433): n is a, c, g, or t
  misc_feature (437)..(438): n is a, c, g, or t
  misc_feature (444)..(444): n is a, c, g, or t
  misc_feature (446)..(446): n is a, c, g, or t
  misc_feature (449)..(449): n is a, c, g, or t
  misc_feature (457)..(457): n is a, c, g, or t
  misc_feature (473)..(473): n is a, c, g, or t
  misc_feature (497)..(497): n is a, c, g, or t
  misc_feature (499)..(499): n is a, c, g, or t
  misc_feature (509)..(509): n is a, c, g, or t
  misc_feature (512)..(512): n is a, c, g, or t
  misc_feature (514)..(515): n is a, c, g, or t
  misc_feature (522)..(524): n is a, c, g, or t
ccgcattgtgtgcatagagggaaacctnatattttaactgtgctatggagtagaagcaggaggtgttcaacctagacacagagcagcacctaccccctcctcctttccacacactgcaaactcttttacttgggctgaatatttagagtaattacatctcanctttgagggctcctgtggcaaattcccggattaaaaggntccctgtgtgtgaggttcctgggctggaccgtgttcaacagagaggcttatttgactttatgctagaagatgaggcttctgggataggcccagaagttcctgatgaccgcgacttcgagccctncctangcccagtgtgccccttccgctgtcaatgncatcttcgagtggtccagngttctgatngggtctggacaaagtgcaaaggatcntncccctgagnnaantctgntaannctgaananaanaaaataancgaaatcaaagatggngactttaagaactgaagaaccttnangcatgatctngtnannaataaannnagcaaagttagtacctggagcatttacaccgttgggtgaagttgggaaacgacttgaatctgtccaagaaatcagctgaaggaatggccagagaaaatgcccaaaagctcttcaggagctgagtgcccatgagaatgagatcagcaacagtgcgacacaagtcactttcaaatggactggaaccaggaatgatcggtcaatagaaattgggaagccaagataggagtgaagaaaactcagggaaattgaaaaatgggggcttaacaaggaaatgaggagagagcgtcataacattccggaatgagtgata

SEQ ID NO: 487682 - DNA, 1090 bp, Homo sapiens
atgcaggaccacttcagccgcgcgtcagcatcatagacgagctcttccaggacaggttgcgttcacccgggagccccaggatacctaccactacctgcccttcagcgctgccccaccggaggcctcacttcttctttcccagagtcaccgacatctgtcgcgcaagcttgagtgcaccttctcgtccgtacgagcccctgaacttccacgccatgtaccagcccttccttgagatgatacacagaggctcagcaggccatggacataccaacttccatagcccggacattccagacaaccacgaacaacagaatacatacgagaaggcgacgatgaccggactgtgtgccgggagatccgccacaagtaccacgggctgcctgcggatgaaggaccaagtgtgacaagtgccagggagatctagtactagaggaactgtaccaccaacaaaccacatcccaggctaagctgcgtgcgggagctcgacgaactccctccaggtacgctgagaggtagaccaggaaatacaaagagctgctaaaagtcacataccagtggacagactgctacacacaacacatccatccttgacatggaagcaacagacacgacgcacgacaacaacaggcatgacccgagagagcaaaacctcacgcaaggagaaagaccagtacaccacactgcggggtaaccaaggggaacccaaacagctgaactcagaacgaacatacccggagatcactgaggagggacagaaaaacctatagaacggaaacccacacacgggaccggacaacagaaaaagaatccagaagaacgcaaaaagcagagaaacagggagaaaaaagcaagagaacaaccacaagaacacggaaacgaaagaaaaagagacagaaccaagggagacgaaatacacaccagaaagaggtggcaccagaggaagcagcaccagacaggacagagcacgccagggcaaggaacgggagcgacacccggccgaaagcgacaggcacagaaacaggggcgaaaagacaaaagagaaaacgggacgccagcccagaatggaagagaggaaaaggagaagacagcg

SEQ ID NO: 487683 - DNA, 158 bp, Homo sapiens
gggtgtcagatcatagagcacccgtgtggagttgccagggttacagctcctcatctcagaacagctctctttggttccatcgacgcccatcaagcttgtgtggtcgcgcacgaattgctgcatccacctcttcaacacaatgattcagtcacaaaacc

SEQ ID NO: 487684 - DNA, 199 bp, Homo sapiens
gttacttctgagaccagtgttgctccgtacgtgctccgcctcgccatgacttcctacagctattgccagtcgtcggccacgtacgtccttcggaggctgagcggcggctccgtgcgatttgggccgggggtcgcttatcgcgcgcccagcattcacgggggctccggtggacggcgccgtatccgtgtcctccggccgc

SEQ ID NO: 487685 - DNA, 412 bp, Homo sapiens
atctaaagaatcccggcgatttaatcgtggaacaaacgaaccttaaatagcggcggcaccatcgggatgtccggatccaacatcgaggtcgtaaaccctatggttggatatggactctaaaataggatggcgcggtaatccctagggtacctggtcccgtgggtcaagtcatgggatcaatggagtatagtagtccgcttggactgggtgaagtcttagcatggtactggcccggaggtggggttctggctccgaggtcgccccaaccgaaattttaaatggcaggttgggtagttaagggacctggtatgattgggtccacgaggtgttcagctggtctcttacttttaaccagggaaatggaccggcccggtagaagaggcgggcataacacagcaagacaagaagacgg

SEQ ID NO: 487686 - DNA, 205 bp, Homo sapiens
tcgtctttgataggcaatgttcattttcttatgcacaccagaaaccactgcaggcttataaatagataaataaataacagttaaaagatatatagactttcttttatgtggttgttgtgtgtgtgagacagagtcttgctctcttacccaggctggagagcagtggcctcatcatacctgactgtcaccccctatcaaaagacga

SEQ ID NO: 487687 - DNA, 402 bp, Homo sapiens
  misc_feature (1)..(1): n is a, c, g, or t
naggttgcctttaaggctcacttctttctgatacgtctgacgcatttcctcgccatgcgccttgttacgctcgtttgcttggaaatgagtctcatgcttctggccgtcatacgacctcaaccattcatcattctcgtctcgatctgccattccctgaatcctcgacctggttgcccgtagagcccctgacagacggcgtggtggccgtctgatacccaaggctgattctacgcataccatcgtattattggcaaaaaatccgatggcacagagcgtttgtagatatggatttttactgtgaagtgcttgtttgaaatacgtgaacaggctgaaaactgtggtgcttgcaaaagcgatgaagaaatttcgggttgcgaaagaattacacaagccggtcgacgc

SEQ ID NO: 487688 - DNA, 546 bp, Homo sapiens
  misc_feature (98)..(98): n is a, c, g, or t
  misc_feature (485)..(485): n is a, c, g, or t
  misc_feature (511)..(511): n is a, c, g, or t
  misc_feature (515)..(516): n is a, c, g, or t
  misc_feature (520)..(521): n is a, c, g, or t
  misc_feature (527)..(527): n is a, c, g, or t
caatatgcaatatgcactcaatatgcaatatgccggctcacggcagtaggggaatctggcctcgagacgtgttgaagaaggtctctcgaggtctttcncgggttgaggcaggaaaccctgggttccctcgacttgtgcaggtgacctcagggggcttctcatggtggctctgagaagccagggaaactggaggtgggaggggcctctcgggactccactgggtttggtgcattggaagagggcctcatctccagttgaggcaggaaccgcagggtacctctgatttcagactccgatcgcagggtccctgcagactggggacaggagagtcaggcctcgtcttgggttgaggcatggaactccgcttgcctctcgagatgtccccggggagagaggccgcttgtcgagctgtatttggaacctgggggttttttccgaacgatgcacgggaaaactgccccttcgtgttgacttcattcacaggntggagttcggagaggtgtccgctcgngccnnatcnngagggnaccgggaaatcggggtcct

SEQ ID NO: 487689 - DNA, 189 bp, Homo sapiens
  misc_feature (127)..(127): n is a, c, g, or t
tgatatgcaaaatgaagacgaaagcaggtgggtcatccctatgccttctgcctcaatacgagatcacgttcagtgctgtgagtgtgtcacccaacccaccaccatgacaaccaccaccacagagaanccaactccgagagcaatcaccaccaccactacggtgaccccagcccggtcccccagcccggt

SEQ ID NO: 487690 - DNA, 1193 bp, Homo sapiens
  misc_feature (407)..(407): n is a, c, g, or t
  misc_feature (691)..(691): n is a, c, g, or t
  misc_feature (745)..(745): n is a, c, g, or t
  misc_feature (1132)..(1132): n is a, c, g, or t
  misc_feature (1158)..(1158): n is a, c, g, or t
  misc_feature (1162)..(1163): n is a, c, g, or t
  misc_feature (1167)..(1168): n is a, c, g, or t
  misc_feature (1174)..(1174): n is a, c, g, or t
gaattcggcacgaggtcgcatcaagggtgccaagtgccctttcgacctccaattcctaacgtgggacttctcctgaggcgctgtagcgggaaagggcttcatcttgcgatgacgggggagccacgtggtttttctcgagttacggcgggattctcgagttacgacggggaattcaggctgcctcttgtgttggcccaggcaagtccaatcttccattcgagttgcgaaggaaagctggggattgctctcgagtgactgcagggccaatagacctcatctaggcttgtgtccagaagccaatgttcctctccaggggcgacagggatctcggggttgcattccagacgcacccggggagacaggcattcatctcgagtggaagcaaagaaccccgctctgctctcgantcgcgacgggtatctcttggagctcactgggtggactcaagggagtcaagcctcctgaggcgtttggagagaggtcgcgagattggtctctaggccatgcaggagacgaaggccctcatctctcgatgacgggggaatctcggggttgttctcgagcggcggccccagtgtgcggtttctcacgaggtacgacggcgaggtcagtgagcctctcgtggggcgccagggaagtcgggtctccatgcgagtggcgagggggagcgcgtcattgctctcgagtcatnagtaggggaatctggcctcgagacgtgttgaagaaggtctctcgaggtctttcncgggttgaggcaggaaaccctgggttccctcgacttgtgcaggtgacctcagggggcttctcatggtggctctgagaagccagggaaactggaggtgggaggggcctctcgggactccactgggtttggtgcattggaagagggcctcatctccagttgaggcaggaaccgcagggtacctctgatttcagactccgatcgcagggtccctgcagactggggacaggagagtcaggcctcgtcttgggttgaggcatggaactccgcttgcctctcgagatgtccccggggagagaggccgcttgtcgagctgtatttggaacctgggggttttttccgaacgatgcacgggaaaactgccccttcgtgttgacttcattcacaggntggagttcggagaggtgtccgctcgngccnnatcnngagggnaccgggaaatcggggtcct

SEQ ID NO: 487691 - DNA, 151 bp, Homo sapiens
aaaaggcacacattcacttttgctttagtcccagaatccctttttaaactctatctcttcaatgttggctcaagtctttcaaaaatgtgaacaacgttggggtagtggtgttaaattcctttgctatttctcctcttgttgtgacagcaat

SEQ ID NO: 487692 - DNA, 1172 bp, Homo sapiens
  misc_feature (386)..(386): n is a, c, g, or t
  misc_feature (670)..(670): n is a, c, g, or t
  misc_feature (724)..(724): n is a, c, g, or t
  misc_feature (1111)..(1111): n is a, c, g, or t
  misc_feature (1137)..(1137): n is a, c, g, or t
  misc_feature (1141)..(1142): n is a, c, g, or t
  misc_feature (1146)..(1147): n is a, c, g, or t
  misc_feature (1153)..(1153): n is a, c, g, or t
caactgtcttgaagtgatacccgtcatcgaagacacaattagccttctacgtctcatcactgtagcgggaaagggcttcatcttgcgatgacgggggagccacgtggtttttctcgagttacggcgggattctcgagttacgacggggaattcaggctgcctcttgtgttggcccaggcaagtccaatcttccattcgagttgcgaaggaaagctggggattgctctcgagtgactgcagggccaatagacctcatctaggcttgtgtccagaagccaatgttcctctccaggggcgacagggatctcggggttgcattccagacgcacccggggagacaggcattcatctcgagtggaagcaaagaaccccgctctgctctcgantcgcgacgggtatctcttggagctcactgggtggactcaagggagtcaagcctcctgaggcgtttggagagaggtcgcgagattggtctctaggccatgcaggagacgaaggccctcatctctcgatgacgggggaatctcggggttgttctcgagcggcggccccagtgtgcggtttctcacgaggtacgacggcgaggtcagtgagcctctcgtggggcgccagggaagtcgggtctccatgcgagtggcgagggggagcgcgtcattgctctcgagtcatnagtaggggaatctggcctcgagacgtgttgaagaaggtctctcgaggtctttcncgggttgaggcaggaaaccctgggttccctcgacttgtgcaggtgacctcagggggcttctcatggtggctctgagaagccagggaaactggaggtgggaggggcctctcgggactccactgggtttggtgcattggaagagggcctcatctccagttgaggcaggaaccgcagggtacctctgatttcagactccgatcgcagggtccctgcagactggggacaggagagtcaggcctcgtcttgggttgaggcatggaactccgcttgcctctcgagatgtccccggggagagaggccgcttgtcgagctgtatttggaacctgggggttttttccgaacgatgcacgggaaaactgccccttcgtgttgacttcattcacaggntggagttcggagaggtgtccgctcgngccnnatcnngagggnaccgggaaatcggggtcct

SEQ ID NO: 487693 - DNA, 1150 bp, Homo sapiens
  misc_feature (407)..(407): n is a, c, g, or t
  misc_feature (691)..(691): n is a, c, g, or t
  misc_feature (702)..(702): n is a, c, g, or t
  misc_feature (1089)..(1089): n is a, c, g, or t
  misc_feature (1115)..(1115): n is a, c, g, or t
  misc_feature (1119)..(1120): n is a, c, g, or t
  misc_feature (1124)..(1125): n is a, c, g, or t
  misc_feature (1131)..(1131): n is a, c, g, or t
gaattcggcacgaggtcgcatcaagggtgccaagtgccctttcgacctccaattcctaacgtgggacttctcctgaggcgctgtagcgggaaagggcttcatcttgcgatgacgggggagccacgtggtttttctcgagttacggcgggattctcgagttacgacggggaattcaggctgcctcttgtgttggcccaggcaagtccaatcttccattcgagttgcgaaggaaagctggggattgctctcgagtgactgcagggccaatagacctcatctaggcttgtgtccagaagccaatgttcctctccaggggcgacagggatctcggggttgcattccagacgcacccggggagacaggcattcatctcgagtggaagcaaagaaccccgctctgctctcgantcgcgacgggtatctcttggagctcactgggtggactcaagggagtcaagcctcctgaggcgtttggagagaggtcgcgagattggtctctaggccatgcaggagacgaaggccctcatctctcgatgacgggggaatctcggggttgttctcgagcggcggccccagtgtgcggtttctcacgaggtacgacggcgaggtcagtgagcctctcgtggggcgccagggaagtcgggtctccatgcgagtggcgagggggagcgcgtcattgctctcgagtcatngaggtctttcncgggttgaggcaggaaaccctgggttccctcgacttgtgcaggtgacctcagggggcttctcatggtggctctgagaagccagggaaactggaggtgggaggggcctctcgggactccactgggtttggtgcattggaagagggcctcatctccagttgaggcaggaaccgcagggtacctctgatttcagactccgatcgcagggtccctgcagactggggacaggagagtcaggcctcgtcttgggttgaggcatggaactccgcttgcctctcgagatgtccccggggagagaggccgcttgtcgagctgtatttggaacctgggggttttttccgaacgatgcacgggaaaactgccccttcgtgttgacttcattcacaggntggagttcggagaggtgtccgctcgngccnnatcnngagggnaccgggaaatcggggtcct

SEQ ID NO: 487694 - DNA, 144 bp, Homo sapiens
aagagttattagaaaagcaaaaaggttattatgaaaaatatacacatcttactgctcaaagtaataagactatattccttacctatatgtaacacaagtatcattgcaatatagttaaataaaatgctgagctctagtgatgta

SEQ ID NO: 487695 - DNA, 188 bp, Homo sapiens
gtccaagcacaaggccttgaggaagaccctgacgctgtgttgtcagctgttggtgctgtgtggttcttgttaagctcttttgagtaagaaggcagcttagtgaaggggaggcaaatctgtccgtcccaggccaaggccatagtaggtgttcagggaatacatgtggaacgcgtaagccacgtggttgg

SEQ ID NO: 487696 - DNA, 327 bp, Homo sapiens
cttttggggtctttgcttgggaggcctaggcgtgagaatcgcttgaacctggaaggtggtggttgcagtgagccgagatcctgccactgcactccagcctgggcaaccaagcgagactctgccttaaaaaaaaaaaaaaaaaaatggggcccatatccccaatggaatcctatgcggccataaaaaaaaatgggatcatttctggtccagaaccgtgtatggagcgggaacccattatcctaaaagaccccactcagaaccagaaacccaaatcccacttgttctcacttataagtagaaccaaaccgttgagtccccatggttcca

SEQ ID NO: 487697 - DNA, 307 bp, Homo sapiens
aatcctgctgcaggggacaagggtatgagtcagactggaggagatgagcagtctgcctattcgtagtaacactcagcaaactggtagtcgaaaatgtctgctatgaccagtctttcccaatctctcatgtgcgctatctgggtcctgacagatcatatttgtgtctgtacccacactcttgtacctggctcatgtgttctctgtgatgcgaaaggaagagcacctgaacaagaaagaggaagcactccaggttgcccaaactgatggtgtcaatgtggacatgcacttgaagcagtattgtataaag

SEQ ID NO: 487698 - DNA, 306 bp, Homo sapiens
gatgatatggtcaagtgcattcagagtatcaggacataatcacaagactgtcctttcccacatgaaaacactttacagaaaacgtaaagcactactcacgtagcatgatgtaggcatcacactctttgcacttacctcttttaggtacacaagtataatacaacaaagcaaaaatattttacagtgtctgttaacaaaaagttctctattagcatagaagaaactacagtatcctgaagctattaccccaagagctagtttagtagataagacctttgaacccatcttatatttccttcttaatat

SEQ ID NO: 487699 - DNA, 193 bp, Homo sapiens
  misc_feature (2)..(2): n is a, c, g, or t
gngacgcctgagctagacgagggcggagtggaccaccttgcaaggcttcaggcccgccgcctccattggccggggatggcccgctgtggcccagcctaccctgccctcgctagctgaagctcgacgacatcacgacagcttaagcatcatacgcccattcgctctggccctcccaccaggcttagcagagcct

SEQ ID NO: 487700 - DNA, 291 bp, Homo sapiens
accattcatgttaaatacatttttgaagcccttcttttattgcattacataatggacagccatttttgatggttgcggcagccattataattttaagtcagacccaatatatgcatattaaaattctgtatactttgataaagtaaaaaataaagctatataaattgatctttagatttttctgcaaaagtagaatccccctttcatgacccttctaacatatcccatcagggctgcttatagacccaacatcagaaagattttcattccggttcccccccctatccctta

SEQ ID NO: 487701 - DNA, 110 bp, Homo sapiens
ttcggacgacatgtatgattgacatttttcttggtctaaaaattatattaaacatttattttgaaatagcttttcttcgtgtttttttcttctgctatggtccgagcgga

SEQ ID NO: 487702 - DNA, 396 bp, Homo sapiens
attgggcacacacacatacaaaactaatgacacttgactcttccgcaatgcaaatgaaataatggaaaacacataaatgagtgtgtagaaattatgtgcatacacaccttacacacagacactgcagaatgaaacactcacacacacagatggagagggtgagtgggttcagaaatcgaatcagagctcttgagagaagatctggggtgtttcaaattgtcctaattgccttgtaactgcaaaatatgagatctgcaataacacaaagaaataaactagacgaggctgacaagtctgcatctgaacgattaggaatggagattaggatatcatctaactgccacaccagtagagagagtcgacgcggccgcgaatttagtagtagtaggcggccgc

SEQ ID NO: 487703 - DNA, 154 bp, Homo sapiens
caagacagtaggatatcactgtatgtctagcgctgtacagtgcatgtatacaccaggctgtgtctagatgcacagttacagcaggagttgatatttcccatcacgggatgccgtgtctgtagcccgggatgtgccgtgccctgcagtatgtcag

SEQ ID NO: 487704 - DNA, 418 bp, Homo sapiens
gcccgatgtgggttctggctgatcaagcggcgtgtatcgggatacctcttgattgtcaccgtcagcctcttgaacagcagacggtgtgacggcattgagcatggtactccatgatggcgccgatccacagcaatgctgcacggccaggaagccattcccggatgtacccaggttctccgccatcaggggactgtaggttcccattggtcctgactttgagaaccgtggcaaaagggaagtagtgtgccagccttctgtctctttcaggaaaaaggagcctgtttgggtccacatgtaatttctccgtgtgtaactgaaccgtaggtgatattttaccgccagcggcaggggctccttgctgtggttgaaggggtgctcgaagaccacggcggccagcacgctggacgagcagttgtcg

SEQ ID NO: 487705 - DNA, 167 bp, Homo sapiens
cgctgttaccataaatggctgttacctaaatggctgatacctaaatggctcttcatactactggaagtcagaccatacttcttagtgtactctttctcccatccttgtaaaagactgtatcatacagccatttaggtaacagccatttaggtaacagccatttaggt

SEQ ID NO: 487706 - DNA, 816 bp, Homo sapiens
atcaggctaggtacgaggccgggtggtcattgggaaaggacaggtgccgagccctgcatgtggagccctcccaacccacccacagatagttagggaaataaccaaaaaactaccaaagcaacagaaacccacatctctagactgaaaccccaaagtgggctatgatgggtgggtaagtgtttcaaggggaaagtgaggcagaggttctgaaaagggtctctgaaaaacagtgtacatgtagccataggcacatgtgagcagaatacttaagcctggccgccgaaatgccgcctgacacacacacgtgccacacctgcgctgattcattgtgtgtgctgcacacccacaaggtgtgtgggtgcatggctgagcttcgggccgggaaggcagcctgggaatctgaggctggagacaggggtttagaggtgggggccatctctgcgaagcacatatggagggaaagacaagagagcccctctccctagcttctccatgattagcatcctatctgcatcctgaccccacctccttgctcattggcagcccctactagtctctgtgctaactccatgttcccaccaactccaggctgcttcccaacttacctcttgggttacagtaacttgtacaatagcgaactattggaaaaacgttcagccgggagttaacaagccaaagaacctgtatacacaaaggtggatggacgattcgctctagacgtgagatctattggacaagtctatgactcataagacagacggccggacggacacaggaaatcaacagagaggcatgtcccacccctacagcagacac

SEQ ID NO: 487707 - DNA, 105 bp, Homo sapiens
tgcttagaggatcctcgacatctctcctctcgacattctctcctctccgacatctctctctctccgacatcctctccctctccctccctctccctccctctccct

SEQ ID NO: 487708 - DNA, 428 bp, Homo sapiens
  misc_feature (16)..(16): n is a, c, g, or t
aacctaagtaacaganaagagagatgatcttcaaacataatgagtttaatggggagtgcagagtggatctgcaaatccaagatatgcaggctaaggagactacagttgtatccaaggaggttgaggcaaggagatgcttttaaaggcaaaagagaaaagtacacataatttggtttgaaacagagaacattgtttacagaggcttatcacagaagatgacactaattttttaatagagacagtgtgtcaggcaagtattcttatggatctttctagctgtccttgtgactcacctagcaagctacagtttggaatccttggcaaagactcttgctataggcacacgtgtaagagccctttagagagtctttgtaatagttcttatcataggcatatgtgagtgagggcccttcattcttaacttccca

SEQ ID NO: 487709 - DNA, 502 bp, Homo sapiens
ggcggcctgcagtcccgggcccgcgccccggccgcccgcgtgccgccatggagcccggcccgacggcccggcgcctccggccccgcgccatccgcgagggctggttccgcagactgcagctgtggcccggcaggcctgtcgctgagtgtgcatgtccaccaccgggctcgcgctaccaggacatcctcgtgcttccggagataagacctatggcaacgtgctggtgttggacggtgtcatccagtgcacggagagagacgagattctcaataccagtgagatgatcgccaaccgtggcgtctctgcacgcgcagcccaaacccggcgaaaagtgtgctgaatcatcgagggccggagaatggacgcgtgtcctgcgcggacggtggtgaaggcgacccctccgtggagtccgaggtacagctgtgagatcgagcaaggatgtcactccaagatctcagggaagtttcctgtccacgggatggccattggcataactctagga

SEQ ID NO: 487710 - DNA, 857 bp, Homo sapiens
  misc_feature (168)..(168): n is a, c, g, or t
gagcatcttgtgtgtcatcgtatgatgttagcgtcgtgtaacgcggtgtgtgatgctctgttgtgtattttgtagtcaccgtgtgtcggtgcgtgtggcgccttgtgtgtttatgcgtcgtctgcccggttgtggatctgcacgtgtccgaaaacccgctcgggggangcccgtcccgcctgtggggttacccccgcgccaagtgttgttatgccctcctcttggggcttgttttcccaaccccaagtgtctcgggccccgcgtttctttgctgggggtaagcgcccgcccaaactttcggtttgccacccctttctgtttccctgcccggtccccgaacaaaattccccggggttttcgccgcttccccccgggggtttctttctcacacaaaaccgaagtgggggccccccgatttcggggttctggaacaaggaccgcccgcgggttgtttttaagtaaatggcgcgccccccaccacacacctggggaaattcccccccttgtatcaccgcgcccacgctttgtgtatccggtacctccggcaggtagccccctccccgcccccagagaccctttgccgaggagaccgggggtagattttcctaacaatcctccggaggttttctcacgcgcgcttcctctttgaggcacccgccccttctttgattgggcgggaaagaccccctggtcgacggtggtgcgccgcggcccacaagtgccgctttgtagacactgtgggcgacttcgcgcccatgtaccccgcgcctcctgtgggttttcagaaggggccccccccccctcggggcccaaatttcccctgcccccggaaaattaaaaaaaattttgtaaaccca

SEQ ID NO: 487711 - DNA, 499 bp, Homo sapiens
ctacattaactagtaagacataaagatttgaaactggaactatattatactttttaaccaatctgtgtggcttcactcatgaaatgtacttcagttaatatgagactgggggttaagtctgtactaatatgcaaaattgcttcgtatatttggtgatcttgtaatgtaagtgaattgattcttatatcactgatactattaatcatgcaatgtacaattcaaaatcatgcaatgttgcactttacaattggatttgaagaactcgactttatgtgatcatggtattggaatacatgtggggcggttaacttagtccttaattctgttactttcggtatataccgacccggcttcacgaaataagtggttttaacaattaataatgtattaatggaggctccctattggggttccgtgttaatgctttgccggacctagaccccaacaaaaggtggctcgggaggttagttccccttgtgaggcgttaatccagcttccg

SEQ ID NO: 487712 - DNA, 266 bp, Homo sapiens
  misc_feature (251)..(251): n is a, c, g, or t
  misc_feature (261)..(261): n is a, c, g, or t
cagtcggcaagatgggtcaccagcagctgtactggagccacccgcgaaaattcggccagggttctcgctcttgtcgtgtctgttcaaaccggcacgtctgatccggaaatatggcctcaatatgtgccgccagtgtttccgtcagtacgcgaaggatatcggtttcattaagttggactaaatgctcttccttcagaggattatccggggcatctactcaatgaaaaccatgataattctttgtatataantaaacattgnttttc

SEQ ID NO: 487713 - DNA, 634 bp, Homo sapiens
ggcttggaaaacctctgactgcatttgcggaacaggtgcggccagttttccacccgccggtgccgtctcgttcgttcacgggcctgcccatgaagaattgtagtagtgcccctgcggtacccagacgtgaatcctgtggtggaaagcgagctcaacccggcgccatttcttcggacgttttccccgacggcgccgtatgccgccatgtgattcatactttgctagtgggattattcactccggccttatttgggcacccggtggagcaccccgcagtgatttcccacgtctgaacccctttgtcggtcgtgcccttctgacgccgtccccaggtggtaggagggccccgcacacccaccctggggggagaccccacccggctaggggagccatttttcacaggcctcggtttcgcacaatgacctaccgttttttttaagcgtctttattgctggccacgcaggataggcatgtagcttctctcctgcttgccggccaatgtggacgcgagaatttccccgtctgcatttgtagtacgacgaaggcccccccgggggaacacccaccactctttatctcgagaatggtgttccaagccttctcaaaaaaccacctttttttcccccacaaaaac

SEQ ID NO: 487714 - DNA, 228 bp, Homo sapiens
ataaggttgtcctcatgctgtagtcctcgccctgaaacaatacatcctgagtaatgtccatagcatggctcggatgctactacatcagtaccgaaagaagtcatacctttttcctgccaaagttctcctggttcctcttacgagatgagtttccgcttactgtataatcacgaaatgggattacattttaaggaattctcagcatctttctgattatattaattctca

SEQ ID NO: 487715 - DNA, 125 bp, Homo sapiens
agctctctctgtagggggtgactgatcactgtcgcttgtttcggggaacctcactgaccgagggggccccctgtgctatcagaagatcttgtggataccatgctgtgagccttgctggctccaga

SEQ ID NO: 487716 - DNA, 416 bp, Homo sapiens
ttccgttgtctattataaaaatgctgtatggtcacttgagtgtttacatgggatgttgctttctaacttgcattatttagcctttgatgatccaaggaggaaagattctgtataagaaacacttatacacatatatataagtgtttatatggatggtatcttttgggtagacacccaggaatgaaattgctgggtcatatgtaattttttttttctttttttggagatggagtctggctctgtcacccaggctggagtgcagaggcgtgacctgggctcacggcgacctcggcctcccgggtttaagcgattcttctgctttagcctcccaagtagctggaaatacaggtgcccaccaccacacccaggtaattttggtatttttagtagagacaaagggaaacaccggggatcct

SEQ ID NO: 487717 - DNA, 396 bp, Homo sapiens
gctgctgaacaatatggcgcacatctggatctttggtccagacaacgtatcttccactagagacataaagagctttgaaacttcttgagcatcctgctgctggtccagtgtccaggcccaaggctaaaacaaatcctgatggatcaaggtatcgcctataactgtatagcaccaaggcaaacaagtactggagatgctcacaaatggtccgaggctcataatctttttcttctgggatgccgtctcccagcatgtagtcactacaagtgcttggacataagtagagtgcctgccgaacgctccaagtcgcgaaaccacactagaacgaaatgtgttgacgtaacaagtgaatccacgcgctagccaggcccacacctgagttctctcacctccact

SEQ ID NO: 487718 - DNA, 335 bp, Homo sapiens
  misc_feature (15)..(15): n is a, c, g, or t
  misc_feature (26)..(26): n is a, c, g, or t
  misc_feature (71)..(71): n is a, c, g, or t
  misc_feature (73)..(73): n is a, c, g, or t
  misc_feature (104)..(104): n is a, c, g, or t
  misc_feature (107)..(107): n is a, c, g, or t
  misc_feature (135)..(135): n is a, c, g, or t
  misc_feature (161)..(161): n is a, c, g, or t
  misc_feature (172)..(172): n is a, c, g, or t
  misc_feature (198)..(198): n is a, c, g, or t
  misc_feature (202)..(202): n is a, c, g, or t
  misc_feature (210)..(210): n is a, c, g, or t
  misc_feature (237)..(237): n is a, c, g, or t
  misc_feature (251)..(252): n is a, c, g, or t
  misc_feature (259)..(259): n is a, c, g, or t
  misc_feature (274)..(274): n is a, c, g, or t
  misc_feature (280)..(281): n is a, c, g, or t
  misc_feature (302)..(302): n is a, c, g, or t
  misc_feature (308)..(308): n is a, c, g, or t
  misc_feature (322)..(322): n is a, c, g, or t
  misc_feature (326)..(326): n is a, c, g, or t
  misc_feature (334)..(334): n is a, c, g, or t
gacagttccatcttngtccataactngctctgtgatccagtgtgcatcactcaaacagactatctcttttntnctacaaaacagacagctgcctctcagataangtngggggcataggaggaatgggaagcccgntaagagaacagaagtcaaaaacagtngggttctagangggaggaggtgtgcgtgcacatgtangttncgtttccngtcttggaatctcagcaggtcagtcanattgcagtgtgtcnnttcaccnggtccctcttttaangatttnncttccctctttccaactcccnggtccnggatcctcaacagngtcngggttagnt

SEQ ID NO: 487719 - DNA, 1069 bp, Homo sapiens
ccgtctctactaaaagtacaaaaaattagccgggtgtggtggtgggtgtctgtggtcccagctactcgggaggctgaggcaggagaatggcatgaacccgggaggtggaggttgcagtgagccgagatcgcgccactgcactccagcctgggcgacagcgagactccgtctcgaaataaaaaaaaaaagttctggctataatgtaacttgccccttggaccatctaaaaccaaggggatacaaggttctgatcgcacgttggtgcctataggatcaacctagctcttatatctatgacatatgccggttatatactgctcagctatatcactacagtggagcaccttcacagcaatctcaacaacaggactcggtaacactcagcatagcaattctaatctgcccaaaactgcatgttccacaccatactcgtgtatcttcctgcttgaccctgaagcagcacccgacagcatattcccccgccaggcaaatgaacacactttagccactgttagatgccttatccctaacaagattccagcataggtcggcacagtggtctctccaccactcgcgactcacttacgtgttgttgcctcctcggaaccaccgggcacaactcaaatggtcgtacctcgcggtcaagggtctctccccccagctgacgcgtttcctctcggtgtccggctgctttctgggcgcgcggggtcttggctctggctggcttcgcgggagggagtgggagggggggggactgcggggtcggttagcgtacctttgtgctcgctttggggcgttccagcgaggatgtcgctggcgccgaccgagctacggccgtggggcagcggggatgtgtcgatcgtctgggtgggctgtcgttttctctggtgaggttgactgcccgggtcgcggcctatgacgatgcgatgtcgtctgtgtgttcccctcggcggctgtcgcgcgtgctgggagtctgacgcgcggcgagctgggtgccctgcagaggagcgggatgcggtcgggcgcgtgttccgagtggtgacgatcggtcgtgatgtcgcttggtttg

SEQ ID NO: 487720 - DNA, 1150 bp, Homo sapiens
cgcggcggtgaaggggaggcggtgggcgtcttgtgagaacagagctgagatggagaagctgatggccgatggctgtgaagtctgatgccccatccagacccctgaaccagacccctcagcatgtgctcctggtgactgcctagtgaaagaaaggatggcctagcatgttctgacgaagtgatgtgcagttgatgtgctggacgactgctatgtggggccctgaagacggctatgtcctgacctgtttaaagtgcaaatctgcttccccagtgtggccccgctcccgtcacgatccccatgagccacatggaggcagcatctcccttattgtgtagatctatttcttccccgcagatgcgcaaatatgaaggcctgagacttgacgtttggagcagtcccccttttgggactttgagttgctcaatatgcttttctatgttctcagcaattaagcgggaccatacgaacccataagcccgtaacagagtcggagttaggggaaaagggattgggtttacctaaagcagtcctttcgttgtatgcaagagtcaaagcatcaggcgctttgctgtgatttcccctggacggacagtactacttgacgcgtacttacttcggctaagtgacaacctaaagagcgacgacgcaatggtacagctttgttacttactaggtgtggcccacgtagtattacactggcgaagcgtcccttggggcttacccgttaagacagacaaattgcaaggtaggtgcatagcggcacgtttcagcaagcacgataattaacctcttcctcactcagatacctcacggaggagaacgacaattaacagttgccccaatctggtttgagctcggcggctctatctaacatacaccattccagcccgacgcaccccatgcggacactaaacgcctcgaccactcacaccttgatccgcgcacgagaaaaacccaccagcccacccatcccaaacgcgacggcacgacataaacaccctatgctatcccaacacaaaccctttaccgtggcgatcgatctgccatgtgcacaccacgcgtgtccccaccatacaatccccccgtcacacccacccccgtgatctggatctacttaccccgtacgcgctcaatcctcctcacataatca

SEQ ID NO: 487721 - DNA, 305 bp, Homo sapiens
aggccacgggggacgcccggcggcaacagctcctaaaaaggcagcccctgctggaagcattcgaccccctgcgccggggcctgactgcccccggcatcaacatcaaggacaaaaacagttccacatccccgtgggaacttttggatcaaaggacaaaaaacccaaaatcaacgggcttaggatggagcccaaccatgaacctgctcccgacaaaacgcccccatgcttttcaggggcaaggctttatgttaaaacttcccgtcgggggtggtaggtcagcattaaagtaaggccacccccagtga

SEQ ID NO: 487722 - DNA, 294 bp, Homo sapiens
gctcgacccctatcttcagcctcttcaaacaaaacggttatcggccaagaattttgtatccagcgaaactaagcatcatatatgaaagaaagatacagcctttttcagacaaacaaatgctgagataattcaccattaccaagccaccactacaagaactgctaaaaggagctctaaatcttgaagcaaatcctggaaacacatcaaaacagaacttctttaaagcataaatcacacaggacctatgaaacaaaaatacaagttaaaaagccaaaaccaaaaaaaaagtcgacg

SEQ ID NO: 487723 - DNA, 84 bp, Homo sapiens
gctggacccaccgtggtgggcatgcaggctgccggcaggcttaggtggactctgctggcagcaaataaagagatgacggcaaac

SEQ ID NO: 487724 - DNA, 588 bp, Homo sapiens
acaggcggctcacccgggagcagagaagtgactgctggctaggggagtgtgccaggatatagcagggttctgggagctggggccttgcgaaccaccaactgccaagtcaaaggcctagctcccccacaccccctttctctttcttgctcaacacctgataggagcctggtctggagacccaactgaccacaggaatagtccacttgaccatcaagggcccagctgccctgccagagaagattccacagcgaccacttgtcctctccaggttgtaacaacaacccaaagttggtgttactactaagatgcaaatactcaacattgtctaaaagatcggctcggtcttgaatttctgttagagcaacccacccaggggacactctcgcaccctcgtgttagcctctggggccgagctcagggctggcaacacagatgttcccctggggcaacggccctgtcctctgcgacaagcccagtgccatgtgctgggtgacccgttaaacagctaactctgtcctcccaccatcaacggggatccgtgcacgtcatcgattactaggacatgcagaaattcttgtcttttttagt

SEQ ID NO: 487725 - DNA, 127 bp, Homo sapiens
atcctcctcctcctgagcatggattaccatgtgcaacaacacactatcatgtatgggtaaaactaacctgtctcactgatggtctaaccctgcacactgttcccgtcggaggaggaggaattctgct

SEQ ID NO: 487726 - DNA, 111 bp, Homo sapiens
gccaacatcagcgcggaaaacatcaagaacaattttgtgctcatatatgagctgctggatgagaatctagactgtggctacccacagaattccgagactgcctcgccaaat

SEQ ID NO: 487727 - DNA, 339 bp, Homo sapiens
ctcatacccaggagtccagactccagaccctactacctcagacggaggagtttatactccagctccttctcccttagactcaggagtccagactacagccccttcttcctgagacctaggagtccagacccgctgcctctcctgccacagactccttccacagagtccaagcctccagcccccttgtctctgagactctggatgttgggccccactatcccctcctttctcagacccaagagtcacgaccccccatgccatcatttacccacagccagggcctggcaaatcctccacattatctcaaggaaagagaatgtgggtggaacgattaggccg

SEQ ID NO: 487728 - DNA, 567 bp, Homo sapiens
agcatacctgtagtagggaataacaatattaaaatacatactaaagaagcaccattgtaatctaaggtagatatctactagaacaaacagttcaaacaaagtagacagggaagagaaatggctatcagtgatgtatggctcaacaggtcaaacttcctgccttctaaaatggctctacttgtaagattctgaagattccattcagcaaatcacttgtattataaagggtaataatgtgagaaaatgcaatatgttgatttgcttgattagaagaccacttcactagaaataattatatcaaaacataatgttgtcctccttaatgtaggtgcaagaaaactcaaaataaacaaaaaaaatctaggaatacttgtgtaaagtaaaaccagtattagatttcactctatgtacatttcacccattatctaggaccaattacacatataggcactgaggaataaattcagagcaacaactcctaggggagaactaaattgtctggttggagatcaaaaagaactaaagcatctctgacggcaaaaagcccccaacacagtgaccaaggac

SEQ ID NO: 487729 - DNA, 302 bp, Homo sapiens
taataccccacaagcttttttaactttcattaaatattcccgataccaaatgagattctctacttatcacccccaatattttaactcctgaaccatgtatccaaaatgatgccactgaattctacctcaatcactcttcttgcagtcaatccaacccatggtatcaaccaagccagtatgaattatgcaataggtttcaagtcttttattcctttcagaaaacccttctcccagatactactagacacatgattttgtagaaaaatagactcattctcttattcaaactaatcacccatgtc

SEQ ID NO: 487730 - DNA, 988 bp, Homo sapiens
  misc_feature (552)..(552): n is a, c, g, or t
aattgaatcaacaaaacaccacagcctaattatagcatcatccctctactattttttaaccaaatcaacaaaactatttagctgttccccaagcttttcctccgacccctaaaaaccctctaatataatactgatcctaccctcacaatcatggaagccaagccacttatccagtgaaccactatcacgaaaaaaactctacctctctatactaatctccctacaaatctccttaattataacattcaccagcacagaaataatccatattttatatcttcttgaaaacacattattcccacctgggtattatacgatgagggaaacagcagaaagtctgaaagcagggaaaaatttatataacctagagggtggcctctgtccccacatgcacctcggcgcacatctacacttcacccaaaaacttacggctctccaacaaatttcaatcaatcacatctccaacgtggcaacgaaagatgacaaattcccaacacacaaacgaccacaaaccaacgcacaacaccacaccaacaacaaaaccgggggggngggcccaaaaaaaaaacccccgggggggcacacccttggcagaacaccgccttctctgacaacacgggcaccaaccgggacgacaaataaacacaacagggggggcgcccacccacacaccgtcgagctcgaaacgagaacaccggagtatcttggcatagaacccaacttgggcgggagaccacagcggcagacccaccccacgacaaactaccgagtccgggcactaacaacttcaggcacgggtaacccacgcaaccctcgtcgtcaccactgggtaccactcgactctaacaactaagccccgcagtcacacactctaaacacaagtcgaacacacacacctagcacgcaaccacaagacaccatacatacaccaagcacaacgatccacacaacgcagaagacatccataaacaatgagacataagatcac

SEQ ID NO: 487731 - DNA, 860 bp, Homo sapiens
tagcatcaccagtattagaggcaacgcctggcccagggacacatgtctgacggccgcgcgtcaccctaaccgtgtcaaaggtaggctgtaattcacttgtccctttaattagggacctgtgtgaatggctccacgagggttctgctgtctctatactttctaaccgaggtgaaattgagcctgcccgtgaagaggcgggcatggacgacagccatgaggaggaagaccgctatggagctttgacttggattaatgcgactacagtgatactaacgagatcgccgaatagtggtgctgagtaacctatcctaataacttgcattaagaaaatttcggattggggctgagcatcgtgagcggagcaccaaactgcgagcagtacatgctaagacttcaccaggttaaaggagaattattgtacgtcaagttgatcgcaataactgtgagacgaagggtaacgaagttggcctagggataagagagcaatgcgtatgcgtagagtcctatatcaaacgatagggttagagacgtcgatgtagagatcaggacatgctagtggggcaggcgtattaatggtcgttttgtcaacgattaaggtgtacgtgatctgagtgcagacggcgtactccaggtcggttcctatgtaggtgcgcattcgtccctgtcgagggcacgagacatcggctattcacgggcgcttccccgtggaggtgtctccaggagagtgtacgcaaccaccgggacggtcggaagcgggcggcgagcaactgggcggccgccgaaatcaaccgagggggggccaggaagagcacgcgcgaccggagcggggtccaacggggggggaacaggcaggcagcggc

SEQ ID NO: 487732 - DNA, 324 bp, Homo sapiens
ttttttttttaaagggggccgggcccccttttaaaaggggaacccccatttggggggggaaggtttttccccccaccggggaaaacttttgcccccccctttgttcttttgggggttaggggggaaaaaacttattttgggcctttgccttttaaaatttgggccccccgccccttgggggggggtttaaaaattttttttaaaaaaggggtcccttttcccgcccccccccgggaaaaaaaaagaggggggccccttttccccgttttttttttttttttgggggttgggttttttttttttaaatgggttaaaaaagggtta

SEQ ID NO: 487733 - DNA, 99 bp, Homo sapiens
cggcacgaggccccaccaactgcaaaatctgttcctggcattaagctccttcttcctttgcaattcggtggggtctcaataaaagttattttcccctga

SEQ ID NO: 487734 - DNA, 119 bp, Homo sapiens
catcagtgtcatgttcaactgcgaaatagagtgttgctttgataatggaaaatgtattcgttttaaaattccgttgttgagaataacaatatgtttaaaaatattattgaacaaatttt

SEQ ID NO: 487735 - DNA, 222 bp, Homo sapiens
ctcttcttttcttcatacatgaaacatagaaaagggattccaaacaatgatggtattttaaaatatactacatttcaaattagtacagtgattatggaaaacagtatggaggtccctcaaaaaactaaaactagatctacaatatgatccaacaatcccactgctgggtatatatcctaaagaaaggatatccatatactgaagagatatctgtattccctg

SEQ ID NO: 487736 - DNA, 743 bp, Homo sapiens
agaacttcactccgcgccacaggccccctttccgcaggctgcgctgggggttcatggttggcgggtcggaagtgaaatgttcgtttgtttcgattttgaaatagtggaagcctccggccctatggttttctggggttggagtggagtgtgtgtgctgggtgtgatggcggagaacggtcaccgcatccaggcgagggcctttgggtctcaataggtggggaaactctctgccaaataggaggcctctcggagcgctcaggtttccccatctgctagactgggctctgagcttcttctggcatgagagggctgtgtgacgacgtaagagaggtaggcagcatagcccgcggtgccgggtaggacacgtcagccaatgtcatctgtagccatcgctgcgcatcaccagaagaacccccatctcaatcgaagcgttgctagtgagggcttgcttggagtacaccactacgagtaggccgatgcagcggcttacaggagtcacccttcgtgcggggggacaaacgtggatcgcctagagccctaatgggcgcaattgcgccgcgacggagggaccattctcgtgtcgaaggtgcggggactttcaacagggtcccccggtctaacaaaagggaagtccctgaaaaatgcttacttgccgggtcccaagggcgaatgggttcatttaaccccaagtttgatggccggccacgaaaatcttcctggaagatctcttgatgtggaaagag

SEQ ID NO: 487737 - DNA, 853 bp, Homo sapiens
ggagagggaggctggtgctggcggtggcgctgcgggagacccggtccagacgcctggcgtgcctgcctggcacacaaggctggctttctaggctccctcccccgagcgcacatgcctgcctccttccctgacggacgcctgcagtggcagcgcttgctctgccctaccgtgacgcgctcctgggagacgctctgcgtggtcctggacacctgggtcctgctggcgtggggactgacatgactggaggcgaacgccatacggtagccggtcctgcgagccatcgattcgaggtgacgccaagtccatcgtccacactggactggtcacaccatccatttctcacgggagaccatttcgccacacggggttacccttggagctgagaacgacgcgggatacgatacgaccatcctttgcccgttgacctgatcgtgctagaaacctcagatttggtgcggatatggcgggcccaggtcgacccacatgcgtgacggttgggacaggcaaacattgtccaggtaccaagatgtgccattgcagaaccccgggaaggtccacggggcccacgcatgcggcgtcccaattaagacagtcgtaagtctggttacacagacaaaggtcccatcgcgttagagcgttggacagtggggtcgcgttcaacattcgagcgttgaaattcgttgctaacgcgcaccgagcaagacggtccttcgtttacaccttgcacggttccgtatccatcgcaatatgaccggggaacagatagtggaccatttgccctatgaccgaccaggtaggcagatgcatgggcttgcaagtggaacgtacgccatacattaggagggccagtgtc

SEQ ID NO: 487738 - DNA, 278 bp, Homo sapiens
  misc_feature (68)..(68): n is a, c, g, or t
  misc_feature (140)..(140): n is a, c, g, or t
  misc_feature (176)..(176): n is a, c, g, or t
  misc_feature (194)..(194): n is a, c, g, or t
agacgtccattcttgcatagacgtccattcttgcatagacgtcccttcttgcatagacgtccattctngcatagacgtccattcttgcatagacgtccattcttgcatagacgtccattcttgcatagacgtccattctngcatagacgtccattcttgcatagacgtccattctngcatagacgtccattctngcatagacgtccattctggcatagcacgtccatctggccatcacaaggcacagcagtgcagcaggacgagagcaaagcatgcgc

SEQ ID NO: 487739 - DNA, 156 bp, Homo sapiens
ttctagaggagtcccccagatggttgttcatacctggcactgtggtatcataccatgcacgtgtagtcatacctgcactgttgtcatacctgcactgttgttcatacttgcactgttgttcatacctggtcgctgtatcgggggcggggagcgggt

SEQ ID NO: 487740 - DNA, 438 bp, Homo sapiens
  misc_feature (68)..(68): n is a, c, g, or t
  misc_feature (140)..(140): n is a, c, g, or t
agacgtccattcttgcatagacgtccattcttgcatagacgtcccttcttgcatagacgtccattctngcatagacgtccattcttgcatagacgtccattcttgcatagacgtccattcttgcatagacgtccattctngcatagacgtccattcttgcatctcactttgctacactgccactctgctgattgttttgttttgaacaatccaggccatttttttgtccaggcttgtggtagcttataaaatataattccttcccacacttactgcgttgctaatctctttgctttcagttccatgtattaatcataacccaagttctttcctggtcatagttctcaatcttgaaatttgctttctcacccactcctctgcatttctctccaatgtaaagctgaagggaggaaaaaaggggatgcaagaatggaggga

SEQ ID NO: 487741 - DNA, 239 bp, Homo sapiens
  misc_feature (38)..(38): n is a, c, g, or t
gcaaaatacctcggtaaagcaacatcacaataaagcangaagcgcattgttttagtttcccagtgcatctaagtcatgtttactgcatattgcagtccactaaatgtgcaatagcattatgtctaacaaatatacaaaccataatttaaaaatatttactgttcaaaatgctgacacagaaacgcaaagtgagcacatgctgttggaaaatggtgccaaatagacttgcctgatggcag

SEQ ID NO: 487742 - DNA, 563 bp, Homo sapiens
  misc_feature (56)..(56): n is a, c, g, or t
  misc_feature (149)..(149): n is a, c, g, or t
  misc_feature (169)..(169): n is a, c, g, or t
  misc_feature (207)..(207): n is a, c, g, or t
agggcttcccggccttggacggtgaaccccaggcctccctcaaccttgcccctggnggacaggatttaccccggcaatttgggaaaaggccaaggtagggattcctacattggggaaacctaaaccccccttcttgggggcctgatacncattccccatttgccccagngctgacaacccaatctccccaatactttcaggcctgcnctacaaaagtacctgtcttgtagaaattttacagtctgccattttgggtgcccaccccaatttttaccttttagtaagttggcatgaaattttggtaaaatctgaaaatcacatttcagaataaaacaattgggcaaaactacctaggctttactcttgagtgtctccttttgatagggattgtttctggaccagtttgtctaagtcctggctcttattggttcatatgaaataatgttaacttcacttctttgtatattatgtataaattagaaaatgaaaaatgtatgaataacattgtatgaaataaacctggtcttgtgtttttctctagataaaatacccctctgtacctc

SEQ ID NO: 487743 - DNA, 149 bp, Homo sapiens
tctgatcgtgccagagttcctcagggttggctcaatgcacgctcgtggctgtcagtatcagacgagggcagcttctgcattttctcaattccaaccactcctctccactcacctacccagtatctctactgggtgtcttccagtcatcc

SEQ ID NO: 487744 - DNA, 337 bp, Homo sapiens
  misc_feature (12)..(12): n is a, c, g, or t
agataccgtagnatggttgcaatgataggtacacacacggggagtgaagcagtggcttggagcatatggtaaacgattgttggcttgtcccagccatgggagcatctcttgccactgtggcagtagtggcatgaagccgccaccagggggccacgcaccagtgcatgtggttgcgttctaaactttttggacaataaaatctgaatttcacatacttttcttatgtcataactttttcctctttgacatcttttcactatttaaaaatgtaaaaatcattcttaacatttgggctgtgcaaaaacagctggtgggcccaattttggcctgtatttca

SEQ ID NO: 487745 - DNA, 357 bp, Homo sapiens
  misc_feature (68)..(68): n is a, c, g, or t
  misc_feature (140)..(140): n is a, c, g, or t
agacgtccattcttgcatagacgtccattcttgcatagacgtcccttcttgcatagacgtccattctngcatagacgtccattcttgcatagacgtccattcttgcatagacgtccattcttgcatagacgtccattctngcatagacgtccattcttgcatgctttatctagaacggttctgaagtgggttccctctgctcttaagggcttatacagtgcatgggatggtgtccttggccaacgttccttaagttgggcttttaaatcattatgggtggcttcttcttctctttttctcttcttatctgggctctttttcttcttactcggttcccttatgcaagaagggaggtct

SEQ ID NO: 487746 - DNA, 247 bp, Homo sapiens
  misc_feature (68)..(68): n is a, c, g, or t
  misc_feature (140)..(140): n is a, c, g, or t
agacgtccattcttgcatagacgtccattcttgcatagacgtcccttcttgcatagacgtccattctngcatagacgtccattcttgcatagacgtccattcttgcatagacgtccattcttgcatagacgtccattctngcatagacgtccattcttgcatgatctgaaccagggacccacagcacttgatccccacgcatccggtgccagcgcacgagggcatcctgtatgcgccacccgtgaag

SEQ ID NO: 487747 - DNA, 214 bp, Homo sapiens
  misc_feature (68)..(68): n is a, c, g, or t
  misc_feature (140)..(140): n is a, c, g, or t
agacgtccattcttgcatagacgtccattcttgcatagacgtcccttcttgcatagacgtccattctngcatagacgtccattcttgcatagacgtccattcttgcatagacgtccattcttgcatagacgtccattctngcatagacgtccattcttgcatagacacactctgggaagcagcagcagcttcccacagacagggccacatgaag

SEQ ID NO: 487748 - DNA, 427 bp, Homo sapiens
  misc_feature (318)..(318): n is a, c, g, or t
  misc_feature (422)..(422): n is a, c, g, or t
agacagagtttcgctcttgttgcccgggctgtagtacaatggtgcgatctcggctcactgcaacctccacctcccaggttcaagcaattctcctgcctcagcctcctgagtagctaagattataggcatgcaccaccacacccagctaattttgtatttttagtagagacgcgtttctctacgttggtcaggctggtctcaaactccagatctctcaggtgatctgcctgcctcagcatcccaaagtcctgggattataggtgtgaaccaccacacctgggccagaagacaatttttctatggatggtgggaaggggngacagggagccataggggaggatggttttccgggctggaaactggattccacctcagattcagggcatttagattcttcattaagggaggcacgcaacttaggntcctt

SEQ ID NO: 487749 - DNA, 626 bp, Homo sapiens
cctccggctggctccgcccggggccgctgaacgcagggtgatgcgctggtggtgctggccgggggggtccctgccggggcgcctgggggtgctggtgggaagcctggcccaagtgaagggggcggcatgctggctgtgatgtagccaatgtggctcctggtgaggcaccgttgtggcttcctgctgtgtggtgtggggctgtgctgtgctgtgatgtgtgggcatgcaacgcctgtgctgcgacgcccgaagggcaggaaaaaaaatgaaaaaaagaatgaaggagagagagaagaaaaagcagaaacacacgcacgacccaccaacgaggagagaagagaaaacgaaaacgagaaagaacgagagaggaggagcaacacaaagaagcgagaaaagcaagcaacgaaaaaacgaaagaagaaaagaaaaaagaaaagaaaaaaaaacagaacaagaaagaccggcccaggccaagcaaggcagaaagaaagagagagagagagacgaaagaaaaagcagcaaaaggagaacggacgcagcaagagagcaaacaaaaaaagaaagaacaacaaagaaagccagcgaagacagaaaaaagagggagagagaaagaaaaacaaaaaaaa

SEQ ID NO: 487750 - DNA, 329 bp, Homo sapiens
aaccaaaaaccaagagaggaaccccctcttcattctgctaaagactacactttgtagactgggaatggtagctcacccctataatcacagctccttgggaggctgaggtgggaggaccgcttgagcccaggagttcaagaccaacagagagagaccctatctctccaaaaaccaaaaaaattagcaaaacatggtggcacattcccatagtcccagcaacccaggagggtgaggtgggaggatttgagcctaggaggctgagacctgcagtgagctgtgatcatgctgctgtactccagtgtgggtaacccagcaaggcccttgtttta

SEQ ID NO: 487751 - DNA, 326 bp, Homo sapiens
  misc_feature (3)..(3): n is a, c, g, or t
aangatgagatagatatgttaaaaccaaatagaacctctgaaattgaaaaattcactaaagaaatttcaaaagtagagttggaagctttaacaatagaccagaccaaccagaagaaagaattttagagctttaagaccagtcttttgaattaacttagttaaggcaaacaaagtctctcataaatatagagttatgtaaagtaacaaaacctatgacttactggcattcctgagaaagaaaagcaaaagtaagcaacttgaaaaacatatttgaggaaataattcagtaaaatttccctgctctagctagaacaggttgacatcca

SEQ ID NO: 487752 - DNA, 153 bp, Homo sapiens
cttgaggatccgcctgctgctggtgggatattgagactctcagtgaatcttgttctttggtctcagcccgacagggctcgtcgtgcgtcatggctatgtggtatggaagagacgctggcccagagcattacgctcagcgtgcttagtctcaat

SEQ ID NO: 487753 - DNA, 206 bp, Homo sapiens
  misc_feature (67)..(67): n is a, c, g, or t
  misc_feature (96)..(96): n is a, c, g, or t
  misc_feature (128)..(128): n is a, c, g, or t
gcaccggctcctgctcctgataggccaaggcaccttccttacctaagagctgactttcttgaagagnggcacaggaggagccggcaacctggctgngtaggcacccaggagaaaatctgcagctcagnatcagaagctccaccagcacggctgttgcagagatggggaaactggctgagagggaagggggttgccaaatcaccagc

SEQ ID NO: 487754 - DNA, 510 bp, Homo sapiens
gctaggaacacaagtacaaataaaccaaacccagaaccgatgagtggaagctgccggtgaaccgagtctgcaacacctctcatctttgtacagaccaacagggtggccactaccccaaagtttcacgtatatcatgctcggggtctccagagcgaggtcttattggccagaaagtgactgatagtcataatgtaaggtattcgtgaggaaatatgatcttactctcagagtctcaacaataccctgggtgataacaacgtggctctcaagggaacaagatagctcccaagcaactccagtgcccaggaaagatggtgaagagatcttagcagacgatctatcagttactggggcagaacaatcattgtgactagtcatcttcatacgatagcttagagcagcagactgagaatttatagtgtagcgaagggcagtctaatgcagtagttacttggatccactcttgctgttgagtgaccctgggcaatcaagcttggggatactctagag

SEQ ID NO: 487755 - DNA, 106 bp, Homo sapiens
tactactactaaattcgcggccggtcgactttatgttgtttttattttagtttttttacacaaccgctttttattatcgagtttcagaaacctttcacaagatggt

SEQ ID NO: 487756 - DNA, 253 bp, Homo sapiens
ctagagtatccccggtctatcttgtgcatcgagaaggcataatggagtacgaggaggaggagcgcaagtaagcggctcggcccccggcgggcctgagaccccgttcgaggtcttacgtagtccctccctgaggaactccagaagtgcttcgatgtgaaggacgtgcagatgctgcaggacgccatacagcaatgatggaccccaccgacgcaaagtaccactatgcaggcgctgtattttgactctggccctt

SEQ ID NO: 487757 - DNA, 180 bp, Homo sapiens
ccgacagtccaaggactgaccctggagctggcgggctcccctcggtccccgggtgatcggctgtgcagtgtcgtgcatggcgctgcgtcacccggctcgccatctatgccgcctttgggaggtcataaaatctgaacgctccatcatctggctgaacttctgcctgtcggctagtcgggg

SEQ ID NO: 487758 - DNA, 177 bp, Homo sapiens
atctagaggatcgctgctgctcctcttcagttagcgattctctgcgtcgctccaagtagctgggattacaggaactcttttttagtatctacacctgtgaggactaaagacatcaaaccggtacaggccagaatcccaggctcagtctgtccactcatcaaagaccaggttcaaggg

SEQ ID NO: 487759 - DNA, 492 bp, Homo sapiens
  misc_feature (18)..(18): n is a, c, g, or t
  misc_feature (75)..(75): n is a, c, g, or t
  misc_feature (107)..(107): n is a, c, g, or t
  misc_feature (126)..(126): n is a, c, g, or t
  misc_feature (130)..(130): n is a, c, g, or t
  misc_feature (143)..(143): n is a, c, g, or t
  misc_feature (156)..(156): n is a, c, g, or t
  misc_feature (212)..(212): n is a, c, g, or t
  misc_feature (214)..(214): n is a, c, g, or t
  misc_feature (217)..(217): n is a, c, g, or t
  misc_feature (229)..(231): n is a, c, g, or t
  misc_feature (250)..(250): n is a, c, g, or t
  misc_feature (264)..(264): n is a, c, g, or t
  misc_feature (266)..(266): n is a, c, g, or t
  misc_feature (275)..(275): n is a, c, g, or t
  misc_feature (279)..(279): n is a, c, g, or t
  misc_feature (291)..(291): n is a, c, g, or t
  misc_feature (331)..(331): n is a, c, g, or t
  misc_feature (351)..(351): n is a, c, g, or t
  misc_feature (364)..(364): n is a, c, g, or t
  misc_feature (378)..(378): n is a, c, g, or t
  misc_feature (408)..(408): n is a, c, g, or t
  misc_feature (426)..(426): n is a, c, g, or t
  misc_feature (428)..(428): n is a, c, g, or t
  misc_feature (430)..(430): n is a, c, g, or t
  misc_feature (437)..(437): n is a, c, g, or t
  misc_feature (450)..(450): n is a, c, g, or t
  misc_feature (459)..(459): n is a, c, g, or t
  misc_feature (467)..(467): n is a, c, g, or t
  misc_feature (471)..(472): n is a, c, g, or t
  misc_feature (481)..(481): n is a, c, g, or t
  misc_feature (484)..(484): n is a, c, g, or t
  misc_feature (487)..(487): n is a, c, g, or t
ccattctggatctcagangcatcaccaactgtctacatcagatagatactctgagagtaaacatactcataagangaaaaaagtaatagataaaagttctgaaaganaagcccccttttataaatnaggntttcttgagattnacaagggtgaggncaactcccatgtgggcctctcccatgtgcccagtttctagtttaactacttgccgngngcngttgctatatannnctctgttgacaggctttcnggtactagaatttncntattttacntggnctctcatttgcncctatcggtttctttcttcctgctctttacttccttcgcnacttgcatatgctatggttngcgtagtccctcncttatttccccccnttccctaggtaccacacttatggcatttgnttaggctgggctctaacncncntggctgngatttattttggnatcacagtntccaagcncggnngggccgtcngtntgnggggc

SEQ ID NO: 487760 - DNA, 689 bp, Homo sapiens
cgttcctccttctcgccctcagctctgagccagtgacgggggtagcttttcaaaagccgtcattctaaatggacgtgagcgcactagagtcgcgtggtctactgcgtaggcagacacagggctacacccaacggctcacggaactgtctatcttgtcctatctatctcaccaggctgctagtgcactgtgtgtgtgggtgtgaatgtgtatacatgcccatcagcatttagtcacatgtctgaatttctgtgtccagacgagccccatcaaactagttgggaagggccccagtgaccaagtgtataagcatcccttgaagagggattggggcaggggaggcagaaggggctctccagaccccttttccatgatgacccactccaagatattatgtgtaaattgtgttattatgtatatgggtaaagatgtacaaatatatgtcctctttgtagcagatatgattttatatttataatgtgcatcaacatgtgaaagcaatctaggtcactagcacagaggaagttgccaggaaggtggcttcagcacctccaggttggttctgggtgtcctgctgtgaggggtagaacgggaggctgctgaagtgagtagctgagcagctggagccatcccaagcatcagtgtctcagagtcctcctcgcccgtttcttcagcacgacgcccaaccagg

SEQ ID NO: 487761 - DNA, 1122 bp, Homo sapiens
tcatttcgcaagggatgaggtcccatcccgtggcgctgtgccgcgatatatagggggggccgagatgtgttgtgccccacccctggtgtttcacccggggtgcttttcccaggaggaagacgttttccctgttagtagtccagtcggcgccccctctccccggaggtgtgcccagagagcgtcttcatatttcccctcctgttagtgctacaagcccgccctggggtgggacccccaaatttggttatatgagaaaaaaagacctttggggaaaatacctgggcccaccccctcccgtgattggcccctcgtggagggccttctctgtaatccgcgctgttttaatatcctttgggggagtatcaaagtgggaagctccacttgtactaaaccaccaccgtgtgcccaacaaccacgagccccctcgggaatttttcggaaacgcgcttttttgcgagaatttagagtccattttaagcttattccacggcccattcttcgtgtcacatttctagcctggtggaccccacagggtatgtgtatatgaaacgctgttttagaaatacccgcccccccttatgtgtgtgacaagattatcctcgaagaaaggccacgccttctccgagaaaccccagcggcccggtgaattcctcggaaccccgcgcggggaccccaccacggaaaacttgggtggttggaaacccccacagcggttggaaggcacaccctggcacccagaaggctgagagccctgggcgtgaatttacccatgctctttaagaaattgggatagaggttcccccctggagactccctcggatattctgcctcggtgagaacctccctcgctttcctcccctcgccctatctatccctgcccctgttcccatagaagacttgagacacataataagactggagacccatatttttctcccaagaaacattacctttttccccaaagcccatttataaatctcataatataatgcacaccggctgtggctcccataatatttcaccactccttttggtccaccatcgagggtttttggaaatttccacatccccttgtcccagaattcattcccctaagagtaataataaataatctctaacccc

SEQ ID NO: 487762 - DNA, 346 bp, Homo sapiens
atgctagaaaacactgcctgatacagtaagcatacaataaatatacattgaccaggcgcggatggtacacgtgtgtaatcccagcactttgggaggccaaggcaggcggatcacctgaggttgggagttatgagaccagcctgaccgacacggtaaaaccctatatctactaaaaatacacacacacaaaaaaattagccaagtatggtggcccgcgcctataatcccagctactggggaggctgaagcaggagaatcacttgaacccaggaggcagaggttgcagtgagccgagattgcaccattgtactccggcctgggcaacaagagtgaaactctgtcttgg

SEQ ID NO: 487763 - DNA, 792 bp, Homo sapiens
agctgtggaagctacttgcggggtgcctgtcccagctgcagcctggcagagagctggcacctgtgctggcacctggagctgcccacccttctgcagcagccggcatatctgactgtgcattggccagaccccacactcactctcacaccccttgccgctccatgcagtctcccttggcaggtgtggaatccaggccattagtgtgagctgaacacagcctgccaggtcgagtgagcagaatgagctcagtgggctgaagcaaaaatttgggcaaaggcacgactggctacagaggtttccagccagaaaagcaacaccccaaatatcccataataataggagtgcaaaacctgttgtaaactgtgcatgccagggatctaggttgtgtgttccttatgagaatctagctaatgcctggtgatctgaggtggaacagttttatcccaaaaccatccccagccccatccctgtccatggaaactgtcttccacaaaacctgttcctggtgccaaaaaggttgggcactgctattctataccgctgtaggatgactatagttaacaataatatatagtttcaaaaagctagaaggaagacattgaatgttcccaacacaaagaaatgatacatgtttgagatgatggatatgctgattatcttgatctgatcactatacatgatatggattggaacatcactaggtaccccatgagtatgtacattaattggcaagataaataagtataaaataaaaggcttatctattccccaaaaaagacagcttgaggaagg

SEQ ID NO: 487764 - DNA, 141 bp, Homo sapiens
caagactgactccctggattttactccctatattttattatttaccaacaattagacaattttccccctgccccaaggctgactccctggattttactccctatattttattatttaccaacaattaggccatcttatgtt

SEQ ID NO: 487765 - DNA, 768 bp, Homo sapiens
cccttcggtcctccggatggagttgccgggtccgctcgctggggtcggcccctcccttcgggggcgaggctccatctcttgggtgactacacccccacttcgccaccatactggagtcttagtcctttaaattcttggaatcacttatggggcgctagagagcctggagccgcacagcggggctcctgggtgggctatagagtggggtcctctgggcacttaatgggatttggggggcttctgtgggaaatgttgctgggagctcaactgggatatgtaaaagttcttcgggaaggtgaaggtcaggcacgccgagggggaggaagcgagcggacatccagctgaagagcttcgggttcgacaccaatggctctctggaggtggagtcgagcgtcctgcggctgggcctccgggaggcagacagagaagacctcatgctggtggggttcagtctcaggccgggtgcgggctggcagagttcgttcctattcaagcccgggatttcgcaggactgccctctcgcagaaaagcgagtagcagtgtcctaggtccgtgtacctcatcaacgatcaaggatctgcaggtccaggtgcggaagtatggagagcagaagacgtgtgtatcttacccgggctcctcccgagaatgcaccgtccaagacagggctccagaagccacaggccagcagtcccccggcaagggggatggcggagggagctctgcaggcatgcaagcccaagtgaacaccgcagtgattcaggggtccta

SEQ ID NO: 487766 - DNA, 1008 bp, Homo sapiens
  misc_feature (36)..(36): n is a, c, g, or t
  misc_feature (195)..(195): n is a, c, g, or t
  misc_feature (375)..(375): n is a, c, g, or t
  misc_feature (378)..(378): n is a, c, g, or t
  misc_feature (399)..(399): n is a, c, g, or t
  misc_feature (401)..(401): n is a, c, g, or t
  misc_feature (411)..(411): n is a, c, g, or t
  misc_feature (537)..(537): n is a, c, g, or t
  misc_feature (587)..(587): n is a, c, g, or t
  misc_feature (590)..(590): n is a, c, g, or t
  misc_feature (593)..(593): n is a, c, g, or t
  misc_feature (601)..(601): n is a, c, g, or t
  misc_feature (606)..(606): n is a, c, g, or t
  misc_feature (609)..(609): n is a, c, g, or t
  misc_feature (613)..(613): n is a, c, g, or t
  misc_feature (668)..(668): n is a, c, g, or t
  misc_feature (719)..(719): n is a, c, g, or t
  misc_feature (733)..(733): n is a, c, g, or t
  misc_feature (762)..(762): n is a, c, g, or t
  misc_feature (781)..(781): n is a, c, g, or t
  misc_feature (785)..(785): n is a, c, g, or t
  misc_feature (795)..(795): n is a, c, g, or t
  misc_feature (808)..(808): n is a, c, g, or t
  misc_feature (846)..(846): n is a, c, g, or t
  misc_feature (854)..(854): n is a, c, g, or t
  misc_feature (866)..(866): n is a, c, g, or t
  misc_feature (874)..(874): n is a, c, g, or t
  misc_feature (896)..(896): n is a, c, g, or t
  misc_feature (925)..(925): n is a, c, g, or t
  misc_feature (930)..(930): n is a, c, g, or t
  misc_feature (952)..(952): n is a, c, g, or t
  misc_feature (987)..(987): n is a, c, g, or t
gagggtgacacaccaaaacaaaaaaagaccaaacangttaaaacccagggttctagaaatacaaactcaattcattcaaatccaagcgcacccagaccctggccacaaaccctagtgaggggcatgtcagcgccaagtcagggagagggggcaggagtcactctgaggccaacagagagggtgggaaggggaccnccctagggcccctggggaccaccccccacccaaactggtatctccacaccctcaatgactattaagacataccaggctctgtcctcttggcccccaccccacccctggccagagcctcaaaggccagtcccaaaaggttctcccctcacttgcccaggcttctggcctccctctcctccnccncctccacactccctctgtcantngtagcagggnagggtactgtataagcgcgcagttaggctgggggccaagggggtggggtagagaggggatgaagagaggggaggagcggtccaaggccccctctctccaggggaccccaaactgtacaacacagcncccctatagaaaacacacggatctgagagagtgcactgtaggcataagcngcnatnctggaganctgcngcnaatnagagaacgggatgggctcactggccagctcttggtggggctggctggtaagaganggcagcagtggcagcttcttccaatgggtgaggctgctgctcagcacaccnaagcgggtgctgtnctgcctggcacggtccatgttctcatgcngctccatgctctgtgagtnttcngcagacacancaattatgtggcnggctgttttggcaaggatgggagagagcagggcctgcncaccagtncgagcggaaggnagggtgtngtagttgggctcggctccattnagagctttggtaggggggctgctagggtncagcngccgcgtccgctcctcttggtnctggtccgagttctcgttctcgctgctgttgcgcnccccaaggccggggtcgggcc

SEQ ID NO: 487767 - DNA, 637 bp, Homo sapiens
atccagggtacaagtggagtcattcaggtaaacccatgttattaagggtcagcatgtaccttatatatgtcatttgaggtgtaatggttacgaggatgggactgagattgcgaaatcctggcttggccgatattataagtgtctgtgggcacaatccttaatctgtccttaaattgtctggtctgtgaaatggagatgataaaagtgcctacttacatatgggtataggaatccaagctcagtaatgtgtgacttagctcttatcagactgcagtgggacatattaaagtagtaaataactatgtaattaatctgtagaatattactagttgtgagatcaactttactaatattaagtatctcaactcatccatggtttactgtctatatagacagtcgggatattgccgctttaagtgagtgagtagaaggtggacgtggaagtagttaggaaaacagtctgcagattggtcaacagtggatcaaataatcacctgagtgctgaccggaaactcaaaggtgataagctacttgataagctaatcaatatcaaggtttgcagaatgatatcactcttggggaagaacagggaaaacgaggagtgatcagtatccttcctgtccactgacttcagtcg

SEQ ID NO: 487768 - DNA, 100 bp, Homo sapiens
cgtgtggttctttcttggcagtcaacacagaggtgaactccacaaagatctttccgcagccgggcacctcgacgccgtccacagtgccgggggaatctcg

SEQ ID NO: 487769 - DNA, 231 bp, Homo sapiens
aaatcccaaaatgtgtgcaattactgcaaaccaggacagaccggggcagtgcaaggcccttgaccaccaagtcctccttgatcacctttcccaggttagaaacccctcttcagcctgtgcttcgcatattaccttcatcgtgccgccattcagactgcgccgtttacatcccagtgccacgctgcgtgaatctcgtgtcaatggttttttctgtagtaggcaatcaagctt

SEQ ID NO: 487770 - DNA, 1145 bp, Homo sapiens
cacaatccagcctccagactcacagacattgagaattaagaagacgcttgccaagatggttgaatcccaagcatgtaaaaatctgcatggttcaaacccatcggcaggcagcaaactcgtagcactgcaagcacactgtccttaccgcatggacatggcgtggcacattcagcagtggacatcacaggatgttaacttggttctcagactctttcttcactacgtgttcacaggctgctaatattaaacctttcagtactcttattaggatacaagctgggaacttctaaacacttcattctttatatatggacagctttattttaaatgtggtttaagatgcctttatataagtgggtttatatgaactgcatcaagacttcaatcctgattagtgtctccagatcaagctcatggagtactgaattgcctgttcatcaaaacggtgctttctgtgaaagccttaagcaagcataaatgcagcgcagcagcagatggcagcaaatcgactttgccttttaactgcagaattcagattcgaagtattactaccttgtaaaacagactatagatcgatgatgtgtcgggatactgcttattaatgatagtaggtcctgtgtccttagagatgtgtgtgatgatatccaatgcacattgcacagccgggattcctctgagcggacaacagacacttagaaagaacaataataaatatgcacatgaaacagggaagatataggaggacggaggcaaatgagcacaacacaacaggcagaatacgacccaaaatcgacaaacaaacaagaccatacactcgcacgagaacacaagttcaccacccaacggaacaaaaacacagaaaacagatgacaagggcacaaacaagctaaagcgaaccgtacaataggaaggaacaatcaccacgccgagataagggagaaaacaagagcacagaaaaaacacacacaaaagaggagataagcacagacaaagatcaacgaagaatcgactagaaagaacaagaaaagcgcagaagggaaacataatgataatacagaaacaaacagagaagataccgcgatgagaaaaccaataccaaaaagaagaagaatacacgcagaacctatccaccacctcataagagg

SEQ ID NO: 487771 - DNA, 1604 bp, Homo sapiens
  misc_feature (241)..(241): n is a, c, g, or t
  misc_feature (1284)..(1284): n is a, c, g, or t
  misc_feature (1291)..(1291): n is a, c, g, or t
acgacataaagtccaagcttagacacatcataaagaaacttctgaaaactataacgtacgcaagataaaataacgatcagaccagagaatacaacgatacaatttcattgcaggttgaacatatctcttgtgaacagactgtgatcttcacctagaatactatacgcaggccacgaatagaagtggcgaacaattgtatatgaggtaactgtaaataactgtcgacaccaagcatagttcntactcatccagatacataatattctctgattttaactggcataattaaaagcaagtgcaatataacagataatgagaactatttcctctacaatgacaagtgctacagactggagaggagacattcccatgaagccgcaaagtcacatcttgccttatagaacaatcaaagtgttaaaccaaagatgtctttcagcacaagcaaccagcaattactggagggacaattcagaagactctagggcaatgccagtgcagaggcaactatccatgacaagtgagacatacaagttcactacgatcaacatgatgccaacacttcatatacttattactattctattcatatataacatatacatattaaacacaagagagggcgagccgacatctgtggagagtgttatcctctctcgaaaaggaggtgtctcccaatgcgctatgataaggaccgtataaaccccatgacatctgtctctctgatggctcaccacaacatgtgtgggtctcccccaatatataggggtgggaggtctcccgaatattataaatagaggctctaaggagaccaacttagggccgatatgcggaatttgtgaccaacacgcggtcttcgtagtggaaaaccgagcgggggaacaacagcagtgttgagcgtgaggagcatgaggaggagagagagtcctatgggggtctgggagagagaaggaaaccctgtggaaaagcatttgacgataggagggaatgggttggaacccatttcaactgtttggggggacagccaacaaaactcttaatcggtgttaagacgagagaagaacatttttcaaaaaagaggagtccaaataagtgggggctacagacttcttttcaaccaggtctttctaccacaaacaggtcgaggaaacatcaaacacgcggagcggagttagacaccccccatagcggggtgggacaaaaaaattgcacatgtggcggcgggaccgttgtggaaacacagtgttgtcggtgggcaagtaaccgggggaccgtagtgtccaccgncggtggnacaccagaagtcttttttattaccaccgatcgaacagccaagcagagtagaattaagcaacgagaaagcagcagagcatacaacgaaccgacacgaacaacagacgcaggccgaacagcgcaccacaagcaaccagcagcacacagacacaccagacacacgagacgacagcatcaagccacgcgaacacagccaacacgagaccggacaagacgacccacgaccgcccagcagtcgaacacagccaaacgcagcaccagcaaacaccaaaccaccacgatgcagcaacacagcaccggcaacgacagaacaa

SEQ ID NO: 487772 - DNA, 224 bp, Homo sapiens
tcggataagggccaagctgaggcgagtgcataagaatctgattcctcagggcatcgtgaagctggatcacccccgcatcacgtggatttccctggtgatcctcttatgagtgtgtgaacctggtgaggtggcagacagaagcaccccctgccccgggcaagaaactcccagtgctccaatcaaggttgttgtgcttccattgaggatgcccagtgctggtggcc

SEQ ID NO: 487773 - DNA, 315 bp, Homo sapiens
tgttctgacgatcccaggagctgtttgataaactaaattgactttagcaagtttcaggactcctctattatttttattttttagagacaaagtactgtctgttgcccaggctagtatgcaggggtgtgatctcagactcacagcaacctctgcctcccaggttaaaaccattttcatgcctcagccccctacagtagctgggttatataggcatgcaccaccacacctggctaatttttttatttttagtagagatgggatttcgccacattggccaggctagtctcaaactcctggcctcaagcgatccgactg

SEQ ID NO: 487774 - DNA, 2088 bp, Homo sapiens
  misc_feature (1718)..(1718): n is a, c, g, or t
gttctagaggatcccagaaggctgagctcttccccaggcgatgggcggccaggtcgggagcagcggcttcggctccgatggcttccgggcggtcagttccaagcacaggctctgagaaacgcctcgaaccctgggtatctggtgaccgtctccgcaggcttccgtgagtctccgataggtgtttggggctttggaatactttcagaatactttcccattttttcataaggcaaaacggagtggacggcctttttttgagagaaacagcattctaagagtgtgcttggaaaacacacttttgggagtccacgtggggagtggacactcaggacaggaagcggtggccctaagacctgcggccacccggaggaggcagacgcaggcgatgacctggttcatcatgagaggagctagagttgactcagtcttaggatctcgatggcgtcagaattgcagagggtttctgccagtgccttaggtctaattcagaaagcaaggaaggctgggcacggtggctggcgcctgtagtctcagctacttggaaactgaggcaggaggatctcttgagcccaagaattcgagaccggtctggcaacatagtgagcctccatctctaaaaaaaagtggcaaagctgaggaaatctgtgcccccatcccccgacaccagacaagctaaggtgcattcagagtagggaacgatgtcaaaacctggccgccgtggtggcgcgcattcctctcacaccaccgtacggaggcaggtgacagtcaactgaaatgtccccaaggaccgtgtgaattcggctggcgtggcccagcagcggggtggaccaggtgcggtggcttcagacctgcctcccgccaccccgtcctcccctaaccccttcttgggacctcctgccaatccctgtggtgtttgagtaaagaaagtggctgatggttttacttttttcttccaatattggaaagaacaaactagatattccccttgaacacatccaaattatttccagtgcctgagggttaccgagcactgtaagctcagctcggctgtagctccgggtttctgccgatggcctccatctgcgccgaaagctgaactgagccccgcggtgccccggagccacagcagcaggtgcagcgacaatcgccgtcgtgcgcagtcgctggagtcctggagagccacgctgtcctctgcagacaacagcatcagtccgctgtgccccaatgcatcgacgccctgtggacggggcctgcagtccacccgtggtctgagcttgccgggctgaagctcggctgggacccagggaggggccaccctgggacccacagtctcctcagtcacgtgcagagcaaaaaatgcttcctgtgtttggaagagcaagtgacgcagcatttattgataaaaatggatttttctgtctgatttcatgctgtggtcgttaagtggtcaatgtcttctttttttttttttggacatggagtctcgctctgttgcccaggctgagttggaatggccccaactcagctcattgaacctttcacctcccaggctcaagcgatctcctgcctcagcctcctgagcagtggggattacgggtgcccaccaccacgcccagctaattttggtgtttttacgtacgagacggggtttcaccaatgtgggccaggctgtggtctcgaacacctgaccttgtgatccacccgcctcggctcccaantaatttggtagtttgttacgcgggatcctcagggccttgttttgccccgggtagacgcttgctcggatgagctccggaaacgtccgctgcctggccgtcgggtgttgtgtgcgaggacgtggccttggacccgcgtgtctcgaggtccttggacaattttggctaggggacggttcgtcgaccatccgctgcggtgtgggcgttactcgctcggatagttcgaccggtgtgtttgtgaggaccggttccgtgtggtaccaagcggcgtttgacctttccggtggagtgcagcgtgtggcaccgcggtgcgccccttgggtgtggcatcaccacccatgctgggtgtgtgagttcctagttgcaagaccgt

SEQ ID NO: 487775 - DNA, 545 bp, Homo sapiens
ctgtctcagtttcgggacgatactattcaacccagtgcagatcgtctgtaagatcttaaaagaacaggtcctctgtaacaaaagggaggcaatgaggggcagtggttaggggtgcaggctctgaagtcagatgacccagtctccctcctggctcccctacttgaactgcctgtgtgacctcggcaaggggtatcccccgtgcctgtgccttttccgatgtcctcatgtgtaacatgggaatagtaagagttcctacctttttgggctgttgcgagaattcagtgaggtaatgcacatgaagcactgagctaacaggtaataggagatgctgtatagactgttgtcttcatcactctctttcactcccgtccagttctcaatagcatacacacggctgccacaaatacacagaagttttgggaattagctctgtgagacaggcctatttcagataagaaaaatgaggatcagagaagctgaaagtcttgcggaggacaccccagcaaggcgaattacaggcccagaattctaacgagggcatccgg

SEQ ID NO: 487776 - DNA, 942 bp, Homo sapiens
ggctcacagttgtcaacaactggtacgactcactcatggcacggcgtcatctctcagacctcccactggagccagctctacttcatgaccttttacattgtgaccatggtggtgcatgcacgcatcattgtcgcctttatcctcgcaggccttcgtcttccgacatgaactcacagccgccacagaaccaggactcggaagttgatggtggcatcacccttgacgaccgaacatctccaaagaagacgctggttgccgatcctggagctctaccgggacggcccggggggcctcctcggatgtcaccaggctgctgccgaccctctccacagatggcgagataccagcaacattccatggcgtacactgggacaggcgctccacgaccaaccagcgaactgagcctgaagatgtcccagagagcgagatcccggcgccgccactccacggcgcccgccaccccaccccaccacccacacagcaacacgaccccacacccccaccccccacaacacaccaaccacccacacccaccacacaccacacccaccgcgacaacctgaaacagccacaccagacccgagcacccacattccccatactcccactcactcacccgacagagacagcccgccacacccaccgtgtgaacaccacacccgccaacaccatccatccacacaacaagacaccacacccatcacactcaccacacacgacacacatcccactcactctaccataccccaccccacccaacaccaccacaccacacaggacacgagtacccacaacctgacgcgcaccgaggagggcgtacaccgcagagagacgggaggggacgggcgaccccatgaagcagaacagacgacgcgcgacgcggcaccaccgccggaccggaacgcgaggacacgactcgcggcgggggaagggggcggcgca

SEQ ID NO: 487777 - DNA, 150 bp, Homo sapiens
ggaggagcgtggagcggcggcggcggcggcggcagaaatgatggaagaagcatagcctggacccacgacggcaggaattattggaggccaggactggagtaggtgttagtaaggaaaactagaaaagaggaggaaaaaaacaataaatat

SEQ ID NO: 487778 - DNA, 131 bp, Homo sapiens
taacatgatacaatcgagctcggtacctgaacattcgtgtcgtgacgagaagttatacgaggcgcggcggggctctcctcgtttatgatatcaccagtccgagaaacctacaatgcgcttactaattggtt

SEQ ID NO: 487779 - DNA, 644 bp, Homo sapiens
ggtctcgcatacatacaaagtttaccaggtgataccatttttcacatatacaattcagtggcattaagtacattcgtgtagccattggcatgtaaccatcaccattatttatctccagaactttttcgacatcccaaactgaaactctacccgtaaaacaaacttccctttcctccctccgcccagacccctttaaccactattctactttccgtctctatgaatttgattcttgtaggtatctctataagtggaaacatgcaatattgtccttttgtatctggcttatttcacttagaatgacgttttcaaggttcattcacgttgtaacatgttgcagaatttcactcctttttcaggctggagtgcaatgatgcatgatgtgacagctcactgcagccttgacccccagggctcgggtgatcctcccacgtcagcctcctgagtagctgggatcgtaggcacatgccatcacgctccgctaattttttgtatttttgtagggagggggtttcaccacattgcccaggatggtcttgaactcctgggatcaagggatccacccgcctcggccgctcaaagtgctgggactacaggcgtgagccaccaggcccaaagaaaaagaagaacacaaaaaaaaaaca

SEQ ID NO: 487780 - DNA, 139 bp, Homo sapiens
gatatcaggatgtgtctttgtaccatgagttcgagagaaactacattttagtcgtccacagacgatcgggctgctagtcgcatacccggagtaacacctgccgccatcacaaatctcagcagattgatgataggcggca

SEQ ID NO: 487781 - DNA, 912 bp, Homo sapiens
gctgtttgggggatctggatggttgactcctacgagtcaatgttcagcatcttcggcgtggctgagacctgactgatgggcactagagggcacgccagcccacactccctgggtctggcttcctcccgcaacctcactctagatagagcctgtgcctgcctactagcgctctggggttcggagagttagggaatttcctcagagccaactggctcaaggcttgggaacggttggctgctgccctccagctccgctcatcagctatgtgaaggggtgtgtatggagtgatcctgccgccccctccctgcgtctggtccagcagatctcaaacatcctgatgcccctgggtgccacgtatgtttgtgtacaggtggatgaaactagggccgcttgagttgggagcctgctttcactttgactttcccactgttgctgtgagacaataggacatcgttgatgaggaggaaagttctgcacaatctagtcggtaagcagccacttttccttgagaccaaagagagtgcggtggggactgggggggcgacgagcacggggtcccctgtcttgacagtggactgcttgccctactgcaggtgtaccctaatttgctctggtgttggggaatgcagggtctaaattgacggaaatctgggagaacgggagaacatagcagatctgtagtgtcgaggtgtccggaccatctaaagaagttggcggaaattacgtccggaagatccaatcttgtgggccaacaagtgccgggaccaagtttgggccaaggcgctgaggccgctgggacagcacggtggggtccggtgcctgccatggaggatggggcctgggcacgtggccggaatggggattcgcggagtgcctggccggggaagctggcgaaggcgtgaaagggagcca

SEQ ID NO: 487782 - DNA, 367 bp, Homo sapiens
gatcccctgagttcgccggacattgtaatgcgtatgagacactatcatatattaactgctagggtgagtggtatgaatgcttctctttcataggaggtatagcagttggccctagcgaactcgggggtatgctgttcgaattcataacgaacagggaggttagaattagcgcggtcttggctgaccagacactatgttctgttgagttcagggcgagagtgcgttatatgttgttcctctcaacgattgtagtgttccgggtgttctattattatcgtgttcgtgtcttcagctttcacgaattgtgcggtcgggcctgccgcgtattcgatcgttcctgccttgatactattctcggactcccctt

SEQ ID NO: 487783 - DNA, 125 bp, Homo sapiens
ggaggagagcgggtacgagtcggtgctctgtgtcaagcctgacgtccacgtctaccgcatccctccgcgggctaccaaccgtggctacagggctgcggagtggcagctggaccagccatcatgga

SEQ ID NO: 487784 - DNA, 946 bp, Homo sapiens
cgaaagctcttggactgttcaaatgttatcgcttacagagcacttgaacgcattgtgtgtacactttgtacaacgtatgaccagtaaatggaactggtcaactctgatagtcgcctcaacatggaggtgagaatgcatcgagggtaagactgtgtccagcagtgtttacaaattctctcttctgagtactagtgtccatgtgctcctcatctctcgaccctgttgttgacaatctcaaacgttcatgatagcactgactctctgggttgggttaactatgcccggccgtccagtaggtatttagaatcttcattatcttcagcagaggaattgttaatcttctcacttcatctgtgtcttgcgagttagctcaagttgatgtcatcactgatttcctaaactagaaactatggaagcatcttgtgacttttccttgttctctgatggattagcttaatcaccaagtcctgtcaacttctgagaatgaatcgtcaaatttgcttcccttctctatctgttgcccctgatttgccttaagttctaggcctgagtgatctcccagcctgtcgttctgtctcctttggttcagtctttatacgtgctcttgagtaatctttctgaaatttaaattgatatttacgcccctctgctgggaaaactttcactaggctttccccattttcctactctttaaggaattgatttctgtaagccgtcagataagaaggacctttatgatctggccatattctgaaatagcttcaatcctctctcatactctgtcccagtatacatctttcctgtcttattctgaacatttaaaccagttggtattctttaaatgtctgtgcctctccggggccaggccggggaaaatccaatccttcggagagggaatgggcggtattaattaagggaagtccccgacggcaaataagggcgaaag

SEQ ID NO: 487785 - DNA, 151 bp, Homo sapiens
caggattcctggctcctggagcccgttctaacatccagtaccgcagcctgccccggccagccaagtcaagttctatgagcgtgaccggcgggcggggttggaccttgcccttttagcagcaggatttacccaaggtttcttagaaccaaga

SEQ ID NO: 487786 - DNA, 289 bp, Homo sapiens
  misc_feature (169)..(169): n is a, c, g, or t
gtgagaacatggcagagctggtgctgctgggatagggcaggcgcccagcattccagcgtgctcttgtgctgggcccaggcgcaatatggaaactggttaggttgtgctttgatccacacattctcctgcagtcgaatcccccttttctaccccacatctctatctagangccagactgcactactcgcgtccaagaacaagtgtcaatgacgtgctaatcacctaagttaccccatcttatgagctctggagactcaactaagcagcacacagccagtggatccttcag

SEQ ID NO: 487787 - DNA, 152 bp, Homo sapiens
gaacatcttattgttgggaaaagggctttaaatttgtctgattttatttttcaaagttttttcatttatgaaccccttttccttgggatattatttaaggaaaatctcttgaaaaaaaatttttatattaaaaaagatttttttttgcttta

SEQ ID NO: 487788 - DNA, 296 bp, Homo sapiens
  misc_feature (96)..(96): n is a, c, g, or t
tcctgaaagatgaatgagaaagctgcccattctcaagactcatctgcctagggagggtcacagaggcaggatgtaagacccactgtgttgatttcnggcccaagtcatgaaaatggagccagagagcctggacatcagggacttttgcccacagcacatgacaccgacagcggcccagcaaaataacaagatggggaccagcacagcaccagaagccatgtgggacaggtgggctttgttcattcaagccacggggatgaaagggatcttgggcattgcagagattttaaaaaaaa

SEQ ID NO: 487789 - DNA, 158 bp, Homo sapiens
cccggggaaaggggaagacggttgtaagaggtgaagggggcaaccgggtcgggtttggttaaactttctgggagatggccaatggggttcaccgtctgggggggctgcttattagtctcctggtactacggggggcaaagtagatcacatagtgtcat

SEQ ID NO: 487790 - DNA, 162 bp, Homo sapiens
tctatgaggatcacccctattacaccacgacacttcattttggaaactgtgttttggattctagaattagaatatgaaccacagttatgaaatacaggtctagatcacaacctggtctgtcctgcggaggactagagccaactagggctgctgggaaaaaga

SEQ ID NO: 487791 - DNA, 941 bp, Homo sapiens
gagtttgttgcgacacagcccggaaacttagtttggggaagtttataaatttttgaaaggcaatcttgttaaccgggtggccggagcataactgttgcgctgcccagaaaccgcttgttggggaaccaagaattggcacaaagtgccgcccccccttttttgggtttttcctggttataaaaaagtttgtgattgtgagaagcggcctctacttgggtccgcccaccctgggactggggatccattgggagatccgaagaccaataaattggattaagaattagggggagggatgtaatttacccagggatttcatgcggacggggatctcagaatttcctcgggacccattaatgagtggatttcctgccccccaccccacaccgccaacttttcgcttggtggaattttgtttaatgtgacaacctgttaattggggctaattccccaagatggttgtttgtttttcaccaattttttgaacgagattggggcccccctatagagagtcacacgcagtgggtaattgttgtttttgcgctttttttggttaaaagggagcccacagtcgaggagcgtggagattaacgctggagccatactccctggagaggattcaagcgacgagtagatgggtgacaccattttaaggggaaagggggggtttgtttaaaatagtgaaataccagtaagtcacttctaaattttaaggaacaccacaaattgggagttgaagaataaagtaaggtgttcccctatggcttatttgcgcgttttctttgaaaaaatatcaacccttttgtttaaaaaactatgcatggttgtcccttttcctcttcaagtaagattttaactgggtttatcacttaattttttaattgttaagataaaataagattttgactcttgtgttaaagtgttacccaatttaaagtttttta

SEQ ID NO: 487792 - DNA, 142 bp, Homo sapiens
tttttatccccagccccccgtcctcccgccaaagggtccctgccccgagtgaccccccatcccctcccatcccccggggggtgtgtgtaaagcctcagggctgagtgcccaataaaggtgggggcaaggctgcggtgaggca

SEQ ID NO: 487793 - DNA, 139 bp, Homo sapiens
tagaaaaacaaaaatgttagctgggcgtggtggtgctaggatggtctcaaacgcctgacctcaagcagtcgcctttcaaggtcctcccaaagtgatgggcttacaggcataagcctgtacgcccggccagaaaaagcca

SEQ ID NO: 487794 - DNA, 220 bp, Homo sapiens
gggaagcggcggcaggcgccatgttcggccgcgaaggtggcaagaagaagccactgaacagcccaagaagcaggccaaggagaatggacgaggaagttaaggctttaagcagaaacaaaaagaggcgcagaagaaacttgaggagcttaaagcgaagcccgccgggaaggccccttgcacaagtgtattagtatctgcaatagtagctcttcttctccta

SEQ ID NO: 487795 - DNA, 794 bp, Homo sapiens
attaaaagccccaggataagcgtggtggttcacacctgtaatcccagcaatttgtgaggccaaggcgggaggatcgcttgagctcaggagttcgagaccagcctaggcaacatagtgagaccccacccatctcaatttaaaaaaagagagaaaaaggccaggtgtagtggctcatgcctgtaatcccagcactttgggaggccaaggcgggtggatcacctgaggtcaggagttcaagaccagcctgatcaatatggtgaaaccccatctctactaaaaatacaaaaattagccagtcctgatggcatgtgcctgtggtcccagcgacttgggaggctgagacaggagaattgcttgaacccgggacgtggaggttgcagtgagccgagattgggccactgcattccagcctgggtgagagagcgagactctgtctcaaaaaaaaaaaaaaaaggagagagagagagagagagagagaaagccccaaaaatacctggggcctttacaacctactgggtcccagaatcgtcttatggtaaacccaaagccaggtcttcgggttcgaaccagtcaaagtgggtactctaaaaacgttaaatagatgattcaacaatcgtgtggggggtttatctctattagaaatcccctttccagtacaaggaactcttctttttttcctaaagtatagaggccttcatagccataaattatttgggcaccaagcattttagtgggcacctaaagtcatggggctgtattcatataccccagggcaccccttgctccctagaagg

SEQ ID NO: 487796 - DNA, 307 bp, Homo sapiens
gtcccaattactctggaggctgaggcaggagaatcgcttgcacccaggaggtggagggcagaaagcgtggtggaagggagctgggcaggacagccacaggcaggacagccataggtggagtgaggtgaaggggcaggtcccagaagtaggaacaaaggaatttggagtgctcagagcagcctgcaaggttcagcatggggaagggaaagtataagaggggtggacagcaatgggcaggaaggaatgactgcccttaaagccttgaacctttgttgcaaaggtgtgaatcttgggccaggctctttac

SEQ ID NO: 487797 - DNA, 851 bp, Homo sapiens
ggtcaggagggacgtaagccgggctcccccggcgtgttgatccgaacccgcgcgggaaaacttgcgcaaaccaaaggagggaagagtcaggcagcccccagccccccagggaggcccaggtgaaaaacagacgccggcctcgcctctcccggtgcggatgatcccggcactcccagccccggccctgctgccccgagttcggctccctcagccccatcatcctctctggtcatctaagtggactgcagctgctcagggagcatgtcgcgaaggatagggaaggacagggggtctgcttccccagtcagcccgtccagacccccagggctgcgtaggggccggactacccgtatgcccccatcctggacttgctgcacccgtgaggtgcgcacagcagggtaacacaggagcaggagtggggagcaaagctctggcatagcagtcatccatctcataggtcaccttccttgctgtcctagggctgcagatgccagggtctctgaggccctgaggtcctgtctggtggcgacggggcttacctcctatccacgtgacattacactgacccggctgagtctagaggcacacatgatacaaagcagaaccctccgaaagacaggcgacgctcaggccctcacatggtcacggctgcttatgctctgggcccagcctgggatttgcctcagtcgccattagcgtgagtcattgaggaattcaacagagggtcttttcaaggttccactcattgtctttacctctaactggactttgagtacaaacaacggaagctcctttgacttccgtctgccgaacctggcaatgcggtgattccctggaaccgttgaaaacca

SEQ ID NO: 487798 - DNA, 224 bp, Homo sapiens
tttaacaaagtaacttggattaatatatgacaaaatgaatctctagtataataaaatgtacaatctggatttatttatttacttagagacggttctcgctctgttgccagactggagtgtagtggcgtgatctcagccaaagtgctgggattacaagtaggagccaccacacagggcctagttactggtttgaataataacagccctttcccgaaactcaacca

SEQ ID NO: 487799 - DNA, 226 bp, Homo sapiens
tgggatgttgtgagctgggtaggcagatcctctgaaggtgtctgctaaatagttattattatcttaaattctcatttagaaagtaataccaatttaagggccaggcacggtggctcacacctgtaatcccaacactttgggaggctgaggcgcgtggatcacctgaggtcgggagtttgagaccagcctaaccaacatggagaaaccccgtctctaccaaaaatcc

SEQ ID NO: 487800 - DNA, 124 bp, Homo sapiens
  misc_feature (1)..(2): n is a, c, g, or t
nntgtcatgggtggatctatgtaatcacggaggccagtttgtccagacaaagttgggaggtttaatttccgtggtctcttcctccttggatagtgtcttgatgatctccttccctcttgtgcct

SEQ ID NO: 487801 - DNA, 262 bp, Homo sapiens
gaggtgggttcagcactcacatttcaccctcaaggtcagcaggggggggtaacagaaggctcagcaatctccccccaaggcatctggcttccttccgcccttggggcttcgtgtatggtcttccattcaaaagtctcaagcctcaacgtggtctgctcagtcctcacggcagcaaccttttcaccccccaaagtttttcatccatggcaagcacaatcatggcaaccaacccccatcattgtggtgggggctgagcagcaag

SEQ ID NO: 487802 - DNA, 253 bp, Homo sapiens
accgaattcctaatacgcagttataatacagtaatatatacttgaaaattgatgatcttaaacattctttccctacgcgcgcgcgcacacacacacacacacgcgcacacacacacacacacacacttcactaatcaactatgcggggtgatagatgtgtaattctctctctttttgtgccatgcccaaggtatgtggaagtcccaggccatggagtgaacccaacacaacatgtcgcccgtaatgagggttg

SEQ ID NO: 487803 - DNA, 208 bp, Homo sapiens
aaaccaagatggaacctgaaagttaatgtatccttgcttttagcagagactcagtttctaataaactagtccctaaggacatatgccgcaattgagttaatttttacctttttacccctattggaaaactaaccatgggtgctggcacttataaatattactcctccggaactccagtgttggttaagttaccaggcttataccaggt

SEQ ID NO: 487804 - DNA, 904 bp, Homo sapiens
cgagaccaacgagagaacaccgcctgcagctagaacagcctggtcaggagcgtaacggagtggtgcgccaacgtgagaggaaacccgtgcgcggctgcgctttcctgtccccaagccgttctagcacgcgggcaaaaatgctttctgaaagcagctcctttttgaacgggtgtgatgcttggaagcattttctgtgctttgatcactatgctaggacacacttaggattggctcatggaaatagaatgcaccaccatgagcactcatcacctacaagctcctaacaaagaacgatactcttgaaacactttcagaggactgagcgcatggcagctcagctaagagcatttcgagctatactgtattatccttgctaaaaacccaacagatgtgagctcttctgggctgcagctaacaggacgacttggaccaacacactgtgacacaagcagcagcttcttcagcttctgacacaatgttaaagctgtcctgacgctcacatctaactactggacacaaatgacatgctggttaactgcatgacgaaacagcttacaacatacgccttctgataagtatagcagaccaatacaactggcttcttccttgcacgccccactacgtttgctatcattgacaacctaaagtactcctcgttacccacacggcatccatcaccagccctttctactctaggccacactatcaccatctggagaccttgacatatgctgggtactggcaaggaggcactcgtccttacgtgtacaatcactgtacccagacttcacagcccttcctcaataatcccagaacagtgtcccgcaccgcgaacggcatgcatctggacacatatctgcccaatacccagctcccagcggccctcacatacgccggcagcatc

SEQ ID NO: 487805 - DNA, 439 bp, Homo sapiens
tagaatcaagctatgacattgtatacggtttcactgtactttgatctagaccaatattgctgtccaaccattctttagacttactagagcctatctgatgatccagaatttcgttgccattgctttcggtgtttcagacataaagtccttgcccatgactatgtcctgaatggtattgcctagtttttcttctagttttttgatggttttaggcctaacatttaagtctttaatccatcttgaattaatttgagtataaggtataaggaagggatccagtttcagctttctacatatggctagccagttttcccagcaccatttattaaatagggaatcatttccccatttcttgattttgccacgcttgacaaagatcagatggttgtagatatgtggcattatctctgaacgctctgctctagtccattggcctata

SEQ ID NO: 487806 - DNA, 2069 bp, Homo sapiens
  misc_feature (1)..(1): n is a, c, g, or t
ngagttgagttgattgttttgtgttgtcatggtgtctttttggcggtcgtcgatggtgggcgttagtgcgcctcatttcggctgggctgtgtatgtgggtgagtcggttattgtgtctctacgtccttttggatatgtgtctggatcttgatgcgtctaggtttgggtggtggtattggtgtgatgtgtgtgattggttttagatgtctgatttgtaatggtgctggttgctgtggtggggtgtgtgggtgtgggtgggtgtgttggtgtgagtttgtggtactgacgacttctgtggcattggcgtggtgtgtgttgttggtgttgttgtttgtggttgtttgcggttggtgtgggtgtgggtggtgtgttgtgagcttgtggggttgttgttgatatgtcttgtatgtgtggtgtaccagcgcgtattgcttgcttgtctattgatgactaagtgctgtgtaggtcactgctgctgagtggggtggtaggtccgtttccgtttgtgtggtgtggtgttgtgtggcgttcggttttttcttcgtatgcatccaggatgtatgtgtgctgctgctcggctgtctactgtctgaggtagtggtgatgggattgtaattgttggtgttgattttcttttctgtcatacttgtggtagtgcatcggaggtatttgttgtctgtcgcctgccctgctgctgatcggttgtagtttggtaggttctgtctggtgtggtcgtcggtctgcgatgagagtggggaggagggggtgtgagcgggggtggtgtggggatgtggtggacagtgggtcggtagtctgtgtgtggtggtgtggggtggttttgtgtgttgtgggtgttgtgtgggcgagtgggtgcgaccactcgatgggtgctccttgtgttgtttgctgttggtacgtcagcggcggtcggcttgaggctgtttgttgtgttttttgtcgcgtagtgggtgactgatgcctactgcctcgttctttttcgtcttgtctgcgtcggtggggggaagaaggaagatcgcaagaccaggctctattggggtatgtcttcgacatgcatctatcatcgagcgagctagtggattggtggtgtttgtttgttggttttggttgttgacaggatgttagtagattaatgttgttggtgatttgtggtgggtagtggggggtatagagacgggcgtttcacacccgacacgtacgtctacatgattacatctactgttgggcgtgagtgtggagagtgggaggtggtgtggttgtgtgtgtggtgtgtgcggagggacggtgacggggattgtttgttggttttataagaagacaacatcaccactcaccacaacaacagacgacggcgtggcggttcgtgtgtgtttggtgtgtgagtggtgaacagagactaaaacgcggctgtgtgtgtggtagtcttcgtatagaaggttgtagcgtcatccacgcacacaacacaccgccacacacacaacctacgcgcgtgtcggtacgattttggtgtgtgtctcgtctctctctcgctcttcgttgtacactatagtcacactactactcgactctagacgagtagtgtatgttgttgggtcgctgctctcgcgatgaacactacacacacacgcgcgcgacgacgaggttcgtctcctcgaccgaccaggtggtgtcacacacacacacacatggtgccaaccacactcactcacacacacactctacctcacgcacgcacggtggtggtgtgtcagcgcgctagtagtggtggtgagttgctgagttgtgtgtgtgtatgtgatgtgtgtgtgtgtgtatgatgagatgtgtctgttctgtctgtgttgatatagctgtctgttagtcgccccacaccgcgaagatgagagagtgagtgtgttctctcttcattctcagtgtgtgtaccacacacacagagattgatgtgttatgttgacttctctctctctgttgctgtgtctgccacccaccacacaataaagtacaagataaataaaattgataatagaataatatatatattaaagtatata

SEQ ID NO: 487807 - DNA, 890 bp, Homo sapiens
gggtttgatatagataatatgttgtgatgtaaattgatggccgcctaacgatagaggatgtcacccatgcgtagggtgtaacggagaagatgggtgtaaggtcgtacaggagggcttccatggggtgtggaagtacgctatccctgcgtagtgcggaggggtacgactgttcaagacttgttccgtggctccgtgactccactagtaagcaggatggcgagcacggatgtagcggatgagtgagggagataggtaaaggacgtgcaagtaacgcttgtgatgggtctgatctctattgcagggagggaaaaacgtcacataatccgcggagagtcaagccgaaatttcaactataagggtgctacaccataaggtctacgatttcgaaccatagattgcccctcctcggagtatgagtaggaatagagtgttaatttcaacttgagtggagaaggaaacagactttcattgtaacccaaaaaataggcgaattgtgtgccttaggtggacccagatttcaaaccagttgttggttaggagtagatgggggtcctgctctaaacgcataaaggaaaaagggtttagggcacatgtagggcaggtgttccacacggaacatcaggtgcctcccgaaaagttaatatgggcacaggggtcttcctaaggcaaggctagtttcgcaccgttgagtggaactttctcgataggcttcccaattagctggcgcatgcccttaatttggataaaaaataacttttctcataaactccaaacgttctaactctctcaagctatttgagcttcttaatcatggaagttcacttggttcttctccatttaactcacacaattatacaagacgttcccaagggtaatgtacaccacacgcg

SEQ ID NO: 487808 - DNA, 884 bp, Homo sapiens
  misc_feature (329)..(329): n is a, c, g, or t
gcgtgagtattggtgctgcgttgagcaatgtacgcgacgtagtgcactgcccgttatcttggccaccgtacatctgtggatagccgtgctggagcaagattcgttaaagcagaggcacatggacagtttctgcatggcggctgctcgtctgatgccgcacgagacgtacactcttatatcaggggagacgcctgctgcactcttgcgtgtaccgcggccccaagctccagagggacggttggtgaaccactatcgaagcaaccagatgacacaggagaaactgacgcgtttcaggaagggtcatccaaccctgaccccgcaacgagctngttgtcatacaagttctctgagtcgagatgcacggacatgtcgccatgtgtacagatggtaccctagaccttgctctgatatcgccacatccatcgagcaagtataccatatagaaaacacacgcacatgcttaattaacgaaatgacatcccagaggggaatagtgagccacgatatggcatgcataaatagatgtggacatatggagactcaatcgagcttgaagaacgttgggtttgccaagccagctgggagagtctttggaggcatacaaaacatcttgtgtacgtctacattcaagccatactcccctggtacacagcatcgttcccagaagtattcagcattcaattgcaagattgctttacacgttattactattgtacgggacgtaattggtagtcccataccttatcgacaacaggtagtggctatgtttagcatacctatagaacgcggggtcaatcttggtgtcacccaataggttatgcagagctaacagaatatacactatgcacggcaacgttattgtatcagacaccttctgtttccgc

SEQ ID NO: 487809 - DNA, 252 bp, Homo sapiens
acagaggcacaaaggagggattaaaggtgaggtgagcagatgaggaagcagaaggctgatgagaaatggaacgaagaagggagaggaatgtccagacccagagagcatcagatgagcatgaggagcaagagcctgggacaggcaggcacagattggaacgaagaccctgcagccacgcaccatctcacagtaagccatacatacggcccatgcacgcgagcctgctcaactctgggttttgggcctctcata

SEQ ID NO: 487810 - DNA, 448 bp, Homo sapiens
aatcatggtcttaattgcatgtagttgatgtgtggtagtgattgttgagcctgagagaggttgaggctgagtgagccaaggtcatgccatgactccagtctgggtgaagggtgagatcctgtctcaaaaaaaaagaaaaaatggaaaagtttctttccctgcaaagtggcttatagttgttggtttgtccaatgttggagagcatcccatttagtcctcatattgcccattagcatgtcattcagaaacgtctctttttcgtgaactggctcaatgaggagagctgggcagatgtcctgcaggtgccttgctgggtttggaggctcgcaattcactacagcagctgagtcgtgcctaggctccagtctaccaaagccagtctgtatggaccatgccccaaagggttggtgggtaactcctcgtatgcggagatgagagagtgtagaaa

SEQ ID NO: 487811 - DNA, 117 bp, Homo sapiens
cagcgccagggattcaatcaaccggggtttttgcgagatgactacaatatacgaggatgaagatgtaaaaaaagccataagtaagacttcctggagaacctttataatgacaggatg

SEQ ID NO: 487812 - DNA, 420 bp, Homo sapiens
ttattccatgaagagttttaaagagctgcaaagcaagatcctgtcaatctaagatgagacacagttccctatttaggagaaaatacagttacatctccctctcagggccttcatccccacatctcttgtacaggaggccgggctccgtggctcacgcctgtaatcctagcactttgcgaggccgaggtgggtggttcacctgagctcaggagttcgggatcagcctgggcaacgtggcaaaaccctgtctctaaaatacaaaaaactagccgggtgtggtggcacatgcccgtggtcccagctacttgggaggctgaggcacgagaattgcttgaatctgggaggcggaggttgcggtgggctgagattgtgctactgcactcagcctgggcaacagagtgagactctgtctcaaaaaaa

SEQ ID NO: 487813 - DNA, 984 bp, Homo sapiens
cggttcccttttaaaaatgtgattgttaacctgcctcttgaaagattcaaccgggtgtggtggctcacgcctgtaatcccagcacattgggaggccaaggcaggtggatcacctgaggttgcagtgagctgagatcgccccattgcaatctagcctgggcaacaagagcgaaactccctctcaagaaaaaagaaaaccatcctggccgacatggtgaaaccccgtctctactaaaaatacaaacaattagctgggcgtggtggcaggctcgggaggttgaggcaggagaatcacttgaacccgggaggcggaggttgcagtgagccgagattgtgccactgcacttccaagccctttgaaggaacaagaaggggaagactcccattcttcaaaacaaaaaacaaacacaaaagaggggcacaatcttaaacacagggccaagttagggttaagccacattacaactctttgtgacaccaccgtggtgctattacacacatacacttctcataagtggaccccccggggtgatactcaagggtatttcaaccgttggttgcaccagagagggattttcagagcttaagtcggatcatatagccaaggactatggacaacaaatcctgagggacttatccacgaacaaccctctataaccaacgtggccaactaagaacaacacaaaagagcacacgaaatattagcgcagagagtaaggtggacatacaaaccctgtaaaaattctaaacacgtgctaggacgaaagcccgcgaaccaaacaggcactgacacggggcccacccaaattgtgaacagaacaccgggggccacaaaccagagacaccagtgctcacctacgaccaccatagagaagacggaggaaccgcggaaacaaccaacataaccgaaaaagctaacaacacatgacagaataaccgagggccacaaggacgagaatggtcgtaagcacaaagaaaagccaag

SEQ ID NO: 487814 - DNA, 244 bp, Homo sapiens
cattgcataagcgtatgaggggtaggcatcagggatgaggccccaggtctattttcccatcgatgaggtgggtagcggcgccttccctgataagggcactcaggggaagatacacttttgggggaggatgccaaggtcagtttgggacatggtgagtgagaggcgcctagtgacatctggtaggcattttgattgatactgagatgaggttccagtgctctgggccaggacgcagaagagtgag

SEQ ID NO: 487815 - DNA, 543 bp, Homo sapiens
ccagattgtggcttatggacgctttaagacactaaagagaccacatggtaataaagctgagtgcggtggctctcgacctgtaatcccaggcactctgaatatgctgacgcgtggcggatctacaacgtcaggagttcgagaccagcctgtccaacatggtgaaatcccgtctctactaaaaatacaaaaattagccgggcatggtggcatgcacctggtaatcccagcgtactcgtggagtgctcacagcatggtatatactcacttgcaacttgtggacacaggagtgtgcattgagccaagatcgcgccattgtactccagcctgggcaatggagtgagactccgtcccataaaaaaacccatgaagaagaaagaaagagagaggaaggaaggaaggaaggaaggaaggaaggaaggaaggaaggaaggaaggaaagaaacaaaacccacatggtagcactaagcctaggcgaggacccatcacctttaggcttaatggggtcttggcctccacagcaccagcagagggcctagaggtgag

SEQ ID NO: 487816 - DNA, 146 bp, Homo sapiens
caggacagcctcctccttctattcagaaccaccctttgagccctctgtgtgaacatatgcggcgggctgccgcgcgctgcttgccttggccaggtggacgcgaaccactcagagtttactctgtacgaatcacggctgttggacat

SEQ ID NO: 487817 - DNA, 628 bp, Homo sapiens
cgggggggtggggggtttttaaacgctaaaacagccgcaaaacaggaaggtccccccatgcttggggtcccttattcccaccggggggtttagggtcaactttctagtaaagttgaggcccggaggtttggggggattggcggtcccagcacagatgccagtgccagtgatgtccacggcaatttcgccttcgagggcattggagatgaggttttgttatttccccggttgggatgtttgccctctaccccagaggaatttacaaaaacttgccctgggcctgtgtcccccaagaaaggggggggggggttttttcctttttttttccaaccaaccccttttttttgggccaggggcctggtttcctccctttctttgtccccgggggggggggcacaagggatggcccctttttttttcagagggggccctcgaggccaaattggcatttggttttttgcccaaagtttaagggcccatggctgcctcccttgggggggaaccatagctccctttgggcggtttttggctttttggacccatgggccaaaggccaaggggaggggcaggggtttgggtttggttgggcccggttccccttctttaaattcggccgggttggggccta

SEQ ID NO: 487818 - DNA, 389 bp, Homo sapiens
gcggaatgcatcctcatgtgagagccccaatcccttgtgcaagttgtgtcctggtataagacatcatccagccacttgtccagggagcacatcccaatccagttcctgaccagacaaggatctgcccctctttccagctgggtgacctggtatatgttagaaagttccagaaggaaggactcactcctgcctggaaaggacctcatactgttatcctccccatgccaaaagctctgaaagtagacagcattcctgcttggattcatccccctcacatcaagaagaccaacaaagcccagcaagaaacatgggtccccaagcctgggacaggccccttaagctgtgtttaagtcgactgaagccgtttaattaattgtttgcatttttca

SEQ ID NO: 487819 - DNA, 1910 bp, Homo sapiens
tcggggagagctgttctggtgtccggatgtggtccatggtaggtggttgagctcgaccattcttgaccggcaaagctgctgctcagtgtcagccgggattcctgcgaggcatccattgaggccagtgacatccggatggtggagtagtgaatggagggtggagtctgaatgaggttcagatgacctgaggaaggcatgcctgagtgaactgcgagtgtcgtggagtggcttgcgtccatagttcctccttagtgccgtggatgacctgcacgacaggacattgcgtcctagcgttagacacgagtcagaacggatcgtgcgtgcgaagaaactgagcgtgcggtgatggctcgagttacgccctcgccgagcgttcaagggttcgaacttggggggcacttgggatcctcatggcgtcgcggggcaggcatttgtccatttggctactgtgattgcggccaaggtgtcgaagtgcgcccgccggcggacccttggggcatgattatccggccaatcccctcaggtcttaggcggcgttccaacgcttggcccgttgggcattgcacgtcccatttacgtagtggccattcctgttgctcgttgccgccgtcctgccgacgaacttgtcctatttttgtcggatgtggggcctggacacccggttgtggcgcggttccaaattaaccaggtttcgggctggatcctggaaagagagcggtgacctcggggtcgatgacattaatgttatcctgacaggaacacgccatttaaccccccgaaggctttgtacacacggaacgacgtctacgcgttgtgtggtggcatacccaagtgtgcggaagtacgcgttacccacagtctctataaccttcgtgtggcgattttgccgggggcaggaaaaccccctttctctggagggtacccctctatgacccgaaggaggggccaccacgaagcggacggaggcgagtccgcgaatggggcaaaagacccctgttgagaccctggtgaagcggctcacattgcaaacaggccgcgagggacagcactaccttacgcacacatcactaccacgcgcatgtcaaaccagcatccattcctctgaaaaatgcgcgcgcttgcaacacgctggtgtgcaccgacctagacacgatacccttcgggggcgactccccaagaaccattccgagcacgacaagggaaacaaactccacagtcaaaacagaggtcagaccgaaaacatgagtagctcgagagcactccacaacgaacgtcgttggtagaccattgttcgtcctcgccacacgaccactaccggagccacgcacccgagaagcatattacaaggagcgcggttcccccaaagggcggcgagagacaagttctagccccggaccacgacgcgcccaacaccgctggtgcccagcgacacaggagcggcgcacaaccaagcagaaaccaggaccgcggacaatacacacggagcaccaacagacccgctgggagaccccatatagaggtcacggcccaacaactaaccccagcgggcggggcaggcggcaaacacacccgccacggcggggggcacccaccaccaacacaaccacgcgacgcggcttggacgagcaacccgatgaggagcgacgacgacacccaccgccggacgcggtggagatgagagcgagctacccccgctgcgacgcaaccgcaacacgaacgacggacacacccacacacagccgagcgctcagcagagatgaccagctcgacccctaccgctcgcagcagaacacaacgaagacacccatcacagagacgagcgacacgcacccacccgcccacgaccgccgccggagtcgaccgacccaacacatccagagcacacgggccgccacggagcacagcacttt

SEQ ID NO: 487820 - DNA, 134 bp, Homo sapiens
tccgtcaatctcccgagtgggagtgaaacaggatatgcgccacacatattactgtttgtatttttaatagagaggtgtgtatcaccatgttggccaggctggtctcgaactcctggcctcgagcgatccgcccg

SEQ ID NO: 487821 - DNA, 446 bp, Homo sapiens
tgctgacgtgggtcggtacacagctgcaccactcaccaatcagtttgtctgtgcaccagtccatggacatgtccagcactctactgcaaacaagtctgttcattgtgaggtgcacaagcatgtggcattgtgtgtgttactgctggatgagtcacaaagcagcagcaggaagataagtaatctgtgcccactgttacattaaataattcccattgttgaaatgccctttttggagcaaaacttaaccaattcaataaagagcctacgttgggaacccacaatctgcactgcccaatcaacttctcatcaatgcttttcccatcacattctacagtcacatgtgtaatggcgatctacagttcagacgcaagcaacagctggtattcatgttcgcaccaaaagctatggggtaaggccaagctagttctgtcaggccctccaacccc

SEQ ID NO: 487822 - DNA, 155 bp, Homo sapiens
aatcctctaagctggacacctggtcgtatcaaagaccatctagcagagtggccgattggctctttctaaactgggacatgtcgtgcttgactgaaagtggatcagatgttagatttaggtttcgctgaacacagttgaagatattattcactgaa

SEQ ID NO: 487823 - DNA, 442 bp, Homo sapiens
tcgacgaaattatttgattcatttgatcagacacaggaaaaccattgatataaatgcacatccattcacaaaatgttttaaaaaccttaacaaactacataaagaaacttccttaatctaataaaatgtatctaccaaaaatgcagagtaaacagcatcctagttaataattagacatttaaagtcagtaacaataatgcgttctattattacgtctactcaatattattctagaggttctaaccatggcagtgagacaagaataggcagtaaattagaaacctatattcaggggccaggcgccttggttcacgcctataatcccaacacttcgggaggcctaagtggaagcatcgcctggagccaggtgtttgagagcagcccagacaacatagtgagacctcattgctacaaaaaagaaattgttttttaattattcagg

SEQ ID NO: 487824 - DNA, 1738 bp, Homo sapiens
cagagccccagcagcagagagcaacagacacccgttgagctggcagtctcttgccatatgacgcgctcgagcgatgcactcgggctcctcccacaggtggtgggctcgaatgatgcgcagatgaactcgatccatggccccaacagtccgcgtgctcgtggactatggtgagtgccagagggatggaggagtctcgtgaccagccacgcgacggtgaatgctgatgagacctgtacagtgcaaggtaatggagctgattggagcgaagctctgcgaaaaagtagagagatgcatggcactatagctgttgggagccagcgtgagcgtggaacagcgggacaggactccccagtgcccatggggactggtctccgggaacccgagaggacttgcagtcatgaggccacttgtctgaagcacacacgtcaccaggcgggtcaggagtctgtgcgtgatggaaggctcggcagtccctgtctgctgcgggcctaccacctgcaggacgagttcggcgtccgacgcttcgcccgtgagacgacggatgcttgctaggagctcgcaggatggggaccctcatgctggccctgaaccgatggcctcgctggcgggggtcgcggtgcgcgagccgacttgacgggactgggcctggacctctcgaggagggatccccttctgtcgttcgacagccgatgctacttggtgtcccttgggtacctggggggttcacccgatgccggtctcggaaaccgccggctgcctatgacggaacgcccggccgccagaccacgcgcccgcgaaacgtccattgcccgaaccccagcgcaaggacccgccgcgccgcgcaaaaggcctgcgagcaatagtagcacaccatcaccgtgttcacagaagaccaccacgcaggtccccgaacaacagtaatacacgtgacatcggaaacataggggccgccaacgcgtacagcgactagttcttcgaagacgatcggaaaaacccccaccgggctcgctacacacccaccaactaagccaaacagttgacagaaagagcgcaacccacgagaagctcggaagcacgtacataacaccacgacacaaaatcacataagcaaaccacaagcaccccccacaccgcagaagcgtcgagcgcccacgaatcccgacaagaacagtttccattcaacaaacatagggaccacacacaccgtcattagaggcggcgcacacgcaagaggggactcggcagagctaggtcgcgcgcacgtccgcgggcgacggacgcgagcgggtgatgaggagagaccgattaggagacgtgtgggagtttcgagtacggcgacgatgagctactcgatcaagtggacggagataagtgcggatgcagcgaagtgagggagagagggcgacgaatgcggcggtggaggcgggaacgtgagcagcagtcgacgagaaccaggagtagacgtcaatacagaaggacctgacagagcgaatcgcatcgaaccacacccaaggaagtaagagaagccataagcgaggcagagaagaccagcacgtcagcgtagaagacgccacacaacagccaacaacacagaccacacagacacagaaagcaccaacaacaacgacagcaaacatcgacgcgcaccaacaccaagcacacaaccaacacctaaaccacagacgccacaaccaagacacaaaccagcacacaccaagccaaagcacccacacaaaca

SEQ ID NO: 487825 - DNA, 295 bp, Homo sapiens
caagctatcggttcaatggaatggaatggaatggaatggaatggaatggaatgtattggaatggcatggaaggggaatggaatcgaatggaatcaattcgagtggaatggaatggaatggaatggaatagattggaatggaatggaatggaatggaatggaatggaatggaatggaatggagtgggatggattacagtggagtggagtggagtgttatggagaggagtggactgtagtggaatggaattgaatggaccagagtggaatagtgtggaatcgagttcggtggaatgg

SEQ ID NO: 487826 - DNA, 289 bp, Homo sapiens
  misc_feature (77)..(77): n is a, c, g, or t
gaaagagtcttgctctgttatccaggctggagtgcagtggcgcaatctcaacccactgtaacctccgcctcctaggntcaagcaattctcatgcctcagcctcccgagtagctgggaccacatgcgtgtgccaccacgcccagctaacttttttgtgtttttggtagagatgggtttcaccgtgttggccaggcatgtctcaaactcctggcctcaagtgatctgcctgcctcagcctcccatgagtgtggtggcaccacacctagcctctaaaacaattttaaatgat

SEQ ID NO: 487827 - DNA, 120 bp, Homo sapiens
atactggtggcccttagagtgtgacaactctggagatattatgcaatagcaagacaggcatgcacaataccaggcaggataaggccaaccatgatgtgctcgcgctactctctctttctg

SEQ ID NO: 487828 - DNA, 116 bp, Homo sapiens
ctgtagaggtgcagtgcaggacaccgccggcacaccacgcttgttcagcgccatggccagcaaggcgatggtcacctgctcccccgtggacacaatcacatccagctcacgcggca

SEQ ID NO: 487829 - DNA, 414 bp, Homo sapiens
  misc_feature (4)..(4): n is a, c, g, or t
  misc_feature (336)..(336): n is a, c, g, or t
gacnctgaggaccccaattctgcccccacagcctgatgtgttttcaattctctttgttttttatacctaggagtggagttgctgggtcatatggtagctctatgtttaactttttgaggcgctgtcaaactgctttgctgcccaacttcattttacattctcaccagctgtgtctgagggttccaatttctccacatccttgccaacacttattaatctctgttttttttaattgtaaccatcctaatgggtatgaagtggtatctccttgtggttttgatttgcttttctcaaattactaatgaatggtgttaagcatcttttcatgtgcttatntggcatttgtatatcttgggagaaatgtctatttaagtcctttgcccattttctaattggattgtctttttattgagt

SEQ ID NO: 487830 - DNA, 127 bp, Homo sapiens
gcacatcacattggctgatgtggatggccaggtatactctgtttgaagtggcaagagactggtaaaaaagagacaatcgaggggtgaggacaattttgacaacttttgaccactggcgcggctcgga

SEQ ID NO: 487831 - DNA, 131 bp, Homo sapiens
aatttgatgatgtcaatgtatgaagctgtttgttgaattctgggtagagcgtttggcatgatcatggggaaggtatagaggatgagactgggagctgagcagctccatgccaattgcgatgaagggcgagg

SEQ ID NO: 487832 - DNA, 393 bp, Homo sapiens
ccccgacgagggaagagagctaaacagcacccacccctaatgtgtttttagctcaaaaacatttatctcaaagaggggattttgcagaacacatactgccccccttcagtataatgagatttatctccctctatacttagcagtatgatttggggaaagcctccaaattgttacatgacttatggcattttgttgtaaaagagaatgagactaaataagattgaaaataggcgccagctttggacttggattctgttctgaggtaagcattttagaaatggaactgaaaaggcctttcaggagataattctgttctctttaagagagcttatggaatttttatttatcaaaaaaatatctttgtccctcattatgttgtataagcatttgggc

SEQ ID NO: 487833 - DNA, 337 bp, Homo sapiens
gtgtcactcactgtactgtagttgatgtgtgactaggaggtgttcacaatgcccagtgtgccagtgatatctagtaaagaagggtttcctaagtaagtcccttccgcgcttgacattggagtgtggatcggtgcaaaggaacacactgtcagtataacttcttatctggcttgggatgtactatacacaaggagcagcagggaacaagcagtggggactggaaggcaaagagcacactcaaccccccacctggaaggtgcaaagaaaagccagcagtcccatgtatgtactcctgtgctggacttgtttcctgagtaacccagcaggtcccttataa

SEQ ID NO: 487834 - DNA, 735 bp, Homo sapiens
tctcccctccccccctttcaccattcccctcggaggcgctttccccgggcaggggcgagccggtctcaccccagggacacaaccacagagacccacgaagagccataatgcaagaaaagagaagacacaacaaacaaaaaaacgcgagacacaaagaagcgatgaagacaagcagaaaagaaccatggatgacataaccaccacacgaaagacgaaagaaaaacgacacaaaaaagcaacgaagaaaacagcaacgagaaagaaacagaaaaacacacaaaaagaaaaaagacaagaacaaaagacaagagaaactacaagaaaaaaaacatataataaacaaaataaaaaaaataggaaacaaaaaaaggaacaagaacacaaaaaaacacaacaaaaaacataaaaaacataaaaaaaaaatcaaaagaaacaaaaagaaaaaataaaaaaaaaaatacaaaaacagaacaaaaaacacaaaaacagataataacacagagacatataaagaaaaaaaacaaacaaaaataaaccacacaaaaaaaaaggcaaacagaacaaacaaagaatgaagaaaacagagccagtaaaaaccaaccgaaaacagagaaaaaaaatagaaaaacaaacaaaaaagaaccaaaagaagacaaaaaaattaagaacccatgagacaaaacaaaaggaaaaataaacaaaaaaaaccccaaatactcaaaaagacaaacggag

SEQ ID NO: 487835 - DNA, 430 bp, Homo sapiens
  misc_feature (21)..(21): n is a, c, g, or t
tgaagtctttatggatcacanatttaatctacagtcttatagtagtctcttacatcattatgcaccagggacgaattataggacctccccaaacagttgatgctgaaactatagcttatatatagagatcattacattttttattcatatatacttaggatagaatttgatttattatttagacacaagagattaataagaatacagtaaaactgctataatctactgaaagaaatattatatgaatattatctactttttaagtattatctatcatatctatctatcatttatctatgtatctatgtatcatttatctatcatatctatctatcatttatctatgtatctatctgtgtatctatctgtgtatctatctatctatgtatctacctgtatatatatccatctatctatcatctgtcgacgc

SEQ ID NO: 487836 - DNA, 553 bp, Homo sapiens
ctagctatgtcgaccagcgtcgccagcgtcgcggtcaggcactgtgatatcccacatcccggaactatgtgattgcggtgcatgaaccaggtgtgccttcgcgggatccatgccttgaggaccactgaacgccccgccgacatgcatgccgtggtactcgcggtgtgccttggggtggcgctggacggcgggcccgaggcctcgggctgcggcgcgctcgcggagcgcagaagcagtgccgcagagttcgtcgttcgcctttctaccaggcggtgcgcgacctgttacccgtgtggctgctggaggatatgcgcgcctatgtgagggcctttccactggggacgagcgcgtggcgctgactgtcttgctacttcgcgccttctgagtgacgtcttggtacctacgacggctcgttgccacgacgcatacaaaaggtgttaccgcgcatttaaccttgcatgtgctcatcgttttccccggactgggtaggctgccggccttcgggatacctcgtccccatggttgacgcgggggctatttcccggctttgtct

SEQ ID NO: 487837 - DNA, 89 bp, Homo sapiens
aaacaaatcctgtgtaatttgtgcttaaaaatgttctgttttgatgtgtttccaggatttgtttcaagcacaaattacacaggacctat

SEQ ID NO: 487838 - DNA, 610 bp, Homo sapiens
  misc_feature (429)..(429): n is a, c, g, or t
  misc_feature (451)..(451): n is a, c, g, or t
  misc_feature (579)..(579): n is a, c, g, or t
  misc_feature (594)..(594): n is a, c, g, or t
  misc_feature (598)..(598): n is a, c, g, or t
gcaaaaattggctttatttttttcttaaaaaaaaaagtctaccaaaggaatttgcatccagcagcagcacttagacctgccagccactgtcaccgagcgggtgcaagcactcggggtccctggagggcaagccctgcccacagaaagccaggagcagccctggcccccatcagccctgctagacgcaccgcctgaaggcacagctaaccacttcgcacacacccatgtaaccactgcactttccaatgccacagacaactcacattgttcaactcccttctcggggtgggacagacgagacaacagcacacaggcagccagccgtggccagaggctcgggggggctcaggggctcaggcacccgcccccacacgggggccccgtgggtgggctggccttgtttctacgcaattttattccaactccatntctcccaaataccgttgatgtnattatttataggcaaaccgtctctttatttagaaacactgataatacactgcggtgggcattcttttccacatcctatagaccctgggtttggaaactcaggcagagtgggacctctagacatcactntcagcttgctacttnaggncacccataggtc

SEQ ID NO: 487839 - DNA, 1196 bp, Homo sapiens
  misc_feature (800)..(800): n is a, c, g, or t
tttttttttttccctaaccaaaataatttattgggaacacacagtctacagcactctatgtacaagcacatggacgcctcctggactatcctcaactaggggacccttttcttccccctttgccttggggacctcttctatcaaatctttcaggtacgggatctcctgggccagggaatccgccctctctttataaagccctcggttcttcttttccagactcttgtggcactcaccagttaagagcctccgggctcgcgcccatcttcttcgtgggggatacctaggtggcgtgcgtggtctgggtttggcctccatttttttacagagcttctatatccagatttctacagcccttatacttgtgggcgggctacacatcttctctccagggaggatcgctaagggttggggcacgggcagaacccacgagagaacacctgggaagatggggaggctccaatttgggaagagcccctgggtacaggggctgtggctgaggaagaccccagataggactctggggctcatacagatgccactatcattatctgaaggggtgtcttcctcctttatgccctgagggatcatgggcaacgtaagcatgtgtagtctgggttccaatctccttcagtgatatccacttcactggcccgagtctaaactaaggggaatgcatctggacctggcgggaccaggacccccgtgtgcgacaacgggcaccgacggtgtcacgaagcgcacacgggggacacctgggacgcgttcgggtaaaccttccaggcacaatgcgcaatcgnggtcacacgacatgcggaggaccagcaaaaacgccccggacaacggggcacaaaaactcacaaggcgctgccccagcgcgtgcaaaaggcaccagggaaggagcccacacaacaatacccaaggggggaccaaacaggagacacgctctaaaaacactgttgtccaacacccatctgccgggacagaaaacacctgtagctgttggtgactagagccaaccaccacaagcacacgatgagccaccacgatggcggaaacaacaaagggtggagacgcccgcatcaaaaaacgactgatcacacaagcgacagatagtcatcaacctccagaacattgatccaaccgcagacgagatagttccttgaactgtgacgcgcgtgtctccagtctcgcgt

SEQ ID NO: 487840 - DNA, 345 bp, Homo sapiens
  misc_feature (1)..(1): n is a, c, g, or t
ngcgctctctcttgtgtctaaactctaccacagctctggctccattcacatgtcatctggcggtgaccctggcataactccgttttatttctacttggcttgctcctgactcatgtccctacttgtcggtgagtcgctctgtatttgcctgttcggtgctgtttggaatttttctggcgttcatgccagtaagtctggtcccctgcattcctcacactgtctgtgcccttatggatgtgtccattctagcgcggcctttgagacatcttcataatgggggagagagagagagagagagagagagagagagagagagagagagagagagagagagagagagagact

SEQ ID NO: 487841 - DNA, 156 bp, Homo sapiens
gtggatctagaggatccctcacacgcacttgggagtcgtgtgttggatgcagcaagcggtgtgtaaactccatctaaggtaaaataacggcacgagaccgatagtcacagtacgtaaggaagtgaaagacttgagagagagtccagttggtgggta

SEQ ID NO: 487842 - DNA, 602 bp, Homo sapiens
cgaccagagaaacagcgagcatggcgagtggcctggtgcttccagaagaaacggcgctgactgggtggggccactccaggcagcagcaagagaagtgtgagtggaagggtgtggtgggggctggggagctgctggacagaggactctgaagggcatgcagtagggactgagcaggtgccacgccaaacacggggcgggccctggagacagagggagcagcaggctggggatgtgggacgggggtgacgtgggacgcgggtgacgtgggatgtggcagagacggacttgtgcaggaccccagggaacctgacagaaaagctgggtggagacagtgactgccatgctgaggagcaggctgagggtgaggggagacagggccatttcaggaatgtggaacgtgggatgcctgagggccttgagtgggatacagaacaggcagatgcagaaggagaggcttcaggggggccgtggctgaagacgggctggggagacgctggccctcagaccagtggggaggagaccctgaggggaccagtcctgggggatctgggcagagcctccccaaaaatgctggttgcctcatcgggtgatgatagccaggg

SEQ ID NO: 487843 - DNA, 372 bp, Homo sapiens
  misc_feature (97)..(97): n is a, c, g, or t
  misc_feature (272)..(272): n is a, c, g, or t
  misc_feature (280)..(280): n is a, c, g, or t
  misc_feature (367)..(367): n is a, c, g, or t
  misc_feature (372)..(372): n is a, c, g, or t
gtaggccttccttctattaagtaataccaagtattctttgaaattctttgagctcctaatgtttaagatttgtgtttttcgacttacgtttcctcantgtgtaacacgactcctggcatacagttgatacgcaagtatttatgcatggggatttatttttcctaatcagtattatatgaattaaaagattggttatatcagtttctgtgtttcgttatttgcgatcttgaaatctctagcagtttctaaattctttcatcacttcagttagngtgttganaagttcccatcaaaataatatcctcaaattttccagtattaaatacaatttgttaagtgttctgaccatggatagtaggtgtatttnagcgn

SEQ ID NO: 487844 - DNA, 195 bp, Homo sapiens
  misc_feature (63)..(63): n is a, c, g, or t
  misc_feature (65)..(65): n is a, c, g, or t
  misc_feature (69)..(69): n is a, c, g, or t
  misc_feature (72)..(72): n is a, c, g, or t
  misc_feature (187)..(187): n is a, c, g, or t
gggcccgaggcgaactctgcccggatgaggaacaaagcagtggggcaggcgcgtccccaagcnantgcnagngttgggcagccccttcccgaagcttctggacggaaggcccaggtgttccccgagatgccccaacccgtggcgggtgcacggccaccgcctcgggagaagttgggcggccccgggnaccccgga

SEQ ID NO: 487845 - DNA, 533 bp, Homo sapiens
gctttctgggagtgctgcttgtgttaggtttactgtgaatgattcccaacacactgaggccctggtaaatattctggaatctggacagaagccatacagcaggcaagcgactctgccacagcaggcatgccctgtggcaccgagggcagcatgcctcttgacaggggcttcctcagtgtttcccacgtgtttgtccaattcagctaagttcgagtcacaagtgcaggctgtggtgccagtctgtgtcacgtgctgaagcctctgtctttccaggttggtcacatgagaaggtttgctttgtgtgcttgcagctgttttcctgtctttgccaagcccaggctgggaccataggcagtgaagagaaaatgtttttttccatagcatttgagtagatatttggcagaagggaattactcaacccatggatacagtgtaattacccacagttctaacagaatggtacagagaggccaaatcctttgtggaatgagacaggtatgaataaataaatgtgatattacctgccctaaaaa

SEQ ID NO: 487846 - DNA, 130 bp, Homo sapiens
aggggagacgcaggagtatggctgtggtgctggcggcgacgcgattgctgcgggctcgggtcttggggctgtcgcggctgaggtttggacctcctgcgtacagacggtttagtagtggtggtgcctctgg

SEQ ID NO: 487847 - DNA, 140 bp, Homo sapiens
caaatgcaatcataacctgctactccccttcaccagacatgtgcttagaagctccagagtggaactctcccaccaggagactgcctcgagagacaacagtctatttacaacaaaaaggacactggcaatgaaactctact

SEQ ID NO: 487848 - DNA, 1070 bp, Homo sapiens
cggagtcggacgcaggccagacatgtggaccctggtgagctgggtgcgccttaacaggcaggcctgatgcggctggaacgcggtgcccagatggtcagttttgccctgcttgggtctgctgcctggaccccgtgaggagcctcaggctacatgtctgctgacctgtcctccttctggacatagatggcgccacagtcactgatcaggcgatcttgctggtgaaccccgtgtcaggtttggtagctcacctgactctgtcggtcacatctcttgcatctattaccgtctcatgggacttccatttgctagccccttcccagaggaccgttgtcaatgcgggtgaatggacattcattggctgcccacggggcttctcagctgaacgtgcataacgggtcagaatccttgttttctccaaaacatcaagtgtaagcaactcgcgtgaggtgccaactcattgctccgtgagtagttgagttcggaactgcccggtagcttctcctatcagtggctggtgtttattgtgtcgactgagtcgtcctggggggtgcgtgggcccttgacctccagagcttcctgtctgtgcaccgactggggtgtactgtctgtcccgtcacggctgccttctgcgatctggttcgttatcccggctgcttcagcatcctcgggcactctgcccttggccaaagaatgctcgctgcccatgaggactagctggtcattgtccttgtccagcctcggccatgtgttccggacgctggtcccggctgcgctgatggttcaagcctggctgagaactgcgcagcggggaagtttttctgtggccgatgcccaacgcacttgtgctcaatacgtgatgttagcccagacactggttttactgtgccaagaagtccttccgggacccccaggtatcatatagggctgggccacggggaataacgtacttggttcccgggactcggcacaaaggctaagggccatacccggtttggcaactagtctcggttacaagtttaggctgcgtgttagcccaataatatatcaccgagtcaagccaagagaccgga

SEQ ID NO: 487849 - DNA, 1036 bp, Homo sapiens
  misc_feature (29)..(29): n is a, c, g, or t
  misc_feature (84)..(84): n is a, c, g, or t
  misc_feature (112)..(112): n is a, c, g, or t
  misc_feature (130)..(130): n is a, c, g, or t
  misc_feature (154)..(154): n is a, c, g, or t
  misc_feature (158)..(158): n is a, c, g, or t
  misc_feature (184)..(184): n is a, c, g, or t
  misc_feature (189)..(189): n is a, c, g, or t
  misc_feature (197)..(200): n is a, c, g, or t
  misc_feature (221)..(222): n is a, c, g, or t
  misc_feature (236)..(236): n is a, c, g, or t
  misc_feature (251)..(251): n is a, c, g, or t
  misc_feature (257)..(259): n is a, c, g, or t
  misc_feature (261)..(261): n is a, c, g, or t
  misc_feature (264)..(264): n is a, c, g, or t
  misc_feature (268)..(268): n is a, c, g, or t
  misc_feature (271)..(272): n is a, c, g, or t
  misc_feature (274)..(274): n is a, c, g, or t
  misc_feature (279)..(279): n is a, c, g, or t
  misc_feature (284)..(284): n is a, c, g, or t
  misc_feature (292)..(292): n is a, c, g, or t
  misc_feature (296)..(296): n is a, c, g, or t
  misc_feature (299)..(299): n is a, c, g, or t
  misc_feature (305)..(305): n is a, c, g, or t
  misc_feature (307)..(307): n is a, c, g, or t
  misc_feature (317)..(317): n is a, c, g, or t
  misc_feature (330)..(330): n is a, c, g, or t
  misc_feature (364)..(364): n is a, c, g, or t
  misc_feature (406)..(406): n is a, c, g, or t
  misc_feature (437)..(437): n is a, c, g, or t
  misc_feature (580)..(580): n is a, c, g, or t
  misc_feature (925)..(925): n is a, c, g, or t
  misc_feature (927)..(928): n is a, c, g, or t
  misc_feature (949)..(949): n is a, c, g, or t
  misc_feature (1036)..(1036): n is a, c, g, or t
tttgtaattgttcatattgaattcaagcnaaataaagaaaatccaagttcctgtttcagtctcaactggccggggtattaaagnaatgcactcctcttttaggaggcatgtntcaagttgtcagtgttgnggccattttttcttgacccttaantctntgcttcttgtttcagcaataccaggnatgtnttttgtannnntttttttatttttttggtttnntttttttagttgtntttgttgttggtttntggttnnntnttnattnacnntntgttntggtncatatagntttnttnttattntntggggggggngtgaggggcagcngggtggctttcaaaagatccctggactgtgctgngagggcttctttagggctttccatgatgctgaatagccagtnaatgaacttctgggtctgttccttccatggntctttctgcagcagcagagccatgctattgggaaggagagtgagaacctcctgcagagtgaccctgtgcattggactcctgccaaggaagcttggtactggcccagccgggccattctcctgatgccatggcaaccaactggnactgaggcgcgaggaggagaggggcagtgtggtcagcccatgcaaccactgcggttgcaaatatcagcaagaagaagtccaaagcctcgtcaagagccgtattgtgaaaggatgttgactggtaagcaacatttctaatataacccatcagttccaagagccactccattctcttcaaaacgcccgtattggcatggctcacaatccgtgcctggtataagctgtgcagaatcatccaggccaaacacctctttctcacggtgctgcacagcaacgctcagcatatcggtcaggttcaccaaggggaatcgtccttgagagactaagtacagtttgacaaggccncnntttctatgttgctcttagtanctgggcgatccgattggcatcatcatctgtcatttctaagaggcattttgctatgctgatatacagctctagattctttctccgaan

SEQ ID NO: 487850 - DNA, 400 bp, Homo sapiens
gcgtgtagtgatatcatatagtaagaaacaatagccagacataaattataactttttcaacatgagatatttttttttggttccaaccttaatatgcttattggactcaccttccttctaggcagtataacagcaaaaggtaagttggcaagtttctttaagtcatatcccgtatggtaagtgcccaggagaagtaaaataggttatggttatcctaatacagttatcagaaatggattcaaacatacttttagcatgtcaaacatttaaataatagaagaatctgagtccggttttagaatgctgggagacctatagatatggaattccggtctgcctatgtcacataatcggtggatccttagatagaggggtgagtcccctattttccactgacacg

SEQ ID NO: 487851 - DNA, 788 bp, Homo sapiens
ggccggcggctcacgctggctagaataagtcttcagcttcccaggagagccatcagcgtgtcatggccgcatagtgtgggaagaagaactggctgtgaccgtttgtgctgacctggaatgggcccagccttgtggcgtgacatggcaggcgcccacgcccgggccgtccggttgtctgatccctacctcatggctggttggctctcttctggcatgggctccttgggctgcggatctatgtgggatctggtgtggagcgtagctgatggtggatcatcagagcgttccggagggttggagcctcccctcttacgtctctgtgcttgtggctctggggaacctgggtctgctggtggtgaccctctggtaggaggtctggcgcccaggaaaggactgagcagggtcccctatccgggtggtgcagtgtgctggggcatggtgggcactgacctgctgtcctctctgtggtacgcttgttggacccagtgggcaggacagtgagtcttctgtggccttacttacgcacgtggaccttgtgtcgctgggtactggtatgcttgtgcctctgatgtcacttacctagcccttcttgagccaactgacaggctcggttcttgcggtcatgcttcctgtggtcaaatgccttgagtggcctgactggcctgtgtgctggccctagtgcaggggttgttggggccgcctcgagtgccctgcagaccccatcaaaggaaccctggacccccgatcgacttccttgaagcgttttcccgacaggacttcttctggga

SEQ ID NO: 487852 - DNA, 191 bp, Homo sapiens
  misc_feature (1)..(1): n is a, c, g, or t
ngagagtggagatggagagtgacaaatctggagtctcccttgagtcccttcctaggaggcagtggtgctctagggcgtcagagtgtttctatgctagtctttctattaattattatgggacagcaagttaaaatttggaactttaaaggatatcggaaagggggctcaaacaataatacaaaatattggac

SEQ ID NO: 487853 - DNA, 703 bp, Homo sapiens
gactagttctagatcgcgagcggcgcccttagcttgtgctctttttcgacagcaaaagtgaattttaaacacataatctctaaatactcgtaatgcaacatgtacaaatgtctgtaaagtaattagactaatcttccgaataatataagcctcacataacaaatacacaatcgggaactcaggactcacgttgagaacaagctgtaaatagtggctgtacataggtactggacatttagaaaagaccagttatgggtcaccagtacaaacttatggctagacaaaaacacaagaacaataaaaacctcacaccaccaaaatagaaagaaaagccagaaacagactgacataatatacaaaatcacaaaacaacgagaggagggcgggtgcgggcacacaacgtaatcacctctcacttgagtggcgggccccaatagagctaggcagtccatacgtgttcttgcttctaaacaaccgtgcgtcatcactgcacgcccgatccttgatgttaccaaagacccaagcgccaaacgcgtcgcgtacgctacactgcacacacagggttgtaaccaacagatgcaatcaccatacacaaggccgcaagtggcaatatcgtcacaggacccacccaccctaccataagcacattacgcccaatcatacactgaggaagcccattcccccaccgaggaaatagatcccc

SEQ ID NO: 487854 - DNA, 862 bp, Homo sapiens
gaacacgggcataaaaatcatcaacaaagtgctggcgggctgaattcaacagtacaccaagaagataatgtgctatggtcaagtgtgatttacccaaagatgcggggatggtttagcacatgcaaatcgataaatgtgatgacatcagtggaatgaaggaagagactttatgattgtctcaatagatgcagaggatgttgatagattcggtatcccttcatgatgaaaaaaaagctctcagcggattagacatacaaggagcatacctcaacatagtagaggccgtatatgacagattcacggtgagtcatgctggatggggaagggctggaagaccttcttctggaaactggaaccagagcaggatgcccacattcaccactcttgttcagcatggccgctggaggttctggccggggcagtcaggcaagagaaataaataaaaagcatctaaattgaaggggagtaagtcaaattgtctctttctgtagatagcatgatcttatatatagacaactaaagactttaccaaagaaaaaccttacaactgataaattcagtacaatatcagaatacaatattagtagtattgatgcatcagatgaaaagctgaacagcaaccaggaaaccaatccattaacaatacataaaaggttacaatactcgacctaacaaacgggcggggtccacagggaaccggggacaaggaggaaaaccggggagggcaatcagggagacgaaagaatcacaacgcccaggaacgcaacggcaaccacaacacgcgcggcagaccaaaaccaggataaggcgacaccgccagacaggcacacacagagggacagggaagacaaacacaaaaaga

SEQ ID NO: 487855 - DNA, 535 bp, Homo sapiens
cggtaccggtgttccttgtctatttatattatttatgagacagagtctgctctgtgcccaggctggaatgcagtggtgtgatcttggctctctacaacctccgctgcctgggttcaagtgatccttgtgccttagcctcccaagtagctgggattacaggcgtaagccactgtgcctggccaatttttgtattttaagtagagacagggtttcactatgttggccaggctggtttccaagtcctgaccttaaatgatcctcctgccttggcctcccaaagtgctgggatcacaggcgtgagccaccacaccggcctggctaatttttctttcttttttttttggagactgagtctcgctctgtcccccaggctggagtgcaggggcgcaacctcggttgattgcaagctccgcttccggggttcatgctattctgcctcagcctcccaagtagctgggtttacaggcgcccgccaccacacccagccaatttttggtatttttagtagacaacgggaaacaccggggatcctcta

SEQ ID NO: 487856 - DNA, 160 bp, Homo sapiens
gcgcacggcgtatgttgggccgtgtgcagacccgcgtgttgcgcaggcaagggaccctcaaaataaacaggcctgttgctttgccgaagccgtctttccccaggcctgccgtccgaagttttccgccgttcggggccccgttccgacggcggaggtatct

SEQ ID NO: 487857 - DNA, 118 bp, Homo sapiens
tattgtgtactgctggaggaactcatgaaatagagggaggagagaaggaaggtcctggaggaggaagagcatgaggatgaagcacggttgaagcctgatctgaaaactcagagaggag

SEQ ID NO: 487858 - DNA, 205 bp, Homo sapiens
gatccaccttaccaccagacaaccttagccaaaccatttaacccaaataaaagtataggcattagaaattcaaacctggcgcaatagatatagtatccgcaaggtaaaagatgaaaaaattataaccacgcataatatagcaaggactaacccctataccttctgcataatgaattaactagagataactttgcatggagagcca

SEQ ID NO: 487859 - DNA, 740 bp, Homo sapiens
  misc_feature (574)..(574): n is a, c, g, or t
  misc_feature (585)..(585): n is a, c, g, or t
  misc_feature (602)..(602): n is a, c, g, or t
  misc_feature (604)..(604): n is a, c, g, or t
  misc_feature (608)..(608): n is a, c, g, or t
  misc_feature (616)..(616): n is a, c, g, or t
  misc_feature (639)..(639): n is a, c, g, or t
  misc_feature (696)..(696): n is a, c, g, or t
gcactcagcgcctttctgggcacggggcttttccggggcacacctggggttacccaggccaccccacgccttgggcctacccatcttttggacaggccagtggcccccgggggcctaccctgccaactggccctatggcgccccttctgggcaccctgattgttgccctataacgccgcccttgcctgggggaatggtgcctcgcatgctgatcaccattctgggcacccgtgagagccccatgccaaccaggaattgctttagatttcccaagagggaatgatgttgccctcccacgtttgtacccacgcttccaatgagacccaccggagagtccattgtttgccaataaccaagctggattataactggggaagggaagaaagcaccactcggttttccccacttgaaagtggggagaacacattccaaatacaagatactggttggacactgacaccaccattcaaggttgccagtgaatgatgctcacttgttgccaggaccatcatcggggttaaaaactccatgagaatcacgccaaactggggattttttggtgacatagacctcnacccgtgcttncatatacccatgatatnanctgnaaggggcnagattaaaaaaaaaaaagaattnaaccttacatgtgtaaaggtttcatgttcactgtgagtgaaaatttttacattcatncatatccctcttgtaagtcatctacttaattaatattaccgtga

SEQ ID NO: 487860 - DNA, 196 bp, Homo sapiens
cgtgataactactgcacgtcatgcctggttgatttttgtatttttagtagagacgaggtttcaccatgttggccaggctggtcttgaactcctgacctcaagtgatccacccgccttggcctcccaaagggctgggattacaggcgtgagccaccgcacctggcctgctttcattgttgggtactacgctttggca

SEQ ID NO: 487861 - DNA, 180 bp, Homo sapiens
aagatttggccctcatgcaggacaaggtcagggagcttcagaaccaggagcagagattgtcggggcctggaggtggtttggataatgccctgctagctcttcaaaggcccactgcagcccaggtactacaggccggcgtggcagaatgacctcaggaacacctccccttcatgaccagtt

SEQ ID NO: 487862 - DNA, 621 bp, Homo sapiens
cgcatcgcgatcgccttcagcggcggcctcgactcgacggtgctgctcgatgcggccgtgcgcgtcgcgggcgcgtcgcgttgcgtcgcgctgcatgtgcatcacggcctgagcgcgaacgccgatgcatgggttgcacatgccgaagcggaagccgcgcggctcggcgtcgcgttcgaatcgatgcgcgtcgacgtgccgcgcgacagcggcctcggtatcgaggccacggcacgcgagcgtcgttacgcggcgctcgacgcgatgtgcgagcgccatggcgcggccacgctgtggctcgcgcaacatgcggacgatcaggccgagcccggtgctgctgcagctgttgcgcggcgcgggcatcgccgggctcgccgcgatggcgccgcgctatcgccccgacggcgtgagcgtcgaacgggtgcgcccgttgctgcgattgttgcgcgcgcaacttgagcgctacgcggagcagcatgcgctcgcatggatcgacgacgaatcgaacggcgacacgcgttatgcgcgcaatgcgctgcgcatcgacgtgctgccggcgctggccgtgcatttcccgggctttcgcgatgcgctcggccgcgcggcgcagcatgcggccgc

SEQ ID NO: 487863 - DNA, 170 bp, Homo sapiens
attataggggtgacgaaaaatcagaataggtgtggtatagaatggcgaagtcaatcttcaggcgaggaagaagagtatgtttatgtgacataagtgacggaaaaataaattcaacaagatagtaaatagaatttaatatggtctcatgcgccctgaagatggttggcttg

SEQ ID NO: 487864 - DNA, 293 bp, Homo sapiens
aaaaaaaatttgcccccggggaaaaaagggcttcttttaaaaaaggctccttttaaacccggaagggtaatttggccttaaaaaccttttggtaaaaaaaggggaaattttttttaatttttaatttggggtggccccaaaaaacccggaaatccggggggcctccctccaataaatttggtttttatttttttggggtaaaccggtttccaaggccttttgccgggtggtttaaccttttaaaatttaaatgatggggaaaatttttggttttaaaatttaaaaaaaaatcc

SEQ ID NO: 487865 - DNA, 486 bp, Homo sapiens
tgccctccccacacccctcaccctgcagcctccccccgccccacctcatccaggagtggcacgactacaagctgcgctgggacccagctgactatgagaatgtcacctccatccgcatcccctccgagctcatctggcggccggacatcgtcctctacaacaagtgagtcctctacagggccttggtgggcaggagtggccagggcctgcccctgcccagacagggagctccaccaaggcccagcctggcccagcgggctatgccagccccatgcatgccagcccaggcccagaaggaagaagcaggagaaggaagaagcaggagcaatggagaaattggtgtgggttgaggagggaagggtccccccaggccagcaaagaggctgagggcaccctgggtctcagcactggagcgtagagccggaggggcctgagagtggctatggcacctggacacagtgtccctgcggaccagtcctgaggcct

SEQ ID NO: 487866 - DNA, 429 bp, Homo sapiens
aggcaataacgtaagtcctagtctgaaggctgaggaccaggagcaccaacatcggggggcacgaatgggatgtcccagcagttcacccttcttccccttttttggttctattcaggccctcaagggataagatgacgctcacccacatgggtgagggcagtcttctttactcaagtctactaattcaagtgctagtctcttccagaaacaccatcacagatgtacctagaaatgtggttggaccagctatcaaggcatcccgtagcctagtcaagtggacagaattagccatctcatcagtatccacaaggtattttaatataaagggatttagccggagaagcttccatggtacagtatctttttttttttttgagggggagaacaaatttccggtctgtgtggccttagaatgggacgccaaattgg

SEQ ID NO: 487867 - DNA, 258 bp, Homo sapiens
acgactatctattatataaagtcaaatccatattctttatattttgagatggagtacactcttgtacccccaggctagagtgcaatggcacgatctcggctcaccgcaacctccgcctcctgggtccaagcaattctcctgcctcagcttcctgagtagctgggactacaggcatgcgccaccatgcccagctaatttttgtatttttagtagagacggagtttcaccatgttggccaggatggtctcgatctcttga

SEQ ID NO: 487868 - DNA, 143 bp, Homo sapiens
gatacaataaataagctagatacggaaacctcactgcatgttggatgttttacccacatgacttattagtgcataagccaaaattccagtttaagtaattgcctacaatagaaagaaattttgcctgccattgggccagcggg

SEQ ID NO: 487869 - DNA, 118 bp, Homo sapiens
aggcggggaacaatcactttggctagggggactagcaaaagtgaacaaataggattacatgaagtgaaaaagcttatgtacagcaaaggaaacaatcaacaaaggtgatggttccccg

SEQ ID NO: 487870 - DNA, 362 bp, Homo sapiens
gtccaagcccacatagctaataacctatagggtagagccttgaatcgtgtgtctgacaaaagcgcttgattttctaaccttccacttgggcgcttctcatataatgtcctatttccaggcttaaatccatgctccaatatggtcgccaggaacctgaaaccactggttgtcacaggcacaaagtcccttaaagccagaggtatgcctaagaatgttgctaataatctatttttctacaccatgtatataaggtatgagtccacgcaatgcccgcgtggtgtacagctatctcatggccatatattgatagagccctgtgagcacctagaggggggcacctaaaatgtggagaagcgcgcgtg

SEQ ID NO: 487871 - DNA, 150 bp, Homo sapiens
ccatccggcaggttgtactgattattggttgctgcttggccaatggcatatgcgttggtactgtctggaataatgatggtttttgctggagacactggagtttgtttgagctcttggtgtgctgctggcaagcaataaaggcttgggctg

SEQ ID NO: 487872 - DNA, 701 bp, Homo sapiens
  misc_feature (637)..(637): n is a, c, g, or t
gagccgcggagcctcagcttccgcctggacccagcctcgtgggagccccgcgggtcctgcccagatgtggaagactgaggcctgttgaaagtgcagagctcagccctggcaccctctgttcccaagagctccatgcaggtgccacaggatggagaagaccttgctggccaaccttggtaccacggcctcctgtcccgccagaaggctgaagctcttcttcagcaaaatggcgacttcctggttctgcgcctctgggtcccgtgggggcaaccccgtgatctcctgccgctggcggggctcagccctccattttgaggtgttccgtgtggccctgcgtccccggccaggccgacccacagccctctttcaactggaggatgagcaattccccagcataccggctctggttcacagttatatgacaggcaggcgcccactgtcccaggccacaggggctgtggtctccaggcctgtgacttggcaggggcctctgcgacgcagctttagcgaggacaccctgatggatggcccagctcggatagagcctctcagggcaaggaagtggagcaacagtcagcctgcagatttggccatatggggcggtcaagagaagaccccgctgggatggaagcctccnacatgcccatatcttgcttgccccgaacgagcagtgacccggtgttgctgaaggcccctgctcc

SEQ ID NO: 487873 - DNA, 691 bp, Homo sapiens
ggaccagaagcatattcctctgcagacactatggaagttcaagtggtggatatgccctgggaatggagtatctgagacaacaggaagtttcttacatgcgagatttagactgctcgaaactgcgtgtgcgagatgacatgactgggctgtgttgcggacttcggcctctctatagaagattttgacaggtggcgattacttaccggccaaggccgcagtgcgtaggaggatgcctgttaaagtggatcgccatagaaagtgttgcgagaccgagtctacacaagtaaatagtgatgtgtgggcatttggcgtgaccaatgtgggaactagctacagcggggagaatgactccctagtcctggggtccagaaccatgagatgtatgagctatcttctccatggccagcaggttgaagctaggccgtaagactgcctggatgaacgtgtgcaagatttaatagagtgaaaacagagctcccataaaatggaaggagacccaaagggggttgccgttgccggctcgaatgcctgggtttctatcccaatcattgtccctccccctgtactctcaggtgatagatattagctatttctttacctcctgtattgcctaattagcattttagtgagctctctttactacctgattggtcgggtgtgagctaagttgaagccctgtgtttaaggtggc

SEQ ID NO: 487874 - DNA, 413 bp, Homo sapiens
  misc_feature (7)..(7): n is a, c, g, or t
cgcttanaaactgagatagaggcagccaacagcgatacaaatttccctctactcgatgagatgggggatcccgctgcaggctgatgaggcacccatgagaacggccggaaagcatgcatcttagaaatagcccctcaattccaggagtcagcatgccaaagaatgaggctggagacaggtagctccgagggaggacttctggcatgagatctcggcacggcaagcccagcatcgcctcagcccagacaggctcgagcaggagatcaagcgggggctgcctttcaggagtcacctcctgagccacttcagagttctggaagtgaccacggatgcagggtggaggaatagacttctagttcattctgggacacttgagccagagcgttgaaagcttggcacgaccagactagaaa

SEQ ID NO: 487875 - DNA, 1143 bp, Homo sapiens
gggggagtatgccgtgccttcgatgcggtggccctgttccttgtgggaagaacttcagtgggcatcttggcatgtccctcctcagctcctggcctgacctctgtacgacagcattgaggagaccctgccccctcgacctgaccacatatacgatgagccctgagggagtggctagccctgtccctctatgacatgccctgcaggagcccctggtggtgatgtgcatggaggatgtgcagtgctgacaagcttgacatgggacccttgctgtccttccacgcatgtccatgccagcctgggcagtgatttctctgcttcttggcttgtgcagccaaggaactgagtatgacaatgtctgtactaaatgaaaggcccaaagtgacagaggcagcagagggatggtccaccgccccttggcttcttgctggtgactcctcctggccacttgcatcagaagaacctcctcgtgccccttctggagccctgaggcctggactgtcttacgtatggggctgataaattgcctctcccagggacctgcttgggtgagtcaccatcgccaaagcaggaaagggtgccctgcgagagaaccaacctcctcctatcttttttccagattccatcctcttctctatcccccaagctgacggaggaaccttgtgggcatttaggggcccgatgacacaaaggatgtcagccaattgcatgggcctgacttggctatagccacgccttacgctgccttgctgactggccactctcacggtgctccagcccttgcgggacccagatgcaccccaagtgtggcaactggcgtccaggataccctggccaccttttccacaactacctcgagtcggccattcctcgcactttacaagaaccacaagaaaacatcacttaaccttcacacatcacacttaactgctacaatccatcattacctcacacaacaacacttcaccagaccgaatccactcccacactctcatatatacattcctcaactctacctcatccctgccaccccccatttaccagccctctcccctctagtccgctctacacttcataccatgagacccatccttctaacttcatcttacgacaatactcgttcccttaatctcgctatcccctccc

SEQ ID NO: 487876 - DNA, 183 bp, Homo sapiens
agcaacagctcaaccactcccaagacgtccatgaaataacctactcgatctcctcagctgagccctgcacaactgacaaaaggggttcaagctgcttcatgctgactgatatcggctgaccctctctatacggaagtgatgataaaaatcaggagcagaacagggcatcaggtgagctgtcct

SEQ ID NO: 487877 - DNA, 628 bp, Homo sapiens
cctggtacggccccggaatttttgggatctcagagtggggcgcgcttgactgacaggctgagaggcgtgcgcagttgcagagtgctgtgctcggtgtcagaggccttccacatcactccatgacccctatagccctgtcgctgtcagctgtcaacaaaggatgcgaatgctggcctgcttccatgtggtgcttctgtgtcacccagaggtgagcccagagccaggatgggggactccagggacctttggcctcaccttgactccataggagaggtgacaaagaggacttgctgctcaaatctaagggaacctgtcaagtcgtgtggggtcaccggaccaaagctatgggcctgtctgcaggttggctgcccctatgtaggctgcggagaatccttcgctgaccacagcaccattcatgcacatggcaaaaaagcacaacttgaccgtgaaccttgaccacgttccgacatgtggtgtaacgccatgtgagaaaggaaggtaattccttggaagcaatcgtagctgagtagccccatactgatggagatccatcataccaaaggttctcatgaacaaggacatccccggaaagacacatacaacaccataatgaaaactagtacctatc

SEQ ID NO: 487878 - DNA, 507 bp, Homo sapiens
gcacgagcaagttaaatactcaaagcacccgtagccgtcgatgcgtcttgttctcctacgcttttctctttccttcaatgcatccttgaaaattgcgaaagtgccaacgaaaaagaaaaatacagtaaaaaaaaaagtcaaacgccaatgaatatatacttgttgctacgctttcggtttcatcaaataataagtagtatacaattagccatatacagtatcaataataaggaagttacgcgactttaaataaaaggattgttctaatatgtagatatgtgaatggcggcttgataaatcaaaatattattatttttatgcataaaaggaccccgatttcgattttcttgcttgaacttcacttataccctcaacgaaatcttcgtgtttaacggaagattgcccattccttaaggcaatcatacctgcctccacagttaccgcctttaactgggcaccattaaactcatcagtagacctggcaagttccccccagttaatatcatc

SEQ ID NO: 487879 - DNA, 585 bp, Homo sapiens
tggttacttcctccttattcccgccgctgcatgctgcgcatcatgacgggaaatcgtgcacttgcagtgccggtgcatgtgcggcaaccaaatcggcgccaagttttgggaggtgatcagcgatgagcactggcatcgaccccacgggcacctaccactggggacagcgaccatgcagactggaacgcatcaacgtgtactacaatgagtgccacctggctggcaagtactgtgccccgcgccgtgctcgtggatctggagcccggacaccatggactcctgtgcgctacggggccctatcgggcagatcttccggccggacaacttcgtaatcaggtcagagtggtgctagggaacaaactgggaccaaggggcacatacacagaaggcgcggagctggtaggactacggatgacttggatgtaagtagagaaaggaggctagagagctgtgactagactgccagggttaccagcatgaccaactcactgggtatggatggagatggaatctagagatgggtaccctcctcatcacaagatccgggaagagtaccagaaagatcatgaacactaaaggtgtgcc

SEQ ID NO: 487880 - DNA, 226 bp, Homo sapiens
gtggggtgagaatatggcattgtctttctgtctccaaagttgattatatgttgtaccaaaccagattaaaaataagcaaactctgtggcaggagtcaactttggagccagacgacaaccatctgagcatcgtcaccctggaggaggcccccttcgtcatcgtggaagacatcgacccgctgactgagacatgcgtgaggaacactgtgccgtgtcggaagttcgtc

SEQ ID NO: 487881 - DNA, 381 bp, Homo sapiens
  misc_feature (6)..(7): n is a, c, g, or t
  misc_feature (11)..(11): n is a, c, g, or t
  misc_feature (18)..(18): n is a, c, g, or t
  misc_feature (75)..(75): n is a, c, g, or t
  misc_feature (77)..(77): n is a, c, g, or t
  misc_feature (161)..(161): n is a, c, g, or t
  misc_feature (255)..(255): n is a, c, g, or t
  misc_feature (282)..(282): n is a, c, g, or t
ccgccnncgangtgatcngtggcctcagcgaagatgggccgggcagggaccatggcggtggagcagaggtggcangngcggggcggctggcggtagaggaggctgtggtcctcagggggctgtaggtggaggtatggctcgggcagcagcgggaacggccnccccttgactgcttccagtgaacaaacctgctgttcctcctcatccagctgccctgcccactttgaaggaacaaatgtggaacggtgtttcctnccaccacgaggtgccccccctcatcanggaagggtgagcccggcggaaggggtgaccccctcgttccaaccccccctccttgccgctatcgccgtttaacttggcgactccggtattgagctcttg

SEQ ID NO: 487882 - DNA, 203 bp, Homo sapiens
aggcctgggaaattcctttcactgttcgcactccgtcaaccccatcacgggtttattcgtgttcatcctgagcacaattgcaatatagcaataccagcccatccaacagatgtaaacccctgcgcgacgaaaaagacaaaaaggatcgtttctcgttgttcactgtccgtcatggccatcgatgcattattcgtattcattat

SEQ ID NO: 487883 - DNA, 609 bp, Homo sapiens
ggccatttcctgtttctctgcagtttatcctacagctttgggtgtgtggccgctgccgggcatcggcttccagtcctggcggagggcgaggcggcgtggacagcggcccggacccagctgccccgccgccgaatgccggctgcccgtccgccagcgccccgagcctgccgcattcctattctccagctgccctgcctgacgcctgaccgaaggttaacagcagagcggccctgatagcaggccatacaagtagtagtaggaggtcgggagacgggcagcttgtacggtaaaaactagagcctaactggattcatgtatacacaaacccagatcgcatatcccctgggagcaaatataatcgcctttacctggttcgttcagcaccaactctaagttacttaggccacaattgtctatttcggtcacgcaatgtgcaacacgcacctgggtggaaacatcgtagggagcactacaataggggaactaacaacgcctggcaacaacagcacacgcactcacataggccacgacattaacacacccccgtaattacctaaacccaggcacaaccagcactgctagtaccacgaactttggataatcccccta

SEQ ID NO: 487884 - DNA, 213 bp, Homo sapiens
ttgcgaattatatccccacatagtaaatacatatccttgctacctagaaatgataatcatcactccccctgctgtctgagagcgcttctcctaccttcacactggctctgccacaaagctaagtataagtagaagtagaagccaagactcaccactagcctgtacatttatcagaggtgaaaacaggagtcagagtccccacaccagcagaga

SEQ ID NO: 487885 - DNA, 722 bp, Homo sapiens
  misc_feature (2)..(2): n is a, c, g, or t
  misc_feature (108)..(108): n is a, c, g, or t
  misc_feature (136)..(136): n is a, c, g, or t
  misc_feature (187)..(187): n is a, c, g, or t
  misc_feature (195)..(195): n is a, c, g, or t
  misc_feature (206)..(206): n is a, c, g, or t
  misc_feature (258)..(258): n is a, c, g, or t
  misc_feature (311)..(311): n is a, c, g, or t
  misc_feature (323)..(323): n is a, c, g, or t
  misc_feature (330)..(330): n is a, c, g, or t
  misc_feature (351)..(351): n is a, c, g, or t
  misc_feature (360)..(360): n is a, c, g, or t
  misc_feature (395)..(395): n is a, c, g, or t
  misc_feature (397)..(397): n is a, c, g, or t
  misc_feature (409)..(409): n is a, c, g, or t
  misc_feature (416)..(416): n is a, c, g, or t
  misc_feature (426)..(427): n is a, c, g, or t
  misc_feature (430)..(430): n is a, c, g, or t
  misc_feature (434)..(434): n is a, c, g, or t
  misc_feature (476)..(476): n is a, c, g, or t
  misc_feature (486)..(486): n is a, c, g, or t
  misc_feature (499)..(499): n is a, c, g, or t
  misc_feature (507)..(507): n is a, c, g, or t
  misc_feature (511)..(511): n is a, c, g, or t
  misc_feature (514)..(514): n is a, c, g, or t
  misc_feature (527)..(527): n is a, c, g, or t
  misc_feature (542)..(542): n is a, c, g, or t
  misc_feature (554)..(554): n is a, c, g, or t
  misc_feature (570)..(570): n is a, c, g, or t
  misc_feature (573)..(576): n is a, c, g, or t
  misc_feature (614)..(614): n is a, c, g, or t
  misc_feature (623)..(623): n is a, c, g, or t
  misc_feature (690)..(690): n is a, c, g, or t
gnccaagagtttttcaagtaaagacatgctcttctctcttctgtataaaactttacgaaataaaggcaaaagattatgtacatcttgctggaaaatgctgcccagggntctggagagggtggctgcccgggctccnttcactgtccaggtcctgaaagagtcttgttcatgaactgtctcttcacanagcaagtncaccacttgcngggtttatcattctgagggtcgaaaactttctcacaaagtctcagtccagtntcttgccttagctgttgtaaataggctctcatcacttcatcttcctgtttgtntgcaggtttggnataaatngcgttaagtggaaaaccaggntctccaggnatgggaaaattagtgattcccagcgtatacatttntntctcaccttggnttttggnatggcactgnngcngtgncttcagagattcagaaatgtagagagtgatatatatcaaggncctatcagcntcattcttaattncatagtgntggnggnagacattggcctngaagtaatagagggnttcatccacaanagctgtgtctgtgggntcnnnnggggcaggccctttgaattgacttctgacaggcaacanttccatgtntccgatgagtttggtatcaggatccatgacacaagagtggtaagccggcatctcggcggcgcccggntttcaaccagacgagcaggatccaggtacagc

SEQ ID NO: 487886 - DNA, 331 bp, Homo sapiens
  misc_feature (49)..(49): n is a, c, g, or t
ctaccttcccgctgggcaagctcattcccggctgggagacgatgctgcngctcatgcacccgggcgatgagtgggagctctatatcccgccggaatacgcatatggcgaaaagggcgtcggccccgtgccgcccaacgccaccttgatattcaaggtggagctggtgtcggtgaagccgccgccgaagagctgaggcgtcacaggcccccgcgcccgcccttatttcggcgcgcaagcgcagggaatgcgtcgatcgggatcgacctcggcgctctcaacgtagaattccgcgccgccggggctcgccgcatagatgatgaactcattggc

SEQ ID NO: 487887 - DNA, 333 bp, Homo sapiens
  misc_feature (21)..(21): n is a, c, g, or t
  misc_feature (40)..(40): n is a, c, g, or t
  misc_feature (82)..(82): n is a, c, g, or t
  misc_feature (93)..(93): n is a, c, g, or t
  misc_feature (119)..(119): n is a, c, g, or t
  misc_feature (144)..(144): n is a, c, g, or t
  misc_feature (161)..(161): n is a, c, g, or t
  misc_feature (217)..(217): n is a, c, g, or t
  misc_feature (327)..(327): n is a, c, g, or t
taagacagagttttactctgntcccccaggctggagtgcnagtggtgcaatcctcagctcactgcaatgcctcccaggtgantctcctgcctnagtctcccaagtggctgggattatangcatgcaccaccacgcctggctaanttttgtgtttttagtanagatggggtttcgccgtgttggccaggctggtcttgaactcttgaccttaagtgancccctcgcctcagcctcccaaagcctcagcctcttacagtgttgggattacaggcatgagacactgtggcccgggatgattttcagtcacagttttttgttacgagtggnaaatgc

SEQ ID NO: 487888 - DNA, 146 bp, Homo sapiens
tttgggctgttttgggccccccccccggggggttggggtcgggatcaaacccttttggcctgttatgattttgaacctttggcttgaaccccaagggaatttttttcctgggggcccaaaaaaaaggataattttttcctgcggga

SEQ ID NO: 487889 - DNA, 146 bp, Homo sapiens
acgcgccactagctcatgcatagggattcaacttggtggtcatctgcagtcccaggcacttggtgaggctgaggcgggagaactgctcgaactggtgaggcagaggtgcagtgagccgggactgcaccactgcactccagcctggg

SEQ ID NO: 487890 - DNA, 157 bp, Homo sapiens
gggcagctgggcacgcaccccaagaaggagcccatgggaggcgctgaacacggcgcagggcgcgcgcgacttcatctacgcctgcatcagaagatgctgcaatgcgtcattgctgcaaatgataccccgaatgtttttccagactcatgttgttgat

SEQ ID NO: 487891 - DNA, 429 bp, Homo sapiens
agctggttggtaatcttaacttttagtcattaaggaacatttttaagacaaaactctaattcagctacttacctggaaataaagctcaggctgatgatcgctctctaccatcatagagaggcaggaaaaaactcacactcaccttctctgtcagaagcaagttgaaactcaagaaagaaggtgcctgctctccatcgtcatggaagcaggaaaacttgccttccttgttggaaatgagtaaaacttcagaaaaggagttgtacagcaaaataacttcaaatagcaaccaaattttgggagatcagggactctctggaggggagaagctccccaagctccacaaattagcctattggcttgagaaataaagataacccaggttggtatcaagcaaaaataaaagctttatcaaaggtcaaaaaaaaaaaa

SEQ ID NO: 487892 - DNA, 216 bp, Homo sapiens
taacgtaacgcttcatgactgaatcatggatctccatcatcacagtagagaaaaagaaagacaactctccttgtttgcataatgtatcgtttatgaagcatattcatacagactatctgaaaataaaatcagaattaaaaagacaattcaggctgggctcagtggctcacatttataatccctagaacttttggaaggctgaggtgggaggatttg

SEQ ID NO: 487893 - DNA, 107 bp, Homo sapiens
gtctcttctggggcctggttctgaaagttcttccatcttgtggatttctgacaagcagagttggggttatagtggaagaagagtctcccctgagtgatggtgaggtg

SEQ ID NO: 487894 - DNA, 352 bp, Homo sapiens
  misc_feature (352)..(352): n is a, c, g, or t
cccacatgcatgtgcgctccgaggaatgggatataatgacctctgaggccaacccatatgacagcgtgagagttcttttggtgtgctccaagaacttaaagccacggagaagcctctcatcttatggcactgacaaagagaagaacattcacacttaccctggaaggggtgaagcccactgatgaagagctggccttgtttcttgtggagtcaagtgaagaagcaaagaagcaccttctccaagtgcgaaagtgcacctcaatggcacaagggaaagcgatgatcgagacttagacgggtataatccctgagaaccagaatgtgacttgcgatggaaagagactggaggggn

SEQ ID NO: 487895 - DNA, 231 bp, Homo sapiens
cagatgtaagagaagacggcaagtaaggagaagcaagggctaaaggtggactggatcttaaaaattgcgggggtgggatggtgcctgcctaccttgagagaagccagggtcccacagtaaaggacacttatatacaaacaggatgaggttccctgcgtctgagcacggtgcagccccacatgatgtttgtagtgcaaatgaaaatagactcccatttctccataaggcgca

SEQ ID NO: 487896 - DNA, 126 bp, Homo sapiens
ggcaccattgtgcggcaaaaagaagtgagcgggagatggatcacagcgaaggagtaaggtgctgcaatgatgttagctgtggccacggtggatttttcgcaagaacattaataaactaaaaacttc

SEQ ID NO: 487897 - DNA, 112 bp, Homo sapiens
cctctaaataggtcttagaaggatgtcaaatttatccgagccaggacaaaaaatagacaaaaattttaaaggaaaaaatgcatagggaaggggcgaaggaacctctaggggg

SEQ ID NO: 487898 - DNA, 322 bp, Homo sapiens
tgttaaaaaggcagaccagcctggcaacatggtgaaacaccgtctctagctacaaatagaaacaatgagctgggcgtggcggcgggcacctataatcccagggaactcaggaggctgaagcacaagaatcgcttgaacccaggaggcagaggttgcattgagccgagattgtgccactgcactccagcttgggtgatatagcgagactcagtctcaaaaacaaaacaaaacaatcttcatatgtaccgcatatcctttctcactcctgacttttttttttaactgcttacccttttcccccccttttcctggggagcagagg

SEQ ID NO: 487899 - DNA, 286 bp, Homo sapiens
catacgctcctctagagcgcgatataagcaccgcccggtcctttgagattttcacgctgtggctcgtactgttctgtcgatcagtttcgttagatttcacctgttgaggtttagggctaagcatagtgcggtatctcatcccagtttgtgtcttcagctcttgtgtgttcagatatcttaaagccactttcgtagtctattttcgtagtctactggagttttttacaactcacgtgatttttcactttcatagcagacggcgtaatctaaaaaaactactttacgc

SEQ ID NO: 487900 - DNA, 140 bp, Homo sapiens
tttctataggtctgactctagagtgatcccatcgtaagttccttcaatgctatccattcctctttgatattggaccatatgcagtgttaccgagatattagtgcgaattaatgatcatgttttgcttgttagatgcgtac

SEQ ID NO: 487901 - DNA, 322 bp, Homo sapiens
taagttgactcgtagagaatttgaaaaggcagtccgggtatggcaggaacgaaggctctagataacagggatgtcgcttggagcctggccctctggctggggcttcttgatgtttcctgtgggaagggctgaaagcaggagagggtggtggccccgtgttcctagcctgctcctccctccattcttcagcccacaagggcctagactgtgcggcctggctaggaaaggtccagggagttcacccagggccctgatctggcgcggggccaagcagaccttccaagagccaaactgagggtagcggagcagccgagctgaccag

SEQ ID NO: 487902 - DNA, 367 bp, Homo sapiens
cactctagtcatcttctgagatgtagtttcagctttatcacctacataacagcattctgcacctcccagattatgtacttagattgacaagtaaacttcttcgttcttcttcctaccctccttctttcccccagatgaacactgtatggacttttctttgggtacccacatctttgtttatatgtcagttttcctctactagaatttaagttcaatgaggagggaaaggccttatcttattcatctttataaacccagcacaattcttaatcatagtaaaaactcttagccgggtgtggtgatacacgcctgtaatcccagctactcgggaggctgaggctggaggatcgcttgagtccaggagttc

SEQ ID NO: 487903 - DNA, 97 bp, Homo sapiens
  misc_feature (31)..(31): n is a, c, g, or t
  misc_feature (69)..(69): n is a, c, g, or t
gatcttcccctagggggccctcttactcctncctctctcctcctccttccccattgctgtaaatatttnaacgaaatggaaaagaaaaaaaaaagac

SEQ ID NO: 487904 - DNA, 465 bp, Homo sapiens
ggagaattaactcctgagtttctgacagtacattctcaggtactattctggtcatctgtctgaaaatgaggagtacctgggagggttggaaacttgatctcacacagtgtgagaagcctgggtctgagagttggaagacctggatttgagtcctggcctggcctctgggtgaccttaggcaagtcccttcccctccctgggcctcttgggttttctcatttagcaagtgacagggaggttgacctccaaagcttgaagaatagtcatgctgattccaggcctctcagtgctaaggttcagttcctgatgcatgggcaaccctctggctgtggcctcctccctgccaggcactgctgggggagagggaagcacaggaagtgataccgcccagggaaaggggactcatagtttggccaggtggacccggtgttccgccaggaaccaaatggaaaatgggctgatggt

SEQ ID NO: 487905 - DNA, 1005 bp, Homo sapiens
tcccccataaaacagtttatattacaacactacatctctattgtgtaactcaaaggtgatgctgttaacagacatttactcatataaacattttaaacaaaaacaaactactacaaaaacaagcattaacttgacttttttcccaatgtgctggcactatcataaatgggccaatatggttattataaccagtaaataaaatgtggcaaaagctaataacttttaaattccacacaggttcccttcaaaaaaaaaaaaaaaaaaaaaaaaaaaaaaaaaaaaaaaaaaaaaaaaaaaaaaaaaaaaaaaaaaaaaaaacaaaaaaaaaaaaaaaacaaaaaaaaaaaaacaaaaaaaaaaaaaaaaaacaaaggggcggggcgccacacatattcttcctaacaggaaccacactaaacaaacaccacacacttattataataaaaaaagacatattctataaaactataataaaaaaaaaccacattccctctcatatataaaacatataacaaaaaacaacatctagtgctcgggattatcgaaagagacaaccccctatagggagtggaacgaaaaggagagaacacctagcaagagactaaggccgctggagtgaacaaaaacacaccggcgcgatgagtgagaacacacaccagacacagctgcgaaccacacacaaccgcagaagggaacaaagaaacacaaacaagcggccccccgaacaccgccgccccggccgcaccggagcgagcccagcgggcacgcgcgcgcggaggggggcggacgggagagccgccgaggggacgacgggggaaggggggagggggcgcgcgggcgcgccgacaagcaggacagcccgccggcgccggcgccgccgccccgcgccggcggggggggaggacagcagaacgcgcacagagaagagagggggaacgagcgagccggggcgaggggaggggcgcgctgaggcccagcaaccgggagagccgggaggagccacgg

SEQ ID NO: 487906 - DNA, 341 bp, Homo sapiens
acgcactggtagtcaggactatagcgtagctgcctgaatcagatgcactacgcagctgtgaggcgagaagcggtgctgagatgagtggagcgtgatatctctgtgatgatccactgctgcagtagcagtgcggtggattggctgacctcggggaccatggcagcatgcctgagctctcagcagtgcggtctggctctgaggttatccatcggacgcatcgcagtcgagagtgccggactgagccgctccaccatccatcctcagcacaccacaatcaaagagattccacgctgctccatgcgagtcgctgattggtacgagctcgaatcgatcatgtcata

SEQ ID NO: 487907 - DNA, 300 bp, Homo sapiens
gcaacctccacctctctgagaatctgaaatccaaaaggtcccagtgagcatatacttggagagccatatggatgcccaaaaagtttaacatttgggattttgggatgggtctgctcaaccgtgtatctcatatcccttaggcattggcaaagtgcttaatacgtatcacctcatttaatcctctcattacttggaaggtacggtaactttgaagtgtagacctgagattggaatccagataatcggacctcgtgcttaaaaccatactacggtactccagaacctaagtataccaggttc

SEQ ID NO: 487908 - DNA, 855 bp, Homo sapiens
  misc_feature (588)..(588): n is a, c, g, or t
  misc_feature (643)..(643): n is a, c, g, or t
  misc_feature (708)..(708): n is a, c, g, or t
tgcgaaatctccgacgtcgggcgcggcggccgatggtcggtcggggtgcagctgatgaaggccctcctggtcctgggtccctccgggcccgcggtcgtcgtcgcctggaggaaccctgattccctttcccgagtacgtttgacgcgagatacctgagcctgagtccgcggagtttctagtcgtgcagtacgtgtatccttacagtgttcgtggacgatgaacacggttctccaaccgacgcccttgaaggtgactgttccgtcatctacccgcctcactggggacagccctgcatgtgggtgatcccctacatcaggaaggagagccccctgctcaactgagttaccggggcttcctggtccgagatgacgcgggtcttcggactgggaggatggacgaggagcttctaggccgtgcagacccttgggcctgcggggcgggtgctctgcggtacgagttcgctgtgccagtggccaccgctagggtctccacaggcgccctccctccgcgcctccctccccctcgagccgccgcgatgtcccctgcgctcctgtcccctcccgcgtagtgcttgcctttgttccaggnatagcgctccaggctcctgctgcagctcctgggccgcactctagagcgcgttgcntccgccctcttttgccagcccagcccctccatgcacatttggacgctgtcctgcacttcaggtgncaagctgggctcctgttacatactggacagaccacccacagccgctgctgcaacccactccactcctccagactgcagccaatacatcattctgccaacagacctacgctaccactgccatcgccatcaccgatctaacaaagatgg

SEQ ID NO: 487909 - DNA, 1237 bp, Homo sapiens
  misc_feature (588)..(588): n is a, c, g, or t
  misc_feature (643)..(643): n is a, c, g, or t
  misc_feature (708)..(708): n is a, c, g, or t
tgcgaaatctccgacgtcgggcgcggcggccgatggtcggtcggggtgcagctgatgaaggccctcctggtcctgggtccctccgggcccgcggtcgtcgtcgcctggaggaaccctgattccctttcccgagtacgtttgacgcgagatacctgagcctgagtccgcggagtttctagtcgtgcagtacgtgtatccttacagtgttcgtggacgatgaacacggttctccaaccgacgcccttgaaggtgactgttccgtcatctacccgcctcactggggacagccctgcatgtgggtgatcccctacatcaggaaggagagccccctgctcaactgagttaccggggcttcctggtccgagatgacgcgggtcttcggactgggaggatggacgaggagcttctaggccgtgcagacccttgggcctgcggggcgggtgctctgcggtacgagttcgctgtgccagtggccaccgctagggtctccacaggcgccctccctccgcgcctccctccccctcgagccgccgcgatgtcccctgcgctcctgtcccctcccgcgtagtgcttgcctttgttccaggnatagcgctccaggctcctgctgcagctcctgggccgcactctagagcgcgttgcntccgccctcttttgccagcccagcccctccatgcacatttggacgctgtcctgcacttcaggtgncaagctgggctcctgttacatactggacagaccacccacagccgctgctgccgaactcgcactctcgcatctgcctgccagaactgcgcaggccatacctaccattcagttctgtccctactagaccatactgctactcacttgccatcgccagtccagccgctatcttcaccaacaagaactgtggctcctctgtgatgtaggacttcacctcaggaggtatccgagctgggactacgagctccctggacagtgatccagatcagctggccgtccccacaaggagcctgtcacctgtcagcgagacccattttcctccccatccccagagacctcattgtgttcctgccacatagctgtcagggcttaagtgtgcctggcaaccaaatcgaatctctcattttctcctgtggaccagttacttttgcctagaatcctgtatttcctctgaatttgcagctgtctctctgatgggtgccttttgttcaacacagtaagctgctcccttctactccgaggcactacctga

SEQ ID NO: 487910 - DNA, 970 bp, Homo sapiens
gcctatatagcctgccggtgagagaggattacatagggctccacagctggggctacagagctcaagccatacatagaaaggaccttgggaccgtaagcaaccaagtgatcgtcgaatacagtatctaaactgtagtagacgacatatagttatctcctctgttcagcgaccagctactctgcgccctatgctgggttccaggggagttctcctgactctgtggctatcgtctagtgttctagggggtgcaagcctcatgtgtgtggctttgtgtgtgtctggtgtgtgcgtactccatcatctatgggtgctcatgcctctgggtgtgtgtgtgtgtgtgcgtgtgtgtgtgtgtgtgtgtccggtgggtgggtgtgtgtgacagggggctctggaatgacatacatagtgagggaggagtagatacaccgatgaacagacgtatagagggacggcgtgacgcgaccgggcacggtctcaggggcctgtagccgtacatgcatcaacggcgtacatactagttcgggggaattggtctggacagtcgtattactgtggccgaggggtcattgatggaagaactgcttcgacgtgcttcagtgaaagagcgggtgcccgggtcgtaaataatgctcactcgtgacgcggggggatcaattggctaccaggagagagggcgtggcggggcatggattgaaacatgccagtgaactgccgaggcagctgcaaggaataggctggagaacaaatccaaggcttgggaagacacatacatctggggccccacggggatgtgcgcaagacccgcgggaggagcgaggcgggaactggcgggcatggtggaggtacgaaaggcggagcggagagggcaggaaacgcgcggggaagaaaggggggagacaacctagggaaccacgcagggagggccgacgacaggccagacaccgggaaaagagaaacaggacacaag

SEQ ID NO: 487911 - DNA, 252 bp, Homo sapiens
  misc_feature (61)..(61): n is a, c, g, or t
aaagggggggggcccctttttttttcccccccccggggttttttttggggagggaaaaaantttaaagccccccctttttttttgggggggcccccggggtttttttgggggggggggttttttttgaacccccccggggggggcccggggggttttttttttgggcgtttgggttttttcccccccccccccggtttttttttgtttttcgcctccccttgggggggccttaaaggggttttttttttgta

SEQ ID NO: 487912 - DNA, 431 bp, Homo sapiens
aaaaagcattaactcccaaacaaacaggcaaaatatccacattttataaaaaagaattaatacaactaataagcaaatagagtgggaactatccagcccttctagtgatgaggaaatatgaattaaagactgtagggtcccgctgggcgtggtggctcacgcctgtaatcccagcactttgggaggccgaggcgggcagatcccgatgtcgggagatcaagaccatcctggctaacatgatgaaaccccgtctctactaaaaatacaaaaagttagctgggtgcggtggcgggcgcttgtggtcccagctactcgggaggctgaggcaggacaatggcgtgaacccaggagacggggcttgcagtgagccgagactgtgccactgccctccagcctaggcgacagagtgagactcggtctcaaaaaaaaaa

SEQ ID NO: 487913 - DNA, 946 bp, Homo sapiens
tggagtagaaataagtcatttctttaatacatcaaacggggggatttctggacctgtgcttctctccgggtccgggcttccccaaaggatccacggggcggggctggagcccgtggggttggcagggtcccacaaaaggactgggggctgcctccctgggtccggagccccaggggcagactcgggtccggctcagtagcagtcggcctcgtccccagtgaaggaagcctcccggggcacagaagggtcctgcaggagggacgggggactcttctccacggggtcgcggttctcggacagcgtgctccgaaggccctccaggtctagggaccgtgagcagggccagcacagctcaggctccgggtccccggggggcggggcctgttcacccgcccgcacacctcggacaggggggcctcatgcgagaggcacgtgtgggggctgcccgggactcccgaaggcctgctgtaggaacgcaatctggtccctcaggaagagaaggaggtcacaagattctggccaaaggggggtcgaagccaaacaaggcacaaaggcggaagacaaagagccccacgtggagagagccctcagggccccggagagtggtgagtgggggcacctcgggaaggccacggctagggaggggaacacggggcccaagctggccaagacacgagggcaaggtcagggctggggggaccccaagcacggccggcacgcagcagaaaagtggccaacagcgcccggacgggccaagacggaagcagccgagaacaagaaaatggatacgcgaggaacccgagtccgaagatggagaccagcacagtagcgacaatctcagagagggaaagacagggaaacagagagaccggacaaggcggcggggagcaaagataggcccgcagaagagcacggagcagctaagacagggcggcgcggcacacaa

SEQ ID NO: 487914 - DNA, 1369 bp, Homo sapiens
gtgccagctccggaatgggatccggctgactgtcgtccgaggatgtatgtttccgcgttgctcctcctttgttccctccgtcctctcttgtccttcctcctccgggcgtccggtctggccgatccgtgtccgagtcacggctaggagaatgcagcacgatccacttgcgtggccttgcttctggaggtctatcactgtagcattacggatgacctggtttagcacgtcacacgtcagtcgtcgtggcaaggctttgacttgggccgaaggaatcccattgttcaaaccaagacaagggtgaggtgcatagagacagtcgtgatgaaccatgttggtatgagaaactgcttgaaccaatgaggaggtctgtgagagccattggtcaggacatgacgcattgtaacaacgcacacgttcgtgaggggactgcaccggatgcattgcaatggaagccggatatctttgcggttgtagggccgcaagctcataaattcgaaattggtttctagaccaaacgcagagtgccagagtttttcgctacataattcagtctaatgggacaccatacaagttatccatacacgccaaagccactcagaatccatttccaacacggggggtacactttagacagaagaattgggtggcgcacttcctagtgtcaggagaggtgtgaatctaaactagggcttggcccatttgccacaggccccgtgactaaaggttccaaaggcggcatgacgcacggaagattaccctagaccattccgaacattccccaggtgggtccgttgtccgcttccaagcaaatcaaaggtattgtttccactatcgcgttggtcaccatacagtgggacacgaccccagcaaaaaggaacaaggaggcagcaaaagacatgggacactggcggtgggagtcgccagcgggctgacaaccagggcacggggacagagtcaggtggtgtttgtgaggaaaagcccctggggtacctgggtgggcaccggccgcaggcaccgccccttgtgaggccgagcacaggtgtaaccccggggagcaaatacccaacagcggttgatcatggagacggacagaggaaattgcagcgccgggacattcagaaacagtatagctgacgcgaagtcgacatgatcacccacacgcggcacatataagagacagtaacacgccaagcggggggcacacaacacagagagtcgcggatgaggtgcagcaaagacaccacaaacacagagacagtgggcgcgcctgccatgagaaagcgcgcaacacgaaagagcgacatgcgacaaaagagggggaacgagtcagcagagaggggacgagcgacaaatccagaaacgcgacccc

SEQ ID NO: 487915 - DNA, 1111 bp, Homo sapiens
  misc_feature (209)..(209): n is a, c, g, or t
  misc_feature (215)..(215): n is a, c, g, or t
  misc_feature (219)..(219): n is a, c, g, or t
  misc_feature (238)..(238): n is a, c, g, or t
  misc_feature (1090)..(1090): n is a, c, g, or t
  misc_feature (1100)..(1100): n is a, c, g, or t
ggcagtttgtattttcctgatgtttgatgggcccgacatcagaggatcctcgaaagtcatattccctgggaaatctgaccaaaccgtaagaacgaaaagactattggctaactttgtggagaccactgagagctcagtcctcagcagaggagctggagggaaagagacattggaatacttcactgtgattgtccacgccgtcattctcntcatcngtanaaactgtggctggttcacnttaaccctgagcaggagctgcctatgaaagaggatggctggagtcagatgcctgggcactcttctggtcaagtcgggagctctcagtgcctgctgactcatctgtaaaatggggataacgtcaggatgagctaataacgcggaagccagaaaggctgatgccatctctgtttccaatatgatttttatggcctccaagatggtgtccttagaatctttctctgcagcaggctcgtttttctcctcaaattcctctgtgtttggctaagaacaatctgtttttcctacacttgtcaagttgctcgaaattcctaatgcccattcatgttctttccaaggattagcagagcactcctcgcttgtctttcatcacactccctccgcacatggggtaaaaattacatttgagtggaaccctggctatcgatgcctgtaaaatggagactttggcgagactcacttgcctgggtcagagtgggaaacaggctgaaaaacaggcctgagcatctttaatgatgtgcagaaagagaggggcctctgcccccacgggcagatgtacacagctgctaacagagaagcccctcatcctgtacgaccagtgcagagaaacgatcccctcgaatgcttcctagtggagttaagaaattttttgttgatcgtgcctttgaactaaggtcatttaagtatacaacagatgttcctctgagggaaacagacttataaagtcaggaacacagaagggacctaatggtttactaggggtggcgcattaagttcatagcaatttaactcctttcaatgctaaacaaaacaatgacgcaatttgatgcgcaataaaaacttgtcaaaagtntcaacttacnaaaaaaaaaaa

SEQ ID NO: 487916 - DNA, 534 bp, Homo sapiens
ctcattccctagaataattataccatgttctatttttaattcagattatgaagaaaggggtttcggttttttcacgataaacagatgtatagtttcatagcatctgcatgaaatcgtttgaagagcccttctcactggaagatctgccatcccctgaatagcactgacttgctctccaactctgttctattttcacttttttcatagagaattctttaaaaaaaaaatgaagttttttacttcaaaataaaaacagagtagataaagaggatacatattggtgaaagtgcatattcttttttcttaggggtgaaagcttgagttgaggtgatcgtataagtaaatagaacacatcaaaagtgtatatagattctgtttgcctagggcctgaagcctcagttgaccaatttaatgtctgtatagataatatttggttttataactgcatttaaaatgaaatcttggcctcccaaattactgggattacaggcgtgagtaccgcacctggccatccctctctctttaaaatgaaac

SEQ ID NO: 487917 - DNA, 1769 bp, Homo sapiens
  misc_feature (496)..(496): n is a, c, g, or t
  misc_feature (605)..(605): n is a, c, g, or t
taaaaaccctcatcaatagatggagacttacagaaatagtcaaaccacattctacaaaagtgccagatatcagggcgggcggctttcgaagcccaagaggtgagtgtttgggatgtgttaagggtgaaaatattagttgggggggattgaaggcagaataggtgagagaaagtgtgagccaattaatgtgagcgtgtgaagtctccgggtggaagccctgtgtgggctatcacaaaaacatgtgttgtgacgccgataaaatgtcgccggctgcgagaaatgtggtgtgaaaggggaagactctcagaaggtatacctcgtgaggcgttgtgtatggagaggggcgctacacacatatatagagaaccccacgagtataaaaatgtgtgtgtaaatatacacgcacacgtgtggcttgtgacattatattgtgtgcgtgtctctgcgggtgtgtgtgtattcctcatatatataacacctataagtgggtgtgaangcctctcgagggtgtgtatctgggtagatacccctcgcgtgagagtgcgcgagagtatacatatagcgcgagagtggtgtgtgtatatagagagagtgtggggacaccntctacatgagaggggggagaatataataggcgcgggagagagtgaaagtcgacgcgtgtgtgtgggagggtgccacaagtgtgggcaccttcctccataaagtgtgggagggggggaaaagagggagcccaataagagaccggtgagacaggtgtggggtataacaacacgaggggggccctacgacagaacaaaaaacatctccccgtggggcgaaaaacgagaaaaacaaaaaacaacatgtactgccgtgcagaaggcgggcataaaataataacaccagactgacgggggcaaaatatatacatcccccgcgggtataatatccgacacaaaggcgggccctattatacgaggcgggagacacccccggcgtgttcgtgtcttgtgttcggtatggcgtgtgtggacccccctgggggggtatatgtggcgctggcccttcatcaccattcacgaggggtgatacaacccaacttatcggcgcggaccacaaacaacaagtggaggggacacaataaaacgggggcacaaacgcagcgagaaggagacagagagaaacacagaaaacaggggccccaaaagaaataaatagagaaagaagcagacgaggttaaaaatggaggaagctgtgtgcgaacaaggcgtaacaaaaaacaccaccacacagtaggcataataacagggccgacgggagcgagggaacacaaaaaagaagcaaggaggagccgtgaggttaacaaaggcgggccccgcccagttgtataataaggggaggaaaccaagcagaggggacagaacagagtgactgcacaaacagataaatcaaacgaatacgagggaacgaggttgatagaacaaacaacaccgacgacgacggcgaggcggaggtgcatgagcaaaacatcctcacgagcggtaaagagagaagcagagaagacacccacagccacacagtagtacacgacccgccgggccacacagagccggaggcagcgcacaacaaagcgcgggcggagataacagagccggtcggcaaaaaaaatccaacacgcagggagggaccaagaaattataccacaccaagcgagcaagtcagacagcccaggacagaacacaaatacagagaagagacgcaaacagaacaagtggtagagcacacag

SEQ ID NO: 487918 - DNA, 930 bp, Homo sapiens
  misc_feature (93)..(96): n is a, c, g, or t
  misc_feature (102)..(102): n is a, c, g, or t
  misc_feature (338)..(338): n is a, c, g, or t
  misc_feature (384)..(384): n is a, c, g, or t
  misc_feature (423)..(423): n is a, c, g, or t
  misc_feature (440)..(440): n is a, c, g, or t
  misc_feature (445)..(445): n is a, c, g, or t
  misc_feature (488)..(488): n is a, c, g, or t
  misc_feature (499)..(499): n is a, c, g, or t
  misc_feature (527)..(528): n is a, c, g, or t
  misc_feature (534)..(534): n is a, c, g, or t
  misc_feature (557)..(558): n is a, c, g, or t
  misc_feature (562)..(563): n is a, c, g, or t
  misc_feature (571)..(571): n is a, c, g, or t
  misc_feature (603)..(606): n is a, c, g, or t
  misc_feature (610)..(611): n is a, c, g, or t
  misc_feature (613)..(613): n is a, c, g, or t
  misc_feature (618)..(621): n is a, c, g, or t
  misc_feature (623)..(625): n is a, c, g, or t
  misc_feature (629)..(629): n is a, c, g, or t
  misc_feature (639)..(641): n is a, c, g, or t
  misc_feature (643)..(643): n is a, c, g, or t
  misc_feature (646)..(646): n is a, c, g, or t
  misc_feature (649)..(649): n is a, c, g, or t
  misc_feature (727)..(729): n is a, c, g, or t
  misc_feature (732)..(732): n is a, c, g, or t
  misc_feature (739)..(739): n is a, c, g, or t
  misc_feature (930)..(930): n is a, c, g, or t
gcaagcgtggggcgcgggaacccgagcaggactctccagtcctcagtcaccttggacaaagaagtgtggatcctcagattccatcttttccannnntttgtntgccatggcagagaaggtgctggtaacaggtggggctggctacattggcagccacacggtgctggagctgctggaggctggctacttgcctgtggtcatcgataacttttattttgccttccgtggagggggctccctgcctgagagcctgcggcgtgtccaggagctgacaggccgctctgtggagtttgaggagatggacattttggaccagggagccctacagcgtctcttcnaaaagctttatggcggtcatccactttgcggggctcaaggccgtgngcgagtcggtgcagaagcctctggattattacagagttnacctgaccgggaccatncagcntctggagatcatgaaggcccacggggtgaagaacctggtgttnagttgttcagncactgtgtacgggaacccccagtacctnncccttnatgaggcccaccccacgggtggnngggnngggggggnttttttttttttttttttttttttttttttgnnnngggnngngtgtnnnntnnntaanactttttttnnntnttnctncgctatttcaaccccacaggtgcccatgcctctggctgcattggtgaggatccccagggcatacccaacaacctcatnnnttntgtctcncaggtggcgatcgggcgacgggaggcactgaatgtctttggcaatgactatgacacagaggatggcacaggtgtccgggattacatccatgtcgtggatctggccaagggcacattgcagccttaaggaagctgacagaacagtgtggctgccggatctacacctgggcacggcacaggctatcagtgctn

SEQ ID NO: 487919 - DNA, 273 bp, Homo sapiens
aggatcccccttgcggtgtctcataatgcactgtggcacttaggtcctaggtctccagagggtgaaagctggatgtctgtcaatgtcctactgagacagcacagaccaaccttaggctagacaacattatgttttatgtctagaacaattatatactatatagaattcagctcaacagatacacaagtctgaaacaggcttcatgtgggtggacatctaacatgtagttgctatggttttctaggaatgagaacttactatctctggctatct

SEQ ID NO: 487920 - DNA, 532 bp, Homo sapiens
  misc_feature (39)..(39): n is a, c, g, or t
  misc_feature (44)..(44): n is a, c, g, or t
  misc_feature (57)..(57): n is a, c, g, or t
  misc_feature (75)..(75): n is a, c, g, or t
  misc_feature (84)..(84): n is a, c, g, or t
  misc_feature (118)..(118): n is a, c, g, or t
  misc_feature (125)..(125): n is a, c, g, or t
  misc_feature (130)..(130): n is a, c, g, or t
  misc_feature (132)..(132): n is a, c, g, or t
  misc_feature (197)..(197): n is a, c, g, or t
ggcaaggcgctgcagaagtgccccaactccggtatcctntggtntgaggccatcttnctccaggcaaggccccanaggaggccncaaagcgtggattcccttaaaaagtgtgagcatnacccccntgtgntnctggccgtggccaaactgttttggagtcaacggaagatccccaaggccagggagtggttcccccnccctgtgaaaatttactcggacctgggggaagcctgggcctttttttacaagttttagctccagcatggcccttaggaacaccaggaggaggttaggaagcccttttaaagtgcaaacccccggcatggggaactttggtgccccgtgtccaaggacatcccccactggcaaaaaaagatcggggacatccttagggtggtggccggccgcatcaaaaaccccttttgattgagcggttgccatggccggtttccgtggggcagggttgggccgcatgtggaagggcttttaactgggtcctccttcattaaaagtttttatgtttcgggtcaga

SEQ ID NO: 487921 - DNA, 1218 bp, Homo sapiens
  misc_feature (428)..(428): n is a, c, g, or t
  misc_feature (573)..(573): n is a, c, g, or t
  misc_feature (612)..(612): n is a, c, g, or t
  misc_feature (621)..(621): n is a, c, g, or t
  misc_feature (698)..(698): n is a, c, g, or t
cttcatagtaatacccatcataagtcggaggctttggctagctgactagttcccctaataatcgtgtgcccccggatatggctgtgttccccgcaataaactagacataagcgtatcttgactcttacccccctctgcatccgtactcctgctcgacatctgcttagtagtgggagcgccggatggcaggaagccagcgttgcacactaagttcgttacccatccctatacgcagggaacaccaatctacccctaccactggtagtcctcacgatcagaccgtaacccagtactatacattccttaccgagcactaggagaggataggttcttcaactttcatattccttaaggggcgccattgctagactttcaattcaactagaatcaagttagtccaactattagaagacgctcccctgtcacantagaccctcgatagtaactcaaacatcggccactcctcattactgtcgtggtaatccagttcgcttaatagtccacaagctacgtcccatatcgttcttccgcttgaatgctcatcccaaagttcggttatgcttggcctgggcnatcgacataagtacataacagtaaacaatgcaccatgcngaccttcanaacacacgcaacacgtattcgtatctcgactccctgcctggcagggcagtgatgactcgccatatctattaccaacnaccttaattctagattctttccgggtcgagccctttgataaggtgtatattatctactttgatttcgcataaccctaaggtctttgcgagaaattagatttcgtcccacagtaactttgctacaatctttaacctcatctccccgagaatatagaccactaaagcccactcttttgggaataagcgattacgggtcatgcggtctagacgccttaatgattactacagatttgtggggccttcacctaaaaggggttttcattccccggttggttgaagaccaggcatcgcaattgaatctttgtgtagccaccgactactgggaaactttagaccgcgtaacgaacgaacgatcgaaaaccaattcatttttgcaccccttccgggggtaacgcatttgaaactccagttcggtttgaatccgcccaatccggggggttcagaagagtgcattttcacggcttgtaaatccgctccaaagctttcccaccgggaaaacgcaaattcttggacccttgga

SEQ ID NO: 487922 - DNA, 411 bp, Homo sapiens
gaggccaaggtggatagatggcttgaggtcaggagttcaagaccagcctggccaacatggtgaaaccccatctctaccaaaaaaaaaaaaattagccagacatggtggtgggcgcctgtaatcccagctactcaggagactaaggcaggagaattgcttgaactcaggaagtggagactgcagtgagccgagactgtgccactgcactccagcctggggtgacagagcaagattccgtctaaaaaaaaaaagtgttatttcttagtaaaatagttcaatctgctttttcttttctgtttttctttttccgctgagttctgtccgcagaaaccgttctctggaacagtgcagattgcagattacgtttactacctccgccatgtcccgcccttcagatgtttgaagatgact

SEQ ID NO: 487923 - DNA, 193 bp, Homo sapiens
tacggcctgctatatgcgtggtcgcgctgacgtcccggtgcatgccaggagtctgttagcgagccctcgaagtgatcaagtcctggcaacattgtaacgccactgtctaatagatcgtagatgttatcaccataagcaatttggattcccttctgagattccatcaatacaaactcattattctttctttttt

SEQ ID NO: 487924 - DNA, 120 bp, Homo sapiens
tctaaaagctgccgcacggccaccaccagcctttctataacgtgctggtggaggacggctcctgtcgatacgcagcccaagaaaacttggaatataacgtggagcctcaagaaatctcac

SEQ ID NO: 487925 - DNA, 401 bp, Homo sapiens
  misc_feature (1)..(1): n is a, c, g, or t
naaattgcatattctcggtcatatgtgagagctaaaaaaaaaaaaaaaggtttatctcatggaggtaaagagtagaatggtgattatcaaagtcttggaagactagaggggtggaggtgatgaagaaaagttgtttataggtacaaagacatagtcacattgaaggagtacattctagtgtttgatagcaaagtagagtgactataattgtattttgctttgtattttaaaacagctaaaaaagatttggaatgttcccaaaacaaagaaatgataaatgttcaaggtaataaatattctaattaccctgattttgtcattacacattgtttcatgtatcaaaatatcaaatgtaccccataaatatatacaattatgtatcaataaaaaagtaaaaatgc

SEQ ID NO: 487926 - DNA, 91 bp, Homo sapiens
agcccgtctggaagagaagggagaggaggagggagcgtcatccgaagtcgccgatcgcctgcagcccccgtccggcgcaacgggaggcagc

SEQ ID NO: 487927 - DNA, 219 bp, Homo sapiens
  misc_feature (31)..(31): n is a, c, g, or t
  misc_feature (61)..(61): n is a, c, g, or t
  misc_feature (98)..(98): n is a, c, g, or t
  misc_feature (131)..(131): n is a, c, g, or t
  misc_feature (151)..(151): n is a, c, g, or t
ccatcatgagcctcctcaacaagcccaagantgagatgaccccagaggagctgcagaagcnagaggaggaggaatttaacaccggtccactctctgtnctcacacagtcagtcaagaacaatacccaagtnctcatcaactgccgcaacantaagaaactcctgggccgcgtgaaggccttcgataggcactgcaacatggtgctggagaacgtgaagg

SEQ ID NO: 487928 - DNA, 240 bp, Homo sapiens
taaaccagggagtaggggtttattattactcaaatcagctccctgaaaattgggaggctagggtttttaaaaggtagttgggcgggcaggaggctcggaaagggggaatgctgatgggtggggtcggggatgaaatcataaggagttgaagctatcctctggcacggagttgggtcccgggggtgggggccagaaaaaccagagtgagccagtttggaccgtgggggggatacccgagct

SEQ ID NO: 487929 - DNA, 482 bp, Homo sapiens
ggagcagacgggtggagcagtcaccgagggagtggaggagtgaaggaggtaatgttggttgaaactgaaaactttcgtcgctcagagaaccatgtggtacctccatatctgaatcgagctccatgtcggcggtagatcccgctgagttgcattcattttactggttctttggactagctgtgctagaggaagatgaacacttcttgttgccagacttaacacctggcgcttggaagtaagaagtaagggagttggcaaacacatccttctgatgacataccctggttgttatggcaccgaagatccaccattcgtcaggaattcctcggggagtagatatattaccgccatgatagttgaccaatttggagagatcgtagggggcactaaaatgctggattattccaacaacttctgtctcctcatcagtgccatcttcaccatcatagagtgcacgcccgaattctcaaattcagcttctt

SEQ ID NO: 487930 - DNA, 408 bp, Homo sapiens
aaccttaatgtgggccagcacataagtgcaagacctcttgttatgtaattattatgcaaatggcgtctccactcgggagtatttctcgattgtcaacctcaaggactcgcaggtcgcctggttctagatataatggggaaagtatgtagaagttatatcttagtccgccgtagtcggtgtactcgtaggtctcagtaccattggtggccaattgatttgatggtaagggaggaatcgttaccctctcttgttatgtaaagtatgcttacggatgatagtccgattagcactagaatgatggcggacaggatagtacatgcgctttatctttcctgagcgtgagagatgtgagtattagttacttctcttgtgagtgataggaaaagggcatacaggtctagcacacct

SEQ ID NO: 487931 - DNA, 387 bp, Homo sapiens
caacgtgcagcctctctgggatgtatggagacttctcagagaaccaacaacagaactaccatttgacccagcagtcccactactgggtacttacccaaaggaaaataaatcattatataaaaaacacacctagaggatgggcgcagtggctcacgcctgactttgggaggccaaggtgggtggatcatgaggtcaggagttcgagatcagcctgaccaacatggtgaaaccccatctctactaaaaatacaaaaattagactggcatggtggcgcgcacctgtaatcccagctacttggggaggctgaggcaggaaaatcacttgaacaagggaggcagaggttgcagtgagccgagatcgtgccactgcattccagcctgcctggg

SEQ ID NO: 487932 - DNA, 872 bp, Homo sapiens
ttttcccggtcggtggttgctgatgagtgtctctagggtgatacgtgagcgtgacagaggtactggttccgtgaccagagaactgcagcgcggcctggtacgccatagccgtacgagtacagaattgaggacatgtcagggatctgtaccggactcacagaccggggatgggatgccgatctgtcaaggatggcaatacgagataagggagaacggtggacagtatgtgaagagtgaccgcagtcgcattgccatgcataaggccttttatcaccacatgtggtacgatgcgactggactacaaggaggaccgtgcaggaggaagactgacaacacgctaccgccgtgtgctccctcgggtgtagtgcatggtgacaggacatctgaaaatgaatcagaccatcattgtttgggactgttttatattgaccttactaacataatgctaattcaagacgacaagtatataagacaagttaaacagtgtattttagtatataactcaaaacaataataaagagagatttgtggaaaaatccaagttacgggtggaggggaaatcggttcatcaattttcactttgcttagaaaacaatacttttttcttaaagcacccgttcaccttcttggttgaagtgtgttaacaatgcagtagccagcacgttcgaggcgcgcattccaggaacgagtgtgcttgtcatctgccactttcgggagggtggatccactgtgcaggagtggacggggaagctggcagcactcaagtgaggtcgccggcacacaaaggcacgttggatttactctttgagagagttatcattgggagaagcgggggacagaacttgaagtctgacagttcggggcagtgagac

SEQ ID NO: 487933 - DNA, 103 bp, Homo sapiens
gtagaaatataggtgaacttttttctgttcttttggcaggatgtgtcaggggcggttgactgtggatccagaagagggattttcgcttcgtcttatgagttct

SEQ ID NO: 487934 - DNA, 166 bp, Homo sapiens
atgcgttttgccgtctctagagtgttccccgcgcggctgccgcacgggagtcggctgcggcacgggagtacttggtgaggtcggggaatagctgggtgatgttggatgagtagcttgcgagcaggtttggcgctgtacgttagggcgtgctggcaccgggcacgac

SEQ ID NO: 487935 - DNA, 152 bp, Homo sapiens
aagtcagctgagcttctcagaggcaactagcagcgtgctctcagtcaggaggcacacaggctggtgcaccagtgcagcccttagtggctgaggagaattgacgctgcgtgatgtcgatgtcgtgatgtgagcaggtgtcagatgtcttgagc

SEQ ID NO: 487936 - DNA, 118 bp, Homo sapiens
tatcagtgcactcaggaacgaggaggcaggagatcagctgaatctggtaggtggaggttaccgtgagccgagatcatgccatgcgctccatcctgggcaaaacgagtgaaaccgttgt

SEQ ID NO: 487937 - DNA, 364 bp, Homo sapiens
gagacgttggcgggaagcgcagctcgaagcgcgatgccgagagtggattcctggggctgctgcccacttcggtggacccagcgctgaggcggtgtatggcgaggcccaagaaataagaagcggagctggcggctgcttgctcatgagccgctgatgctggaggtagaccaggtcctggaagacgtgcggctacaggagcgctcgagcggcggcttgttgccagaggcgcccaatgaatgactcttcttagtggacactggcttcaaggagagaccacttctgggtgacctgatactcgagaacacattcaaagttcctgctcgcgacgtgctggtgcaccacgttcccagcgccgaggctgagc

SEQ ID NO: 487938 - DNA, 1684 bp, Homo sapiens
tgacgctggacttgggcgacctggtgaggcacaggcaggggagagatgggcgacccctgccccagcgcagtgccggccacaccccaatggcggttgccagagcttaagccccgagacggagcaggctagtaacatagcatagatacgtagagaataactacacgtgtaagactagatgcacgaacaagatctggacaaggcagtaagaatgtggagttatcgaggaggaataaaatactcacacaccacccatgactaaacacacaagaatataactccataaaatataaataagaaaaacaacaacattataaaaaaaaacacaaaaacatcaaaatcatctcatataatcgtcaccaaaaaaaaaataaaaaactgaaaatatcaaagacacaaaaataccagacaacaaaaaaaaaacaacaaacgataataacctcaacagctacaaacaaaacgaaccaaacaacttcaaacaacaacaacctaattatatatatcacctaaacaaaacatccatcaactcattcataaaataaaaaacagaaagacacatgaaaatgagacaaagcaacaagtctagaaaacggagtaggcaacaacggcctcaagaagacactaccacaaacaacaccacgacaagtcagacaccaacgagcgcgaaagctcggatgcgaatagaatccaataaaaaatcatatcacgctacactacgagagaagagaatgacgacatgccacacacaaatgaccgatattgaagacgagctcacaaagacaaacatactaaccaaatcacaacatcaacccacaacctcacaaataacacacaacaacaaacaacaaactaacataatccaacacaccataaaccaactcataacataatcacatactacataactcatccaagatccactaaataacatagaataaattctatactaaatcatcattcaaacatacaataactacaacaacactatcaaactaaactaccaataccaaacaaacaacaatacataaacacagaaacagataccaacaatcacatccaaccaaactacataatacaatatactacatcaattaactataacccgcagacacgatataacagaatcagtaaaaacatttacgcagtatacatctaaatatatgtacaagaaagaaaatacttacactatctagtgcacatatacacactcacaacgtcatgtaaattcatgtacgatatttacttacatagacacactaagttactactaattatcaaacttagcaccgacaatcatagacaatcaatgattcaataactacgtattacttaaaatcaacaatagaagaattagatatgaatacaatataaagccatatagaacaatacaaacaatatcaaaatgaccacaaatacacactaaatatgatataatatctatataacaaacaacacaacaaccaaataaaaaaaaccaaataaaatattaaaaatatagctaatctataagaaactcgtataaatccacactaaaaaattaactcaaatacacaacaagaccaacaacactaaacaactgaacatattaatcgaaacaatcagaaaaagacacacaaaaaaacaatacgaaacaatcattaaaaaaacgacgatcaacggaacgaaagaataaacatacacccaaacc

SEQ ID NO: 487939 - DNA, 859 bp, Homo sapiens
  misc_feature (5)..(5): n is a, c, g, or t
  misc_feature (23)..(23): n is a, c, g, or t
  misc_feature (53)..(53): n is a, c, g, or t
  misc_feature (76)..(76): n is a, c, g, or t
  misc_feature (118)..(118): n is a, c, g, or t
  misc_feature (815)..(815): n is a, c, g, or t
  misc_feature (824)..(824): n is a, c, g, or t
tgatnacaaagaacggagccctnatagatgtgtgagtcatccaccgatcactncacacacatctggtcactgcttntttcggacagcccctgatcctcctgaatccctgatccctgtngctccttgcggagttttctagccctcttatttgaagcatgtctttcagagcctcgcaccacccagcttgggtatctggtgaattctgtggtctgcatgtccatgtttttgacattctgggaagggtggcccaggctgtgatttgccatctactgctgcaggctatggatggtattcagaagggaggggagatgctgtgtgcgtgttctgaagggtttcccactaaatggagagactgactctctccataagtatttgatttttactttatctcctcgttgacttcacagtgtaagtgcagtttgtctctactgggtgatgcatgcagataaatgtttatgtgaacataagaagtctgcatgtgtgggtgaactctccacatcatgtcatttattgtccatcattacgtatctgtggtgtctagcacattcctctaccttattttctgtcattgtacctacttctacctgaacacgtattaaatatcttattaaaaatacacaaatattatgtttcctcagtggttttttccccctcacattggggccctcctcttcagtgggactacagtgtgggtacctgcaggtcttcagggccttctggggagggttccagcttttccggggatggctctctctctctgggccagcttcaggctggaaggcagtggggtgttgggtgcccatcccgttggctantagggtgantaaaccggggttgtgtttttgaacccctagttttt

SEQ ID NO: 487940 - DNA, 468 bp, Homo sapiens
  misc_feature (447)..(447): n is a, c, g, or t
gaaggggtgatgcggtaggatcacttaaacccaggagttgaggttatcgtgagctatgactgtaccacctgcactccaggcggggcaacatagtaagactgtatctcaaaaaaaaaagagggtaaaagataatggaacggaaatggttacctgaacattcagaataagcttaggggcaagataaattgggttacacacatgtcaaatttaaaaggcctataagtttctaaatgggcaagatgtgtcaccattgggatatacaaagaccgggaatccagaagcatgagcatctaagcccagctggcatgggggcatgacttgggctctggtttggacaacttaccctcccttttatcctatttcccaggccaggctctccaaggtgagctacaaaatacactttaataactcctttctcaaactccgggcctcaagtgatccaaccgnatcacccgttcgggtaccgag

SEQ ID NO: 487941 - DNA, 631 bp, Homo sapiens
gtaaactcagccactttgctcaggagaagtgtttgagcatggtctgttcctagttacatgttggctgtatatgtatgttgagaagtcagtccaagggaggtatgttgcttcgcacaatcaggccttctcaggcgctctggctatttcctttgaggaaggtagcaagtgagtttccatgttggcatgatgtagtttaaataccgtcagattttattaattgagaaatacagtacccctccctccagatccgaatctggtaatttatggtaaaattgtggttctgtgaacgcagctattagtctcatcttcttaagctcccgtcaggcatccatctaaattctttgatcttcgtcttccacctctctggctctcagtggaagaatcctttgacacatgaaacacaatggaagctggagaaatcttgtcttttagaaaagagaattaatcacaaggtatctctcttgcgtaaatagataaatataggtaaatctccataggaaatggggaatttagtttctctacatgtgatttcggtctccaaagctccctgttggctttttaatgcaattgttaattgttggaagtaataacatagtccaagggtgtttcgttaaaaataataagagcataa

SEQ ID NO: 487942 - DNA, 1606 bp, Homo sapiens
  misc_feature (75)..(75): n is a, c, g, or t
actatggcgtgtagtttggttgtggtgtggcggtgcggtctgtttgttggtttcccgtacagctggtcgtggttnggttccggcttgcggtgtggcgtgtgtgtttgtttctttcggtgtggtgggcggtgcctccccgcccgcagcgtgttgtgtttggcttccggcgggccttgtggtggtggcgttgagtatgtagtagctgttgtgttgttgagcttacacgcgctcggtgtgcgtgcttgagttgtttttgtaagtcgcgatcgcgcgcgtatgttggtccgtcgtatgcgtgtgtgctctcgcgtgctgctgttgttttgccccgcctctctccgggcgggtggtgtgtggctgaaggggaggcggtggttggttgtgtgacggtgggtcgatcgtggctgtgctcggagcgagacttcatttgctgcctacggcggtggggtggctcgcgatcacttgatgtagtgcagcgagtgtgtgtatgttgttgctcgtccggtccagcagtctgctttttgtttgggtggagcctccctctgtgcggggggtggttagtgtgttgtcatgcatgtgtcgcttgttttgtgcaccgaccactgctcagggggtggggtcgccccggccgtgtggctgcgggggccgctcctggtcgtgtgttgtgtgtgttggcgtcgccagcacacgggctgctcatgctcctcgccgtgtagtgagagcagcgctcggcgtggggttttcttcgtcgctgtcggccgacgctgtgtggttggcgcgtcggttgtggggggagggccgcgacagtgtcttctcacctatagatgtcgtcgtctctctccctctatagggagagagaggttgctatgtttttcccccccgcctctctctcgagggggagatgttctcttctcctgtcgtctacgctcgtgggtggtagtggccccccgctctctgtgtttcgtcgcggggtagctccccgctcgtgtgcacacaccaggctcgctcgtcctgcgcgcacgagtgtctccgtctctgtctcctctctcgtctttctatgtttctctctcgcgcgcgcgcgagaagatatataactctgtttttctcgtcccccccacacacactctttctctgcgcgcgctctctctccgcgcgagatctcacccgcgcgctgtgtcttctcggtgcgttgtcctcccgcgcggccgggctcccgcccccgtctgtgacacactctctctctctctctctctctgtgtggggggcgctcctctcctattttgtttctcttcccccgcgcgctatatatattatataaatatgttttctctgtggttgtgtgtgaagacacctctctcctcttcttgagagcgcgcgagaaatcatctctctctatatagtatatagtagagagacacaccctcccctctgcccctgtggggggaaaaaagggagagacccccccccccgccccaccgctctcgtcgagagacccccgaaacacacaaaaaattgaccacaaaaaagagagagagagagtggcgggccccccccaaagggggtggtcaaaagcagcaccccccgggcccccttgtttttttctaca

SEQ ID NO: 487943 - DNA, 281 bp, Homo sapiens
tcagacgctgaactatgtgatttgaggcacggtagatctcgcctgtcatcccaccacttttggaggccttggcgggaggatcacttgagttcaagagctccagaccatcataggcaacatggtgaaaccatgtctctacaaaaaatacaaaagttagccgggcatcctggcgcgtgcctgaagtcctagctatttgagaggttgaggtgggaggatcccttgagcccaggaggtcaaggatgcaatgagtcgtgttcatgccactacactctaatctgtgt

SEQ ID NO: 487944 - DNA, 86 bp, Homo sapiens
gttggatattaatgctttgtttgctgaggctaaacactatcatgccaagttggtgaatataagaaaagagatgctgatgcttcatg

SEQ ID NO: 487945 - DNA, 456 bp, Homo sapiens
acatatcaattaattctagctgtattttgtttttctatttggggtggcggaggcgaacggaaggcaatacccggtaagagaaacgggctggagaacaggtgacctttttgtttttattttttctcaaacagcaagtactgtgggtctgataccaggttcacctgaagggtacatcttaacagcatccagaaggctttcttttgacaaatcacacgcaccaccgcatcaggtgggaggggtctggccatgcggctcaagtgtccaggtggagatgaatgtgtggctcccgcaggcctgaactcacccaggaatggcttggcaaggagggccggtggggaccgagagggctcatcccaggccccacaagcagccgcttgcagtgggagaaggaccagcagacaagaagctcaggtaaggaatgcctggaactgtcgggtggtctaaatgcactcagga

SEQ ID NO: 487946 - DNA, 184 bp, Homo sapiens
gtgaaaggaagccagaagactgattggagggccctatcttgtgagttgggcatctgtttggactttccaccttggtcatatactcttcagctgttagaatgtcaagactttggggcagcattagcttctgttgtcacagggatttcttgagcagaaatgctggagatcaaccatggggtcagga

SEQ ID NO: 487947 - DNA, 128 bp, Homo sapiens
atcgatgcttcctggtagctgtggaactgtgagtaaattaaacctctttcctttataacttacccagttctcaggtaatatactatacagcagtgtgacgaacagataaatacaagcctcattgtctt

SEQ ID NO: 487948 - DNA, 274 bp, Homo sapiens
tgaggtctaaccagatatgagagaaccctcttatgtacctcttcttgctcttactaatccattcctttccttgcactgtgaactctttttttaacttttttgagacagcgtctcactctgtcactcaggctggagtgcactggtgtgacctcagctcactgcaacctccacctcccaggctcaagcaatcctcccacctcagcctctctggtagctaagaggtgcataccaccatgcccagctaatttttttttttttttttggtagagcacgg

SEQ ID NO: 487949 - DNA, 231 bp, Homo sapiens
cttgaggactcccgtcacgcatcgtcgctcgctgatgcctttctctccgtactagcccgtgaacttccacgccatgtccagcccttccttgaggatctacacagaggctcagcggccattggacatccctcttccacttgcccgggctgtccagcacccgccagacagaattcataccagtaaggccacgatgacccgcgcatgtgtgcctcggagatccggccacaaact

SEQ ID NO: 487950 - DNA, 744 bp, Homo sapiens
agcggggagtggcctggcgcacaggtcgagggcggctgcgtgcgcagtcttgcaacatgtgcgtacccagtgggcatcctggcgccgagctgtgggtactaccctcgtgcagtggtatggaggtgactccctgcgatgggtcctgcagtttccccggacgaactcaggatcctgctgtatgtgttactttgctgctgtaccttggacaggacttgggcatgatagatgctgatgaattgcgatgagatgtctgacacatgtctgggcattgctgaagagatacaataccttttaaccgtgtggagactatgcgcggcttatgagttttcaatgctgggtagagatatgtctggcacaataggttttcaactgaatttaaaagaactcttgggctgtactgaatggctggagactacactttatcagttattgacactgacaggagtggaacatgtagaccctagcgagaattgcagataggccctgatgacgaatgtggatttatgttgagtccccaggctgtgtagttcacttgtctcaaatgatacaagtacctagtggaaagatcaccttcgacgagctacagtcagccttgctgctgtcaaatctgagggctcttacagagcatgtttcgaagacgggatactgctcagcaaggtgtttgttgaaatttcccatatgatggatttcattcactgtgctcatgactgttggaatccaggagggaactgttgactgtttcca

SEQ ID NO: 487951 - DNA, 114 bp, Homo sapiens
ggaagacctcgctggacatcctgcagggccacatggtggctctgcttgtgattctggggtccaccctctccagtcaagagaacccccgtcgggtttaatgtatcaggaaagaga

SEQ ID NO: 487952 - DNA, 413 bp, Homo sapiens
  misc_feature (167)..(167): n is a, c, g, or t
  misc_feature (172)..(172): n is a, c, g, or t
  misc_feature (204)..(204): n is a, c, g, or t
  misc_feature (381)..(381): n is a, c, g, or t
acatcggtcaaaagtgaagatgaacccccagcactgccaccaaagatcggaactccaacaagaccctgccctctaccacctgggaaaagatccatcaacaaattggattctcctgatccctttaaactgaatgatccatttcagcctttcccaggcaacgatagccnccccncaaagcaacaaaggaaaaaactttttcccccntttttggggcaaaaaaatattttgtgatccattcacttctgctactaacccaacttaacccaaagttacacactaggctgatccaagcaattttgccaacttcagtgcttatccctctgaagaagatatgatcgaatgggccaagagggaaagtgagagagaggaagagcagaggcnttgcccgactaaatcagcaggaacaagcaaga

SEQ ID NO: 487953 - DNA, 119 bp, Homo sapiens
ggggggggccccctttttttccaaaaaaaccccccccagaggggggggggggcttttttttccccttttttccccccccaggggggttttcccccttattaaagggcgggggggcccca

SEQ ID NO: 487954 - DNA, 294 bp, Homo sapiens
gtctgccgcagtatctcgctagccctgcgcccgactagcggctttctcggaacttggcagacgcagcttagagagactcatccagcgagcgctcattgttgtcttgcttggaactcattcccatgagatcagaacctcttcgagaaagaagaaggtagatcctaaaaaagaccaagacgcaaaggagcgctttaaaagcaagatccgacaactggaaaaggctactcaagagctaattactatcgaagattttattaccctctaaagatcttggctaaagcaagaatacggcct

SEQ ID NO: 487955 - DNA, 87 bp, Homo sapiens
  misc_feature (17)..(17): n is a, c, g, or t
  misc_feature (63)..(63): n is a, c, g, or t
cccgtccgacaccagcntgttgtccacttcaaggtgtcagcccagggcattacactgacgggnaaccaaaggaagctcttctttagc

SEQ ID NO: 487956 - DNA, 387 bp, Homo sapiens
  misc_feature (153)..(153): n is a, c, g, or t
  misc_feature (183)..(183): n is a, c, g, or t
  misc_feature (190)..(190): n is a, c, g, or t
  misc_feature (206)..(206): n is a, c, g, or t
  misc_feature (220)..(220): n is a, c, g, or t
  misc_feature (229)..(229): n is a, c, g, or t
  misc_feature (240)..(240): n is a, c, g, or t
  misc_feature (243)..(243): n is a, c, g, or t
  misc_feature (269)..(269): n is a, c, g, or t
  misc_feature (275)..(275): n is a, c, g, or t
  misc_feature (312)..(312): n is a, c, g, or t
ggaaaggaaaagggcccggagttgccaggagcaaaccaaagtgaagaaaaaaataggaagttgccttggggcccccccttgcaaagggggtgtgtcccccaaacccttctatgggtggggtggggggctggggtgctgggtagccagtgtttnacttttttttcaagtgggggaaagtggganaggactnagagtgaggcaagttntccccagcccctgnccgtctgtntgtctgtttgnggnggtttttgttttttgggaggcatggnaggatnataagtcattcccctccccttccaggcctcctgctanatttgggggacctgattggtttggttggagtcccatgaggaagtgggccctttaataaaggatagccaacaggga

SEQ ID NO: 487957 - DNA, 1310 bp, Homo sapiens
gagaattgccagtaagcctctgctggccgcctgcgctgctccgtcactccatgctgtacctccacaaatagatcacttgctgtctatgcagcgcattgacagacgtgtaccgtaaacgtagggtgaaggagaatgcacgtagcaatcgggagcgagatggcatcacatggaagccagatactggaggtcgaagatggagacgaatctccacagaagctaggcaatggcctaatcgcactgtagtgctacatataaacgtacagggaggaaagactaggcacagataggagcgagagactacacaaaagatggctagaaaggatacaatcgaggatgcaggaagaaaagactttgtagcgtatgaagaggattggaacaagtgatgtaggcaacctatggcacattggtcaatattactaggattcgtgctatttgaaagatcttgcccatttggaagaggaagtaagaaggagaaaggtgaaagagagagtctgctttgtgacaacagggatcttggatggtggaatgcctcccgacgaacatactaccttccccgagacaggtcacctttaagagtgtcaggggtgtggtaccgattgcacagtggggacgagtgggcctcccttgtgggttgaaacacatgggggcgaaaacataacatgcgtgtgtggaatgtcccccgtgttgcaatacggtacgtggaggatagaccgcacctttcaggagggaccccgaaaattcaattgttaccatttaaccgtttctgtgtgtatgcaaagattactacaaagttctaaaagatttccagtacagaaatttatgagagtcacacggggtttcggcaggttgttagtagtatgagtggacgcgccaggttgaacttgttgtcggaaagtaaagggggaacgaatgggaacacgagattcagattaatgagtatagaatttgacgacagggaagaggtgtaggtatacaaggagtatactggaggccaagagagatatggatagtccacgggcacaaacaaaagtgtgatggcctggatgtcaataacaggggagggaatatcgggacagaggaactgtccaagaacgttgttgagtgtaaataggaacataaggagtgtgtgcaggtggatcaaaggtagacacaggaatttgaaggagttgaaaatgaagacaacaggtaaagggtggcagaacagagggtggtacacgcttagtgacaacgaagtacctgtatccgagaaggtaacaagtgtataggaagtgtagcgcttagtatggttggaaaaaagaagggaagacgga

SEQ ID NO: 487958 - DNA, 1199 bp, Homo sapiens
  misc_feature (270)..(270): n is a, c, g, or t
  misc_feature (272)..(272): n is a, c, g, or t
gaacctgagagtgaggagtgagtaggcagcccactcgaaactgatgcaggccgtggcaagctgaggccttgcacagaaggtggctgtcgaggcatcgagacgacggtgacccagcgtgggtgggcatcgagcctgaaatgtgcattcacacaggaaagaccgagtggctgcgacactacgtcgacgagtacgccacctctagcgtggtcgcctccgcgaagacgtaacgcgaggtcgcgtaaacattcccatacgcactgactctagtangngcaggacttgcacgaggccacgtatacgtatttgcgtcgattgctggtcccacacggtcctcgtacgaatagtggactgaaggacatgaggtcgaggtcgataccaattgtggaagcgagactaggcccaaaacggcttcgtgccccgtggcgggcacccgtagcttgtccaatgcatacgccccaagggtcacctcggagacaaccggtgaccgactaagtgtcccccacgtagaaacgccgacttcgttaattggggtcgggaaacgctaccgcgaaagcagtactatatgatgggaatagccgcctaaacgtatttcacatggggcacttgaacgcctaaggagcctcattcttagcctatacgatccttggaaacgcatcggggagggtctccacgcggtagagcatggtacgcgcgtcgaggcgtgatttgacgccatggaattcatcgacgtgggcagagaataggaatcgcatgtacgagtacgagaacgagttctagatgaggccatgcgggccttggcgagactctggcaggacgatttgatcggaacgctgaacagctcgggaaccaatggctgccagatatgctaggacccgtttgacatcgctacagttcggtgtaaccgcacgcaacgaaggatgctaaaggggaatgaaggctttgctccgtgtttgggacatatctaatatgctgggatgaagaaagatgaggatgccgagtgtgtaactgcacgaatgctaggatcgcgtagcgagggatggcatcaaagtcaccgggtgggttggtccaagcatagaataggcacgacatagtaattgtctgtgcccctggactgaggattcatgggagggtgaagacggtactatggcaaaaaaagacccatggtctgatgggaaggtgaatgggggccgggttcacag

SEQ ID NO: 487959 - DNA, 406 bp, Homo sapiens
ccgttactccccgttgatcagagcctaatcaaactgggggaagagaaatacccaactccattcccttcagtgcatcctgtcccatctaagagaaagaaaatcttagaagttcacagcccagggcccaggctcactagaagactgagatctaagtcataggactatagaacacatcccttcccaccacatcttcccaccaaatcactaaaggcctctttacctatgggtaaaaggtaacaagtgcctattacccgagtgcagcatgcctgcctttcagcaaacaatgccaaggcagactaacaggcaaaaagcacagtccgaagacacaacgcaagcatcagaatcagacccagctatatggcagggatgtaggaatcatcaggctatgaatctaaaacaactgtga

SEQ ID NO: 487960 - DNA, 396 bp, Homo sapiens
atcgatgggacactctcgtgggagccctaccacctatccaaacggtaaacacagcgacgtgaatcacaccttcatgctcgcaacgaccataccgtctgaaatatcctcaagacttttatctatcactctactagcacctattcaattacaggtcactacttccagactgcctttacagataaagccacttttgctctttcccatcccctctaatgatactgatgccttgttttcctaaaccaaaaatctagacttgttgcttgacaatgttgcactgatttaatgggacaatgggacagaatgcttgcagttgttgcggctgccatttatcctcatgattccttacaccctttactgtgaattgtttatagatgtgcttccagtataaatgtgctc

SEQ ID NO: 487961 - DNA, 588 bp, Homo sapiens
tcataagtctctcctgagagatggtgtaaactccagcatggcagcagtgaacggatctgcatacggtcgcacggactgaatgagcctcagcctggcgcggttgcaggtgccgtaatctgtgtgagggaggcggggcccgggtcatccacaaacacgacaggcacgtggcgcaggaacctgtgtgagaggggcttacttccagggtctgatggggagattacaagccccaacaaactggattctccccagacttcaacccatgttggatctgaggtacggtcaacgcctccgtgactccaccatctgtctgatgaaggatatgaccctctgggtccaatatttatccatatctggcaagttgatttcactcacagaacaacaacagccactttccacgttgaacaggagccaaacacaccccattaggtgtgcgcctgtactcgcagtagtgatcaaaagtcttcaagaagcagctctggcgtaatagcactggagaagttgagagccaccaccgtcatgtcaggcaaggcccggagggcgctacagagtgtcatggtcttgccaagaccaggagggccacaaagaccg

SEQ ID NO: 487962 - DNA, 627 bp, Homo sapiens
  misc_feature (587)..(587): n is a, c, g, or t
tagctggagattacaggcacgcatcaccatggccagcgtaatttatggtattgcttagtagagatgggattttaccatgtggcccaggaaaggttcactcttttaacatgtaaaattcagtggctttatagtatattcataaagttgtccatgggtcaccagtacctctttctagaacatttttatcacccccacaaaaggggaaacccccggacgccatttaagcagcatccccattcccaaatccccagacaggttccccgttattctatttatggttactattctgggatgatgaaaggtgttgtgactgtggtcctttaagactgcgtcgactagtataagtccaggtcaccgtgtgtgcatgtagtatcatctttatggtgatatatcgcgatgatatgtctctgaagtacaatcctggagtgaatctgtgacattgtctttcagctaccactgctttgaaatgtctgtgttgctagactgttatcgttactgaggacagtttcccatcgcgcagattgtcaactgaattgaccttgattgtaaccttactcgtcatctgcttccgccttcgcaccagaggngctagaaccaacaaactaaggaacccaaaaacaagaaaaa

SEQ ID NO: 487963 - DNA, 565 bp, Homo sapiens
gggcgtcagaggacccggtagtccggaccaggagtgacagcatgaagaatgagaaaaatctagacagacgtcacagttatatgacagtgagtgtaggaatcagaacccctaaatgggacagacactacgaacaagctagcaaatgttcttgataactatcaagtgcagaaatcctcacttaaagtaccaacaagccatatttagcatcatactagcgcagaaatcctcagttaagtactcacaagcgatatgtagcagcacagtaaaaggattatacagcaaaaccgaggtgagatttatcgcctaaaataaagtggtgcaatatatgaaaaatcaatcagtgtaaggtatgacatcggcgaaaggactgaaatatcgtagctatggcaacggatgcaggaggagtattggacaaatggttaagacccactcatgataaaaatacacaataaactaggactacaaggaaactacagtatgaaaaaccagcactaacatcaccatcaatgctgaaataccaaaacaaacaagcaaaaaaacccttttctcccaagatcaggaaaga

SEQ ID NO: 487964 - DNA, 332 bp, Homo sapiens
cggggttttccgaaatttcgtaaatctccgccccctttcccccatgggggggtgggggggtcggggggggttttttatgccaaactcgttttgttcccttctggtcccctgggtggcccgtccccgctgtttttccttttttgaagcccccggggccgtcccgggccctgggatcttagggttggtcgcggggggggtgggccttttcccccggttccccctgttcccctttggccctttttggttgcttttttggccccgtttgtcccgtttggccggctgggcccggtgggggctttccggggtttcctgggcccccgggtccccagaga

SEQ ID NO: 487965 - DNA, 144 bp, Homo sapiens
aattccccttctccagcgtcacatttactcggaacgtggcgggtacgtgggctgatgtgagatcccaggcgatcccgaatctccgcctcaagatccagtaccaccagagtaaccacctctctgccccgatcccagttcgaccgt

SEQ ID NO: 487966 - DNA, 123 bp, Homo sapiens
tcacgctcggtacctgggagctggggtatgagcaaaaaacttagagctactgggcactacgtatgtgccagccctgagctagtgtgcattcaccatccggaaaaaggagtatcttcaagagcc

SEQ ID NO: 487967 - DNA, 175 bp, Homo sapiens
cgttgtagcaatagaagcaagagtggcattgtttcagaaggaacggaaaagcagagcttggagcacggatgcctctgactaaccacagtgcggaggtgggggtggggcagactgtgccttcgcctccacagctagtctacaccaatcttcctctactcccttgggtaccgagctc

SEQ ID NO: 487968 - DNA, 327 bp, Homo sapiens
  misc_feature (118)..(118): n is a, c, g, or t
gcttacatgcttcatttacactgtcatgctcatctctcagtaccggactggacttggatcaggaggtcagtgagtgaagagacttgtcgtagtgaagagccaaattcactcagactcntggctcacaaagtcagtgctctgctggtggggacatgggaatttcttgagtaagggagtgaaataaaaaatttagtattccaggaagtatactctagccagctggtactgagggactgcattaaacaaaacaagtcagaagtagttccactgaaagtttcaaaatgtaagggagattgacttgttcatgtaagacatcaacagagctag

SEQ ID NO: 487969 - DNA, 366 bp, Homo sapiens
tctctgaggatccccggccgccacagctctcgagtagctgggattccaggtgcctgcaccacgcccagctatctttgtatttgtagtacgatgatggggtttcaccatgctttgccggctggtctcgaaccccttgatctcgttgatccacccaccttgggctcccatagttctgggattacaggcattagctgccgtgcccagccatgtttctgaatttttaagtcaacttctgaataggtctaagaattctttttgtgtatgtgttcaactttcagtgctatcaatcgccagttggacacaaaggttttagtgctatttaggtatgtttgggtgaaatagtgtgaaggaatatagctgcttaaa

SEQ ID NO: 487970 - DNA, 549 bp, Homo sapiens
atttaaaccactgccccaaaaaccctaaacccccttgggggagataggtgccccctccccccccctccatagggtttatggggaaccccggcccttctttacgggagggttgggtccaaccccattaaaatttcccatcctgggggcctccccccataaaccctgcccttcttaggcaaaaggggcccctttgtccctttttttttttccttaaaaagagtgacaaactttagttcctttggggcccgccaaggggcctaaatgagttaagccctgagtctgtttttgggataataagaaggtaaggtgggggcttttccaaactggctggagggcatgtccctttctggaacgggcaaggggttttttgctccagcttaaagttgccagagaaaaaattctggggccatggtactaaaactttcatttttttcaaaaagcccaaaatctgggtggttctggaaaatctccccacttttaagcgaattttgcggttcccggattttgtgaggccccccgtgtttgataagcatagatagaaaaaaaaaa

SEQ ID NO: 487971 - DNA, 611 bp, Homo sapiens
  misc_feature (330)..(330): n is a, c, g, or t
tgggcttgcactatcccatcacaagcagcaggaggaaaaaaaattgggatggctcaaaggactgggtgtactacagaatttctcacgaggaaaaggacctgttttttaacttgtgacggctcaatctcagggatttctcttctccaattagcttacattcagtggagaagagattagtgggaaccttctcccagtgtttaagagtgagtggctttccttcgtgccccccttctgtgccactctcagtgtggcagcggtctcataacagcagggcaaccaagagttgtggagacgggcaagccctctcagtgtgccttgtgcacatgtggnacccttgactggtggatttttctccaattatacccactatgtgggacagacttttttctcaatgtgtggacacccggttgaaaaagaaagcaattctcaggtgggttgtggaggcgcaaaggggtcataccacaccgcggcacaacaactgcggttataccagcgggagcgctcagaaaagggttttcccagataaataccccagggtgggagccccaacctcgtggtgggaattataaaagggggcatactggggtgaactcccacagtttctcccttcc

SEQ ID NO: 487972 - DNA, 894 bp, Homo sapiens
  misc_feature (324)..(324): n is a, c, g, or t
attttacacagagttgctgacctgcatggggtaaacctcagtggatctgtcttttctgttggtctcatgtgattactggatggaacaattgctgctgtcttgttaggaggttcatttccatcttatcattacttacaaacttcatactcaaatagcactgagaatttcattagtggagtatattgaagtagacgtcagattctttggcatcatttctgtattcaattttataaatctatttcgataaagcctataagagtgtttattaatcgtaatattaatgatggcgtcgaatgaactgggcgcagttcctgtgcgaagtcnatgtacatagaacatgagatttcattattaacacactaatcacatttcaatgcagacttaaaggaaatttaataggaaggaatgttagatgaacgatatggagttacgcaagtaattagtaaggaagtatgtgaacgcatacttatgatgagctactcgttgttggttgcaagaaggtaaccagggttctttgattgggcgttttgatgatggtgcaccagacatttcagatcaagattgtttgatgactgggttaagtcttgtgcaggttaagtctcggtgagagaacctggttgtcgtatgtggctgacagtcgcgttgccaaggcccctgggaagagcttgcagtaattgtttgcgcgtaaggaattgattgagggggggattgtactacgaaagattcccgacacattcctaaagcgaaaagcgggggggggcgcttaaaacatcggaggcaaccctggaatttggcgaaaagaattgggttaaaatgaggggcgctccgagatttcaaggcgttgaaaaacagtgcttccgcacaatggggggccatgggctgggattggctaat

SEQ ID NO: 487973 - DNA, 894 bp, Homo sapiens
taggctaggtacgaggcctgggtggtttggtggaggtagcctcaacagcgggaaggtgatgtagcgccttctgcagagtgaaggaccccaagctctttggactgcccatagatttgtcctcaactcaacctggacaggcgagggcgtgaacgatgtgcgcgatgggagcctgctgccagtcacgtcagcaccatggcccagcttcctgaagggggcccattgtgtaccgtcatgcttggcgcggagccgacggaggtatgtgtgacgtccttgtagatgcatcgatggagcatagggtggccaatgcttcaggtgccgaactacagcgttgtcacaagggagattggccgcttccagtgacgtggtacctccaggccccagtgtggctctgtgtaccacaaccatccaagtgctcgtgtctgagcattaaaacgggttcggtgaagactggccttctggtgccagtaggcaggcagaatgtgtggacggccatgacatccgtcgcgtctggtatggaagaacgcggcggtgcccggatgggatgcgcaagcggaatgtggagcagtagcgccgggagcgtgagctgcgtgatggctgctcgtcctgggacgcgtctgtttatcgagcgagcctgtggctggcagaggctcatgcccccctagaggaccggtggggagcacgtcagccatgaatgtgagtcacgacggaactcgcagagtgcatggaggaagtcttgccgttgcacccgtagtggaggattgttcgcgcaggaagggttacgtgcctggtctagcagctcctctcctagtctcgaccttggaaggctgaggagccgttcctggaaagcatacccacaaggaaaccgttgggcgaaccagttgtgccttaggccgg

SEQ ID NO: 487974 - DNA, 630 bp, Homo sapiens
caatgatacttgaaaatgtggcagtgactttggaactgggaatgggcagaggtggaacagattggatgggcttagaagaatgacagaaagatataggacagtttggaagttcctagacgattgttgaatgttttagaccaaaatgctgacagtgacatggacaatgaggtccaagatgaggtggtctccgatggagaagaggagctggagcaaatggtcattcttgttatattttagctaaagagacattgacatttggtccctggcctagagatctgtagaattgcgaagtacagagagatgattgattgtatctgtctgaatatagtatctaagtagcaaagcatgcaagaggtgtacgggttcattctggagacgcatgccactatactgtaaacaaatagatggttagcaaattgaacacttaagttcaaacagggaagcaaagcataggtttggaaaatacaccaggaagcagacattgcaaaattgcagcctgacatctggaagaaaagaaaacccatttactggggaggaactcaagtgagctgctgaagtttgcacaagtaacaagcagtcacctgttaatagccaagaccatggggaaagtgtctccaggcatatcaagac

SEQ ID NO: 487975 - DNA, 354 bp, Homo sapiens
aattcctggcgtgaggacagagaggcaagtgccacgggccaaacaagagcaccatgcagaagaggctctgcaatagaggaactgctccttaccatcagctgttacaaagccggggacaaaggggatcccagactacgctgtacataattgtgcgtactccatagatagacgatgggtccagcaccaaggagcccagaaaaaactgaaacggtccggaatcatgagagccgccaatgaaaggtctcgccgagcagaaaaaacaggctagagccacggatcccggccaagacggtccagaagcccaactgagaaaccaaggcatctcagcggatgagggaaacgagaaagggacac

SEQ ID NO: 487976 - DNA, 124 bp, Homo sapiens
ctcttacatttatcgatcaaagagcacactgactccaattaactctctatggaaaggatatgggtgaagtctttgatctccttgaggcggcaggccttagatatctttgtagccctgcccaaca

SEQ ID NO: 487977 - DNA, 887 bp, Homo sapiens
aggtctataagaagctacttcccctatcatagaagagcttatcacctttcatgatcatgccctcgtaatcatttcccttatctggttcctagttcctgtatgcccttttcctaaaactcacagaaaaattaactaatactaacagtctcggacgctcaggataatagaagacgcgtctgatactatcctggcccgacatcatccctagtaccctctatcgctcctctccatccctacgtcatccttttacataacagacgaggtcaacgagtccctccccttacacatcacatatcgaaattggacaccaatgcgtactgtagcgctactgattacaccgatgtaggggcggcactacatcttccaactgcctagcatagcttcctcccattatatcctagaaccaggtgaggctgcgattccttgactgttgagcaatcgaagtagtactcccgattgatgccccattcgtattataattacatccacaagacgtctgagatcatgagctgtccccacatcaggcttaaaaatggatgcaattcccggacgttaaatcaaaccagtttcacgttagacgaccgggggttactacggtcgatgtctgaaatctgtggggcaagcacaggttcatgcccatgcgtcctagaagtaattccgctagaattgcttgaaagggccgggttttaccaatagatgcctttaaccttttagagctaataggaaaacataaagaaatttgcgcggccgcccaaaagaagacaaacgggcggggcccaaaaaaaacgcgagagcaacacacgaccaagctggccccacaaacgggacacttgaacacggcacaggtccggacccgacccccggagacgaccccacagccaacacaa

SEQ ID NO: 487978 - DNA, 250 bp, Homo sapiens
ctatctcatgatcgatcagtgtactatgattggacatgactgcaagtcatgggcctgtgacatatagatgaaagcataaaaccgatcatgctacaaaaaaaatagtatggtccgttgtgtttagattcaaaacttacctagtacacttccatttttaaagaaactgatggaaaaatgcttccccaaacgtgaactatggtgcgatagcatagtctgtccggaacttcaccaattcagtagctaatcttta

SEQ ID NO: 487979 - DNA, 166 bp, Homo sapiens
  misc_feature (143)..(144): n is a, c, g, or t
tccctctcttgtctcctccacatactgcagcctccctccatgcatcccacatacaagcactccccactccccacgcgtggcctcacgtgtcttctggatcttgtgtgctacatcgaaattgtcacccagtaatttgcaatccnntgaccctcacccgggatacacg

SEQ ID NO: 487980 - DNA, 459 bp, Homo sapiens
gggcttaattgtcaccggacgaatgcggtttgcaattgcaggagcaggcgaactctgcgcggaattcgccgccagcaccaccttgggcggtttggtcgacaagctgcacgtgccgtcggtgggtccaggtgctgcgcagaaactcgcggacaagttcggttcgctggaaagcgtcatcaaggctgagctgggtctgatattcgccaggcgctgccccgagaagcaagccaaggctgtgcgggactttttcgataattccgaaaacgccagccatgccttggccatcgagcagcagctcaaggactatggtatggcattggcagagcgagaaaaaaggtcgttgaaggcttgcccgaaagccggggcacacctgggtactcacgggctccctggagctgatgagccgcgatgtggccaaggacaagctcgaaagcctgggggccaaggtggccggttccg

SEQ ID NO: 487981 - DNA, 413 bp, Homo sapiens
  misc_feature (48)..(48): n is a, c, g, or t
caccaaggagagggaagtaaaaaagggaaaggaaagaaaaagaagtancctagtatcagcatcaagtatgtggtactactgtaagagacatgaatggagatttctaattgtatcggagggaacagaagcttttgtttgcttcattaactgaactgtgaccccttggccttccattcttaatcatggaggtgccaggtgaacaaattttacatcagaagttgcattctcgcgataatcccgtataaaagaatttttttttcttccaatgcagtttttggaaagaaaaattttttaaagggccaagggctggtccattaggttacttgaaataagttgtttcagataaatttcaattagatttaaaataaacattatgtccaccttttaagttaatgaaataaaatttgaaactg

SEQ ID NO: 487982 - DNA, 112 bp, Homo sapiens
  misc_feature (32)..(32): n is a, c, g, or t
  misc_feature (64)..(64): n is a, c, g, or t
  misc_feature (98)..(98): n is a, c, g, or t
ctaagactggaaaaatatttcatggggcattnggtatgatacagagtagggggtcttgcctctntagtagggaatgatcagccttagagtgagcactncttcagccctacct

SEQ ID NO: 487983 - DNA, 367 bp, Homo sapiens
  misc_feature (154)..(154): n is a, c, g, or t
  misc_feature (221)..(221): n is a, c, g, or t
  misc_feature (266)..(266): n is a, c, g, or t
  misc_feature (352)..(352): n is a, c, g, or t
tttgatgctcaaaggttcactcccaactggccctggtgccgcacccttgaagttgaaattttcgaacctgatgccggtggactttctcgcccggtttaattgcgttcccagagcagccgctgccgtgctggagggacggtgttcaacctgcatnacccgcagcccctgagctgggaaacctacgtcgacgcctttcgccaggcaggccacgcattcgagcntgtgagcgtggcttactggcaacgttacctgcacacagtggacangcgcaatgcgctgttcggcgtactgggcttctacctcaatggggtgggcgaggacatcggcgatacctcgatgatccgccatgacnaacgcagacgcggcg

SEQ ID NO: 487984 - DNA, 152 bp, Homo sapiens
tgaccaatggggagagcagtgaatgagtctagtgaattagacaaagtgtcaaattataaatacccctctatgcctgtatgagagttcaaatatttatcctcgaagaagtgtggagcagttaggcgcagtggcccactcctgtaatcccagca

SEQ ID NO: 487985 - DNA, 355 bp, Homo sapiens
cccgggcccaagccgacacacacctaacaggctgaaagaattcattatctttccagttaagaaaacctaactcagctgggcgtggtggctcatgcctgtagtctcagcactttgggtaggccgcggccgggcagtctcacctgaggtcaggagttcgagaccagcctaggctagcattgtgtaataccccatctctactaaaaacacaaaaaattagccaggcaaggtgactggcacctgtaatctcagctacttaggagactgagacaggagaatcgcttgagcccgggaggtggcggttggagtgagtcgagattatgcccttgtactccagcctgtgtgacggagtgagact

SEQ ID NO: 487986 - DNA, 725 bp, Homo sapiens
gatttctgagtgtggatactaactatgttgcttaacttcgacattctcacaaacaattcctgctaatactactttttcagagcttggcaagaaagaaaaatctgacctaagtggagcactagatctagaacacaaaatacttgggtactaggcctggctctgccatcaactagcactgtgtgagtgtgagcaagatttttcatcatctatccaggcctgctttgctcgtttgtcaaagatggatgtgctttgcagatggctaactttccttcaggctctgacatctgcctcatgactttggcactcttcacatgaagatgaagtgacagttcttttaaagtgggtagccagacacacggtttctagattgcctgatatttccatatgaggatggctggtgcccaggttaccttttggaatgatagattctctgacagggaattctctctggtagagaaaagaaaataatatgagtgcgtggaacattgtcttaaggacataactaactaactaactgcgaaatacattagtatatctaccatgacagattcgcatataaaaaactggctgttcccacagctaagccataatatttatatttggtgtatgattgggaagtaagatcttgtgaatttgtgaagccttcaccttaaagcggagtgttctatagaatatgtttggattgcatgtatcagactttgatcatactattctgttggtttctg

SEQ ID NO: 487987 - DNA, 240 bp, Homo sapiens
ccgggaattttaaaggtttttccccaaaccttaaccttttttaacctccggtttgccgttgtggaaaagccaaaggaggaaacctttgtttgtgttgctcccccaaattcccccctgcctttgcctccccaacttccccccatttgggccgttttttttgtttaaaccttaagtttgggttttgtaaaaaaggggggcccatttttttctataaagccttttataaactgttttttatta

SEQ ID NO: 487988 - DNA, 272 bp, Homo sapiens
cgttcacagcagagtctcggacgcctccgcacacctcttgtgctcgacttcttcctgttcccgtccactggacattccattctggtttctgagccaggctgagctttccgcgaggtggagttggcccgccgagatcagtggagagccgcgtgcccggcactcccactgaaggattctaagaatgaagtcagcctaagaatgagtgactcctctgcttcttttactgccgagcttactcagacctttagctcctagtctagtagatctctagc

SEQ ID NO: 487989 - DNA, 277 bp, Homo sapiens
  misc_feature (145)..(145): n is a, c, g, or t
aggcggggatttcacgtactacggctctccccagatgatgcattttccaaagcttggccgggctatctcttctttcaatcccggccatgtctgaccccagtcgggcaccatgtcgcagaatgatgatgacgcagctttgtagatngaaccaccatcggtcgtgcttggtactgcgtacctcgagggatgcaatgacttcaattaccttagcagcaactgttttgagatcaccgtgaagcttagctttgagaagttcccaccttaacaatctccgcct

SEQ ID NO: 487990 - DNA, 279 bp, Homo sapiens
aagaactatcatcagaatagtacgctcgacatggataaaaccaaaggttaattaatattaagcacctattcgaaatagataataaccaaacaaaaactgggcaaaggacatgaagagttcattcacagaaaaagaaatgtagggctgtgatatcaattgaaaggctgtgatcccagcgctttgggacgccgagagtagtagatcacgaggtcaagagataggccatcctggcaaggtgaaaccccgtctctactaaaaatacaaaaattagctggctgt

SEQ ID NO: 487991 - DNA, 941 bp, Homo sapiens
catcctcccgctgaattaaatttcccgaaattcaacgtgccgtgcaccaccaccagagagggggtccaaccaaaagtggtgtccgtgcccattttcaaaatctgatctccgccttaataacgaaaaaggcccccttgtcgtcacgaaaacaaacacatgtcttccccccgggtaaaactctgcggcccataacaaagtaccaaaatagtccccataggcttttaaatcaaacgagcgcacagctgtattttctacccgctcgtcctccccccctaagactcttttaaccttgaaaccaacacgtccttataaaatctttcatacaacctctcaccgatttttttaacccgccgcacttcaaatattttagtccccccccccacaaatgctgttccgaacattaagggctggacgaaaacttttcggcactttttgatatataccacgggaccacgggacccagaattttctatacagggacccttgattcaaaagtagccaaacgttgtcttaataaaatatgtttaatatacaaaaccgaccctgggaggcactacctctgtacaacaaatctatcgcgcccacgtgttaacacagaaaatgccccctcttctcgtgtaaaacacacctaaacctctccagtcaggccccacatattgtatacataattcatttagtaaatcacaacccgttttcgagcctagtgaacacactatttcgaataacatactttaatttccctacagacgtgaattctattttaacctaccccccacgctttgcttcacatgactacatagcacaaatgctacagacccgattcttgttggtgaactacatctaaagggttccccttgtcgaccacaaaacatgtctctttcggaagacgatgacccacggcaccacctctggtataaattttacccaggtccaacaaaaca

SEQ ID NO: 487992 - DNA, 172 bp, Homo sapiens
ctgaatgctgcaggtactctaaggatccgtcgacggggattaagaccagctctcctgttgtgggatcaggacataggaagagttgctgaaaggcacgggtgctttttgggattagtaggcatcactataccatctttgaaccaggtgtattcagaaggtggggaaacatctt

SEQ ID NO: 487993 - DNA, 885 bp, Homo sapiens
  misc_feature (7)..(7): n is a, c, g, or t
  misc_feature (66)..(66): n is a, c, g, or t
  misc_feature (97)..(97): n is a, c, g, or t
  misc_feature (108)..(108): n is a, c, g, or t
  misc_feature (112)..(112): n is a, c, g, or t
  misc_feature (127)..(127): n is a, c, g, or t
  misc_feature (131)..(131): n is a, c, g, or t
  misc_feature (136)..(136): n is a, c, g, or t
  misc_feature (151)..(151): n is a, c, g, or t
  misc_feature (196)..(196): n is a, c, g, or t
  misc_feature (210)..(210): n is a, c, g, or t
  misc_feature (221)..(221): n is a, c, g, or t
  misc_feature (247)..(247): n is a, c, g, or t
  misc_feature (255)..(255): n is a, c, g, or t
  misc_feature (264)..(264): n is a, c, g, or t
  misc_feature (274)..(274): n is a, c, g, or t
  misc_feature (276)..(276): n is a, c, g, or t
  misc_feature (282)..(282): n is a, c, g, or t
  misc_feature (284)..(284): n is a, c, g, or t
  misc_feature (313)..(313): n is a, c, g, or t
  misc_feature (318)..(318): n is a, c, g, or t
  misc_feature (404)..(404): n is a, c, g, or t
  misc_feature (423)..(423): n is a, c, g, or t
  misc_feature (484)..(484): n is a, c, g, or t
  misc_feature (504)..(504): n is a, c, g, or t
  misc_feature (557)..(557): n is a, c, g, or t
  misc_feature (559)..(559): n is a, c, g, or t
ctcgcantcattcctgcggttgcgcgcccttgtagacagccggggccttcgtgagaccggtgcagncctggggtagtctcctgtctggacagagaanaaaaaaatgcngaanactggctcagtagtncctntgcanaggtttggctattgntacgcagcactggttgcttctggtggatcaattgcgtatgtaaancaagcagcgtccgncacttgcttcnaggcttcacatttgcacatctacccnccctgggngcttacccnctctctcacnanccaagnancgtttgccttttcctagctacatctggtnccttngctggcattatgggaatgaggttctaccactctggaaaattcatgcctgcaggtttaattgcaggtgccacgtttgctgatggtcnccacacacgctggagttangtatgttcacgaccccttagcgagtctgttccagcttagactgatgagattaaaatctgcntctccactacaatatattangagaatagtgcagcattgctctgacttttacctaaaaaaaagacaccaaactngncagagaggtggaaatcagtcatgattacaaactacagaggtggcgagtatgtaacacaagagcttaataagaccctcatagagcttgattcttgtatattgatgttgtcttttctttctgtatctgtaggtaaatctcaagggtaaaatgttaggtgtcagctttcagggctctgaaaccctattccctgctctgaggaacagtgtgaaaaaaagtcttttaggagatttacaatatctgttcttttgctcatcttagaccacagactgactttgaaattatgttaagtgaaatatcaatgaaaataaagtttactataaataata

SEQ ID NO: 487994 - DNA, 1877 bp, Homo sapiens
  misc_feature (495)..(495): n is a, c, g, or t
tcatgacatttctatgaatgtgggcgtagattctgatgagagatcgtgtctgctgtgcttgcacgcacatgacggtccctaccacggtgtctcaggcgttactgttgacatgctcgtgtgacacgatggagtgtaccacatgttacatcgagagtagcatcatatgaagagagtgcgtccactgtggcctccgtggacgactgtggtccttgagtggtttagtctatagagatctgtgatctgtgagttgaggaggagcatgttcactctagtacatgtcgctatagtcaacagctcaggaccactgattgcttgagagatagcgcagcgagattcgtctaatattcatagataccctggcgattcgtgacgcctgtgcagtaattgaggcttgttgtgtatcaggtgccgtaacataacggtagatgtcgttcttagacttaatttcccttgtatcagcctaaacgtgattaaggcaagacaactcactgattncgaatctagcaagtagcttcgccctgaggtgagagagccattggatgtaccaactatttagcatgtggccaaaggggtggtgcaatgcgacattaggaagtgctataaaactcattgttacactaaacctcgagtgagtattgcacaataaataggtgagttgcacgcaccttggccctggcattggcaaaccagtgtcaacccacgtgtattccacctccgtgtggtacatggcgtggctcttccatgaaacatattttcccctttgtcacaacagcaatgtggctcctaagtcgttcgcgtggatacgttataccaagaggtaggagaaccacctggttgaagcgtacacgggaaagtcactgggtccgaacgctttaaagcctagcgactgattggaatcccgtttgtagagggggacgcatttggcaagatttgcgctgtgctaatgccttggaacaacaaggggcaaccacttgcatggaatcgtgcacgcatggccgaacaaggtgcctgtggtgccccgatgtgtcggcactgcgacaagcaaagcacactgtgtacccccaagtgtcatttggtgggtttgacatacctaggcgtgacgtatgagtgaggggcactcttaaatcacagaatggcgtatattcgcccactacaatggagattaggagcgattggtctcttattcgtacccaggggtggtggtccttccaaaacgcggaaggaacacggcccggcgggttcctagtaggcttatgaaaagcactttggtcacattggttataccgtagattagtggcacacccgtaggcgaagcaccagcgtgagccctcccaatttggccagggatgtgtaacacagaggataagatacaccatgagatctggtgcaagtagagaggcacacaatgtgagcgcatcaccataacgagagacacaagtgacgagagaggcacgaatcatacaagcgggagcgcctccaccgctcgtgtgacgccccaccgacaagcattgccgcggcgaaccccgtgcgacgatgagaagcccaccacaactagggagggggacaactcgcacaacagattgcgccgagcgtagaggaactgatcaagaagcgaaggagcagacagcgagcaggaaggtaagaacatgaaggaccacgagacagcagggagaaacaacaggcaacatcactacccaagagcgatgacccgacagcatgcagaaggagcgagaacgcacgcgaccacgccgacgcaacagacagacgagcgcacaacaaacaagacgagagacagaagtgagaggacagagaaatgcacgagcgcagcgagcacacaggtgcagagcagcacacacgacacaggcgaaaacggaaac

SEQ ID NO: 487995 - DNA, 1159 bp, Homo sapiens
  misc_feature (650)..(650): n is a, c, g, or t
ggtcacttacataattatcttgtggtggtgcctcccttaaacaccgcggggctttttgataaccccggtataggccctgggggtttttcctccttgtgtggagcaagagagaaagataaatatgccaggaaccctgcgctcaatatggcccctttgagcacatgtggtttgccattttgggcaaaccaccaacgacccgggtggccttttcttgggggggaatacattggccctacattgaaaaaccacggggctaagcggtcccggttcccctgggtcttgacacgggctcgctctttttgggccacgtttaagcccgggccctgggggtgcctatagcccaagccgtggtcttccaggggatcccacagggaaacgctttttgcggttttttcccatagcgataacaatctggtaccctctggctcgcgcactttaaatggggaaattgaagggttcttaacccaccctcttggaaaaaatttcacatgccctgcacaggttttaaaattcgcacaggtgcgccacagttttgctcgaatgtgtctcgccacaaaagttgggaagagtatatagaaaatgtgctcacagcacggagccccccacttatgccacgagaggctcacatgttttcccacggctttaagagnctgagatgaaagagaattataaaaaattgtgacacatactgtcccacacataatgttctcacaataataattataagagagagaaataaagtggcacgcaatttttcgacacttctgaacactttatacctcataaaaaataaagaccacccacaaacttggcacagaagagaggtggagaaaatcacgtcactcgagttaccacaaacctaacacagagaggtggcgagtatgtaacacaagagcttaataagaccctcatagagcttgattcttgtatattgatgttgtcttttctttctgtatctgtaggtaaatctcaagggtaaaatgttaggtgtcagctttcagggctctgaaaccctattccctgctctgaggaacagtgtgaaaaaaagtcttttaggagatttacaatatctgttcttttgctcatcttagaccacagactgactttgaaattatgttaagtgaaatatcaatgaaaataaagtttactataaataata

SEQ ID NO: 487996 - DNA, 898 bp, Homo sapiens
  misc_feature (7)..(7): n is a, c, g, or t
  misc_feature (66)..(66): n is a, c, g, or t
  misc_feature (97)..(97): n is a, c, g, or t
  misc_feature (108)..(108): n is a, c, g, or t
  misc_feature (112)..(112): n is a, c, g, or t
  misc_feature (127)..(127): n is a, c, g, or t
  misc_feature (131)..(131): n is a, c, g, or t
  misc_feature (136)..(136): n is a, c, g, or t
  misc_feature (151)..(151): n is a, c, g, or t
  misc_feature (196)..(196): n is a, c, g, or t
  misc_feature (210)..(210): n is a, c, g, or t
  misc_feature (221)..(221): n is a, c, g, or t
  misc_feature (247)..(247): n is a, c, g, or t
  misc_feature (255)..(255): n is a, c, g, or t
  misc_feature (264)..(264): n is a, c, g, or t
  misc_feature (274)..(274): n is a, c, g, or t
  misc_feature (276)..(276): n is a, c, g, or t
  misc_feature (282)..(282): n is a, c, g, or t
  misc_feature (284)..(284): n is a, c, g, or t
  misc_feature (313)..(313): n is a, c, g, or t
  misc_feature (318)..(318): n is a, c, g, or t
  misc_feature (404)..(404): n is a, c, g, or t
  misc_feature (423)..(423): n is a, c, g, or t
  misc_feature (484)..(484): n is a, c, g, or t
  misc_feature (504)..(504): n is a, c, g, or t
  misc_feature (557)..(557): n is a, c, g, or t
  misc_feature (559)..(559): n is a, c, g, or t
ctcgcantcattcctgcggttgcgcgcccttgtagacagccggggccttcgtgagaccggtgcagncctggggtagtctcctgtctggacagagaanaaaaaaatgcngaanactggctcagtagtncctntgcanaggtttggctattgntacgcagcactggttgcttctggtggatcaattgcgtatgtaaancaagcagcgtccgncacttgcttcnaggcttcacatttgcacatctacccnccctgggngcttacccnctctctcacnanccaagnancgtttgccttttcctagctacatctggtnccttngctggcattatgggaatgaggttctaccactctggaaaattcatgcctgcaggtttaattgcaggtgccacgtttgctgatggtcnccacacacgctggagttangtatgttcacgaccccttagcgagtctgttccagcttagactgatgagattaaaatctgcntctccactacaatatattangagaatagtgcagcattgctctgacttttacctaaaaaaaagacaccaaactngncagagaggtggaaatcagtcatgattacaaactacagaggtggcgagtatgtaacacaagagcttaataagaccctcatagagcttgattcttgtatattgatgttgtcttttctttctgtatctgtaggtaaatctcaagggtaaaatgttaggtgtcagctttcagggctctgaaaccctattccctgctctgaggaacagtgtgaaaaaaagtcttttaggagatttacaatatctgttcttttgctcatcttagaccacagactgactttgaaattatgttaactgtaaggcccatgcaattaaggttggctatctttcttccaacaaaaaaaaa

SEQ ID NO: 487997 - DNA, 407 bp, Homo sapiens
acagtgactctggacttctaaaacttcaacttattatccatctcttttgcctctctcctctccctttaaccatggttagacctcttcttgcttcacctctgttagagattgagcagaggcaggaagaatgaaacccagaaaagtcaactgaatttttagcaataccctcaaaagatttcgagtgggacgaaggttttaactattcatattacctatgtcttattctttgtgtaattgaaaatttgtcagtttcttcttacaaatacatttttattaaaatatgttttcatttaaccagtcttcacctatatcacatagttatcccagtggccccaaacttaaccaaatggatgattaaagggtgactgattctaaaattatgatctagagccaattaatttgttcac

SEQ ID NO: 487998 - DNA, 165 bp, Homo sapiens
gctgctatctccacaaacagtatttttgtgtgttacttaatatttgcgcacatgagaatcattggtgtgacactcatctaatttatcttggttgtgatagttatggtcctaataaggagaaagagggtttaatttttcttgtcttctgtttgtggaggtagcact

SEQ ID NO: 487999 - DNA, 202 bp, Homo sapiens
  misc_feature (194)..(194): n is a, c, g, or t
tgctgggattataggcatgagccaccatgccaggcctaagtggggaattttcaaaaggtaggtttccaagttaaattgttttatacatgaaaatagcccctaacgtccctttgaggtagtaagatgacttcgtttatacagtgaatattattattacaaatattactgtatacaattctgaggaagaatgaaanccaaatat

SEQ ID NO: 488000 - DNA, 128 bp, Homo sapiens
  misc_feature (10)..(10): n is a, c, g, or t
  misc_feature (92)..(92): n is a, c, g, or t
  misc_feature (96)..(96): n is a, c, g, or t
aacagagaanaggtcgagctggaagagttcaccctggtcattgctatcatctgtatagtggtcttagagcaagtcttctagatgactatcanctgncagaaatttttggaaactcctttggaagaact

SEQ ID NO: 488001 - DNA, 439 bp, Homo sapiens
  misc_feature (88)..(88): n is a, c, g, or t
  misc_feature (149)..(149): n is a, c, g, or t
cttcactttctacactttctacacattcctaccagctggctgaaaagaatcaaaagcttcttacaaccagctaaaaagaaagactttnccatgccccttgaaaaagctcattttcacgttactcaggcttcattatgctaaatcaatantcgtttagtcactggggttattgacatattttaaaataaaagtatacccttcagctactgcactcattacaggtaatttgtcttgtcagagagcagggaatattatcctagtctttcaggggctgacagcccatgaaaatacctccccatggttacaactgtaaataattttaaggtaaaatattgaaaaatcaatgactgtttcctgcaatctgtcacaaacaaatcaatcataatctgtactgccagagagtatgatttgaaggaaataggagcaaagaccccaaaag

SEQ ID NO: 488002 - DNA, 132 bp, Homo sapiens
  misc_feature (18)..(18): n is a, c, g, or t
  misc_feature (26)..(26): n is a, c, g, or t
  misc_feature (84)..(84): n is a, c, g, or t
  misc_feature (100)..(100): n is a, c, g, or t
ctgcatctagctcaaacntccttccntttcctgggctccacttgtttttttccctggagctcaggggcgtgccctccctggttnatccatgaggctgacncccctggctttcctgtctcctctccctgcaga

SEQ ID NO: 488003 - DNA, 160 bp, Homo sapiens
gtttagcggctcatccgctcacagcatcacgtcctcagacaggtctttcctcccaaaccgttgtgtcttcgtaaccatcatgcttagcccctgtggtctctcctccctcggcccttctcgcaacaatatactctgaccatgtcagccctgggtccagccc

SEQ ID NO: 488004 - DNA, 136 bp, Homo sapiens
gcacaacgatcccggagatgctcgtgcctgcgcagatatcataacttgcgtctaacccactgctgtcgcacatagtcgctgaatgcgatgatcctcgcaggtttggagctacgtggatacgtcgcacgccaagtaa

SEQ ID NO: 488005 - DNA, 614 bp, Homo sapiens
  misc_feature (101)..(101): n is a, c, g, or t
  misc_feature (103)..(103): n is a, c, g, or t
  misc_feature (114)..(114): n is a, c, g, or t
  misc_feature (126)..(126): n is a, c, g, or t
  misc_feature (133)..(133): n is a, c, g, or t
  misc_feature (154)..(154): n is a, c, g, or t
  misc_feature (156)..(156): n is a, c, g, or t
  misc_feature (175)..(175): n is a, c, g, or t
  misc_feature (178)..(178): n is a, c, g, or t
  misc_feature (185)..(185): n is a, c, g, or t
  misc_feature (215)..(215): n is a, c, g, or t
  misc_feature (236)..(236): n is a, c, g, or t
  misc_feature (247)..(247): n is a, c, g, or t
  misc_feature (327)..(327): n is a, c, g, or t
  misc_feature (332)..(332): n is a, c, g, or t
  misc_feature (351)..(351): n is a, c, g, or t
  misc_feature (360)..(360): n is a, c, g, or t
  misc_feature (371)..(371): n is a, c, g, or t
  misc_feature (414)..(414): n is a, c, g, or t
  misc_feature (417)..(417): n is a, c, g, or t
  misc_feature (421)..(421): n is a, c, g, or t
  misc_feature (458)..(458): n is a, c, g, or t
  misc_feature (470)..(470): n is a, c, g, or t
  misc_feature (472)..(472): n is a, c, g, or t
  misc_feature (480)..(480): n is a, c, g, or t
  misc_feature (486)..(486): n is a, c, g, or t
  misc_feature (488)..(488): n is a, c, g, or t
  misc_feature (494)..(495): n is a, c, g, or t
  misc_feature (499)..(500): n is a, c, g, or t
  misc_feature (519)..(519): n is a, c, g, or t
  misc_feature (528)..(528): n is a, c, g, or t
  misc_feature (535)..(535): n is a, c, g, or t
  misc_feature (546)..(546): n is a, c, g, or t
  misc_feature (548)..(548): n is a, c, g, or t
  misc_feature (551)..(551): n is a, c, g, or t
  misc_feature (553)..(554): n is a, c, g, or t
  misc_feature (556)..(556): n is a, c, g, or t
  misc_feature (560)..(560): n is a, c, g, or t
  misc_feature (563)..(563): n is a, c, g, or t
  misc_feature (568)..(568): n is a, c, g, or t
  misc_feature (579)..(580): n is a, c, g, or t
  misc_feature (588)..(588): n is a, c, g, or t
  misc_feature (593)..(593): n is a, c, g, or t
  misc_feature (596)..(596): n is a, c, g, or t
cccctcggttgcaaggtatttctgcctcagccccgggatggagaaacattgagttaaggctggttagctggtagccccttagctccctcatcccagcagcntngcacactcctnagggttttaccntccctcntgatgtccctggaacaggaantngcctgaccctgctgccacntcntgtgcantttgagcaatgccccttgggatcaccccanccacaagccctttgagggccntataccatggncccccttggagcaaagagccaagcattttccctgggaagtttttttggccaagtttggccagcctggccctgcaggtttnccatnaaggcccccccatggtttnatgggcatnaagcatttcanactccttggcaaaaaacggagtccgcaggccgcaggtgttgtnaanaccnctcgttttgtggttggggtcctgcaaaaaggcctccncagcccgggggntntggccctnaccccngntttccnntttnntgttaaagtggcagctccnagctggttntggcccngtagctggggngnccncnncngggntgntcagngcctgcctttnncaaaattnaagcnttnatggcctgtggccctgca

SEQ ID NO: 488006 - DNA, 172 bp, Homo sapiens
agtatgacaattcatacagggtccagaatatataaagcagctccgaggaaatgtctgtatggacacatcatgtggagtagtgtgcaccccctgggtcatgtaaaaagcaggtgggggagtgtgtgccggggatctgggcagccctcactgacagctggcacagattctcggg

SEQ ID NO: 488007 - DNA, 269 bp, Homo sapiens
atccaaagttgccctgtaagaagagaagaactacagtgacagagtccctacagcataaaggcaatcaagaggaaaacaacgtagacctagaatcagccgttaaaccagaattcttgaccaaggttaagggctttgaggttccggtttaactattcctgggttccaggtattggaagattgagctggcttcgaggtcacagtctttccaggatccaggaaatcagcttggtatgggaggatacatctctgcgctctggagtgctcaccca

SEQ ID NO: 488008 - DNA, 397 bp, Homo sapiens
  misc_feature (319)..(319): n is a, c, g, or t
tgaacagagtctcgatctgtcaccaggctggagtgcaatggcgcgatctcggctcaccacaacctctgcctctcgggttcaagcgattctcctgtcttttaaatgcctgtaacatctttagaactgttcccttttcactcttaaaactgatgatatttgctccctctctctttttatcactcttgtcaagctgggcacggtggctcacacctataatcccagcagtttgggaagccgaggtgggcggatcaggaggtcaggagattgagaccatcctggctaacatggtgaaaatccgtctctactaaaaatacaaaanaaaatagctgggtgtggtggctactgcctgtaatcccagctactcgggaggctgaggcaggaggttgcagtgagccga

SEQ ID NO: 488009 - DNA, 676 bp, Homo sapiens
acaagagccaccgcagattctgtgttaattgcttaggttaatggcttcagctgcacccgtgttgctgcagaggacatgatttcattcctttttatgcctatgtgggttggctttgcttttaacatatactatttctctgagtgtatcagctttgttcaccttgcctcacatttcttatccagtgtaaaccttagttgcaacataaaacaagacagacacactacaaaaaaaaaaaaaaaaaactccggggatggctgggggcattaatatattaaggtgtaacattggggaaaatgggtctttacattattaagtctttctattcaagaacaagaatgattagctaaatttgagatgcaggggggcataacaaggtgggagataccaaagacgggaagtccaatttctgccaaaattggaccgggtatcttagaaactcaggttatagattagagctagggaggcttttcaagattgagagaagaaagccatggggtccttatagttgcttggaaacaaataatactaactaaaagcaaagtatggttgggggcatatatataggaggggaccaatgaatactaaccccagacctcaggcatactaatctctagagggcacggctcgaagtatggacatgaaagaggcacaaggcgatgtaagttatggggaatgt

SEQ ID NO: 488010 - DNA, 1510 bp, Homo sapiens
  misc_feature (327)..(327): n is a, c, g, or t
  misc_feature (949)..(949): n is a, c, g, or t
  misc_feature (951)..(951): n is a, c, g, or t
cgactacgctggggtctcctccgatccaggtagggggaagagagtaaaaaactcttcctttgtgggggggggcagcactagatatatatggggggcgccctaaccacatggtgttgttctacagacaacacaggaattgtaggaggcgagcgtcgatctagaagtgtcttgatagcacgacacggcgaggggcttatgggtgggcaaccagaatccattgtattatcctccccctcccccagacgggagagtactccttctggtggggggttttttgcccacaacacaacaagggttgctcggcgcagtgaccaaagagatttctcngtccatgtaggtagagtaagaagaaggtgggttaattaaacatcccggcgggggtgttctctacgcagagaaggagggggcctctgacgtaacaaccaccctgtgagggggtgtgttggtcccaccactttggtggtgattcctgctgttggtggtgttctacaacaaactatgtctttggttgtgtctggggccgaggaagacttccacctacgactatggaagctggtctttcaccaccaaccaaggttcgttcctttaagaggagaattataataagcggggtagagaattattattgttgggcccccacacagcgttgtcaacacgacaacagcgcgcctatggtggagaacacacaaatgtgggacgcaccgcgggttcctcaccggagtacacaccacggcggtcccacgacagcaacatcatcttcttggggagcaacatgtgttacccactcgtctcagcacaggaagtaccgacaacacacatgttgtgacacgcgcgaagaggggtcttgtgcgcgcaccaagggggacacttctcacaacgcagaaagtttgtgggcgtgtacacacacacacacacactctctgatatgttgtcacatcatataggtggngngacaacatctttggtactctctgtgaggcggttctggcgccccaactctctgagagactctctgggggtgtctcactgagacgccttctctctgagaatatttctatgtgtgtgccacgagaacacactctggagaccacacgggtgttctcacacccgcggcgtctgtctgttgaatacaccgcttatgaggcacaccgcgccctcaacccacaagattcaccgcgccccgcgcacccacgctatcacacgggtgcgcgcgtgggggcacactttccactcgtgcgtgcgaccgtcggtaaaatatttgtgtttaaaccccacgctttgccctcggagaaccctcccgcccttcacacacattcccctcggggagacccaacgctggggtgggtggccccctcgctgctgtcaccctctcttccaccgggagacctcggggcttttgtgcacacacaattcctgtccccacatctgtcggcctatcccccaccccccaaagaattattttttctacccccacaccctccaataaatcccccgcgtttttgggaaaaaa

SEQ ID NO: 488011 - DNA, 147 bp, Homo sapiens
gaacggaatctctgagctgactggttctctgtgtgcgcctatctcctaggacacatcagtcaaacaggcttggagcctgtcagagactagaaggtgccttagggagccactaatccaacctccttacgctatgcaggaggaaggaaa

SEQ ID NO: 488012 - DNA, 1130 bp, Homo sapiens
  misc_feature (1)..(1): n is a, c, g, or t
ntttgttctgtggtatcttgtattgctcgtgttggtctgatactcgctgtgttgtcgtctgtgctttttggctgttgtctttctgcgtcgttcttgctgtgtcgtcttcctgctgtcttgttctccttctcttgtctttctgggtttgtcctgtgttcctgtgtatttcttctgtatgtctttgtgttcatgtgaattcctggttccctgttggttcttctgtgtcttgtgtggcctcggtttgcattttgggtgtctcctttctatttttgccatttttgcctgtgttgtgtgttcattggtattgacggtttctcggctctcggctcttgagcttgtgccctctttgtgatcggttcttctgtttcccatcggtggtcggtatgcgtaatctggtctgtgtgcccggggcctctctcgtcttctcggtgtctgtgcgggacttgcctcattgcccgcctttggtgcggtccggccctctcgcggcctcgtgctcctgcgcctcttatcctcgcacttatctcgttctgttgcattccatggagtagtatctctctatctctcattccatgtcacccatgtgggtccgtatacattagcactcctcatcatggcccgtgattctcgataaatctcccgcgtagtcccgtggccatacgtcctagttcgttgtggtacgtttatggatggctcgtcctggtgctgctagggtgtgttgggtttgcttggatggactggctgtcaccttgccttgggcatgcttgcctgggctctatgcatgcctgcttgcccctgttcgggttgcatgttgctgtgtgtgtggcctgtggatggaagctgactgatgccccatactggtggagcacaccttgcgcttaatagggaatcaccatggcccggcttgtgcctacaccacagctgctgctgttttgctgaatgtaaatggtttgtgtacaatagttttatttgattaagcttcaggatctgttttgtaaagtcgaggtgggaccgatgtggcacatcgtccatgctgcggtttcccggagtcgtggagaggcatgtgtctgtctgctcccgcccgatggctcatgacaatctcaagaatagcactgctgaaattcttgggcagt

SEQ ID NO: 488013 - DNA, 190 bp, Homo sapiens
cagaaacctcccgtggagcagaagggccaagaagattgaagccagagaaggaagccaagatgacagattttgatcgttttaaagttatgaaggcaaagaaaatgaggacagattatcaggatgaggttaagagcttcaaaggcagctctcctgaagcttctccaaaaagcacctggtactaagggtactc

SEQ ID NO: 488014 - DNA, 151 bp, Homo sapiens
tgtaatatagcactgaagtgcgagtcgagacagctgcacatgaagacaaatgaaggtggctaggctgtggttccagctatctggaggtgaggtgggaggataggttgatctgaaggttgacgctgcagttagctgtgattgtagcactgta

SEQ ID NO: 488015 - DNA, 710 bp, Homo sapiens
  misc_feature (9)..(9): n is a, c, g, or t
  misc_feature (105)..(105): n is a, c, g, or t
  misc_feature (110)..(110): n is a, c, g, or t
  misc_feature (117)..(117): n is a, c, g, or t
  misc_feature (150)..(150): n is a, c, g, or t
  misc_feature (155)..(155): n is a, c, g, or t
  misc_feature (180)..(180): n is a, c, g, or t
  misc_feature (185)..(185): n is a, c, g, or t
  misc_feature (205)..(205): n is a, c, g, or t
  misc_feature (236)..(237): n is a, c, g, or t
  misc_feature (247)..(247): n is a, c, g, or t
  misc_feature (263)..(263): n is a, c, g, or t
  misc_feature (277)..(277): n is a, c, g, or t
  misc_feature (281)..(281): n is a, c, g, or t
  misc_feature (283)..(283): n is a, c, g, or t
  misc_feature (291)..(291): n is a, c, g, or t
  misc_feature (296)..(296): n is a, c, g, or t
  misc_feature (306)..(306): n is a, c, g, or t
  misc_feature (326)..(326): n is a, c, g, or t
  misc_feature (372)..(372): n is a, c, g, or t
  misc_feature (375)..(375): n is a, c, g, or t
  misc_feature (377)..(377): n is a, c, g, or t
  misc_feature (410)..(410): n is a, c, g, or t
  misc_feature (412)..(412): n is a, c, g, or t
  misc_feature (428)..(428): n is a, c, g, or t
  misc_feature (578)..(578): n is a, c, g, or t
  misc_feature (618)..(619): n is a, c, g, or t
  misc_feature (637)..(637): n is a, c, g, or t
  misc_feature (645)..(645): n is a, c, g, or t
  misc_feature (700)..(700): n is a, c, g, or t
tcacaagtnaaaaatatttattatatgacacttctttaagaaagaatttgctgacctctagtttagatttagacaagaataacaacaaaaaaaattcttcattgnaaagnatctttnaacagccaagtgaccaagaatatcttgccaganttctntttagtagcatgtctttctacatangcatnagaagaaaaaagaaaaagtnattcaggggtttgggggggggggggcacagnnggccacaccngtaatcccagcacttngggggaccggggcngggngntcacttgngctcnggggtttganaccagcctgggaaacacagnaaaacctcatctctaaaagaaataaaaaaattaagcggggtatggnggngngtgcctgtagttccagctactcaggaggctganangggaggatcctttgancccaggaggatgaggtagcagtgagctttgactgtaccactgcattcagcctgggtgacacagtgagatcctacctcaaataataataataataataatgataataatttaggatgaagccagtaacatatattttgtttaataaaaganagcttatattctacaatatatgtagaataaaaatatatgnntgtgtgtatagacacacncctgcacncataaaaacacatatactaaaattctgggggggacagatcattaacagattgggngcacagaatt

SEQ ID NO: 488016 - DNA, 317 bp, Homo sapiens
  misc_feature (216)..(216): n is a, c, g, or t
cagtctggaggaggagtgggacagagtagtgtgccacatggaactcagcaggacagaggctgagatgcttcagacagaaaaagcatgtttaaaggatggaaagaagttcagtaagcctggagcacaaggcacagaaaggacagtaacagtaaaggaaaggaaaactagagaaaagagaggagaattaattgcgtgatgatgcaacggcccttcccnaagtcatgttaaagaagttcatggcgtacagcatgtgaagtcgttacagactggcagctattggagaccacgttaagaagacagctagcgtccatggtcta

SEQ ID NO: 488017 - DNA, 287 bp, Homo sapiens
  misc_feature (24)..(24): n is a, c, g, or t
  misc_feature (41)..(41): n is a, c, g, or t
  misc_feature (111)..(111): n is a, c, g, or t
  misc_feature (126)..(126): n is a, c, g, or t
  misc_feature (262)..(262): n is a, c, g, or t
gacttgcagacgcgggttctgccngagtgttaaacagagtnctggggggttctcttaggggagggaatcccggcggcgggctcggggctatttgagagctaggtcttattnggggactgggaatgnatggagtgaccggaagtatacgaggacgggatcagaggccgtatcgtgtttgggatgcctttttgggataaatgctagaaaacggtactatagctggtggaatcaaatggccatgggttactgggaggggctgctngtggagcttgctctggcgggggtga

SEQ ID NO: 488018 - DNA, 83 bp, Homo sapiens
agggcggggacgggggttttttaaaaagggttttggggttccctttggggctttgggcggaaaaaaattttttgggggcggga

SEQ ID NO: 488019 - DNA, 115 bp, Homo sapiens
tgtggttggtgttctagaggatcccaatggagtcttcagtggcagccctgaatatagtgaagagaaagagttggaaggatcaccggggaacaagaagagtacaacctgccggtgg

SEQ ID NO: 488020 - DNA, 193 bp, Homo sapiens
gtaatacggctctcttgggacagtcacagttgggtgaggcagcatctcttagtctcctgcagcattcagccgagggcaggaagtgagactgacccttcctcctccccgccccggaaaatgaataaggagtgattattttcgcatcatttcgggggcagaacgaagcagaggaacgggtggggaggcctgggag

SEQ ID NO: 488021 - DNA, 130 bp, Homo sapiens
accccgagacacgggggtgaaaaacatccctttgtaaaaaggttttttgtttaccgggggagggggggggaaaaatcttgcgcctgaaaaggggggttttttcaacctccctgaggggggggtctaatcc

SEQ ID NO: 488022 - DNA, 158 bp, Homo sapiens
aagaaaatgatcctagagtgaatttttctagaaaatatctattatgaaccatgctgtttaaagtaatagctggatccatcaccttcaagctaatactttaaacagcatggttcataatagatatttaaaggattagcttgaaggtgatggatccagct

SEQ ID NO: 488023 - DNA, 138 bp, Homo sapiens
tacctgctcaaacttgttacggaagtcatctgcagccagactgggcgttgtcgatactgcaggacaatcctggagtactcaatggtggcaccaatgaatcttgtcccgcaggacctggatggtcgtgtagtagtggct

SEQ ID NO: 488024 - DNA, 776 bp, Homo sapiens
ggggtcttgctgcccacgatcggccggctcctccgcattccacgaatctccccgtggctctccccgacctggacgggtggacgcccttggggccccaatgcctcggtctgccgcggggggcggtgcgcctggcgcgccatggctcgggtgccgtgagaggtggcagaaacctcagggtcaggcagcagagagactgataaggctgatggagtcgagctgagtcccgtgggaacagcgagagcattcctagatgaggccagttcctgcccggggtgagtggcacggccattctgaagaggaagggctttgccgatggcatgaggaggactctgatggagaactgaatacctggagagcgtgtctagagaaggaacagagtgatgcatccccaggggtgagatcagcctgtgcgattctttttaagtgagggacatgggactcggatgttgaaagctagaatcaaggggaatcgcatatgatgctgactgattagtccaggatgagcaatttctcaggagcttaaaccttggagtgtgctgtgcccccacaaggagacatgatctatgaccccaagtgtgggcaccatccgcctccagctgataccctattattccaagatggtcttctgaaagcaggaccagtttgacgatgctgaagattgagtgtggagcttttctgacttgtaagtgggcgggctccacgtgaagatctcttttgcctgtgctggacgtggagacgttcatgatctggagaaaaatgtttgcaagtgaccccta

SEQ ID NO: 488025 - DNA, 698 bp, Homo sapiens
tctcgcccccccgccgtagacaattcgtaggcagtgtcgtgcgggtttccaactgaaaccggttaggaccgaccgccttagtgtagttgcttccacatagggatcaccgctttacaggtacgaatcctggcgtctgctgtgtggcgtgcgatcgaaacagtgtttccccgggacagcgatttcggcattagccgagctagatctttgcttccagaaggcaccctatgctgatctgccaggcagtgacgatcggtctacaaatagtgtatccctcgggctgccgcattccggcaagagcttgcacaccttttccctatgattgccaacctcaaagatctcaaataactttgtaggctggtgcaggcagagcaacttctttagaagaacttgtcatagatgttaagccccagtggacaccagttgaaaggtattagactagtcttcaataaggatgcagtgtcctctgatgagggttgctagaatgaacttgtcagtaatgcatggttagttttcatgcaagtcattaaagtgattaatagcatcccttgcttttaccccagtcagtagcccgcctccaagctttgacccccgttgcccttacccgtcggtgtaaagtcaacactgtgttctcttcacccaatattcctcaatatttgcgcatattgcattggtgttccaattaatattcaatgaagatt

SEQ ID NO: 488026 - DNA, 114 bp, Homo sapiens
ggagtaaatcacgccgtccatacgatcgcctatcactcctgaaagggaacgtctgattggcgataccgcccagaaccagatcacctaccaaccccaagaacacggtcttatgac

SEQ ID NO: 488027 - DNA, 1027 bp, Homo sapiens
ttaaaattatgacatttttgctttgtgattgaatttcaaatagcagtatggtatcctttcatatattaactagataaaaggataccatactgctatttgaaattcaatcacagaagttttgaatataagcgggtaaagccgatcttgaaggtgacgcctttcacggatatttgtcctgttccaatttggccaaggccctttttgatttggtccactggtttggcaaataattagcaagaacggtgagaccagtgggggggcaacaattgtggcgtaaatgataatcaaacatgttcgaaattctaaaagtctctacatttacctaggttggctttctcccccagttcagaagtttccagcttggccaatcatcagaatcacttgaggacacttagaagagaagctcccttggggtggtagctccctaatgttagggttagggctgagagctctgggattcccccccattttttgaacggggttccccacctgaggggtgtctgggcataagaccgccttcttttggacgcaggcttgctgcgcgggagcttttatttcccccatgtagcaaccccgggaggttggcgatacatttctcgtgttcagtgcgatttcttcccccctccgtagtgggtctctgtaattaaaccgggcccttcctcaaacggtgttgtactattctgccgcgtgtttctttcccatggccccacgcacccaaagatctggttagggttaaccaaagcaaccaaagcaactgctcggcacagaaataacgacaaggggaagacccactggatgaggtaacatacaaaccacgaggggaaggaaattgtgcccacaaaccacacgtgcgtggtgggcaatctaataacccctgtcgggagaagtccacaaacgcgactaccttcacactttagatatcaaaatggcgctcactaacccctgcgcacggaaataatgagtacacccacatacatattattaagaaagcacgcctgcattacacggagtaccacaataaaggcgg

SEQ ID NO: 488028 - DNA, 143 bp, Homo sapiens
ggagcccccgagaaggcttacctcaaacacttaggaaatactaacacagataatttttaaaatactgcctctacatacaatgattgtgggctttctctgaagaagttgtctttttttttcctttttcctctgggggggggctg

SEQ ID NO: 488029 - DNA, 857 bp, Homo sapiens
aagctcgaaccccgttgttagactcgcagctctcgggcttctgctccggaggcttcttccctgacccgcccggggccctgacctgtggcttcttccccggcctgatctgcgcagcccggcgggcgcccagaaggagcaggccggcgcgggggcgcgctgggcgggggagagcgtggcctggagctagcaggcaggcaagcgggctgggactgcatcggccgccatccatgcccggacgagcagctcagaccattgtcgcctgaagaatggacgtatcatagtggtacttcttatctccatcccgcatcggcgttcctcatttaagaaagccggtcctgggctgaagagatggggagcagccgcatgatggagccatggaggctcacccatgattatcaccattgtggcaccaaccaacaacattatgacatactctggtacaccaatccatcgagggacctgggccctcaattcatggcccagaccatgatcctgcgcacggcccatgagctctgagccatggacttatcatccataatactccatgattcgttccagagcgcctcgagacctccctggtgccatgcccacatcccacgcgcctatcacgcaagtgaccagaccagcatgctagcatgaactgcgtgacagcgtggtgagccatggcacagtgaagtccaggaacctgcagtcgtggccccacacgacaggcaagtggacgtcagcgctacagcaaggggggccaacccatggggactggctgccccgaagtgcacctccctgattgagacaagcacgcacagtacagctcactgggactcatgaaggcccgaaataccacgaaagaaccacaggag

SEQ ID NO: 488030 - DNA, 123 bp, Homo sapiens
ggtgattaaataacaataaaccctgtatgtcacataagcaaccatattttaatgcaaacaataactgcattttgaaagacagtacaattagtgagaaaagtggcatttaaaaaaatctcatta

SEQ ID NO: 488031 - DNA, 240 bp, Homo sapiens
agattggagatacagatttgggggtagtttataggtgatgtttcttcaagagactcatagatgaaagagtagtagtgcaagacgaaacttcaatgacactggcatttatagccaaacaaggaggagagattctgaagcagactcaggtgagatgtgggagtggcgtgaggatggagactcgtgagatgcattgcatggaggctgtatggatattatgttttagcctaccggtatttaaca

SEQ ID NO: 488032 - DNA, 228 bp, Homo sapiens
  misc_feature (105)..(105): n is a, c, g, or t
tagagatccccgggaagggaagagagtggctcacctgcagtaaatagctaaaaagccaagccaaagctggagggagaggacagtcgcatgtccacctgggtctgnggtgtagggtttcccttaccctgtgccttctatctggtcatgagcctagtcttgcagccttgtcttagagctgctctatgtcagaacaggatctgtctccttttggacacttcctggacctca

SEQ ID NO: 488033 - DNA, 914 bp, Homo sapiens
gctgcacatcccggcgtacgcgtgtgccgacgtttcctcctccatctcttttcctccgcctccgcggcgcgatggcgaagccgctgacggacagcgagaacgcggacgcagatcagcgtgcgcggctggcggggctaggcgacgtggcgaggtgcggaagagcttcaaccggacttgcacttcatgctggtcaaggaccgcaatgtggccacgcccgcgactacttcttcgcgctggcgcacacggtgcgcgaccactcgtgggccgctggatccgcacgcagcagactactacgagcgcgaccccaagcgcatctattaatctttccctggaatctacatgggtcgcacgctgcagaacccgatggtgaacctgggccttcagaatgcctgcgattgaacccatctatcagtggggttagacttgcgcaagggaactcgaggagctacgcccgaacgatgctgccttgggaatggaggcctggggaggctggcagcgtgtccttgactcactggctaccttgggcctggcagcataccgctatgggactccgtatgaattgggcattttacccagaagcttgtcactgggccggcagggtagaaggaggccggactgaccttggcatgcggctaacgggaacgcccctgggacgaaagcgcggcctgagttatatgcagccgcgcgcacgtactacggaccgcgtggagcccaccccgacgggcgttgcagtgggtgacacccacacggtggtgctggccatggccaaagaaaacccaggcccggctacaggaacaaccgcacaacccagcgggggggtccgccaggtccacaggaatcaagcgcggcactcaccttggccaccacacggcggcgcacgcacggcgacacacccgcgcgctccacaggaaccg

SEQ ID NO: 488034 - DNA, 208 bp, Homo sapiens
tcgaccccgacccttaacgaccagattacaaagtaatctgaattcttggattttaaaaagagtcaacccacctattttggtgattgcgaatctttgacaaaagagtacgtcgatacaaagagaataaatacggaactcctgattaaagaccaaaagatcgacaattacgtgacaactggaagtattaccacggatgcgttcgctaggg

SEQ ID NO: 488035 - DNA, 656 bp, Homo sapiens
  misc_feature (533)..(533): n is a, c, g, or t
  misc_feature (574)..(574): n is a, c, g, or t
cccgatgtagaacatgacctgaaacactgccagtatgacactgagaaaggcctagctgctgggtacaaaggcttaaatgaccatcatgtttacctggcgggcacactgctaaatgccaacatggcgactgctggacatgcatgcactaagaagtatactccagaacaagtagctatagacaccgtaacagctatccaccaaactgaatctgaagctgttcgctgcgatatgatgttagaaaggtggcatgagagaagaggatgccactatgaacctgaatgctaacaaactgtgcactgtagcatagtgctcgaaactaagcatgtcttatggacggaacctgcacgacagtgtactggctgtaagacggggctggctgcaaacaaggatgcaacccacgaagctgttatgaaactggccaatgctatcttgcatgccgccagaggacacgatgattacacgggtattgtagggctgtgttcatacagtatgttgtgacagcctggtatacctactacgggcccaatgcacgncattgctattgcagagcgtctaatgggaaggcttcaacgcnagcacactttcctcttattctcgaaattccacacaatagatttttactgctggaaatccacacctgtaattgaagtacgggt

SEQ ID NO: 488036 - DNA, 115 bp, Homo sapiens
aatgttccatacactatgattatcacgtctattgatgttctactatctacagaagaacatttaaacattaaatagtatgaactctcatcaattttttttttattattttttattg

SEQ ID NO: 488037 - DNA, 185 bp, Homo sapiens
actaccgccgctgggccgaaatcatcgagctatcgatcaacttgaaattggccggtgacctgatcgaacgcatgctgcgcaaagtccagcaacagaagacttcgcaacgccggcaattttccgaagtgggcctggaggaactcagtggcctgcacagccagttgatcgccaacctgcgcctgggc

SEQ ID NO: 488038 - DNA, 345 bp, Homo sapiens
tgtgtgtagaagctcataatagcttggtagaggctattaccgtattacctttaaatggtgctcctgcaactcttgttctcaaagaatttctccaaaccttagagttcctcaggtttcgggattaagagctactctgcattacagggcatcagtcttaaccatgatcactccgggttcattagaatttatcagctacagcgtttcttgttgaataattctttgaagatgtcgtctcataatgtctgatccaaggatatctctcaagtggagcacaaaggtaactacctgacagcccgggcacaaggcctagagttagagagcaccacagtaatatgctcaaggcac

SEQ ID NO: 488039 - DNA, 210 bp, Homo sapiens
gtcatggtagactcgtaaacaaaatggtacagcccttccctgaatagacccgcttcttgctgtgggaccagtcgggctttgtaggactaacaaattagctgcggtgttagaaataatggaataggggtcttgtggcctccgcatgtgagagtctgaacctccccaaattgattcgggggatcagctcactatggtaaagcctgagatcag

SEQ ID NO: 488040 - DNA, 726 bp, Homo sapiens
cgacgctccgccgtacgcgtttctctgaccggtcgcaaatggaagaatgagatcgaccgacgcatggatcatatgacaactggactccggcatgtgcaaatgctggcttttgctggggactgacgctccccgagaccgtgtttccttatccatcgtcgggcgccccagacaccagggcagtcatggtgtggcatggtgccagaatggactcctacagtgggcgacgatggcccagagcaatgcagtggcatcctgacccatgaatgtacacccattgatgcatggcatcgtcaccaactgggacgacatggaggaagatctggcaccacaccttctagcaactgagctgcgcgtggacccggaggagcaaccagtgctgctgaccgatggtcccacctgaaccaccaaggccaacatgatgagacagatgactcagattatgttttgaggaccatatacaacaaccctggacatgttaacagtggccatacccaagacacgtgctatgtcacctctacgcctctgggacgcacacaatgtgaaatatgttcagtgggacatcttgtgatgaaagatgggtctacaccactactgggtggccctctacttaccgacgggctaactgcagtcgccaccaagtcattttctctggtgttattagaacatgagaaatgaccggggacctgcaatgattaccttcatgatgatcatcaatgatcaaataaa

SEQ ID NO: 488041 - DNA, 298 bp, Homo sapiens
  misc_feature (202)..(202): n is a, c, g, or t
taagatctatttgtaaattaggattaaaaagggtttaacccctttttaaggctgggtgaatttttttaaacaaaaaccctttgcaatatgggtttcttagagatttaaccaattataacttattagcagtcgcgagcccatgtttataaagtcaatgtaaaaaacccctaatgagtatttggtaaatcccaggaggcttttncccttagcaaaattttgtgttggcaaattaaggtccaattacctctttaattttggataaaattccttggttaacaaaaaagtggcaaaagcccca

SEQ ID NO: 488042 - DNA, 152 bp, Homo sapiens
  misc_feature (128)..(128): n is a, c, g, or t
gatagcggatgaggggctgttgtcgtttgagcatgtcgagcagttactgtggcttcttgtatatggataagctgctgtccttccccttcaaaactgaccccggcagtacaaaaactagtatatgcatntgtgcttgattgatgatagaactc

SEQ ID NO: 488043 - DNA, 168 bp, Homo sapiens
gagatgagtaacactgtaccccggccggggcgacagagccagacaccgtctcaaaaaacaaacaaacaaacacatctacactttttaatactcctcccttcaataggtcacgtttaatttctaccctatatcccctaatatgggctgtcagtagcaattcacttgggg

SEQ ID NO: 488044 - DNA, 588 bp, Homo sapiens
tccgaatccaccaacgcagaggagtggagagagaaactccggagaagaagcaggagcgggtgcggcggcgaggtcgatgtcgacgacggcggggtacctggcgcggcgcgcgggccagaaggagcgggtgcggctgctctaccgccgcgcgctcaaggacaccctcaactgggccgtccaccgccacctcttctaccaggacgcgtccgagctcagggacaagttcgaggccaacagaaatgtggagaacctggacgtgatcgataggctcatcgaggacgcggaggcgcagcagaggaacttccagcacccggatccttacattgttccatgggctcctggtggcactaaattcacaaggaaccctcctccacctgaagggattgagattatctacaactatggcaaagaagaccaatgaacaagaatcatgcatttgtgagcagagcctggcaccggcggagtgcaaaggacttacttttgcttttccagatgatagcatgcaactgagctgctgtatgatttgttaagaacaaaataaaattactagcctccttccatgtgtttctttttatacacataaaaaaa

SEQ ID NO: 488045 - DNA, 127 bp, Homo sapiens
ctattcacggcacctcgctattcatcggcaccattagctctagaggtccatgcatacttcatattatactttaattcaatactgcatagtattgtgtagtgtggactactatatgggtgtcgacgta

SEQ ID NO: 488046 - DNA, 430 bp, Homo sapiens
acttggagtatgtcctcatccctcatggtatcattgtggacagaattgagcggctggccaaggatattatgaaagacataggatatagtgacatcatggtcctgtgtgtgcttaaaggaggttacaaattctgtgctgatctcgtagaacaccttaagaacatcagccgaaattcagatcgatttgtctcaatgaaggttgatttcatcagactagatctttcaacgctggctggaaagaatgttctcattgttgaggatgttgtcggaactgggaggaccatgaaagcactactcagcaatatagagaaatacaagcccaacatgattaaggtagccagtttgttggtgaagagaacatccagaagtgacggctttagacctgactatgctggatttgagattccaaacttatttgtggtgggatatgc

SEQ ID NO: 488047 - DNA, 339 bp, Homo sapiens
tttcacccacgatcacagggttggtgtaaaataggcggtgaagtgctgctaaggctgacattataaacggcacgatcaagtgaatggtaaagaatcgtgtgacggatagaggactgtactactgagataactctcctcatcattcattgtaactaagtctgtcccaatgtcatggtatagtgccgtgcatagataagtttgtatttactgtggcccctcagaataatatatggcctcacgggaggacatatcctatgaaaggctcgttgcttatagtatacaagctagaggataatgccaatttgacaggtttctgagtacagcaatcatccgtaatat

SEQ ID NO: 488048 - DNA, 123 bp, Homo sapiens
ctctagaggatctccccctgtatacccaccctgaaaattttccgcaaaggaaggcttatgactacgacggccacgagaaaaactatggaatcgttgattaccttgatcgagcagtccgggcct

SEQ ID NO: 488049 - DNA, 296 bp, Homo sapiens
cgtcgacttatttactttgtgtgatattactgtgtgtgtgtgtgtgtgtgtgtgtgtgtgtgtgtatgtgcgcaggttttcatccagtttttgtctcatacgccacatagccattgatacagtgtttgatataacgctggcgcactcagaaataggcttcaggaaacagtctctttctgaccttctcgtgctctcctctcaccttcagagagtagaactctaatctgagtgtgggtcataagactctcattccagagaaggttctgactcataccctggaggaaggaatgccgcag

SEQ ID NO: 488050 - DNA, 506 bp, Homo sapiens
gggttccccccgggggggggcgcttttaaaaaaaagggatcccccgggcccaaagattttggcccaaggtatttttttttcccccaaaaaccttgggcccttttttttcccaaaggtttccctgaggcccccccccccccccttgcccttggttttttaaaaggggcccccccatcccctttttcccccccaaggggggaaaggggccccctcccgggggttaaaaaaaaaaacccttgtgttttggggcccttaatttattcgcccatgcgtgttttttttggccaaggggggttcaaaaaagggttctttttttcaaggtggggttaaagtttttcttgttcaagggcaaattttcctaggtttttttttaaaagggtttgggtaaccaattccattttgttttttttagccggtaaaaaaagggggtaaagggcccttttttaaaaaattacccctgtgtttttccccaggaaaaaaaaaaaaattgggggccttccccccca

SEQ ID NO: 488051 - DNA, 414 bp, Homo sapiens
aacggatgtcgtcactgagcagcatgtgtgagtgcggcaggatgccagtcccaggaagacagtcctcatgctgggaatccggctccaggtgcattaaccctgctgcctggagatgtgcagagctgtgtagggcttctcgttgtctaggcagccatgggtctgctgggttgagagatgtgatgcctgagcattggcctcctctccaagctgcctgaatgttgcctcccatggtggaaggtaatttgtctctcgagtcctttcccagaactggtcaaccatggcaattccccaattcttccaaagccaagtcaataaattggggccttggcttgctcacctgaaaaatgcagaagccaagactgaccccctggaggccctggaggtctctgctcatgaggagcggcctgtttattg

SEQ ID NO: 488052 - DNA, 978 bp, Homo sapiens
gacccaccgaggcctgcgcaaggatggcctgtattggggcatggcatccatgcatcgtgtagccttctctgtggcacgcgcatgggcagaaaggctaccatcaccgcactgcagcatcaaccaagcaagctttcatacagcattggccagtggctcacccttatcaaggacggcccagctgcatcaagaacaatgcctccactgcactatgacctatctgacaagagcatcaaccctctgggatggcttggtccacatatggtgaaagtgaccaatgacattcgtcactgctgacacggctgtgtggtgggaatcacacgacgcgaggtgctcaacctccgacaagatccttgctggatgcagaccgaagcggcgggctctggacgacgacttgacccttcagattcattgacaaccatgctccaagattaggccatggccgacttccagaccatggacggagcagacaagcactcatgggaccactgccgacaccgaccgcactggcacaggcacacgaccggaggcttaactgccaggcaacacgcctcaggccagctgggagagaggtcctcacctacaccaggttactcaccccaccgcacaaccacacaccaaccacaccccacacgcgacgcacacaaaccatacacgcagccgcacccacagccccaccccacaaccgcctcaacacaaaccacgacgcaaaggagacacgggccccacagcacggcacaacgagagacaacaggggaccccacagcggggcaccaccatagaaacagatccaggagggcaaatgcacaacatgcgactacgaaactcctccaccaaccgaatcacagacgccgccgagcagacacacaccagacgcgagaccacacacacgaccggaggcgagcgcaggacacaaaggcggacctcaaacggcgggccaagcggacgagccgtatgaatacccccccagcgcgggagcac

SEQ ID NO: 488053 - DNA, 498 bp, Homo sapiens
gtgctattttacaactgaggaaactgaatccccagaaaagtgaaataaccccagccaagatcatggagctactaaactgtggcaaccattattttgaatcttagtcctctttacatgtaaagttctttaaaatattccatctctctaaaagttcccataaaaatatatatgttggtgcactgcctgtaacccccagcactttgggaggcccgaagcgggcagatcacttgaggccaggagtttgagacctgccttgccaacatggcaaaaccccatctccataaaaatgcacacacacaataatagccaggtgtggtggcgtgcttataatctcagctacttgggaaggtgaggcatgagaatcatttgaacctgggaggcggaggctgcagtgagccgagattgcaccactgcacttcagcctgggcaacagaacaagatgctgtctcaaaaaaataaaaattaaaattaaaaaaggtatattttaaacgtgtggaa

SEQ ID NO: 488054 - DNA, 190 bp, Homo sapiens
attgtacggaccgaactacttgaccacctgtcgtacataaaaacccaatccacatacaaaagcccctccccatgcttacaagcccagtacagcacatcaaacctcacatatcacacatcaatctgcaagctccaaacgccaccccatcatccacataggataccaaccaacaacctgtgtaccggcgctc

SEQ ID NO: 488055 - DNA, 326 bp, Homo sapiens
  misc_feature (168)..(168): n is a, c, g, or t
ctcgccctgaattctttcttgcgcaagatccaagaaccctctcttggggtctggatagggacccctttccagtacagaacctctatgggttcagctatctggaagttccctgtgttagagatgtgtgaaccaaagcaactccaccttgagtaggagctgggtaaaatnaggctgagacctactgggctgcattcccagacggttaaggcattctaagccacaggatgagataggaggtcagcacaaaatacaggtcattaaagaccttcttaataaaacaggttacagttaaagggagctggcttaaaattcaccaaaactgcgat

SEQ ID NO: 488056 - DNA, 430 bp, Homo sapiens
gtcatataagcgctcagatcggtgttcttctaaaacctttaagataaaagaaagaatacaacttatacattaaaatgtttagttagtacatatcccatgaagctataaaaaaaaacttctcctggatagagaaattctctccactagcagcagccattccaaccagtttgtttcactgaggtgttgggataatgctcgtttatgttgaggacatagcagagttttccatgtcgtcaggtactaaataggtataataatagaaaaactctttcatgggcacaataatttactgctaagcatagaatttagggttataagcattcaatacagtcactgtttactgaacccacattcagtgtcccgcaactcccaagagttccatagtagaatatatacccgcttatatgacgctagggtaccgagcctcgac

SEQ ID NO: 488057 - DNA, 151 bp, Homo sapiens
ctcaaggtctttgctggtgggcaggtctttgctgggtcggactgtctttgcttggtgggacacgactctttgcttggtgggacacgtggggactcctcatacgacgtcgaccctgcactgtgcacgtgccactgcttggcaccttggcctg

SEQ ID NO: 488058 - DNA, 119 bp, Homo sapiens
agaatataacgttgtgttacggactgagcagcacatctttgagagcatgcacgtgcgattcgactgggctgtctgtgattctcaagagacagccatgcagcgtgggcccacgggtacat

SEQ ID NO: 488059 - DNA, 801 bp, Homo sapiens
cggtgagagcgccttgacgccgggatccctccccagaccttggagcccggtggccgacctcagatttggcaggacccccatcctgcgtccagcccgaggaccgatcctgtatcactgacggtccaatgaggagacctttgctacgaagtcccatcaaagaggagggggactacgtcgctggtctttgaaatttgcagaggtctactttgcacagtccccgcccaaggtatttgatgtgacgattgaatgcccccctcgtggtgaaggacttggatatctttgatcgtgttgggcatagcaccagctcacgatggcattatacctatgagccatccagaaaggggaaactgagtgtcccgggggaggtgtccccccctcaccgggagaactctaccttgagtttgtccaggggtactatgaccatccccaggtctgtgcactctacatcatggctgggaccatggatgatgtacccaagcttcagcctcatcccgggattggagaagaaagaagaggaagaagaagaagaagcatatgatgaagggtctaatctccaaaaaccagacccataagaacccgggtgccagtcaggcccccgcacaccccacccctatgcctccggaccacagccagcctcatgtttcccatcctggtggccttcggagtcttcattcccaccctcttctgcctctgccggttgtgagaaccaatgactatcctgaaccgggtggaggggtgtgggaaagaaaacccgccatattggttttggtttctgtatttttccccatgattaatgaacca

SEQ ID NO: 488060 - DNA, 1602 bp, Homo sapiens
  misc_feature (760)..(760): n is a, c, g, or t
  misc_feature (924)..(924): n is a, c, g, or t
  misc_feature (978)..(978): n is a, c, g, or t
  misc_feature (984)..(985): n is a, c, g, or t
  misc_feature (987)..(987): n is a, c, g, or t
  misc_feature (991)..(991): n is a, c, g, or t
  misc_feature (1002)..(1002): n is a, c, g, or t
  misc_feature (1014)..(1015): n is a, c, g, or t
  misc_feature (1028)..(1028): n is a, c, g, or t
  misc_feature (1032)..(1032): n is a, c, g, or t
  misc_feature (1077)..(1077): n is a, c, g, or t
  misc_feature (1081)..(1081): n is a, c, g, or t
  misc_feature (1086)..(1086): n is a, c, g, or t
  misc_feature (1108)..(1108): n is a, c, g, or t
  misc_feature (1116)..(1116): n is a, c, g, or t
  misc_feature (1119)..(1119): n is a, c, g, or t
  misc_feature (1122)..(1123): n is a, c, g, or t
  misc_feature (1131)..(1131): n is a, c, g, or t
  misc_feature (1142)..(1142): n is a, c, g, or t
  misc_feature (1148)..(1148): n is a, c, g, or t
  misc_feature (1155)..(1156): n is a, c, g, or t
  misc_feature (1172)..(1172): n is a, c, g, or t
  misc_feature (1178)..(1178): n is a, c, g, or t
  misc_feature (1189)..(1189): n is a, c, g, or t
  misc_feature (1222)..(1222): n is a, c, g, or t
  misc_feature (1443)..(1443): n is a, c, g, or t
  misc_feature (1451)..(1451): n is a, c, g, or t
  misc_feature (1472)..(1472): n is a, c, g, or t
  misc_feature (1510)..(1510): n is a, c, g, or t
  misc_feature (1594)..(1594): n is a, c, g, or t
gttctgtcttcctcccggtccccgctcttgcctccttcctcttcttccttccgcgtggcctcctgcttcgcgccgtcttcgcctgtctctggtctctcgctcgcctcgtcttgtctctctcttctctccctttcgctgttcgcgtctgttcttcgttctcactctctggttgtctctccctctctctcttcctctttcgtctgtcttctctcgttttctgctctctccctctttgtggctcccgcttccttctctttcgtttctctcctgttcgttgttcgtccccgctcctgcttcttccctccgtcttgtccctctcgtctcctgttcgttcgccttctgcttcttcgttcttcttttctttttctcttctatctgctctccttcttctccttctctccctctccacgcttgtctgttttcttttgtttcttgtggtctgtttggtgtgtggtttgtttgcttgtttgtgtgttttatagtgttgtctctgcttctcgctgtttcgttctgttttgtttttttcgtggttttctttgtctttttttttgtcggtgttttctctcgtctttcttgtttgtgtgttgttattgtctccatgttttgttggcctctgttgtttctttgtttctgtgttctctgttgttgtgttgtttgttgtgtgtttctgtggttcccccgcgcccggtgtgtgtgtggtcatacgcgctaccccatgtgtaatgacaagtggacccccctttaagtgggtgagtcccanagacacaccgaatcaccgattttttatgtggtgcacacaccttattagggaaactcccgaaagtgattccccaccacaagagtgtgtgtgtaccaccaggaaaaaggcacggtccttgtgtaaaaaacgcaccgcgccccgcgtattacttattataccgggtncctaaaggttattcgcacggccctcgtggtgtgccgaaaatttcgcgccacacnaagggnncncgcncacacacatgnggcccccgcttnngccacccacacanaccncgtgaaagaaaggccgcgccccgcgggtcacatacacatatgaanaaangtatnctaacaccgccgcccctgggcnacaacganacnttnncacacacncgcgaccacanggcgcncgttttnngcgaaggaagatatcncccacncttattctccnacgcccacaaaggcttcccccacccaagatatnccacggttatatgtccacacgccacttctgagatgagaagccgagaattcacagaagagggccccacgctataagagaggtatttctcccactccaagctgtccacggagaggaaggaagaggaagaaaaggagagagaccacacttatgttcctcgaggttctcacgcccctggatccacggagattattgaagtagatcctcgaccacctaaaggaaantgctgaangcttttggaacttcggcacgntctgtccacacccttcacggtcacctcacagcctaccncttgggatgaatttccaaacccctcggggacccgtttgaattttttctgtagtgcctgtattattttccataaatctgggaccnccccccca

SEQ ID NO: 488061 - DNA, 145 bp, Homo sapiens
taactatggaggacgtgcacattgaagggccaggaatgtgtgtgggaagcggacgaacacatgcatgacaggccactgggctcacagacgatgggctggcctaaggaagtagtggttgatgctgaccgagggacccagagcgaca

SEQ ID NO: 488062 - DNA, 877 bp, Homo sapiens
cagagcagtggcgcgcgtagagtttgacctttatgctccgggatccccttgcgccctgtggagcccccctgagagcctctaccacatgagttgtccccaaggagcatttgcgtatcctaaaattatggggaaggccgagagtgttggtgttcaccactaggggaaacttgtcgccggcatttgtgtgtaaacgtgtcctggcgtaataataaattcgggggcttcctcccccctgctgaaatcgccatgttcgggtgcagccccccaaattctgtggcgtcatgaccaccagcgttttagccctccctcggaaacgtacattcacacatcccacaaacgtctccccccctaatcaaattatactcgtatttcaagaaaaaatttcccaaggatcggccaaagaggccagcccactggcttacaccccacaaaaattttctccctccccccccaatgtcatgccttgtaaccccaggcacctgaaaaggcacccacacatcctcactttcccactcctccccctgaagtagatcctacgcccccacccaggttttgtctttcgcggaggattatttcttatgggaccgttccctccggaatagtggccgccgcaccagtatgcgctgatgtgattctgttccttgggtgtacggcgctctcccttaaatggttagcggtcaattggtctcactcaggttagcactctatgcgtctcgtgccgtaccgaaccccccaacgtatcgtcttcttatgaggggccgccccaaaggagagataccccccgcgcgttgtctttttcttaattccttcgggaccctctgggttactgtcgttttttggcaaataaaaaacaacaccccccgcccacataaacaag

SEQ ID NO: 488063 - DNA, 675 bp, Homo sapiens
  misc_feature (616)..(616): n is a, c, g, or t
cccagaggatcccggcagctatccggttcaatcggaaattaaccccagactgcgcctgaggggagctctggaacatgagttgtgctagagagttaggcccaccttgaggcagggagctggttttcatatcacagaatgagttagtcattcacctattttagtatatctgtgccagtaaaggtcggagaatatttcattcatttgcatgtgattcatgccattgacctgccagagagcgtagatatgttgtctctcagttctaagccttttgattctaaatttacatttgaaatactttttattttcttctcagaacaaaacgtacccactctcttgttccaaaacattacatttgccctccatattatagttcacagaccctgactggtatgaaagggctgaagagttacatctagacacttggtaaagtgtggtcggcaggccagcaacatcacctagaagcttattagtaatgcaggccccaacaactccaacccataaaatcaaaatctattaacaaagatcctgtggatctttgttaaaaagtttgagaagcaccaagatatagaaatctcattgaaataaactgatagtaacttaaagagcctttcaagtnttggaccttttgtgtgggaagagtgcagaactgatagttaagaattgagcttattaaat

SEQ ID NO: 488064 - DNA, 592 bp, Homo sapiens
  misc_feature (93)..(93): n is a, c, g, or t
  misc_feature (99)..(99): n is a, c, g, or t
  misc_feature (149)..(149): n is a, c, g, or t
  misc_feature (179)..(180): n is a, c, g, or t
  misc_feature (215)..(215): n is a, c, g, or t
  misc_feature (224)..(224): n is a, c, g, or t
  misc_feature (240)..(240): n is a, c, g, or t
  misc_feature (255)..(255): n is a, c, g, or t
  misc_feature (264)..(264): n is a, c, g, or t
  misc_feature (364)..(364): n is a, c, g, or t
tgttatcatagctggctgaggctttgacatccacacaacaccaggacttaagacagatgggactgatgtcatcttgggctcttcatttattcngactgngatttatttggagaggggacattgatttcacgcacacattttatgtaggngggctaaacatattttgcgggggggggtannaaaagattgcctatccgctaaaagcacacccaaantaaattggngctgcacccttcctgncgaattttgcctatnattgtatanaactactcaccattcaactcctggggcgccatccccccttgctcctcccctccttaaacagttttattcccctcatttccctctccctttctccgcatcnccatacaaaactcaaaccaggaaacactaaacacacgacccaatctctactctaacttttgtttgattccctcaccctgctcccattctatctgcgacttctttcctcctctttttcgtgtgtcttattttacacctatcaattctacttctcattttagtattttctttctgttacactcttattatttgtgtggagaggtataagtaattctattttattaattat

SEQ ID NO: 488065 - DNA, 117 bp, Homo sapiens
tccccataaattaagaaaagtattctgccctctagtgggtctaaaggtctgtatagcgcggaaggatggattttatagcagccttttaacagaactagttaatttcgtgtatatgaa

SEQ ID NO: 488066 - DNA, 492 bp, Homo sapiens
  misc_feature (17)..(17): n is a, c, g, or t
  misc_feature (76)..(76): n is a, c, g, or t
  misc_feature (227)..(227): n is a, c, g, or t
  misc_feature (252)..(252): n is a, c, g, or t
  misc_feature (316)..(316): n is a, c, g, or t
  misc_feature (327)..(327): n is a, c, g, or t
  misc_feature (371)..(371): n is a, c, g, or t
  misc_feature (394)..(394): n is a, c, g, or t
  misc_feature (401)..(401): n is a, c, g, or t
  misc_feature (411)..(411): n is a, c, g, or t
  misc_feature (431)..(431): n is a, c, g, or t
  misc_feature (457)..(457): n is a, c, g, or t
aagcacctccttcagtnattactctgcccaaggcataagacttcacttagacaaaaagctttcaaaacctacctanaaataagatagttcataaattttcaaaactgttcttccctgttgcggacagcccttgatctttgtaagacttagcaaattttggcatgctctcatgttagctttttaagttactgaaaactcctataaatttagcatcatttctcaaatcngtatagttttctcattccgaatgcntaaacatttaggtcaaaaattaaaataccagtagaaaaatattcaccggtagccaggggggatngggaacaacanggcaagaaactgaggagaacatttaaacattcagagcataaaantacttcaaagcattacgaaactngaacttngcattttccnaaattttagtagttccaacnagcgggggataagacggccagagggnctgggatgatttaagccaactcaaatttgggccgg

SEQ ID NO: 488067 - DNA, 677 bp, Homo sapiens
ggatgcatttgtgagcctcatataaagtgatgctattagtgatacgtaggtaaattagagcaacagcttttgaaacgctttgtcaagataccttactacataaatatcagttcttaggcatctaccaatgactcaccatctgttgtgttataatattggcagaataacaatggcatatatgtacatttatgtaacagacaaatccaggagcacccatgtgctctgatttattctggtgcttttagaacaaagtagaactgccagattccaggggaattagaaaaataaagttacgaactggtcttaaaattagaccagttctaattttaatatctgcattggcagctttgcttccagatcagctctgtcctttccagcattacctagtatcaggatttttccagtaaaccctgtgactaaaataatggttggctatcattattgattcgatttgaacatcactacactcttttcacagccaccactactcctgccctggattgactttctcattccttttggttcttcatacatgaatgctttccatatgggggatttcctaatttcattttaaattgaaaccacaaaattaagtatgaaattgttggttgtcacatggcattataaattcctcaaaatattctcttttcagtatgatcttgtaattggttgttctc

SEQ ID NO: 488068 - DNA, 1561 bp, Homo sapiens
  misc_feature (584)..(584): n is a, c, g, or t
  misc_feature (588)..(588): n is a, c, g, or t
cgcctttttgtgttgtcggccacaccccgggtgggccgccttgttgttggcctccttgtagtccaatacccgtgttggaagtggtctccgtgtctatctgtagactcgtgctctgtgcgctcctataattgtgttttgttgttggtttgtttttcctccggcggctgtgggtctccccatcaatatatcacctggtggtagtgtccgcgggagaatgctcactgtgttttttctaactacattctccctacttttgttggtgctacccccctcgtttcctcgtctcttgtgtgttccatctacacttgtccgggagggcgtctatttggttggtcgtctcttgtccaactatatgccggtgttgtttgttttcctactgctgtccctctcgatcgtctccacacgtggttgtctcagaaaatgcaccatgtggggtggttgcttacctccccccccccaccacatattgttttttgttcgcggcgtgtcataactcctctcctctggaaactttcttgtttatggagtcgtgctcacaacatactgcttcttgtggttgtctcaaagagtctgatctaagatgnggtnagttggtggtacctcctcttccttgtgtgttcatcgcttactccctccttgtatcattgtgtgtgggctcaccttatctgttgggtgggggggcaccacttcgtcttcccccctcccaggtggttgtgttacttacgtttggcgtgcccccaccacccgttggagtggtattattttttctccccagtggacgacactgcgtgcttcctaacacacttctatcttgggcggtatgattatcctagctgggagtggccgccgcactcccgcgcagaggtggttgttctaacagtgcgttatatagctccccgtagtaacacatggtgttttgttcacacacccccccttgtcacaacttgcggctgtgatatttatcagtcgtccccccctctttcttttttttgtgtttccccctctctgtgtggagatactcactatctatagtgtgtaaacagaaaaacgttattttgtgggaaaaattcctttctctctatgctttattgaattatacactcgcattcacgcgccaattgattaccctcacagttttgtcaaccaccccctgtcatttgctgctgtgtggaaataaggcgctcttccaggaataaaaactctcgcggtgactttgcgacacaatatatttcctcttttcttttagaatgaagaaaaatagattttctgtgactgactcctctccccgacgtcattaaggcctccctactcacaacataaaggaggagaaaattttttgtggagaccctctgatatgagagcccctgtgacggggtgcacctttctcctacatattgttgaagagactcatgagtgctgtcagcaaccctcgtggaagaaaaatgctgatattttaatttttttggggaaaaattttgtttttaaacacctctacccccccccaattggggggggttttgtgggggcccaccacaaataaacccccccctgtttttttaca

SEQ ID NO: 488069 - DNA, 309 bp, Homo sapiens
cacctcgtgggacagaatcacttgccaaaaaaaaaagaaatggccaggcgcagtggctcacgcctgtaatcccaggactttgggaagcagaggcgggcggatcacaatggtcaggagatcaagaccatcctggctaacatggtgaaaccccagtgaaaccccatctctactgaaaatacaaaaaattagccaggcatgctggtgggcatctgtagtcccagctacttgggaggctgaggcaggagaatggcgtgaacccgggagccagagcttgcagtgaacctggctgacagagggagactccgtctc

SEQ ID NO: 488070 - DNA, 283 bp, Homo sapiens
agcagtttgagttggggtagggtatttttggttatcagaaaactcaaaaagctttgggattttgaattggtaaatattcatgatgtgtgaaaaatcatgaaacaaactgtccagtttcagtcccataaaattggatgttgggcctacccccaggatttaaaagaaaatgtccaactataaactgcttgggattgtgaaagactttgttctttgcttgtgtttttcaatttcctataatgcccaaactaacttttaaaaaaaaaaggttattttaaaagcctga

SEQ ID NO: 488071 - DNA, 414 bp, Homo sapiens
  misc_feature (10)..(10): n is a, c, g, or t
  misc_feature (138)..(138): n is a, c, g, or t
  misc_feature (166)..(166): n is a, c, g, or t
  misc_feature (190)..(190): n is a, c, g, or t
  misc_feature (204)..(204): n is a, c, g, or t
  misc_feature (275)..(275): n is a, c, g, or t
  misc_feature (285)..(285): n is a, c, g, or t
  misc_feature (294)..(294): n is a, c, g, or t
  misc_feature (347)..(347): n is a, c, g, or t
tatactggtncctccaagagcctgcagccgccaagatcaagcagtccactgccacctgcttgagaagctcttggagttgctagagagcttagcaccactgaaggccccatgagacactctcctccacatagatattgngcacagccaaagctatatggcacaagtntggtgacacggtaagaaaaaacanccaagcacaaacanagcagcaggctgtgttagactgaaagtaaaagataaaacctaagacctatgaagcgcagggcagtgctggngcttcaccanatggctccnttggtgtctgctggtgctgatgaagcagcatccctactgacatgacctagctnaagagggctgagactgctgaaagtgaagctgttataaatggacagcaggacgacagacacatggtgt

SEQ ID NO: 488072 - DNA, 513 bp, Homo sapiens
cgcggtggctcacgcctgtaatcccagctctcagggaggctaagaggcgggaggatagcttgagcccaggagttcgagacctgcctgggcaatatagcgagaccccgttctccagaaaaaggaaaaaaaaaaacaaaaaaaaaaaaaaaaaaaaaaaaaaaaaaatgtgtggtgcggcgcgcggcccgggcgcccaggagaaaaggtttctatagagaaccacctccggttggggcgcgcgggggccccctgaggcgtcaccggcgaacctgtgggccatagcgggggtcccaaagggagaaacccgggggccacagcacacaggggcggggggagtttctcccccaataataaaaaaaccgcgccgggggggacacaacccagagggtgtgtctgggaacaaactcaccaagagagggggggagctccgaggaggggcacaaacagggggagctccttaccacacaggggggactcccaagggcaggccgcgaaatttcaaattaacccccg

SEQ ID NO: 488073 - DNA, 155 bp, Homo sapiens
agctgcgctggttaggggcagagaacatcttgaactcagtattctaggccctgcccgaccatccagtgcttgttcttcacctcactggaaccatttatgcttgtggcgtgaaattgtctaagagcattattatctcggggtaataaatccttctc

SEQ ID NO: 488074 - DNA, 296 bp, Homo sapiens
tgtgcaggccagagtgaccacagatctggacaggtgtcaccagtagcatgaggacaatatcttatcatcgtgcttatcctgagctgatgagatcacaggctttgatttacagtctgaagcatgtggcagccactcacacttgtacacactgtggtgttggtaatgctgcgcgtctctgagctctgccagggtcttattatcctgttatcgtcttcccgaaggctcccatttatgcgagccaactcccgaagctgcatcttccgtagatcatactggtcctgcctgggtccaatggc

SEQ ID NO: 488075 - DNA, 188 bp, Homo sapiens
tacttgaggatccccggtgtccagtggcatcatgacactttggtatcgtgaggatcatgacacagtcatgcatcactgcgaccagaagactgtggatggccctccggaaactgtggctgtgatggcgcggtgtctccagaacatcatcctgtctctactggcgctgcaaagctgtgggcaaggtcatc

SEQ ID NO: 488076 - DNA, 2153 bp, Homo sapiens
ctcctccaactgggaatgctaaaacgggactgatggacgtgtccgaactctgcatcccggaccccctcggctaccacaaccagtaggttgctgaaccgaatgtcgtccgaagacaggcacctgggctctagctgcggctccttcatcaagacggagccatctagcccatcctcgggcattgatgccctcagccaccacagccccagcggctcgtcggacgccagcggtggctttggcatggccctgggcacccacgccaacggtctggactctccgcctatgttcgcaggtgcggggctgggaggcaacccgtgtcgcaagagctacgaggactgtactagcggtatcatggaggactcggccatcaagtgcgagtacatgcttaacgccatccccaagcgcctgtgcctcgtgtgcggggacattgcttctggctaccactatggagtggcctcctgcgaggcttgcaaggcgttcttcaagagaaccattcaaggaaacatcgaatacagctgccctgccaccaacgagtgtgagatcaccaaacggaggcgcaagtcctgtcaggcctgccggttcatgaaatgcctcaaagtggggatgctgaaggaaggcgtgcgccttgaccgggtgcgaggaggccgccagaagtacaagagacggctggattcggagaacagcccctacctgagcttacagatttccccgcctgctaaaaagccattgactaagattgtctcgtatctactggtggccgagccggacaagctgtacgctatgcctcccgacgatgtgcctgaaggggatatcaaggccctgaccactctctgtgacttggcagatcgggagcttgtgttcctcattagctgggccaagcacatcccaggtttctccaacctgacactcggggaccagatgagcctgctgcagagtgcctggatggagatcctcatcctgggcatcgtgtaccgctcgcttccctatgatgacaagctggcatacgcggaggactatatcatggatgaggaacactctcgcctggtggggctgctggagctttaccgagccatcttgcagctcgtacgcaggtacaagaagctcaaggtggagaaggaagagtttgtgatgctcaaagccctggcccttgccaactcagattcaatgtacatcgagaacctggaggctgtgcagaagcttcaggacctgctgcatgaggcgctgcaggactatgagctgagccagcgccatgaggagccacggagggcgggcaagctgctgttgacactgcccctgctgcggcagacggcagccaaagccgtccagcacttctacagtgtgaaactgcagggcaaggtgcccatgcacaaactcttcctggagatgctggaggccaaggtgtgatggccccgcatgcagacggatggacacgatccacatggagacttccacggccaccagcctcgactttctcacacctgcatcggggctctgagctgtcccagaagaaggggtttcttgcttcctggccatgtgcagactcctggggggcagcagatggggagatggggatgggagggtgggggcggggggctcatctgtcacccgaattttctttggtatttttttttttccttctccatgggcagtgctaaggcttgggccggggctgacttcccttagggctggagaccacgggaggaagcatcccttcctgcaagggatccatttctggaccactccatatttaggacctggaggtacctggatgggcagggcttagtgcccagggcccaagagacttagattgggtgctcctgaaggtgttggtatcacagagggcaggcccttggaacaggaggtctctgtggcctctcctggggctctgtgcctcctcagtctagctgtctccctccccttccccctttcttgtcctagtacatccagctctcagtggatgctcctgctagagtagccacatccccaccactaagaggcccctcccctgcttcctgcccctacctcagccagctgaggtaactccaggacatgcacctgggaactcgctggctcagaaaagagttgggtcctatacccacccttgcctgttgtttctcctaatcctcttgggcatggcgagtctagaaacctatgga

SEQ ID NO: 488077 - DNA, 403 bp, Homo sapiens
  misc_feature (32)..(33): n is a, c, g, or t
  misc_feature (45)..(45): n is a, c, g, or t
atatcacgacatctatccacccagtcatccanntcacaggccccncctccaacattggggattgcatttcaacatgagatttggaggggacaaatatccaaattatactacatgttaaagttgaaaagcattttcctagcccctggctttgcaagttcccttcttgttcagcagaaaccagggcctgggggagaggggaatcgccctgctcatgttggcgtcagcttctcacagagtcatctcttctaactggccttgcatagcctggattcccaagggcctcccaggaagttccagcaaggtgtgttgaaaaactctagaactgttctgttcaatgcagcaactactagttgcatgcgactatttaaataaaattctttagttcagatatactagtcacatt

SEQ ID NO: 488078 - DNA, 213 bp, Homo sapiens
tggggagcagtttcacttccacaggcatcggttcataatcttcactgtcaatgctaaaagagccccatgctcgttggggagaagagaatattcagaacagctcaaacacatcagtggcatattggatttagaggtctcacagcagctccagaagaagttcattatggaaaacaacatcctatgttgaggagctatccataatgttcttttaca

SEQ ID NO: 488079 - DNA, 150 bp, Homo sapiens
ggcgtatgttcagcaattgagaactaatcgttgtaatgcaggagtgtgtgctctgaatggaagttatacatcggaggtggctctgatccatatggtcaagcaggactgaaaaatagtgatgtatttgatcctgtaaccaacatgtggaca

SEQ ID NO: 488080 - DNA, 362 bp, Homo sapiens
cccccccccggggggggggggggccccccccccaatttggggccatgccccgggccctttttggggggggggggggggggggaagttttggttccccccccccccgggatgggttgggggcccccaaaggggttttttggggcccaaggtttttttgggggtcccccccccccccccaaggggattttccggggtttggggggcccccccccctggtttcccccccaaggccccccccccggggaaagggcctttttgggtttttaaaggggcccagggggcggggtttttaaaatttttcccgggttaagcccggggaattgggggttcccccggggggaaaaaggggtttccccccccca

SEQ ID NO: 488081 - DNA, 179 bp, Homo sapiens
tggagaatttttatatctgagacggcgcttcaccgtgtgaatcatgatcgatctcgactctcctgatctcgtgatccgcccaccttggcctcccaaagtgttgggattacaggcgtgagccaccgcgcctggccatcaatgtttatttttaagtagcacaagagaactcagcagtgttg

SEQ ID NO: 488082 - DNA, 937 bp, Homo sapiens
  misc_feature (1)..(1): n is a, c, g, or t
ntgtggatcgtgtgttctgtgatttttactgtgttgagcggtatcgtagtgctcgtgtggctgcggagctgtaggtttggaggagagagtgcagttcgcgcttggacgcagcaccacctaccgaatcaggacgcttgataagcgggttttgaccccagggtgcgacagcggggttgttcgactgtgggccatggtgtcgtgagtggggcgcctaaagggttggcgccgggctttcttgctgttttttagagcgccttcagttgtcggggttaccatgggacgatattggcccatcggcgcaccctctgaggtggtgtgaccacggggccaatcaagtggcggggacccccgcggttttcgcgaggccttgtgccgcagggtgtccgtctcgtcccgttttctggtgctgtgaccatttatgagggggtttagtcggagcggtgggataccacttatgtcgggggctgtctttctggtgggcgcattaatacgggtgtcttccctctgtcgcgccctaataggttgcgcccgctgcttgctctagtattgtcgcaactggacccaccagtgggcgtcccctggccccattacttttcccaacagctctaccttctgcaatcttcccccccgaccctttctagtggctataatatgaaacccacgggtcgtacattaaaatgctgcacaagatcacacaagtggtaaacattatttgttttatttcaagcatttccaccaatccaccgtttaaatactctattaatactcttattaacttgttctagagggatgatatgtccacattatgtagatgggccacacgacgggaggagaaaaaacatatgtttttcgacgacaagaatgagaaggaggaggaaaatacccgcataagagtggatccggacgcaactttatcgccccatcaatagacagaaaa

SEQ ID NO: 488083 - DNA, 497 bp, Homo sapiens
ggagcaaagacgatgaagccagagtctccaggactcctcactcaaactcggccatggacgcaggtcgggtgtgaggggggtcgcagcgctgtcggtctgcgtatttccctatttccagtgcttcccagccgggtttctgagccagagggtggaacgggcctggactcctcttcccaactgcctcgaggtcatttcccagtgtgagcacaaggccaaccttagtgtgtctccagtcagacagatgccgcagcatgaaggggtaggagacttgaggatcattccttcctcgctgcaggagcttcccaagctggtcagagagtctcctggggcacaggttatacagacccctggccaattgtcatctactgaaacagggtctccacatgaggggccagggaatatgggtattaaagaagcgtcttaacaaaacagttctctatcatgcagccggagagctggctgtgagcccttttgtgttctaacagagatccctcagg

SEQ ID NO: 488084 - DNA, 337 bp, Homo sapiens
tgcatacctgggaagaacagacatagagttggaaatatatggtatggaaggtaatccagaaaaagacatggatgaaagaagacgacttcttgaaaagaaaacacaagaaagtcaaaaaaaagaagcaaaaagatgattctgatgaatatgatgatgacgactctgcagcctcaacttcatttcagccacagactgtccaacctcagcaaggttatattccctccaatggcacagccatgactggcaccagtaccaggagcaccaggaatgcctccaggcatacctccattaatggcaggtgttccctcctctgatgcacaagaatgccaccagttat

SEQ ID NO: 488085 - DNA, 689 bp, Homo sapiens
agacgctacttcccctatcatagaaggagcttatcaccttgcatgatcacgccctcataatcattttccttatctgcttcctagtcctgtatgcccttttcctaacactcacgaacagaagagcttgaacgtaatactagacatctcagacgctcaggaagagtaggaagaccgatctgaactatccgtggcccgggcatcgatcctagtcgctcaatcgacccgttcccatccctaagcgatcctttacacagacagacgaggtcaacgatcccgtcccttaccatcaaatcaattggccaccaatggtactgaacctacgagtacaccggactacggggactaatcttcaactcctacatacttcccccattattcctagaaccaggcgactgcgactccttgacgttgacaatcgagtagtactcccgattgaagcccccattcgtataataattaccatcacaagacgtcttgcactcatgagctgtccccacattaggcttaaaaacagatgcaattcccggacgtctaaacaaaaccatttcacgtacacgaccgggggtttactacggtcaatgctctggaatctgtggagcaaacacagttcatgcccatcgtccttagaattatcccctaaaaatcttgaatagggccgttttaccctatagaacccttacccttagagc

SEQ ID NO: 488086 - DNA, 163 bp, Homo sapiens
ttatagggtgatagatcggtccgaagtagtgtgaggagtcagttcatatgtttgggcatatacaggtcagtgggtgttgagcttgaacgctttcttaattggtggctgcttttaggcctactatggttcggggagttattactcaacaccacagctgaagagg

SEQ ID NO: 488087 - DNA, 368 bp, Homo sapiens
  misc_feature (1)..(1): n is a, c, g, or t
  misc_feature (83)..(83): n is a, c, g, or t
nggtggggggatcgcctaagctcaggagtttgagaccagcctgatcaacatggtgaaaccctgtctctactaaaaaatacaanaatcagtcaggcatggtggcaggcacctgcagtcccagctacttggaagtctaagccagaagaatcttgcttgaacccaggatcctgtagaggttccagtgagccgagatcacgccattgcattccagcctgggcaccaagagtaagactccatcttggagaagggctccatttctcttgaagaaggtactgcccggccagatgggtggacctgatgtgctttgatatgcctgagtcaaagcctgaattagattgtgtctatactctgggtctatgcaccacaac

SEQ ID NO: 488088 - DNA, 428 bp, Homo sapiens
cgtgtgcaccatttccatcactattacccttgtcggagcttccattatctctcccctaaacaaatataatagactctttcatagatgtccctgcctctgatagtctgtaccctacactgcagccagagaaatcctgttaacacctaaatccgctgctcacatctctcctcagctcagagccctcccatggctcccggctcactcagagtcaaagcaaggtcctcggcctggcacagtggctcacgcctgtaatcctagcactttggggggccaaggcaggtggatcagctgaagtcaggagttcgagaccagccttgccagcatgacgaaaccctgtctctactgcaaatacagaaattaccagcctgaccaacatgatgaatccccgtctctactaaaaatacaaaaattagccaggtgtggtggca

SEQ ID NO: 488089 - DNA, 246 bp, Homo sapiens
  misc_feature (41)..(41): n is a, c, g, or t
  misc_feature (43)..(43): n is a, c, g, or t
  misc_feature (152)..(152): n is a, c, g, or t
aattcgcggccgcgtcgactacggctgcgagaagacgacanangggggagttcgagaccagcctggccaacatggcaaaaccccatctctactaaaaatacaaaagtagccagggtaggtggcacatgccggtaatcccaactgctcaggangctgaggcatgcctgaacctagaggcagttgttgcagtgagttgagatcatgccactgcacaccagcctgggcaacaaaccgaggctgtgtccc

SEQ ID NO: 488090 - DNA, 190 bp, Homo sapiens
gtctatacgggcttactcaatcgtcggcccaatgtgcttagtgtgtgtcaaagaaacttactacattgtacccattacagaaaagttccatgtaattggtattgaaaaaccagaggtgtcgtccccctccccgggtacattttttcttttagggcatgagtctccttggaggatacattcagattcattt

SEQ ID NO: 488091 - DNA, 967 bp, Homo sapiens
ataaggaggttggctcattcatagctataattcggcgctggagctggagcttgtagtgcgccgatctaatgcctctgtatgcgagccgaccttgggctagccaggaaaattactaggtgaatcgaccagatctagcaatgtaatcgtcaccctcccgactgcgattatgctgatttcactctatctctctatcagatataatgactcactatctaattaactacagggagtgactatctgcgtcaccgcgtagaacatagatatcccactcataacttaattacgtaatgacactccgaaataatggatgtattcacactcagatctattaactagagcattaataggctatcttagacatcttatgagcacatcacgctcctctctcttactctctgcatctgcctatgaggttaatacgctagggagggacccgggatgctatggagacatccacggtttcggtgcatgcttctatccactactcgcattaaagacaaggtgaagacctacctactccctacacacttcgagtagtcctccacgtacgtactcctcacatccaattattacggctcttacctttcttagctacggttgtctccatattcatcttccaggcgagtcacagttcagaggtagcatcaggaaggaatttatcccatattccagactaccgctggaaacatacattcgacaaaatactcactacgactctatcctatcgctagggaatgcccgtcctagatacgattagtaagcgccataaaattccttccataaattaatactcactcagtttccattaggttcatgctagtgtttatacataaatatttcttaaacttaaatagaaaggcgataaaccttacataaatccaagttttatttctgcaaaggcccggcagggagagcatgaaagtaactcactatttgctattctgcaaaaccaccgattactggggat

SEQ ID NO: 488092 - DNA, 588 bp, Homo sapiens
gagaatcgcttgaacccacaaggtgtaggttgcagtgagctgagatctcgccattacactccagcctcgtgtgacagagagagactctgtgccccccacccccccaaatgggaaggagagacagcctcagctagagccctttccttctgacgcatgaatgtgcttctcttcagggatttggacatttggtgcgcatcttcagaagatccaggagtcctgggaatcgtgtatgactcaattgctttccctgagcacgacaggagcccccctggcctcagagtgactgtgaggaggaggctttgcctagaggcatttccagagggctcctctgtgctccattgtacgcaagggcagactgatcagtgctatattccctccttaggtgatgctgcgagggtcctggctacagacactggaggctaatggctgtgtcttatctcaagagactggttaacagcgggcccaggaagcacctgctacacacattggactgaaggagatgccgagccactgctttggccatctacacaagaactgtgattcccagtgtacactatgtctcggaggctggagcctcctatgacgggg

SEQ ID NO: 488093 - DNA, 714 bp, Homo sapiens
gttcgctttttgccctcaaccttttgtccccctttttattttgcgacccctttggcctacccgtgttactcagatcctcttgatcagggggagcatcaaactccaactatcccccctgagtcggcgcccactgcggggcagttgccccgcccatttcatatggagtcccccttgccctcatgtttagtagtccagccttgtctaataagggggtcccttaacctttccgcccttctgccgacagccagacaccctctgattactcctgccactcatgagcccctggctctaatatgagtttatctcccccctttgcacgagaccaccggacccccttcgagccttgccgaaggggggtccgagactagtttcacgggttcaacaactcgaatactccgcaggcgcccttcctgccctatttttctatagccgaataccccagcattattataatgaacaccctcacccctacaatcttcctaggaacaacatatgacgcactctcccctgaactctacacacacatattttgtcacccagactctacttttaacaatccccgtttttatgaattcggacagcatacccccggttccctgggccaaatcaaacccctccttgtggaaaaacttccttccactcaccctagcattacttaaatgaaaagtttccaaaccccattacaatgttccagcattcccaccccaaacccta

SEQ ID NO: 488094 - DNA, 378 bp, Homo sapiens
gaattttaaaaaggggccccccccctttggggggggggggccccggtgggggtttcccggccccccccaaaaaaatttaacccccggggggtttttggaaaggtttggggggggggcccccctttttagggggggggtttttttttttttggggggggcccccccaaaaggtccccccccttccccccccccgaaaaaaattcccggggggccccttgggaaaaaagaaggggggttggtttggggacccccccccccctttcccaaaccgggggggggggggggggggttccccggttttttggggggccaaaatggggggggggtttttttaaacccgggttttttttttccggcccaaaaaaggggtttccccga

SEQ ID NO: 488095 - DNA, 226 bp, Homo sapiens
atagtggagaagatttatcgggtgaggcgacacacctaccgtagcctggtcatagcttgttgccggaatgtattaatcgaggttcaacactatccttagcccggtcatacctctaactcgagtgttaaatgtaagcggtgagtccacagaggcccggctctttggacactcggaaaaaacctctggtagagagagtaaaaaatttaacacccatagtgggcctaaa

SEQ ID NO: 488096 - DNA, 1080 bp, Homo sapiens
gatcatgcaatcggtaggcgtagtgaatcgactgtgatcgttccgtctagcccttttgcgtcgcctggaggacatggctcttctgaaagggtgtgcccgacgtccgcagcagcctactgacaccgcttgaccttgttgcgatgagcatcggctgcctggtccagtagcttagagcgcacgtccacgtggctcgcagcgatgttggtcgtctactcaccgggcagccattaggtggtcaattgtccatgcctgctccccgtctcctagtcgagaggccgaacagactacaccttgtgaggtcacacatccaatcagggcttgggttgacttcgttcgtgtccagctagttgttgtagctctagagtcaggctcaagagtcctagactaagccttgacagagcctcaggtgcgaatcagcggcccagaaatgaggaacagagccgtgaatgcttcgtaccgaggaagctatgggcttcgatggacgatgaccattggctacaacgctaccgaactttcaggctaccgcaaagttgtgctcaaagacattgagaagagagcaaaagcacatttggcaatagactaatggacacaagaggggaccccagagtgcaaagacgccattcgctccactcaccacgtaacactctcagatacacacatagaaaggaagccccaaagagagcacccatacatagaccccaacaccaataccttccaccttggtccaatcccagacaaaaccgtggcagcaacacgaatgaattgaggcctgacaatttcactttgtatcaaattacaaagttacccaaataggaaccgcaggtttggaaattaccggaaattggtgacccattgtggaaactttatctggcgtgggacaccgcacaagtgcgaaacacacagcccaagaggtaggcaccccgagcgaacattgcgcgcaacttaccggagataaccccatgtaggcacggggccgaggcaagcgttactacagacagacaaaggacaaaaacaccagggctaaccatgtcaggtacagataccaaaaataaacagacacacgatgggaggacacacgca

SEQ ID NO: 488097 - DNA, 246 bp, Homo sapiens
atttcagctcgctgtcctctccctccgccaggctcgaggcgtttcgaggctggttggtttcaatagaggtttcaattcccagaccttctggctggcacatgcagtgcagcagtgtgtgtgcatgtgtgtgtgtgttcatgtgtgccctgtatgcatgtggctggctcccatatccctggtgccgtgcatccttggttagagctggcccgggcgggcgacggtgcacctgggtgttcgcagaagaaa

SEQ ID NO: 488098 - DNA, 827 bp, Homo sapiens
atggcacatgcagcgcaagtaggtctacaagacgctactatcccctatcatagaagagcttatcacctattcatgatcacgccgcatccataatcactgtttccttagtctgctgcctaggtcctgtatgttctcttgacctagcactcacaacaaaactaactaagtactatcatctcagacgctcaggagatagaaaccggctgaactatccgtgaccgccatcaatcgcatagaaccatcagtcggcccgtccccaatgacatacgcagtcacatggatacagtaaacagaacggagagggcaaagcgaaaccacatcccagtatagcaaacaagaatcaaagtaggagacaaccgaaaaggagatacatgaagacaaaagaagataacacccgaccgacgcgacggggaccataaaatgcgtttacaagacgtcgcgtaacatcacaaatcacacaccaaatgagatatcgcataagaaaccacgcagagacagcagcccgagcagaacatccatatagagcggcttgaaaccaaaatccggaaggtaagagacgaaccgccagaaaaatggaaaaggaccccacgcaaataaccggagaaggtaaattaacagtaagaccagtgaaccaaaagggaacccgaacagaagggtgaagtctcgacatgacagaccaaggcaccaccagacacgaatatgcaaggacatggaaaaaaaaacagagacatggcaacggaacaccacgaggcacggacactaacaacgcaaacacgaaacatcaaagcaccccggaacaagcaaagaagcagcggggaggacaatag

SEQ ID NO: 488099 - DNA, 2256 bp, Homo sapiens
gaaaagttatttgcaaaagataacatggatttgctgcaaaccgccaggggtctgcactgtgattctcctttcagggctggttgaaggctccatacagtatctctatctgccttggacacttcaggcatatgtgccatatatgacagaacatcttgcacaacagtctgaatttgctgcaacccttctcttgctctgggccccactcaaaaccggcagacttacaaattccttcgtaaatgggccagggcagcatggtaaaatgtgctgtatattacctcctaaaacacccgtcaagtatttttttttaactctttcctagcataggagtacatgatgcagcaatttgttttcatttgaaggagataaccaacatgcctcaggccactgaactcctagaaatgtcacatgctcaacatattatccatataatggactagttctgcattttatgggatgttgtgattatcaagacccctgaagccttgcttatgacagaacaggagagttgccatagacctgagctcaaatcgtgaagatgtactgctgtccctgccatgtgaaagcaaacaccttccaaaagtgcctgtaaccaatacagcaggaaaaaaagtatattttacataaatagctgcatcccacatgtcaaaagccattttgatttactctagtaagaataacatatttgaaacagcagcagcaatcaattaaatattgataataagcaatggagagataacaggaaatcacgtagaatatatcattgtttgccaaatattctggctcctttcctactgaggaatcatacttccttaactgcagtcttgtccacgtgacttgcaaatgaaatgtgaacaaaagtgacatgcgtcacctttagacagaagatctaagagctgatgtgtgctttgttatgatgtattttccctctgccataagactaagcaatgttccaaacagaggctgatccacagcctccatctggagtgaagataaaatggaaaagagcttcagtcaagctgcagtggacacatagcaagaataagaagttaacttttgttggccaggcgtggtggctcacgcctgcagtcccagcgctttgggaggccaaggcgggaggatcacttgaggtcaggagttcgagacccgcctggccaacatggtaaaacactgtctctactaaagatacaaaaattagccaggtgtggtggggggcacctgtagtcccagctattcaggaggccaaggctggagaatcgcttttacttgggagtcggaggttgcagtgagccgagatcatgccactgcaccccagcctgggcaacagagcgacacttttgttgtctgccactgggatttttgatgacactaccaaagcctaaaatagcctgacccaacatatacagtctcagagattagcaacagttgagagtcagtgttcagcgatcctgaaacagtcccaagtattttcctctcccatgacaatggccatgggtctcttagggcttgaagaatgatttttagtatatattgcagcaatgtcagtgggctccaggtctgcaaaattgttcagctcccagaactgggggaagggccatgactattatggtgatccaaattagaattctacttacctgataatttctaattatgtagatcaacatatattttagtaggctattttattcctagagatactaccaaagaccctcacaagtcaaaaacattcattttaccactgtggccctgctgcccatgaaagtaactgtgcccactgtgtctctggtgttaaacactgtcacttggtctctgaaataaggaaggcaatttaaagagtagcatttcttattgtcacccccagcactttgggaggctgaggcgggtggatcacgaggtcagaagatcgagaccatcctggctaacacggtgaaaccccgtctctactaaaaatacaaaaaattagctgggcgcctgtagtcccagctactagggaggctgaggcgggagaatggcgtgaatccgggaggcggaggttgcagtgagctgagatcaggccactgcattccagcctgggcaacagagcaagactccatctcaaagaaaaaaagaataaagccacggacctcgcagtgagtgttacagttcttaaaggtggcgtgtctgcagtcgtttgttcctctctgtgggttggtggtctggctgactaaggaaatgaagccgcaggccctggcagtgaatgctacagctcttcaagttggt

SEQ ID NO: 488100 - DNA, 390 bp, Homo sapiens
gggatcccatttacattatcatggattgaaagaatgataaatgagaaaatctatttttcccaaattatcttacatggtgttaagctttaaaaaataagaaaaacaatgttgcaaataggtatgaatttctatttgattggttgaggggaaatttatgaaagcatacctgtgatgacagatcaatgcatggctacactacaccagagcaagcacaaactttaaaaactcatcggaattttcataatttcttcaaatgtttgaattgaagtgagtagatacccagcaaatttttctcatatgcttctgtgaaaatataaaggtatgaattaaattggtttttctttttataaaatgagtttcattgtatatttttcttccaatgtaaagaca

SEQ ID NO: 488101 - DNA, 2265 bp, Homo sapiens
gaaaagttatttgcaaaagataacatggatttgctgcaaaccgccaggggtctgcactgtgattctcctttcagggctggttgaaggctccatacagtatctctatctgccttggacacttcaggcatatgtgccatatatgacagaacatcttgcacaacagtctgaatttgctgcaacccttctcttgctctgggccccactcaaaaccggcagacttacaaattccttcgtaaatgggccagggcagcatggtaaaatgtgctgtatattacctcctaaaacacccgtcaagtatttttttttaactctttcctagcataggagtacatgatgcagcaatttgttttcatttgaaggagataaccaacatgcctcaggccactgaactcctagaaatgtcacatgctcaacatattatccatataatggactagttctgcattttatgggatgttgtgattatcaagacccctgaagccttgcttatgacagaacaggagagttgccatagacctgagctcaaatcgtgaagatgtactgctgtccctgccatgtgaaagcaaacaccttccaaaagtgcctgtaaccaatacagcaggaaaaaaagtatattttacataaatagctgcatcccacatgtcaaaagccattttgatttactctagtaagaataacatatttgaaacagcagcagcaatcaattaaatattgataataagcaatggagagataacaggaaatcacgtagaatatatcattgtttgccaaatattctggctcctttcctactgaggaatcatacttccttaactgcagtcttgtccacgtgacttgcaaatgaaatgtgaacaaaagtgacatgcgtcacctttagacagaagatctaagagctgatgtgtgctttgttatgatgtattttccctctgccataagactaagcaatgttccaaacagaggctgatccacagcctccatctggagtgaagataaaatggaaaagagcttcagtcaagctgcagtggacacatagcaagaataagaagttaacttttgttggccaggcgtggtggctcacgcctgcagtcccagcgctttgggaggccaaggcgggaggatcacttgaggtcaggagttcgagacccgcctggccaacatggtaaaacactgtctctactaaagatacaaaaattagccaggtgtggtggggggcacctgtagtcccagctattcaggaggccaaggctggagaatcgcttttacttgggagtcggaggttgcagtgagccgagatcatgccactgcaccccagcctgggcaacagagcgacacttttgttgtctgccactgggatttttgatgacactaccaaagcctaaaatagcctgacccaacatatacagtctcagagattagcaacagttgagagtcagtgttcagcgatcctgaaacagtcccaagtattttcctctcccatgacaatggccatgggtctcttagggcttgaagaatgatttttagtatatattgcagcaatgtcagtgggctccaggtctgcaaaattgttcagctcccagaactgggggaagggccatgactattatggtgatccaaattagaattctacttacctgataatttctaattatgtagatcaacatatattttagtaggctattttattcctagagatactaccaaagaccctcacaagtcaaaaacattcattttaccactgtggccctgctgcccatgaaagtaactgtgcccactgtgtctctggtgttaaacactgtcacttggtctctgaaataaggaaggcaatttaaagagtagcatttcttattgtcacccccagcaggcagaggatacccgctacaaagctcctaaagggaaatggagctctcctccgcacattttttttttgtaagagaaggtcttgctctgtcacgcaggctggagtgcactgtcatgatgacagctcactgtggccttgacctcctgaggcgggagaatggcgtgaatccgggaggcggaggttgcagtgagctgagatcaggccactgcattccagcctgggcaacagagcaagactccatctcaaagaaaaaaagaataaagccacggacctcgcagtgagtgttacagttcttaaaggtggcgtgtctgcagtcgtttgttcctctctgtgggttggtggtctggctgactaaggaaatgaagccgcaggccctggcagtgaatgctacagctcttcaagttggt

SEQ ID NO: 488102 - DNA, 320 bp, Homo sapiens
gccccatccttaactgatgacattccaccattgtgatttgttcctgccccaccttaactgagtgattaaccctgtgaatttccttcttctggctcagaagctcccccactgagcaccttgtgacacccgcccctgcccaacagagaacaaccccctttgactgtgattttcattaacttcccaaatcctataaaacggccccacccctatctcccttcactgactctctttttggactcagcccacctgcacccaggtgaaataaaaagctttattgctcacacacacacacacacacacacacagggggcggagatttc

SEQ ID NO: 488103 - DNA, 169 bp, Homo sapiens
cctcttgagtttaagtgattctcatgccttagcctcctgagcagctgggactacaggtgcccaccaccacgcccggttaatttttttttttgcattttgttagaagatacggcacttcaccggattagccagaagggtcttgatctcctgacctcgggatctgcttgat

SEQ ID NO: 488104 - DNA, 679 bp, Homo sapiens
ttactgtgtgtatattcagttaatgcattcgtagtccgacagtgagaatgcgcatcatcagaacgcgcatgcatgaagcctgaatcagccgacgcgcgcaaatccagacatcacgtgtgctcagcccatctgccagctaactaactactctctgcaccaagtgcgatggacacacatccgcgcgcgcgtccgacacgcacaccgttcgctacccagctcacttctcggcgaccacaagccagaggtctaatacaaaatattcacaaacacacacaccagtcgcgggctggcaacacaaggccttcagaaactcacccaaggagcggcacacttcctggaggcaccatggcacgctaagcgcggaacacgagcaacagcgcaacatatcaattctgtcacagtataccaacgagatgtttcaccacacaatcccaacaccgcaccatatgatacagtaaacgagcgccgcggcaacgcaaagcacacatttcaccggcaggtactgccgcaaggacgggtatacatatcacgatgcaaacccaccctggcatatatcagaaccgcaccctggatcccccaaaacacagtcatcatcccctttatgggagcccggcacacacacgcgtttacaaccctctaacacttttgcggacattggcgcgttacacgggagaaccaa

SEQ ID NO: 488105 - DNA, 185 bp, Homo sapiens
gtcatgcacctacggggcatgttagtcagctcccccaagtatgagctgcagccccccagagagagctctgaacgtcaccaagtaacaggccccagttccaggccccaattccgccagctctccccgctctggatcctgcatctaacactcgactctgctgctcatgggaagaacagaattgctcc

SEQ ID NO: 488106 - DNA, 801 bp, Homo sapiens
ctatgtctgctggtgttaatcggccgaggcgcagatggcggcgcccagaggctgctgaggcgcggaacggagtgatggctgctggtggcgttggtggctgggtgctcgtgctgggtgcggcggctgagctgtgtgccggtggctggtggctgaggtgcactggacctggctggccagtgcgctcccgtgagccgtgcgcgaagctgtgcagaagcctgagtgctggagtgtgccctgtgtgtaccagtactgtgtgtgctgaagctgctgcttgccctgctgcctgatcgcgtcttcagtgtgtgtgtgcttcatgcattctctgtgtgtgtgcgcttggtgctgttgcctatcctattgttggttgcccatgcttcctgtgtgccctgtgtgcccctgctgcctgtgcgccctgacctgctgcctgcagttgatccatgccctgtgccctatcgcctggatgcttggaccaaaagattatcatcttgctgcttgctggctatgtgattcacacttgctgtcctctaatgacttgcggatgttacgaaatgtctgggggatggtgactcaacaaagattctcagcttggatttcacaggagccggaaagataaaacgagggtgctacgagtatgtgtttgtgagccctcacccgtctccctgcctctggacatgacctcaggagacacgggtgctgcatggtctcctgctggccgagctcactctcttgtgttgactgaccagtggaaggagtcttcagcatgggaaacaatcttatgggcactgtggcagacaggtggca

SEQ ID NO: 488107 - DNA, 2111 bp, Homo sapiens
gaaaagttatttgcaaaagataacatggatttgctgcaaaccgccaggggtctgcactgtgattctcctttcagggctggttgaaggctccatacagtatctctatctgccttggacacttcaggcatatgtgccatatatgacagaacatcttgcacaacagtctgaatttgctgcaacccttctcttgctctgggccccactcaaaaccggcagacttacaaattccttcgtaaatgggccagggcagcatggtaaaatgtgctgtatattacctcctaaaacacccgtcaagtatttttttttaactctttcctagcataggagtacatgatgcagcaatttgttttcatttgaaggagataaccaacatgcctcaggccactgaactcctagaaatgtcacatgctcaacatattatccatataatggactagttctgcattttatgggatgttgtgattatcaagacccctgaagccttgcttatgacagaacaggagagttgccatagacctgagctcaaatcgtgaagatgtactgctgtccctgccatgtgaaagcaaacaccttccaaaagtgcctgtaaccaatacagcaggaaaaaaagtatattttacataaatagctgcatcccacatgtcaaaagccattttgatttactctagtaagaataacatatttgaaacagcagcagcaatcaattaaatattgataataagcaatggagagataacaggaaatcacgtagaatatatcattgtttgccaaatattctggctcctttcctactgaggaatcatacttccttaactgcagtcttgtccacgtgacttgcaaatgaaatgtgaacaaaagtgacatgcgtcacctttagacagaagatctaagagctgatgtgtgctttgttatgatgtattttccctctgccataagactaagcaatgttccaaacagaggctgatccacagcctccatctggagtgaagataaaatggaaaagagcttcagtcaagctgcagtggacacatagcaagaataagaagttaacttttgttggccaggcgtggtggctcacgcctgcagtcccagcgctttgggaggccaaggcgggaggatcacttgaggtcaggagttcgagacccgcctggccaacatggtaaaacactgtctctactaaagatacaaaaattagccaggtgtggtggggggcacctgtagtcccagctattcaggaggccaaggctggagaatcgcttttacttgggagtcggaggttgcagtgagccgagatcatgccactgcaccccagcctgggcaacagagcgacacttttgttgtctgccactgggatttttgatgacactaccaaagcctaaaatagcctgacccaacatatacagtctcagagattagcaacagttgagagtcagtgttcagcgatcctgaaacagtcccaagtattttcctctcccatgacaatggccatgggtctcttagggcttgaagaatgatttttagtatatattgcagcaatgtcagtgggctccaggtctgcaaaattgttcagctcccagaactgggggaagggccatgactattatggtgatccaaattagaattctacttacctgataatttctaattatgtagatcaacatatattttagtaggctattttattcctagagatactaccaaagaccctcacaagtcaaaaacattcattttaccactgtggccctgctgcccatgaaagtaactgtgcccactgtgtctctggtgttaaacactgtcacttggtctctgaaataaggaaggcaatttaaagagtagcatttcttattgtcacccccagcaggcagaggatacccgctacaaagctcctaaagggaaatggagctctcctccgcacattttttttttgtaagagaaggtcttgctctgtcacgcaggctggagtgcactgtcatgatgacagctcactgtggccttgacctcctgggctcaagccatccttccacttcggcctcctgagtagctgggactggaggcatgcaccaccatgcctggctaattttttaattttttatggagatgtctcttggcaa

SEQ ID NO: 488108 - DNA, 251 bp, Homo sapiens
  misc_feature (9)..(9): n is a, c, g, or t
  misc_feature (16)..(16): n is a, c, g, or t
  misc_feature (32)..(32): n is a, c, g, or t
  misc_feature (70)..(70): n is a, c, g, or t
  misc_feature (101)..(101): n is a, c, g, or t
  misc_feature (104)..(105): n is a, c, g, or t
  misc_feature (109)..(109): n is a, c, g, or t
  misc_feature (125)..(125): n is a, c, g, or t
  misc_feature (127)..(127): n is a, c, g, or t
  misc_feature (129)..(129): n is a, c, g, or t
  misc_feature (133)..(133): n is a, c, g, or t
  misc_feature (135)..(135): n is a, c, g, or t
  misc_feature (223)..(223): n is a, c, g, or t
  misc_feature (244)..(244): n is a, c, g, or t
  misc_feature (249)..(249): n is a, c, g, or t
gtggatttnaattganaaatatagtggttttnagcaaattacaactactggctcagaagtaataaatctnagcttcacatttattccatagaattatattntcnnactnataatgaacatataantnanatgngntatatagcagtcatgttgttttattctctacaggtatgttcgcaattcgtgctgatcatgattttgtagtacaggaggacttcatganagcagtcagaaaagtggctgnttctngg

SEQ ID NO: 488109 - DNA, 87 bp, Homo sapiens
atggatttgctggtgcagtacaactaggcttaatactcgaattcgagctcgaattcaacttctaacgttagaagcttgaattcgagc

SEQ ID NO: 488110 - DNA, 900 bp, Homo sapiens
cccacgcgtccggagaaacagtcaccaacctgtgttcccactgggctctgtcctgggagaggcacaagaacctgccctgacgcctgagagaaagactctgaaggcctcaggaccaaatccctggaggggtcttggcgtctaatgaatctagattgactgacttccctgggatgcttctggaaccttctgctaagccctcagcttcttggcagagctctattactaactggatatcagaatatgggtgcaaactagacatggggagtgaagtcagccattctcacagcatctacctaagaaggccaggatcctccacagccacgtagatcgtagagccagtggcatgccggggatgatatacaaagacaagaaactctgaaacagagaacacaaactaacagcccataggccaaatgcagcccgcaggcacatggcttatttggccaacacagcatttaagaaatgttttgagccgaggctgggtgaggtggctcaggcctgtgatccccagtactttgggaggccgaggcaggtggatcacctgaggtcgggagttcacgaccagcctggcagcatgacaaaacccgtctctactaaaatacagaattggccgggtgtggttggcccatgcctgcagtccagctaacccagctgcttgcgggggctgaggcaggacgactcgcttgaccctggggggccgcaggttgcagagagctgagatcaacattgaactcaaacttggggacaacgagcgaactcgtcccttattagtctacactatacacaacactcacacacaaaaagggggcgtcaaaacacacgaggggccatttcagtcccacttttacaagggcccaataggcattaagaagcagcgcgctaacggcgcaatgcatcgag

SEQ ID NO: 488111 - DNA, 482 bp, Homo sapiens
  misc_feature (204)..(204): n is a, c, g, or t
  misc_feature (220)..(220): n is a, c, g, or t
  misc_feature (266)..(266): n is a, c, g, or t
  misc_feature (378)..(378): n is a, c, g, or t
  misc_feature (382)..(382): n is a, c, g, or t
gatttctaagtggcccagaggtgcttgactgcccgaaatgggcaagttcatgaaacctgggaaggtggtgcttgtcctggctggacgctactccggacgcaaagctgtcatcgtgaagaacattgatgatggcacctcagatcgcccctacagccatgctctggtggctggaattgaccgctacccccgcaaagtgacagctgnccatgggcaagaagangatcgccaagagatcaaagataaaatcttttgtgaacagtgtatanctacaatcacctaatgcccacaaggtactctgtggatatccccttggacaaaactgtcgtcaataaggatgtcttcagagatcctgctcttaaacgcaaggcccgacggggnccanggtcaagctgtaagaaagatacaaaacaggcaaaagcaagtggttctccccccaaatgcggttttaaaccctccgctttgctcccttgactttatcaaaa

SEQ ID NO: 488112 - DNA, 114 bp, Homo sapiens
  misc_feature (63)..(63): n is a, c, g, or t
ttcccaggaatatcattccaaactgaaggcctaaaaataaggggcagaagataaccaccccanataaatgcatgatcctttgtttgatccttaattaaacaaagtataattata

SEQ ID NO: 488113 - DNA, 514 bp, Homo sapiens
  misc_feature (204)..(204): n is a, c, g, or t
  misc_feature (220)..(220): n is a, c, g, or t
  misc_feature (266)..(266): n is a, c, g, or t
gatttctaagtggcccagaggtgcttgactgcccgaaatgggcaagttcatgaaacctgggaaggtggtgcttgtcctggctggacgctactccggacgcaaagctgtcatcgtgaagaacattgatgatggcacctcagatcgcccctacagccatgctctggtggctggaattgaccgctacccccgcaaagtgacagctgnccatgggcaagaagangatcgccaagagatcaaagataaaatcttttgtgaacagtgtatanctacaatcacctaatgcccacaaggtactctgtggatatccccttggacaaaactgtcgtcaataaggatgtcttcagagatcctgctcttaaacgcaaggcccgagcgggaaggccaagggtcaacgtttgcacgagacgataccaagacatggcaagtgaacaagtggttcttccagaaactgcggtttctagactgcttttgtctacgatcattacacaattatacccagaacacaaaaacaaac

SEQ ID NO: 488114 - DNA, 650 bp, Homo sapiens
gcgcctctaacggcgcgacaggcctggcctatcccgcgcaaccccagcagcagcagcagccgccgcaccacctgcctcagcagatgcctgtgcagcacctgcggctgcagaccatgatggagtagcctcagacagtgcctgagatgcctgtcgagacaccgcccctgtccaccatagacatggagtcccaggagcggatcaaggcggagaggaagcgcatgaggaaccgcatcgctgcctccaagtgccgaaaaaggaagctggagagaatcgcccggctggaggaaaaagtgaaaaccttgaaagctcagaactcggagctggcgtccacggccaacatgctcagggaacaggtggcacagcttaaacagaaagtcatgaaccacgttaacagtgggtgccaactcatgctaacgcagcagttgcaaacattttgaagagagaccgtcgggggctgaggggcaacgaagaaaaaaaataacacagagagacagacttgagaacttgacaagttgcggcgtagatatagtcggagttgtcgtcatccaagcaccggtgtatgcgagttggattgggtggcgtcgggatggcgccctcagtgtgcacgagtggcaaggacttggcgcgccctcccttggcgtggagccagg

SEQ ID NO: 488115 - DNA, 237 bp, Homo sapiens
cccggattgtcggccaggagaagaagggttactttgaagaccgtcggccttctgccaattgcgacccctatgcggtgacggaagccatcgtccgcacgtgtctcctcaacgaaactggcgacgagcccttccaatacaagaactaagcggactcgacttccagtgatcttgagcccttcctagttcaccccactcccaactgttccctctcccactggtccccactgtaactcaaaa

SEQ ID NO: 488116 - DNA, 468 bp, Homo sapiens
gttttggttttctggtgttagggtttcagattttggtttagccctaccattctgacataaggtgaatgagtgctaaagttcaggtaaccatcccccaggtggccattaaattctggaattttttaggggtttttcccaagcttcctttttttatgccattttaacccagggttgactcatccttgcaaaaattggaatccctacctatttcaagaggacttatccttttggaaagggggccctggtcttccaagagaaatccaggggcgggggcccatttcccttttggggggcaacactgggatataatggctttctggggggctggctgggttaaaggcaccctcattaatataatagcaaaccaaaactcaggagttactttggacatctttgactctttaacttagtaataggaccccgcaggtttattccctaaataaaataatccacctaaatcaaatactc

SEQ ID NO: 488117 - DNA, 154 bp, Homo sapiens
ccgcctccacccaatttactgcatcccaagtcagctcatacaccccaactgacttagagtctctgaaatgcatgcaacttaaaattccctaaagcacacatcaggttccgaagtctgatttttacagggacagaggctacggatgctgactggg

SEQ ID NO: 488118 - DNA, 796 bp, Homo sapiens
gaggcattgaggcagtccagcgctaggggcttctgctgaagggagcaggcggtgagtcgttgcagtgaaacccgccaagataagttttatctcttctttcgagagatagcagattacatagcaaactagcttaataaggaatagatatagccaaataggttactaatgatattgcttgatcgttaagattggtaacgtaacttttaatagcttcaacggattttaagagagcaatgatgaagacgtgagaagagtggcatgaggaaggaaagagataaaaggttgcataaaactcatgacgggaggttgagatgaagcattccatgcatggagtaaataaagtgtattctcataggagaaaatgttgagagaagaaggactacagagcctccgaattgaataccagtagaagggcgaatgcttttagattaaatatgaaggtgacttatgcagcttagagtttagtttaaaagttgtaggtgattaagaataatttgaaggcgatcttttagaaagagatgtaaatccgaaggtgattcataagaccttgaaatccatgaggcagggagaattgcgtcattgaaagcctagattaacgcgtttactaaactgcagacgaatacatggatcagattaatgtgggagtggtacggatgacaagcaatttggaagaagatgagaagtttgaaggtggaacaatctggtattacagaagtacgggaaggcgaaagaagaagaatagagaagataggggaaatttggaaagatcagaactacttttagccagaagacaaga

SEQ ID NO: 488119 - DNA, 134 bp, Homo sapiens
catagtgctcccacgtagcaagaaacgacatggttcatatatgtggtgtctggtattcggcatatatcctccggtgtagttagccagtctttctgtgccattattccacagctgatgggagaagactgcgggga

SEQ ID NO: 488120 - DNA, 136 bp, Homo sapiens
ccccttttaaaagaaaaaaagctttgcttaagggttgcatccttttattggagtaaatttgaatgatcctactcctttggagtaaaactagtgcttcccagtttccaattgtatttagcttttggttggaatttga

SEQ ID NO: 488121 - DNA, 154 bp, Homo sapiens
ccttcaggatcctcaggatctcctcaggatctcatcaggatctcatcaggatctcctcaggatctcctcaggatctcatcaggatctcctctagagatctcctcaggatctcatcaggatctcctcaggatctcctcaggatctcatcaggatc

SEQ ID NO: 488122 - DNA, 264 bp, Homo sapiens
ggtcgacggtgtggtggcatgtacctgtggtcccaggtacttgggaggctgaggtgggaggattgcttgagcctgggaggtggaggttgtagtgagctgagatcacatcactgcactccagccctgggcgacagagtgagactctgtttcgaaaaaataaaacgaaataaaaacttagctgtaagggtaaaaaattagaaactggctgggcacagtggctcatgcctgtaatcccagcactttgggaggctgaggcagtcgacg

SEQ ID NO: 488123 - DNA, 522 bp, Homo sapiens
aatttaggcagaggggtaaaactgtctgctgagccctggggcatctgcgtggaatgggaaactagcaaagtctcgctttggctgcattctgaggggtttatgtgatggcaaacagcccagaatgaagaagctgcctagcagtcgctgcagcggctgagggtaatgtgggacttcagatagcttctgagtagtcaagcagtgcacaatcctggaggaagaggaggctcagcaagaaagagcgcatgaggaatggagtccagaagacaggccacagtgtcctgggactccggagggtctgatgaagcaccgcccaagcccagcagaccgggttatcccagtccgaggtccagcgagggatttttatcccagccccacagcacatggtacaaaccattcattaccaggtttctggctaccctggttcacttggaatcacagccttggttggcagcttctatcccgggtcagggcttctctttcggcccaaacagtttcatgcgatcatagacctcaggagatagc

SEQ ID NO: 488124 - DNA, 274 bp, Homo sapiens
agctcgggaccgcaactaagagctagactctgcccctagaataaaacaaaaactaggcatgcatggttggtgccctgcctatagtcccaccccagggaggctgatggagatggatcccttggagcccaggaagtggactgctgcacgagccacgattgcatcactgcactccagcctgtgtgacagagagagacagagaaagaaaagagaaagaaacagtctggggcggtggctctacgcctgtcatccctgctcttattgcccaggctggagt

SEQ ID NO: 488125 - DNA, 393 bp, Homo sapiens
  misc_feature (5)..(5): n is a, c, g, or t
  misc_feature (107)..(107): n is a, c, g, or t
  misc_feature (159)..(159): n is a, c, g, or t
tcccnttcccttctcagcttgattggcatttaattccaattccattccgattcccattataattccattcccattccattccattccaattccattccattcccatnccaattcctctcgggtggattccatgccattccatttcattccattccattncatgtccactctggttaattcccttccattcatttcgattccattccattgcattccactcgggttgattccattccattccattccattccattccattccattccattccattccattccgttccattccattccattacactcgggttgattccattcctttccattccattccattccattgcattccattgcattccattcgattccattccattccgctcgggttgat

SEQ ID NO: 488126 - DNA, 129 bp, Homo sapiens
tgtcccctgctccccactaggtggacttcacccttagctcagacaagagacttcgcactcctcagttctccaggtgccctctgaaagatgcgaagacgctgtggcctccattcaactccctcagaggcc

SEQ ID NO: 488127 - DNA, 736 bp, Homo sapiens
ggtacagggctggatgattgaagggccggcgggaactagtcggacctccgagctcttgaagactgtcctcagctcggctggttctccacgagctccgggccgagacggcggggggtgggtcggcgtttgaagtcaaaggccttggggctccgagtcccttcctctccccggcgggtgaaggcacgagccagttcacgctgtctgtaaaggtggagccattagtccctgcctcgtatgtgggaaaactgggaggcggaacgatgggaggccgccggtcccaacccggcccaggagcatctttctcctgggaccgtttcctggcgagatcctgcgcagcctgcaggctgtgttagcgccaaaggagtctccagacaggtgttagcagacgcgttgacgcacggaaggctggacgcggacggcacgcgggcttggtggacagcgacgtcacgcagcataggaaagccctcatacgcagagttcctagcacccgggcaccggcctgaggtctacgagtcactgcaggatggcagtctgggccccgagttcctgggcgtggactgagtacagacgtgtccccagaacgcagacctcaagggacttgctccagacggcttggagacacgtatcgggtgatcgacacacggaagacggaacgcgcagggcctgggccgggccaacagtcacatacaggccagcagacatccctccttccacacgaaggagaaagcgcatctac

SEQ ID NO: 488128 - DNA, 402 bp, Homo sapiens
  misc_feature (63)..(63): n is a, c, g, or t
  misc_feature (123)..(123): n is a, c, g, or t
  misc_feature (213)..(213): n is a, c, g, or t
  misc_feature (282)..(282): n is a, c, g, or t
  misc_feature (372)..(372): n is a, c, g, or t
cctcgtgtgcgacaatggctccggctggtgaaagccggcttcggtgaattgacgcccctaggncggtgttcccgtccatcgtgggccgcccccgacaccagggcgtcatggtcggtatgggtnagaaagattcctacgtgggcgacgaggctcagagcaagagaggtatcctgaccctgaagtaccctatcgagcacggcatcatcaccaacntgggatgacatggagaagatctggcaccacacctttctacaacgagctttcgcgttggctcccgagganaccccaccctgctcaccgaggcccccctcaatcccaaggccaaccgcgagaagattgacccagatcatgtttgagaccttcaacgtgccngccatgtacgtggccattcaagcggtgctt

SEQ ID NO: 488129 - DNA, 292 bp, Homo sapiens
gatcgattggagcgggggcagtgtatgatgatggggacgttcattagatagtacattactggtttgaacatggttagtgggtgtatatgtgtcatttgatgatcgctcgggggaataggttatgtgatcaggagtagggttaggatgagtgggaagaagaaagagaggaagtcaagtttaattatgcctttgtgggttgaggtgatgatggcggtgcgagattcgctgctgtgaacattgtcttaggtaatagcttttctagtcaggttacgtctaggatacagtagggaga

SEQ ID NO: 488130 - DNA, 136 bp, Homo sapiens
tggcccaacttaagcactcttggtaggtcccgtgtctcttggcgtacagcttagcaggctccctcggaagctgcgggagctgaaactgcgccatcgtcactgggggcggccatgacaccgctcgtctcccgcctga

SEQ ID NO: 488131 - DNA, 448 bp, Homo sapiens
gccatttggtctcatgccttctttcattcagcatgtatctattgagtgccacaggtatgccctgtttattgaaaatgtcagagataagtagatgagcagactccttacactgcatgctgccatacagagttaacctgtataagatctagtgcggcctagcactcccattctctctgtcagacaggactgtcagggtttgatctagaagcaaagtctcctctgttttctgcctaatccctgtaagagtcatgctcttggggatttcatgttccagtggggatcatgtccttgagatcacaacaagtacatctctatgcaggtgagtgaacagtcgtgcaggtgcccagctcacggtggcctagtgctgagagtgatggacaggatgggtccggagttatcccactgtagatacactatcattgctgtgtttttgattcaaactatccag

SEQ ID NO: 488132 - DNA, 334 bp, Homo sapiens
tcttgatatactatctttctggctgatcctttgtctgtaaggtgagtgggttcagacgtggatggttacttgcccttggcttcttttgtgtttgtttttgacgacagggtctcgctctgtcgcccaggttggagtgcagcggtgcaatcttggctcactgcagcctcctggattcaagcaattctccctcctcagcctcctgagtagctgggattacaggaatgcgctgccacatctagctaatttttatattttcagtagagaaagggtctaccatgttggccaggctggtcttgaactcctcacctcaggtgatccgctggccttggcctcc

SEQ ID NO: 488133 - DNA, 248 bp, Homo sapiens
tcactagagaaccccgtatcattattgatgtgcgataaaacactcgcgtgtgttttatacctcacaatgatggctatgtgaagagcgtgtggagcaccccaaggctttagtgagtcactagcctctggaaggcccttccgacctccctaccatggtggagacatgccttagttactagttcatcctacctctgttccatcctagaacagacagagcaagcacctagtgcattatacagctaggacccc

SEQ ID NO: 488134 - DNA, 133 bp, Homo sapiens
tgtatgcttaatgccactggctggtgaacagtgctgtccacctcttcggatatctgtccttatgacaagaacatttgcccccgggagaatatccgtggtttcacttggagctgtgaggtgagggcttccacaa

SEQ ID NO: 488135 - DNA, 148 bp, Homo sapiens
  misc_feature (49)..(49): n is a, c, g, or t
  misc_feature (81)..(81): n is a, c, g, or t
cccggtgggccgagtgcaaaaatgctccgtaaaggcaactacgcagagnggtctggggcaggcgcgccggttgtacctggnggcggtgttagagtatctgaccgccgagatcctggagctggccggcaacgcggctcgcgacaacaag

SEQ ID NO: 488136 - DNA, 1417 bp, Homo sapiens
  misc_feature (249)..(249): n is a, c, g, or t
  misc_feature (601)..(601): n is a, c, g, or t
  misc_feature (960)..(960): n is a, c, g, or t
  misc_feature (1417)..(1417): n is a, c, g, or t
tgggcaacggcatgggtattccattgaaatttcacaaacacaagggtctctgagccggggtctccacattcggtgaaggaggcagggctcggggaagcacagagtgtgagttccctcccaaaccgtgggacaatttgtgcaataagccctttccgtgcatagggtgctcaagggctccaagggggcccccaggaacccgtgggaaaggggcccgtgtgtagggccgaggggacacagaagcgccgtggnagacccccaagggtgtgccagcacagggcgaaaggcgtgagaaaggccccccgagtgagccccacagaaacaaccgagagccaaggggtgtgcgaagggccccaggggaaaggccggaaggggggttgagactctgaaagagggccaccaaagtcataccaatcgttgtgccccccctctttgtgctgtggtaaatctcaccagatctatcacgtagaaagtagcgggctcctgtgagtggagcgcccacagttttcacacacatgtctcaccagcagggggggcccccccccagagatatccaagaggaaaagaggctcctcgttgagcaccttgtgtgccccacaaaaanctattctgatgtgggggaaaatcatccccttattgtagggttttctcccaagcggggggggaaccccccatctttggaagaaaaattttaccagcccccagatgtttggctctcatacaagggggtcggctttgttggatcatcttatcgaggccgacagaatagccaagcggcacgttggtttgcctcatctttggcgcgaagagcggccaattataacgaataccacacccggcgcgaggaacagggaggggtgatgatatcactcctcacgtaccaaagctagcaaaaaagagaattgtttgaccagaggcaccccagaagacaggctgcaacttgttgagactcgtctgcccagnagaagaaaagagctgtcttttgttggcccccacaagagtgtgggtggcttatgacaaacaacctggtgttgtggcacgtaagaaacagtgtgggtgctagcgaaaacacagaagtgtacacagtagtggaaagccccccacggaatgctgattttgtagggagagaaaatcttccctcctctctaccgccaggaaaggacgggaggtacttccccccaactattctcaccaggggggggtcatcacaaacgtttagtctggaactagaaaaaacgggacctatttacacgatgtaagagagtaccttctctacacggcgacagacaacaacttactatacgaaggagaaggagcgcgtagcaacaagtcattaggtgggcgggcacaccgaacataggggggtgaccagtaaattattaagtaaacagccggcgcccctccctaataggctggtacn

SEQ ID NO: 488137 - DNA, 1368 bp, Homo sapiens
tggcagtgcaaatatccaagaagaggaagtttgtcgctgatggccatcttcaacagctgacactgcaatgagtttcttactcgggagcctggctgcacagcatggctcactcgtggcagttgcaggtgcgcagcttaccaccgacaccaggaccagacacatccattcatctctcagcccaccagcaactaccagcaatgtatccttgcgtgcagcacagggccaggccggcattcgagcgcaacctgcacctgcctgctcagcttccacgcacacccaggctttcggccctcttcccacgcagtggccagctagtcagcacgcttctcatcagctacgcacaacaggttgtgcccactacagccaggtctcgtcgtagccccattggcccccagggccaggagtcatcctgacgctctacaaaaacctacacataagggacagtgctcatgctggtgccggcagtgggcacatgcactaatgcgctgctgacaagccgggactccccactcccctggccacgcagctgcggcgcccgaaacaggcctgccggcagggcatccgacgcggcagatcatgggacgcacaagcctcacagcaaggcacaagcaggggcaataaggctacccactgccacaggccccggcacgggaatgggcccctggcactgaactcccacacacgacgggcagaaaaccacaagggtacaaaccataaccataccgcgctcgcaccaccctaggcacaggtggcggcccacagaaagctaaggcctcgcaaggaaccagagcgcaagactgcccagaagagccagatccaaacggcgctgcacacggaacatccactggacactgcccccccggaggcgtaccgccaaaccacctgggccacacgccacacccgggcgcaccattaacagacaacgaccccccgggccccatcgaaccccacgaccactgacagcccccccccgcatagagcacacgccggaccaccaacggacctcgccagaacactagcctaggcccccccaagacggagagcacgccacacgcacaatcgtaccagaggcaacccaccacggcaacaagcgcgtgctgcgcggcacacagcgcccaccgacagaggccgggccgccggtcgctctacatgtgaccccccccccagagcgcacataacggcccgcagcacagaacgcagcagctatacccccacggggggctcactacgactccagcgcgaccaggcaccacgcctacactacactcatgcgcacgacgccctacctcggaagcccgatacgccgcgcaggcacataaccaagacaaccacaggcacagaccacacccaccacgcccaggggcacac

SEQ ID NO: 488138 - DNA, 436 bp, Homo sapiens
accactcttacaatgctgatgcgactgtgagcttatgcaaccttcatgaaaacaggttgtcaaaacaggagtatgttatgacatcttaagcattttatatacttcgaactagtaatttcatctcttgaaatacatctttagaaaggaatggaggtaaatcttaagagttatttatagcagtgttcatagaaaagataaaggaaacatttgggatataatattaagtgtaaaaataagatatgaaactctttgtgttaagattgtaatgccttaaaatattaggcagaaaattattgaaaattgatagtgagttgtaggcgatttttttaatgctttctttaaaatttccaaatttctttttaaaattatatttttctcttaaaagaaaacaacaaaattgggcctggaaagctttaaaaacaaattaaatactcca

SEQ ID NO: 488139 - DNA, 1976 bp, Homo sapiens
  misc_feature (273)..(273): n is a, c, g, or t
  misc_feature (1769)..(1769): n is a, c, g, or t
ctgctggctttccatctctactggtggttgctctgtggtgcatgttccttctcgactccttccttcttttgtgtgtgagctgtgtcctatcgccggcgtcgttggtctccgttttctcgccgcgctgtgttttataggtgtgaggctgccgccctgtgggcgccaactccttccgtatctacttagcggcttttgtttcacaacctccttagtgagtgtgtgcggggcgcccttcctctgtcggttcagacaggtgtttcctacacggatagngtgtatgcgactctcttgtgtgtacgtttatgttgtgggggctacccccactcgggtcccttgttctccctctgctgggtgtgtaattgtccctgtctgtttgctgttcacaattatggttggtgaggctccgaagatctcgctcgtgtggttgtcggtgtgtggctgtctcaccacgggctcccccgtgctcgctgtgtgcccttggtgttttagcctcccagctggcttcggggggatgttaactgccacgtagtgacccccccggtggaattgttataattggtgggtgagagtaggttgtggtttgcccccccgcttgttgtagcccttccttttgcggctccccccaggtggtgttgaagagcaagaccgttctgcgtgggtggtttataagcactcaggaatgtattgtcgtaattgtcgtgggatgtagtcgtccctgctgggccccctctcgagtggagaactcttctggtgtgtgttttgtaataaaggtgttgtgttgtagatgagtgtgtgaaggtattaggtctgttagaggcgccacaagccctctgtgtcgccccccaccaaaacatgtgttggcggccccccctcgttggtgcggcaccccctcttcgtgtgttggagcacacatgttgttgttctgtaatataatacgccgcgtctcttctggtgttgtgagtgttgtttcttggacaacacgacacatagatgtggcacggctggtgttgttgtaaaactgtcggctgttgaatgtgttgtggtcgactaatagtagtggagatacctctctgatgtagtgctcgtgttgttggtgtggttgtgtaatcagaggagtagttgtttgtttaagaccctctgagatatagccaccacacacaagtgttgtattagtttgaagagtgttcttgtcttctggtgaggataaatttattctactatctgctgttggtgttcgacaagcattgtcttcgtgttggtgtggacaacactagcagaaggttgtagatcactctcttatattagctccctactgcggctgctgatgcgtcgtcgctgattagttgatgatttttgctctctaacggcgaggatataatatattattggtattacagcacacccctcacataagggtgattatgtgcgcgcctccgaagcagagttttggggagctgtgtttttttggtacaccagcagataaacccacagctgctgctctcgtcgcgctttgtctattataaaatatctctgtcttaaatatgtgttcttaaagtttctgtgtctcacacagcagtgagaaatattctcctctctcctggtggtgtgttacctcaccactgtgttgaggaggagacgcgctctttataggcgtctctctgtataaccgcgagagtcacattgtgtctctgtgacacaccctgtgtggtgtgaataatgagatagtgatgatgaaagcacacacatacaatagtgtattctaactcttngaaactctttgtgtaaaataggagtaggtggtgtggaggcgctcaattgtctctggtgtgtgttcccctgtctcccagtgcctctgtggtggtgcaccctggtgttggccacagtggcacacacacgtggtggtggtggtgaaaaacacacccctgttaaaacccgaaattaccttttaaaaattaacccaaaatggggaccctgga

SEQ ID NO: 488140 - DNA, 837 bp, Homo sapiens
  misc_feature (535)..(535): n is a, c, g, or t
gcaacgtgttctgaaacttgcgtgagtaataccatgcgtcggggatcaaggaactaggtggttgcgaatcggaatggtagagcagtagtgctactactttgaggctagaatattctggactggattcagtagaactgtttaacagtgtgtaggttgagtatgcatgtgtatcggtcgtttgttgccaatgtcttgaaggagatactggtgggccagtttgggaagaatgaagagaagtgcgtaataagtgaggtgaagtaagtgcgtagtaagaaagatgttaagctgcctgttgtagatcatggtggacgtgactcggttgctcctaagctgtagagacttctcagtgatgtactggacctcctggttgcagtctctgattcgtaagagtcgcacccctagataacacttatctaaggcacgttgtcgaacattattgaaaagcattaaggcctggggtgtatttcatcgtggcttgctatgggcacctctaggtcggttacctctagggttgggcttgataggtgtagtgccntttgatagttaaggcgaaagttaatgataaatgtcttgttggcaattacaattaaaaagaacccgttgttggaatcccttttcacagtaggagatatggacacacaagaggcaaaggggcggcaaccgttttgcgtgtgttaggccaagggtaaaaacggaaagagttgggcgcgtgtgggtccattgtgaatggaagaatggttttccttccgaatggaagagaaaaattctgtgggttgaataaaaggggcggggagttactaacttgtgcaaagtaggattcgggggaaggatttatgg

SEQ ID NO: 488141 - DNA, 420 bp, Homo sapiens
gtggcaagcagttcttttcagcagattttgcccactattcctctgagctgaagttctttgcatagatttggcttaagcttgaattagatccctgcaaaggcttgctctgtgatgtcagatgtaattgtaaatgtcagtaatcacttcatgaacgctaaaggggaatgtaagtatttttaaaaggggggtatttccaaattggttgactaaatccggaatttccagatttccatgccggatttaccctcaacccgggcctgtttccccaaacttgaagagggaaagctccgaaaatcgggcttcccctcggggtcctaccaaaatgggccttggggggtcaccctttgggaaggtgcagctttgttgtcccttgagccttctgttatgtgcctatcctaataaactcttaaacacaaaaaa

SEQ ID NO: 488142 - DNA, 270 bp, Homo sapiens
gcttgcctttcttctgtactctagctgctaatgttgtgctgaatcgtttcaaagtctttcccatgctcgtactgctcctcgaagtaggtgttctgttcctctgtgctccacgacttccactgccgctggacttttgtgctttcttccgtcttgtcaccagatgaccctaagttccgggaggatgagcgctgtagcttgcaggtgcagcagggcaaccttagatatatttccatgacgatgatcctccaccttcagctccttgctctgcgt

SEQ ID NO: 488143 - DNA, 152 bp, Homo sapiens
ccatgtcaggcaagttgggaagtgctggcatgggcacaatgctgcctgggctaaagaacacgtacccaacaccaatacttaaaactatccttaatctgtctccctaccccgaggtttatacacttccaggtcaggcatcctttgtggcagaa

SEQ ID NO: 488144 - DNA, 232 bp, Homo sapiens
  misc_feature (70)..(70): n is a, c, g, or t
  misc_feature (133)..(133): n is a, c, g, or t
  misc_feature (141)..(141): n is a, c, g, or t
  misc_feature (158)..(158): n is a, c, g, or t
  misc_feature (201)..(201): n is a, c, g, or t
  misc_feature (203)..(203): n is a, c, g, or t
aggaaatatacttttacaagtaacaaaaataaaaactcttataaatttctattttttatctgagttacanaatgattactaaggaagattactcgtaatttgtttaaaagtaataaaattcacagacatttgnctgaatanctactatatgtcagtgnctgtgcaggtattacactctgtaattgaatattattcctcaananattgcacatagagagcgctatctgggaag

SEQ ID NO: 488145 - DNA, 376 bp, Homo sapiens
tccccgatgctatccccaacacaaaaaatttaaaaatcagctgggcatctgtatttccagctactcaggagctgaagtgggaggaatcacttgagcccaggagtttgatgcagcactgagccataatcatgccactgcactgaactccactccagcccaggtgacagagcaaaaccttgtttcaaaaaaaaaaaaaaaaaaggtatttcttggttcccaaagaagaaccttttcttcctgccaaggtataagggttggtataataaagatctatcaaaggttcccggctttccccaaaagaaaacacttccatcccagtaaaagggcctttttaaagactttaacaccccctaaaacctttggaaaacaaaaaatt

SEQ ID NO: 488146 - DNA, 231 bp, Homo sapiens
tgtcagcggctctactcatgctggtgaggaggagagtagggaccgatgaatcttgctataacatgatccgttgcacagagaagctttcctcagctgagagctaccatggaggcttattctaggatggctaatcgagacttgtaacgcggtgtgagccgtgaggtcttccggactatgtagaacagtggtattgaagaccactcttgcatgtgtgacctagaacctgccctg

SEQ ID NO: 488147 - DNA, 148 bp, Homo sapiens
gaactgggttctgacaagatggccggctgcccgcagatcatcaaggaaaccagcgtttctgcagaccagttctgcatcaagccgaccagatgagagcacgccgtatttcatgtggtcaatgctggcctcaggattccccttgaggagg

SEQ ID NO: 488148 - DNA, 262 bp, Homo sapiens
ctaagaatgtcatgtcttgggttagaattttcatttttagccccgttaatgtattcccttaaatctatgttagcaccttgtctccatgcagaacaacaaaccatccaaacattttaaacattgggtgaaacacgaaggggagggttaaagacagactccggtactgtgcaaggagtggctttagatcacaagatccttgtcgatatccttctgcttgatgcccgagcagcctgcccactcatccagggcgatgtacttgtca

SEQ ID NO: 488149 - DNA, 154 bp, Homo sapiens
gccacggtagattttgacaaggtacaagataattaagtgggcccacggcggcttcatgcccaacggcatcggtgggctgatcgcctcgtttgcggtggtgatgttgcctttggtggcatcgaaatcatcggcatcaccgccggtaaagccaagg

SEQ ID NO: 488150 - DNA, 312 bp, Homo sapiens
ccgctgaccaatgacagtggtcttgtcgttggagtgttcagttccagcagtgcagagcatttgggggtggctcagctctgttgggaggcggcagtccaccatcaagtacaccagcacctcctccttccagcaggacgagctataagcactaaagtgcgtctgctagctctcggtcccacagtcctcaggcccctctctggctgcagcgccatctcctcaggtggcctgtcctctcctggcctccagtctcccctgctgtcccaggtagagctggggatgagtgcttagtgccctcatttcttctctctctct

SEQ ID NO: 488151 - DNA, 797 bp, Homo sapiens
tgtggtttactctgagattctgtagtcctaatattgtatcattgtgctgtctgcaaaacaacttgaatctattttgtttgcatctttgttacatgtaacgcagctgtactttatgttctttgcaactgtttccattatgagaacgctgtgctatttacaaggttacatttttcttggccaggcgaggtggtcatgcctgtaatcccagcactttgggaggccaaggtgggcggatcacttgaggtaaagagttgagaccagcctggctagcatggcgaaacccagtctctactaaaaatacaaaaattagccgggtgaaattagccgggcgtggtggtgtgtgcttgtaatcccagctactcgggaggctgaggcaggagaatcgcttgaatccgggaggcagaggttgcagtgagccaagatcaggccactgcactccagcctcggggtcaagagcgaaactctgtctcaaacagaaagaaagaaaggacggaaggaaggagggaaggacacggaacgaaagagagaaccgacaagacagaaagaaagaaagaaagaaagaaagagagacagaaagaaaggaagaacgagaaggaaatatcttgtattgtataaactggaaatttaacagttagctctagaagagttactgaacgtggttactgggaatgtaatagactgcattaaatgactggcatcaactgggtaggaaccgtggataagttcggaattatttttctcttgaagttgtttccaaacgttcgctttttgcaaagtgttatcattcttaacttctt

SEQ ID NO: 488152 - DNA, 790 bp, Homo sapiens
  misc_feature (22)..(22): n is a, c, g, or t
  misc_feature (69)..(69): n is a, c, g, or t
  misc_feature (105)..(106): n is a, c, g, or t
  misc_feature (113)..(113): n is a, c, g, or t
  misc_feature (115)..(115): n is a, c, g, or t
  misc_feature (145)..(145): n is a, c, g, or t
  misc_feature (149)..(149): n is a, c, g, or t
  misc_feature (158)..(158): n is a, c, g, or t
  misc_feature (202)..(202): n is a, c, g, or t
  misc_feature (211)..(211): n is a, c, g, or t
  misc_feature (214)..(214): n is a, c, g, or t
  misc_feature (226)..(226): n is a, c, g, or t
  misc_feature (236)..(236): n is a, c, g, or t
  misc_feature (248)..(249): n is a, c, g, or t
  misc_feature (253)..(253): n is a, c, g, or t
  misc_feature (257)..(258): n is a, c, g, or t
  misc_feature (267)..(267): n is a, c, g, or t
  misc_feature (270)..(270): n is a, c, g, or t
  misc_feature (274)..(274): n is a, c, g, or t
  misc_feature (277)..(277): n is a, c, g, or t
  misc_feature (282)..(282): n is a, c, g, or t
  misc_feature (293)..(293): n is a, c, g, or t
  misc_feature (300)..(300): n is a, c, g, or t
  misc_feature (309)..(313): n is a, c, g, or t
  misc_feature (316)..(316): n is a, c, g, or t
  misc_feature (318)..(318): n is a, c, g, or t
  misc_feature (320)..(323): n is a, c, g, or t
  misc_feature (325)..(328): n is a, c, g, or t
  misc_feature (331)..(331): n is a, c, g, or t
  misc_feature (335)..(335): n is a, c, g, or t
  misc_feature (337)..(338): n is a, c, g, or t
  misc_feature (343)..(343): n is a, c, g, or t
  misc_feature (348)..(350): n is a, c, g, or t
  misc_feature (353)..(353): n is a, c, g, or t
  misc_feature (361)..(362): n is a, c, g, or t
  misc_feature (364)..(365): n is a, c, g, or t
  misc_feature (371)..(371): n is a, c, g, or t
  misc_feature (379)..(380): n is a, c, g, or t
  misc_feature (384)..(384): n is a, c, g, or t
  misc_feature (388)..(388): n is a, c, g, or t
  misc_feature (390)..(390): n is a, c, g, or t
  misc_feature (405)..(405): n is a, c, g, or t
  misc_feature (409)..(410): n is a, c, g, or t
  misc_feature (414)..(414): n is a, c, g, or t
  misc_feature (421)..(421): n is a, c, g, or t
  misc_feature (424)..(424): n is a, c, g, or t
  misc_feature (426)..(426): n is a, c, g, or t
  misc_feature (430)..(430): n is a, c, g, or t
  misc_feature (433)..(434): n is a, c, g, or t
  misc_feature (436)..(436): n is a, c, g, or t
  misc_feature (443)..(443): n is a, c, g, or t
  misc_feature (447)..(447): n is a, c, g, or t
  misc_feature (453)..(453): n is a, c, g, or t
  misc_feature (459)..(459): n is a, c, g, or t
  misc_feature (474)..(474): n is a, c, g, or t
  misc_feature (477)..(477): n is a, c, g, or t
  misc_feature (479)..(479): n is a, c, g, or t
  misc_feature (487)..(487): n is a, c, g, or t
  misc_feature (496)..(496): n is a, c, g, or t
  misc_feature (501)..(501): n is a, c, g, or t
  misc_feature (505)..(506): n is a, c, g, or t
  misc_feature (525)..(526): n is a, c, g, or t
  misc_feature (530)..(530): n is a, c, g, or t
  misc_feature (536)..(537): n is a, c, g, or t
  misc_feature (543)..(543): n is a, c, g, or t
  misc_feature (557)..(557): n is a, c, g, or t
  misc_feature (565)..(565): n is a, c, g, or t
  misc_feature (570)..(570): n is a, c, g, or t
  misc_feature (783)..(783): n is a, c, g, or t
gataccgcaatagaatgagganacagtactttcagagaattatctttaggtgaagaaattcaaactgtnaagagtaatatactgtacataaacatatacataagnngtctaananccaagctgtgacaagggacctagaactganacanaatttgagnaaaacttacttaaaagcatttgtttcctgtaatctctacaaatnattttagangcngagatttctgcnctcaactgtnatgactaatacnnccgngggnntcacttagnggngttnggngtaanggggggggtgnggttggngtgttagtnnnnnggngnannnncnnnngcntttncnnattcngcgannngantaaatagnngnngtgaangcggaggnnaatntttntnagcagtggtttgtgngtgnncttngcgacgnagngngtcngcnncngggaccnctgngttggnatcgcncccgcataattgtgntcncnttcatatnctccttganttggntttnngcgggatcggtgcgcatgnngacngagatnncgtggnccagagtgagcgtntttgtggngtttntcagctgagcttccaagagtattctgagcttgctggtgaggtagaatgcctcacagaacctggttcccaccttctatagtgctcttttcttccctctatatccttttcaaatctcctataaccataaatcttgtcctctgaattcctacagaaggaatctgaggaatttcttctactggaaaaatgtctttctgatttatatggcttttctgntttgcta

SEQ ID NO: 488153 - DNA, 398 bp, Homo sapiens
  misc_feature (284)..(284): n is a, c, g, or t
  misc_feature (322)..(322): n is a, c, g, or t
  misc_feature (359)..(359): n is a, c, g, or t
  misc_feature (379)..(379): n is a, c, g, or t
cttgaatggtcttcaagattgcttgaagaagaaaattatctgaaatatgttgaagaaaatatattacctagctgagatagattctgaaggcagtcactagtgaaattgtaatttgttaaattattttgcaagaagccccctttttttaagcaatcttaaaaaatggtaaacgtaataacattccaagagtttttgactaattgggtgaaggaagtataggaaaattgcaagtacactgagtagggataatgggtcttaggattcttagggaaggattgggctgnatgggggaggatagttaagggtagggctgttacttttnatgtttggcattaggcagggctgtttggaactttttnggaggagttatttccccctnaactttcaccaggcaggac

SEQ ID NO: 488154 - DNA, 234 bp, Homo sapiens
ttctagcagctgtgtgtcatctcacaatcacagattgttgtctccaatcctcacagagacccaattgagcaacaaaagaaaaaaggaaaaaaaaaagtcgtctttttattttgttgttggggacaaatcggttggaaagccccggtggggcttggcacaacggggggaacccacaaggagtgccggggggctttgcatgtgtggtcgacgcccgaggataaaaagggatcagca

SEQ ID NO: 488155 - DNA, 142 bp, Homo sapiens
gatgccgagtcgaagctggactttactgctgccatctcgggtcactgcaacgcggcctgcctgattctcctgcctcagcctgccatatgcctacaactgcaggtgcgcaccgactcccctgactgagtttcgtattttatcg

SEQ ID NO: 488156 - DNA, 356 bp, Homo sapiens
  misc_feature (16)..(16): n is a, c, g, or t
  misc_feature (25)..(25): n is a, c, g, or t
  misc_feature (28)..(29): n is a, c, g, or t
  misc_feature (85)..(85): n is a, c, g, or t
  misc_feature (87)..(87): n is a, c, g, or t
  misc_feature (112)..(112): n is a, c, g, or t
  misc_feature (132)..(132): n is a, c, g, or t
  misc_feature (182)..(182): n is a, c, g, or t
  misc_feature (197)..(197): n is a, c, g, or t
  misc_feature (201)..(201): n is a, c, g, or t
  misc_feature (250)..(250): n is a, c, g, or t
  misc_feature (269)..(269): n is a, c, g, or t
  misc_feature (315)..(315): n is a, c, g, or t
  misc_feature (319)..(319): n is a, c, g, or t
  misc_feature (335)..(335): n is a, c, g, or t
  misc_feature (337)..(337): n is a, c, g, or t
cttgccgagcagaatnagctctgcnccnnacgccccggtagctgcttccgcatctgcatttcatctggagcagggcaggtaaccncnggaggaggcatgcccgaggcagccnggactgggcgggaaggtgcncccgggatatactctgtgaaccgtctggaaggctgctggcagtttttccnttttgtccaccaccnggcncgttttaataattgtacataatccgtgtatttgttttacctgctcatcntctaaaactggcgagcccnatagttcgttctcattgttagattttgccgtttacaagtgtccccnaccngcaataaacttttccngngtgaaaaaaagtaatcggg

SEQ ID NO: 488157 - DNA, 226 bp, Homo sapiens
caggaggatcacttaaggccaggagtttgagaccagtgtggccaacatggtgaaaccctgtctctaccaaaaatacaaaaattatccaggcatggtggtgtgcacctttaatcccagctacttggaagctgaagtcacaagaatcacttgaacccaagaggccatctgggcaacatagtgaagtaaaaaaaaaaaggaaataatacttagatgccttaaaatctgt

SEQ ID NO: 488158 - DNA, 399 bp, Homo sapiens
catacaatagtgacaacttaggtacataaacagaactgtctgacttcaaagttgaaacttcctccaccatactatgctccccgcaccaacgagaatatttagtgtaattaaactattgaagacaacaacaggtaaacgagaaaatccttggaaaagaacaccgttaatttacaatagtatatgtctctctctggccaacgtactttgtttcatgacactactggcatcatccatcccaaatactttcggtcgctgtgtgtttcagactctgaaaaaccttcaaataacacaataaaacctgctcctcttttcctttaatcttacataaaggcagttctcttaagtctatagtcaaagcagattataaaaagaaaacaaatcactttgcgtgtgtgtgtg

SEQ ID NO: 488159 - DNA, 176 bp, Homo sapiens
gtcaaaggacaatgtgttttctggtatgacaagagaagtagaattgttgttaagggaagccgagtaccaaaaagatcccggtgtcacagatttgtgtagggtgtttaaagctaaaccacaaagttttattttatcacatagagagagagagccacacagagagatttccatattat

SEQ ID NO: 488160 - DNA, 383 bp, Homo sapiens
  misc_feature (76)..(76): n is a, c, g, or t
  misc_feature (158)..(158): n is a, c, g, or t
  misc_feature (366)..(366): n is a, c, g, or t
aagcctcctgccttgaaaggaaattttggcctacaaaggaccgctgttaaatcagattggacaggaggtgatatcnaagaatatgcaggtagtaagggtataagacaaaacttctaatgcatgaaggggaatactgctctagaattcaaatttattcnttcagttagtcacttattcactcacacattcatcatgtggtcattcattcaatcaacaaatacttatattaagcatctactctgtaccaagcactgggctagctataggatatgcagtagtagtgacaaaaattcagagttccagccctcattaagtttcctgtgtaagggaagtgagattccatgtgctttcatgaaaagcagactntttgtttcttaaaaaaa

SEQ ID NO: 488161 - DNA, 468 bp, Homo sapiens
ccacaggaatgtagagtcaggctggagtgcagcggcatgatctcggctcactgcaagccccactcccaggttcacgccattctcctgtctcagcctcccgagtagctgggactatatgcgccctccaccatggccggcttattttttgtatttttagtagagacagggtttcactgtgttagccaggatggtctccatctcctgacctcgtgatccgccagccggggcctggcaaagtgctgggattacaggcatgagccaccgtgcctgacctattctacacttcttttccttggcctttttctcttcttccattttcttcctttttttttttttttttttttaaacacaggggatttcttttaatctcggggaattttcctggggggaaaaaaaggcttaataagtaattatctaaagggaatttgaccaattgagatttagaggggagagatatggcctcggtgt

SEQ ID NO: 488162 - DNA, 386 bp, Homo sapiens
ggcagtaggggagagagcagttaaagcacacagagcaccagcgttctcctgcctgaagatgtgtccaccaaatttgggcagatctgctctactcttataggattatccttaactccatctaccagtggcctgagcacagtgaactgacaactctgggcgtggatgggaaggagttcccagaggtgcacttgggccagtggtactttatcgcaagggcagcttccaccaaggaggagttggcaacttttgaccctgtggacacacattgtcttcaatatggctggtggctctgtcccgatgcagatccaccttcgtgctaccatacgcatgagatgggctctgtgtgccccggtggatctaccacctggctggagggagcacagtct

SEQ ID NO: 488163 - DNA, 302 bp, Homo sapiens
  misc_feature (203)..(203): n is a, c, g, or t
  misc_feature (238)..(238): n is a, c, g, or t
gtcgacctttacaacccaaaatggagcggaaactgttctttctctagtttaagtcccgaaaaaacggcgtccttttattttttgctttcttatgcgttttttggctggggtcattctcagtctttcccgtatcagttcttttaatctttgaggaactgggacccctgtatttaattggcctggtaggaagatgacacgagctntgtgggcttacatttggcctctgctgtaaaagctnttgttttctttggcctattaaagcgctggtggtaaaagcctgctgtgtatgttatgagtcgacg

SEQ ID NO: 488164 - DNA, 240 bp, Homo sapiens
gatcccccggttgtcagtgacgcgttgtcagtggactggaacacgacttggtctattcagccatgacaattctgtccctgctgtcttagctttgtttgcagctagaggtgcactggtagctggctcgggcaaagtgcatctaagtaaagctctgcagcgggagagagcaggaaacagacttctgacgagttttcactttctgatagaaggtgccgggtccagcttagtttgggcccattc

SEQ ID NO: 488165 - DNA, 295 bp, Homo sapiens
tcgtcgcggactgactcttcgccagcctcgatcttcaacaggcgtgaatacgagaccacctaccatcagcagcatgatcgcgatgatgaccgcaaagctcgccaatatccgttggcgcaaggtccagttcttcacagtaattcctcgagggccattcaaatggaggggagtatagctgagcgggtgccatcattaatcaacgggttgtgggatctgggtcacgcgcaggggggaaagttttcttgggggggcatatccgttgctgcggtaacggctgctgacggttcgtcgacgc

SEQ ID NO: 488166 - DNA, 304 bp, Homo sapiens
tacgactagaggatcccgaagcatcctaaccaggtaggtggaggttgcagtgagccaagatcgggccactgcacacaagcttaggcaatagagcaagactccatctcaaaattatgaatacataagtaaacaaaatctgggtttcaggccaggtgtggtggtgcattcctgcactccctgcactttggaaggctgagctgggcagacagcttgacctcaggaattcccgactagcctgggcaacatggcgaaaccccatgtctacaaataatacaaaaaaattagctggttacgggactgctgt

SEQ ID NO: 488167 - DNA, 219 bp, Homo sapiens
agctcagttttgaagtgagggtatttaaagcttctctgcgggggctgccttttaaagggatgatagatcatttgaacccaatgccaatttttaaccagaaaatttaattggacctgaatcaccctttcagcctaggacgaagtttaggcccaagtcaaagtattaatgttcatgaaaattgtgtgctgaaccagtaaacgagtttcccttttgatggta

SEQ ID NO: 488168 - DNA, 398 bp, Homo sapiens
tacaaggcccgcggagactggtcttcactctcaatgcagccgccacatagatctcgtgccagctgtctgccacagacactggcatcccctgcacactctgccagtgttcagggcactcagcgccagtgttggtggcatgtgaggtgccctgcctagtgtgcttcccgcatgtgtgtgcagctaggtgcagcttataggtagaccatgggcttgcgtctcgtggctgctggcgctatgcatccactccgcagagcaactgtcctgcttgcagtgccccctgccctggtgcctgccatgcccagctggcccagcccaggagactgctgcagcagtgtgactggatgatggttccatgaggtggctacaagcccagggtccagtgtgggacggtgtggcat

SEQ ID NO: 488169 - DNA, 229 bp, Homo sapiens
gacatgtgtaggcaacccaccttctggaggacgggagatctctgggtaaaaagcatgtccccaggacagtagaggagaaagtccctgaagagactagctaccaaaaaggtctctccgtgacactattaagacaactgctcttgccatctgattgacacctattctccctctgagagggccccagctgcagagcacagcctgcggcacccctgagaactaatctgctgtc

SEQ ID NO: 488170 - DNA, 139 bp, Homo sapiens
tccaacatctcattgctctttccaatatctcataattccttccaagatctcatgtctccttccaacatctcatgcgcgccactaataaaattaattaaccactcattcatcgactaccccaccccatccaacattgggt

SEQ ID NO: 488171 - DNA, 741 bp, Homo sapiens
gcttgtatttagagcgcagcggctgacgggccggatcgccttcgaccgtcgcgcgcccggaaatcttcgtgcgcggcccgtctcgccccggctggcaagcagaccgtcggacaggggataatataagcacgcatggatgggcttctgtgagtatcactcgtatatactcgagtcaccgggtccacgcaagtcattcatgtgggtcaggaactggcaggtacctgaggggcctggcaagcgagagtaagaagaagaagatcaatggacaggaatagcggagtgaatccagaaacgaagacagagagacgcacgtgtcaagacaggcactagagaaacgagccgacacgtggaccctcgtataaccgtagtaacaggaaggtgcaggtacgaccctagagaaggaagccatgaggagacctgagagagtctagggaagaacacacaaactcgcgcggagagcgactggggacgaaaccgacaggtggaacccccaagtgtcaagaaaaagaagggaaagccctactatgaaacaattactaaagagaatcagctcctgacgaggacccacaatgaagggggcatccaaggagatcctttcgacaataagtagcttggttgatgaccgaataggtagccagagaatcgggaatctaggccagaatgtgagcaaactggcacacgggcactatgcatgcatggaagatgaagcagaaaagcaacgtacaaagtaatgaagaacaa

SEQ ID NO: 488172 - DNA, 1003 bp, Homo sapiens
  misc_feature (184)..(184): n is a, c, g, or t
gccggcatcaaaccccactgagtggatgccatcttctcgggaatcttaagtgcagcagaagaatggaccgccacatcgctctcgactggcattgaaatctgtgcaattgaagtaaataaggttccaatcatcagctccaaaagccccacagcactgccaatattcctgggtgaagtctatgagngcaaatcaatgtcatcccgatatgctctgatgttgttgtttataaagaaatacagctggtctttgatccagtctttgaaaacaaatgctagaactccggcagtgagctccaggaagaaaataattcccaggaacacagaaacaaacttgagaaggaaagtgttttcccgtagcgctccaatgcaccctgcaaatcccaaaatgaacatcactcctcccaccacaaggaagagccaaactgggtcaaagccgccgagatcggtgatggaagagatgttggacagaactcctttttcattccatgcccacagtccaattccaagaaatgttattcccaaaaaccaaaatatgacattgaagccaaatatgaagtatttgatgcaacaactgacttcaggacccttgtagtgcttcccggacatcctctgggttcatgaagacacttgccccggcagcccgagtttggagctccgaagcaccgttgctcggagcagcccggcggggagcaggagctcagggacaccgcacggggccgcggcgctggcggcctgggctcagccgcgcggggaccgaccggcggagagcggctcccgcacctccagcccctcgcgcgccgaggccgccggagccggggtggccgcgagaaagcagggaagccgcgcgctgcaagctcaagcctcgccgacgctagccccgaacacaaagcgagcgcccgcgtccgtgcgccaggcggtcggtccgtcggttcgtccccgggcttcgggcaaaggcggccgcggcagatgctggtggagacgccgctcgcttgctcgcccccgct

SEQ ID NO: 488173 - DNA, 242 bp, Homo sapiens
cgaatctcgacacgtgtgccacatcatcaccagtccacttcagaactttatatcatctcaaatagaaactatgccatgacagagtatctacccccttcgtcctatttcctggtccctgtgacctctattctgctttctgtctatatggatatgcctatttggatatacatattaatagaatcaacagtgggtcactctttgtgtacagcttataacagttggcataatgttgtcaaggttca

SEQ ID NO: 488174 - DNA, 828 bp, Homo sapiens
  misc_feature (184)..(184): n is a, c, g, or t
gccggcatcaaaccccactgagtggatgccatcttctcgggaatcttaagtgcagcagaagaatggaccgccacatcgctctcgactggcattgaaatctgtgcaattgaagtaaataaggttccaatcatcagctccaaaagccccacagcactgccaatattcctgggtgaagtctatgagngcaaatcaatgtcatcccgatatgctctgatgttgttgtttataaagaaatacagctggtctttgatccagtctttgaaaacaaatgctagaactccggcagtgagctccaggaagaaaataattcccaggaacacagaaacaaacttgagaaggaaagtgttttcccgtagcgctccaatgcaccctgcaaatcccaaaatgaacatcactcctcccaccacaaggaagagccaaactgggtcaaagccgccgagatcggtgatggaagagatgttggacagaactcctttttcattccatgcccacagtccaattccaagaaatgttattcccaaaaaccaaaatatgacattgaagccaaatatgaagtatttgatgcaacaactgacttcaggacccttgtagtgcttcccggacatcctctgggttcatgaagacacttgccccggcagcgggtggccgcgagaaagcagggaagccgcgcgctgcaagctcaagcctcgccgacgctagccccgaacacaaagcgagcgcccgcgtccgtgcgccaggcggtcggtccgtcggttcgtccccgggcttcgggcaaaggcggccgcggcagatgctggtggagacgccgctcgcttgctcgcccccgct

SEQ ID NO: 488175 - DNA, 1060 bp, Homo sapiens
  misc_feature (184)..(184): n is a, c, g, or t
gccggcatcaaaccccactgagtggatgccatcttctcgggaatcttaagtgcagcagaagaatggaccgccacatcgctctcgactggcattgaaatctgtgcaattgaagtaaataaggttccaatcatcagctccaaaagccccacagcactgccaatattcctgggtgaagtctatgagngcaaatcaatgtcatcccgatatgctctgatgttgttgtttataaagaaatacagctggtctttgatccagtctttgaaaacaaatgctagaactccggcagtgagctccaggaagaaaataattcccaggaacacagaaaatacttatctcataccttctgttcgaagattattccaggcaagtttttattgtttgtcaaacttgagaaggaaagtgttttcccgtagcgctccaatgcaccctgcaaatcccaaaatgaacatcactcctcccaccacaaggaagagccaaactgggtcaaagccgccgagatcggtgatggaagagatgttggacagaactcctttttcattccatgcccacagtccaattccaagaaatgttattcccaaaaaccaaaatatgacattgaagccaaatatgaagtatttgatgcaacaactgacttcaggacccttgtagtgcttcccggacatcctctgggttcatgaagacacttgccccggcagcccgagtttggagctccgaagcaccgttgctcggagcagcccggcggggagcaggagctcagggacaccgcacggggccgcggcgctggcggcctgggctcagccgcgcggggaccgaccggcggagagcggctcccgcacctccagcccctcgcgcgccgaggccgccggagccggggtggccgcgagaaagcagggaagccgcgcgctgcaagctcaagcctcgccgacgctagccccgaacacaaagcgagcgcccgcgtccgtgcgccaggcggtcggtccgtcggttcgtccccgggcttcgggcaaaggcggccgcggcagatgctggtggagacgccgctcgcttgctcgcccccgct

SEQ ID NO: 488176 - DNA, 104 bp, Homo sapiens
tctaatgatgtattggggggtccagttcctctacctctttgtgactctagccatcccaccaggtgttatgtggtcatctgatttatttattttattttctattt

SEQ ID NO: 488177 - DNA, 446 bp, Homo sapiens
ggcataagcccggcgagcatgttcgtcaatgcacgagcgtatacagtagtatggttaagaggtagtgcgcgctgtcggtaatctcagtgctcatgccagactcatgtcccagccgtgacttatcagctagacctgcgcgctcagtgatttcccaggtcttgccatccagtggcacagataccgtgatgagcgtgctggagatcagggcttacctgttcaaccatgcatttatgagagctgtcgctcaacgtctggcagggtaccgtcgcctgacctctcaggcatgctatggcggcaggtctgcctgccagcgtcacatctgttgggactcgggtcccgagctcagcaggccagtgccttggtgagctctgggtaaacgcggatcgtcggccatcatcccatccagtgcttcctggctatccagtggctcatacacatcttaggag

SEQ ID NO: 488178 - DNA, 968 bp, Homo sapiens
  misc_feature (4)..(4): n is a, c, g, or t
  misc_feature (26)..(26): n is a, c, g, or t
taanccctaaagataccttagggaanggaaacccaatctgtgatataatatgccacaaaaccctcccatggatggcatggtggggtggtgggggtggtgttgtaccttattaaggaggcacaactgggaatcagggctagagagctctctcaaaagaaaataatgaccctgggccctactttggccagtgccctttggtacagctcactgtcttgcctgtagatagggtgacctcctgatggaaggtaaagttttggctctcaatctgagagtagagagtgtaatacttacaaacttgagaaggaaagtgttttcccgtagcgctccaatgcaccctgcaaatcccaaaatgaacatcactcctcccaccacaaggaagagccaaactgggtcaaagccgccgagatcggtgatggaagagatgttggacagaactcctttttcattccatgcccacagtccaattccaagaaatgttattcccaaaaaccaaaatatgacattgaagccaaatatgaagtatttgatgcaacaactgacttcaggacccttgtagtgcttcccggacatcctctgggttcatgaagacacttgccccggcagcccgagtttggagctccgaagcaccgttgctcggagcagcccggcggggagcaggagctcagggacaccgcacggggccgcggcgctggcggcctgggctcagccgcgcggggaccgaccggcggagagcggctcccgcacctccagcccctcgcgcgccgaggccgccggagccggggtggccgcgagaaagcagggaagccgcgcgctgcaagctcaagcctcgccgacgctagccccgaacacaaagcgagcgcccgcgtccgtgcgccaggcggtcggtccgtcggttcgtccccgggcttcgggcaaaggcggccgcggcagatgctggtggagacgccgctcgcttgctcgcccccgct

SEQ ID NO: 488179 - DNA, 206 bp, Homo sapiens
tcatcagtatcagagcttcggagagatcccagacatgctcatgaagaccgaggagcatgtggcccctgtagcaagactgagagttacctgtacagcatcaaagctgcaatcaccaacaaaatcagacagaatactgaggagtccaacaatggcgtcgctcatatgaagtccttcccctggagcagcagggaaagacaggggagggt

SEQ ID NO: 488180 - DNA, 901 bp, Homo sapiens
  misc_feature (184)..(184): n is a, c, g, or t
gccggcatcaaaccccactgagtggatgccatcttctcgggaatcttaagtgcagcagaagaatggaccgccacatcgctctcgactggcattgaaatctgtgcaattgaagtaaataaggttccaatcatcagctccaaaagccccacagcactgccaatattcctgggtgaagtctatgagngcaaatcaatgtcatcccgatatgctctgatgttgttgtttataaagaaatacagctggtctttgatccagtctttgaaaacaaatgctagaactccggcagtgagctccaggaagaaaataattcccaggaacacagaaacaaacttgagaaggaaagtgttttcccgtagcgctccaatgcaccctgcaaatcccaaaatgaacatcactcctcccaccacaaggaagagccaaactgggtcaaagccgccgagatcggtgatggaagagatgttggacagaactcctttttcattccatgcccacagtccaattccaagaaatgttattcccaaaaaccaaaatatgacattgaagccaaatatgaagtatttgatgcaacaactgacttcaggacccttgtagtgcttcccggacatcctctgggttcatgaagacacttgccccggcagcccgagtttggagctccgaagcaccgttgctcggagcagcccggcggggagcaggagctcagggacaccgcacggggtggccgcgagaaagcagggaagccgcgcgctgcaagctcaagcctcgccgacgctagccccgaacacaaagcgagcgcccgcgtccgtgcgccaggcggtcggtccgtcggttcgtccccgggcttcgggcaaaggcggccgcggcagatgctggtggagacgccgctcgcttgctcgcccccgct

SEQ ID NO: 488181 - DNA, 1025 bp, Homo sapiens
  misc_feature (4)..(4): n is a, c, g, or t
  misc_feature (26)..(26): n is a, c, g, or t
taanccctaaagataccttagggaanggaaacccaatctgtgatataatatgccacaaaaccctcccatggatggcatggtggggtggtgggggtggtgttgtaccttattaaggaggcacaactgggaatcagggctagagagctctctcaaaagaaaataatgaccctgggccctactttggccagtgccctttggtacagctcactgtcttgcctgtagatagggtgacctcctgatggaaggtaaagttttggctctcaatctgagagtagagagtgtaatacttacaaacttgagaaggaaagtgttttcccgtagcgctccaatgcaccctgcaaatcccaaaatgaacatcactcctcccaccacaaggaagagccaaactgggtcaaagccgccgagatcggtgatggaagagatgttggacagaactcctttttcattccatgcccacagtccaattccaagaaatgttattcccgaaaatgcaacttttgaaggacatgtctagatacagtggacccgaaatgttaacagcaaaaaccaaaatatgacattgaagccaaatatgaagtatttgatgcaacaactgacttcaggacccttgtagtgcttcccggacatcctctgggttcatgaagacacttgccccggcagcccgagtttggagctccgaagcaccgttgctcggagcagcccggcggggagcaggagctcagggacaccgcacggggccgcggcgctggcggcctgggctcagccgcgcggggaccgaccggcggagagcggctcccgcacctccagcccctcgcgcgccgaggccgccggagccggggtggccgcgagaaagcagggaagccgcgcgctgcaagctcaagcctcgccgacgctagccccgaacacaaagcgagcgcccgcgtccgtgcgccaggcggtcggtccgtcggttcgtccccgggcttcgggcaaaggcggccgcggcagatgctggtggagacgccgctcgcttgctcgcccccgct

SEQ ID NO: 488182 - DNA, 614 bp, Homo sapiens
  misc_feature (4)..(4): n is a, c, g, or t
  misc_feature (26)..(26): n is a, c, g, or t
taanccctaaagataccttagggaanggaaacccaatctgtgatataatatgccacaaaaccctcccatggatggcatggtggggtggtgggggtggtgttgtaccttattaaggaggcacaactgggaatcagggctagagagctctctcaaaagaaaataatgaccctgggccctactttggccagtgccctttggtacagctcactgtcttgcctgtagatagggtgacctcctgatggaaggtaaagttttggctctcaatctgagagtagagagtgtaatacttacaaacttgagaaggaaagtgttttcccgtagcgctccaatgcaccctgcaaatcccaaaatgaacatcactcctcccaccacaaggaagagccaaactgggtcaaagccgccgagatcggtgatggaagagatgttggacagaactcctttttcattccatgcccacagtccaattccaagaaatgttattcccaaaaaagggagcgctttccagctgaagaggagagcgtgcaggaaacgttatttacgtgcaattacaggaccatataccacggcatctgcatcctacacaaagcccgagatggtgctcactgacagaatta

SEQ ID NO: 488183 - DNA, 176 bp, Homo sapiens
acaagagacagctgtaaactaccatagaagctatccatggattgatgtctcaggttattaaaggataaacctggttaatccaaatttaacatcttctttaaacagtctcttgagaagtacttttacctgaaaggacaggtatggagaaaaaatattcaatgttaacaactttaaaa

SEQ ID NO: 488184 - DNA, 337 bp, Homo sapiens
atagtcaagcctgtattagcaaaggctacaatgaggataaatccagtcagtcaccattgtcaaaggaaaataaatttgacaaagtagcctcacagcaaagatttgaaaggatggcttaaaaaatccaataatgatacaaaaagttacacaggcgtggtggcacatgcctgtgatccaagctactggggaggctgaggcaggagaattgcttgaacctgggaggcaaaggttgcagtgagctgagatcatgccattgcactccagcctgggcaacaagagcaaaaaactctgtctcaaaaaaaagttgaaggttgacaagtttaacatgtttcatgtc

SEQ ID NO: 488185 - DNA, 413 bp, Homo sapiens
gggctcggctattattatatcactgattattattattatccatgctggggtatagagtgtcaggacagagccctttcctctgaatgctttgtaaacatcagatccgtcttctttatatttatttatttatattatttatttttgagatggaattgcgctctgtctcccagctggagtacagtgtattttgagtagagacagggtttaaccatgttggtcgggctggtcttgaactcttgacctcaaatgatccgactgtctcggccttccaaagtgctgggattacaggcgtgagccaacgagtctggacattatatcatctttaaacacggctttcactgtgttattacacttctcagaaattgttacgcttccccgtcaattacaaatgtcatatcttatttgtcacctat

SEQ ID NO: 488186 - DNA, 110 bp, Homo sapiens
ccggacccaccccgggttgctccttttgggtctacctggacgtctgactgggggactcctctacgacgtcgacgctgcacggcctgaacggcttggacctggcctgtcgt

SEQ ID NO: 488187 - DNA, 401 bp, Homo sapiens
accagagatcaactggccccgatgggatggcaggcccgagagtgccgtcactccgcatgacgtagagcatgcgaagtgaggattgtagacaggcttgtgatgacatgaacctctcggagttccctttctccggtggcatctacgcgctatggtttctggggaagccctgctgccgatcgcagacaggcgagccaattctgaccgttgtaatcaaggcgttcagtgactgtgagttgctcaagcccaattctgggactgggaaagacggccatatttggcatatcgattctgcagcacggattgacattagatcgtaaagagcctagcccaggcctctggggcctaggctatcgccagagtcgagcaattgggctcaggcgagatacagagaggtggtcatg

SEQ ID NO: 488188 - DNA, 321 bp, Homo sapiens
  misc_feature (49)..(49): n is a, c, g, or t
  misc_feature (198)..(198): n is a, c, g, or t
ggacccggggaaaaaaattaaagaaccagccccctcgggttggagttcnggggggctttttttctttataaaaagccccccgggggcaaaaaaaggggggcgcagggggaagtttttttattctccctgaaggatgagggtttggccaaccccttcccccaaaaaagcctttcccttttcccggggtaattaattggnggggggggaaaccccccctccccggggtttttgggttgcccgaggatttttgggggggaccccgttttaatattttcccgggcccccggatgggaataaaggccccccccctgccctggggga

SEQ ID NO: 488189 - DNA, 163 bp, Homo sapiens
ggtgttcaggaggaggtcccttcccctctgagatcacacctggtggaaatggggtctgcctgattgctgttccctctgcgccctgcacaggtcctgggatgtcatggcgtaggtcacaggagacatttgctggctgatagatcaattaactacatcaagtgaa

SEQ ID NO: 488190 - DNA, 262 bp, Homo sapiens
aaggcgggcagtgagagagagacagagagagagagacagagacggagacagagagaaggagacagacagacagggaaagagacagacagagaaagacagagacagacagagggagaaagagaaacaggcagagagagagagagagagagagagagagagagggcgagagagaaacagaaagggagcactgggagaagaagggaccccaggtcagagagtggagccagtacttcgagatcatcgaggacctgagggctcagat

SEQ ID NO: 488191 - DNA, 370 bp, Homo sapiens
cacggtggcgggtgcctgtactcccagctacttgggaggctgaggtaggagaatggcatgaacctgggaggtggagcttgcagtgagcagagatcgcgccactgcactccagcctgggcgacagagtaagactccgtctcaaaaaaaaaaaaaaatacagttagccgggcgtggtggcacacacctgtagtcccagctacttgggaggctgaggcaggagaatcgcttgaacctgggaggcagaggttgcagtgagccaagattacaccactgcactccagcctgggtgacagagcgagactccgtctcaatgcactctattatgtgccaagcaataggactcagataccaaggagtgagacagtcactc

SEQ ID NO: 488192 - DNA, 249 bp, Homo sapiens
acctaggtcgcagtgtacaattggtgtgcgtatatggaactttacctgcaccttctcctggcagtatggttcaagtttaggtgtctggtcagctcattctcaccaatcctctccgtgacctcctcgggcacctaccgctgtgttgccactacccaaatgggccgtgcatcctgttatctgaccctctcggttaccgaaccctcccaaggtcgagtggccggagtctctgattggggtgctcctggtgcg

SEQ ID NO: 488193 - DNA, 146 bp, Homo sapiens
agagtgtgagattctgagcaaatgagggcaggtttgtaaagccctcggtaccggggagcagtcagacaacacaaggcggcggttattagagtagatccaggaggttgagttcagcccaatgtggactccgtccaagtgtggcgttg

SEQ ID NO: 488194 - DNA, 707 bp, Homo sapiens
  misc_feature (279)..(279): n is a, c, g, or t
ctcatccatgcttggagaaaggacaatgtccttcggagcccaaccaaccggctgcttctccttccagagccacgggtccaagggtggcctggcgttggcttcaggaatccaactatcaggcctacctcctgatgcttgggtgtgcttccctccccgtgcccgggggggtgcccatgcgtgggaaactgtgaagtgtgacggacctgcaccctgggggcactgccacctttccagctgttgcattctgtggctaccagctgcagggagaggagaccctcnatctggcgctcaaaattggggcgcaaccacacctaggtggcccaatgtccccccggtgtgtgcaacaacctggttgttcgaaaaaataaactccccccacgcgaaaggccttattggcccacttttgtggccacatttcacaatttggaattgtgatgtgggccaacccataatttccccaatcaacatattgcggctaatgcgccccttggtggtggtccccttggctaatctttctcgacttggtttcactctcgatgtggaatatggcgcctattggtggcgtggcggactggcccttggataacgtggggggctccacaattaggcccttttcgaccctttggtccccgtgattctcgcgggggtccaacttttggacaaccggccaatagccttagaccaggcggtgcctgccctgggctttg

SEQ ID NO: 488195 - DNA, 208 bp, Homo sapiens
ctttccggtatctatttttgccatacatattgctgtgttgcaaagtttgtataagacacacataccactactgagttataaagaattcaatcataaaggtcaaaatatattcacataatatggtttagtggattcattcacatttattaattcacagggcaccacattttaattaaattgggtaaggtatatatgcaaaaaaaaaaaa

SEQ ID NO: 488196 - DNA, 534 bp, Homo sapiens
  misc_feature (54)..(54): n is a, c, g, or t
  misc_feature (454)..(454): n is a, c, g, or t
acgcagtaaggagaagattgggactgttgactcccgcaggctcagtgcactgtngtctggtcctctgtgggcggacgggcaggaggcagtggttgctgggtgtactcagtgtgttggactgtatggaggagttggggagctaatgggtcataagtgtttgcatttctatcttttctgcaaatgaacaggccaaggtcctccaagagggagtgagcgggaataaggggctcagtggaaagcagttcagtggaggggcggtcctgtgagtgtgcaggaaagggagcagctcgggggcacagcaggattggcctagtgagcttgagccattagcctccgagtgctgttccccagcatcttgggaacatgcgtggagaggcggaaacagtgtctgttccacaacaggtgtttccaacctgtagatcataaacccctcacagcggcgcttgtctggggncagctcgtacccggtggtccagctgcacttgtagcttgcccatggtgttaatgcaccgctgctcacagtccccggccgtg

SEQ ID NO: 488197 - DNA, 400 bp, Homo sapiens
  misc_feature (30)..(30): n is a, c, g, or t
  misc_feature (72)..(72): n is a, c, g, or t
cagataactgaagtggagtgatggactccngattcggagagtagtaagacgtgaaaggaatacacttgctcnaagcaccatgaactccatgttcactgttggggagaagaaacaagaaaagtaactggctgtcacctatgagacccttacgtgattgttagttaagcttttattcaaagcaccctgcaattcacgacaataacacaattactgacccaaaaaaatcgttttaatggcctcaactgccctcaaccgacagaatccgacgttcttttttttctccgcgaggagaacatccatgaaccacccacaccgactcccccccaccacacccatcgccctagcgcccccccaacaaccccgccccccgctacatcccaaacactccccacaagaatac

SEQ ID NO: 488198 - DNA, 419 bp, Homo sapiens
  misc_feature (139)..(139): n is a, c, g, or t
attgtctgagggacagtgcggcatgccatgctacgcctactttggcctacttaaatctgtggtgtgaacgggtgcagaaacatgttatggttcatgcatcagtgtgagctgtggagcacagtcgtggggcatattgcanagctcaagggctgcaaagttgttggagcagtacggtctgatgaaaaggttgcctaccttcaaaagcttggatttgatttcttcttaatttatgcagagggtgagtcttaggaagaaaccttgaagaaagccgtctcctgatggttatgattgtaatagggataatgtaggtggagagtttcaaacactgttatcggccaggatgaagaaatttggaaggattgccatatgtggagccatctctacatataacagaaccggcccacttcccccaggcccaa

SEQ ID NO: 488199 - DNA, 326 bp, Homo sapiens
  misc_feature (176)..(176): n is a, c, g, or t
  misc_feature (198)..(198): n is a, c, g, or t
  misc_feature (202)..(202): n is a, c, g, or t
  misc_feature (206)..(206): n is a, c, g, or t
atgtaaaatttgtaaagtataaagtatataaagtagatctaaatcagacattcaatattttgttgaagctattgactgtcaattaaacattttcaaaaagtgtaatttattaaaatgtctcttttggtaaaattatgtgacttttaaagctaaaaataaacttaataagcttagtnaaaaaaaaacaaaaaaactttnaagnagtnatttttttaaaacatgggctggctttgtttaaagatgcaagtgttacatatggctttgtacattaaagttgaaaggggttttacattttccattaaaaggactttatcaaaaaatgaaaa

SEQ ID NO: 488200 - DNA, 496 bp, Homo sapiens
aggagaggagagcataacacctgccgcaagatggatgtgggcagcaaagaggtcctgatggagaggcccgcggaactactccgcagctccccggggccgatattggcataccctgacatgaaccagtgaccacctgaaaacgcacttcttatcgattgggtggtggtggatggtcctcatcgatcgtggtgattgtgggagccctgacctcatgggtctccacatgagccagaaacaacaccgcgcagaactggggaaccagggagactgaagccatcaggggggagcccgggcaggcccacagcaaaagcgccagggcacgcgagatagagcagcacatggagtacacacacggcaaacagtatacagatagagctcacagagagcataagcgggctgctgatgaaataacgcagaacgcgtgcatgcatcggaccaacgcaacaagccccgagacacctgccagaccacaccaagcaaatagtccaaaaacatc

SEQ ID NO: 488201 - DNA, 1159 bp, Homo sapiens
  misc_feature (1125)..(1125): n is a, c, g, or t
gcgcggcgggtcgccgcgccggcgtgtgtcttgttctgttgttgctgggccccctattcgttgctcggattctctgtgtggtcttcccttggtcttcgtgcctgaatgttctgtcgagtgccctccttgcttgtgtcgtttccgcttcggaagctccgggtgtgccaacgggttcttctgccggtgtctcctacggacctctcttgtgtgcactcttcggcgtgctccggggtctggactctttcttcgcggcggtgctggcagtactcgtggcactcatacgcgatgtttctggtgtgtgtgtgcgacacgcggctctcgctggtcaccaggtggggtctccggctgctgcgccatcaaccaggtcgctgtcatgttcgcctgtctgaggagatagacccgctggcgcgggttcatcttgcctcgcagggcactagggctcctcggtgcgggcgctcaaccagcagcggacgttctttgcgacgctacgagggtgcttgcttcgcgctcaaagagcaacgcatctccagaagcccttatagacaggggggctgcagctgcgtccggcgacgagctccagatgagtgcagaagggaccagacgcggcggtctatcctcgcgagacagtagccagagacgttgtatcctgcgggctgagccaccatcgtagatacgctggtgagacgggaggatcgtcgcaccctgaaggaggcacacgcgtcttggcgatcgtccgccgctcctacgcgagaagggtcgtccgagcgctgcaacagcctcgtttgaggtagaggtcgcgcccaggtgcatgactcctttcagctgctgggtaggagacacagccgccctaccactccctctctggaatggtaagataataaagtcacgctttctccccaccctcctgtgggccacacgagcacttgctacaacaccacacacacacacacacacacacacacacagacacacagacacatacgcacacacgtgcacacatgtacaacacggatacacacacatacacacacacacacactgcatatctgagcgcgcccctcgcactgggtctcacctgcaccttcttcaggattttatatgtgaagagatttttatatagccttnggtcctttttcaactttccttctttcctcgcact

SEQ ID NO: 488202 - DNA, 131 bp, Homo sapiens
gagagaagagaaggagggaaggatttaggatggtaaaagttaaggtacaagagacctccctgttcaaggcccctgacaagctgtccctgcccttacttccccttccctgctgcaggggttattgtggaagt

SEQ ID NO: 488203 - DNA, 252 bp, Homo sapiens
ctcagtaccgaggcacttcgccaagcctgacattacgcacttcccgttgtggtatccgggctgaggcgctggccacagcagaccatctatgtacggacttagtgaggaagaatggcatagagcagcggtcctctcaagagatgtgcaaagtcacattttcataataatcctaaaacctcatttgtcttcctcgctgattgtctcttttttttccagtgtagctttggcagatctggacttctaatttggaag

SEQ ID NO: 488204 - DNA, 194 bp, Homo sapiens
acattgatggctgctgactgcttagggtggtggttgctgaaggttgggtgacagtggtaattcagtgattttggttttgtttggtttctttaagagacaggatctcattctgtcactcagggtggagtgcagtggtacgatcatagttcactgcagccttgatttcccgggctcaagcaatccttctgcctcag

SEQ ID NO: 488205 - DNA, 519 bp, Homo sapiens
  misc_feature (514)..(514): n is a, c, g, or t
tgaggctacttagaggacccgcaggtggtggtgggtagctttcaatagatgtcaactcaacagaaaccacggcagaaacaggtccagttcactggcagcaatcagaggggagcagggtctcctccttgcaacttttcttcccattaggaaaataatttccagtccaagcaaggcagtctcagctcctgggccgcccatgagcccagcctgctgtttgaggcttctgatcacctacaatgcggtcttcagtttatctggctcgctacgggcagcaccctctctaccacttacctctaaaaacaccctggggccagacgtgttaaccccattcaatgaccacccagacagcaaacgttaaaatgtggctttggagagcacagccggtggcccccccgggggtgcagggggaggatggacatggcagtcaagctgccggactgggcaaatctccacccactgcacacccgtttccttagctgctgccctgcaaggaacgtgtccccctaaccacaancactg

SEQ ID NO: 488206 - DNA, 407 bp, Homo sapiens
aaaacagaaaatgtggtacatatacacaactgattactatgcagccataaaaatcaacaaaatcatttcctctgcaggtgtccatcaatggcagactgaaaaagaaaatgtggtacatatatgccatggtacactatgcagccacatatataagaatgaaatcatgtcctttgcagtaacctggatgcagctggaggccattatcctaagtgaactaacacagaaacagaaaacaaaatactgcatgttctcactttaaaatgggagcaaaacattaggtcatccatggacataaagcatgagaacaatagacactgtggactactagagagaggcaaaagcaagtggggcaaggcactaaacagctacctcattgggtactctgctcacagcaggtagacaggtgc

SEQ ID NO: 488207 - DNA, 478 bp, Homo sapiens
tccaagagagtgccaccccatccgtggggccatcattctggccaagctttccattgtccccgtgggcaaagggtaatgggggaacaagatcggccagcccccccctgtccccttcaaggggacaggccccttcgggtttgtgttggtacccctcatccctgcccccaggggccctgggattgtttccgcccctgtgcctaaaaaactggtcatgatgggtgggatcgatgactggttcccctcaggccgggggtgccctgcccccctggggaaatttgcccaggccaccttttattgccttttttaaggcctacaggtacctggcccccggcctctggaaggaggctggtttcccccagtttccccatccgggggtccctggccccctcgtccagacccccccccaagtttccgtgcagcgggctccgggtccccctgggggtcccacataggggtttttttccaaaaaaataaagtg

SEQ ID NO: 488208 - DNA, 602 bp, Homo sapiens
  misc_feature (98)..(98): n is a, c, g, or t
  misc_feature (104)..(104): n is a, c, g, or t
  misc_feature (107)..(107): n is a, c, g, or t
  misc_feature (142)..(144): n is a, c, g, or t
  misc_feature (155)..(155): n is a, c, g, or t
  misc_feature (158)..(158): n is a, c, g, or t
  misc_feature (176)..(176): n is a, c, g, or t
  misc_feature (180)..(180): n is a, c, g, or t
  misc_feature (215)..(215): n is a, c, g, or t
  misc_feature (273)..(273): n is a, c, g, or t
tggcattaaccacagttttttaattggggccctcacccttctggggtgaggccttgttttaagccctgacatgtgcttgggcactggggggcctgggnttttanggnggcctccgccctgatcagggaccctccccgctttnnngggcctttcgntgnacaaagcagcaaaacaanggcngttttatatgaaagattagaagcctggaataatcnggctttttaaatgatgtaattccccctgtaaaagcatagggattttggaaccagctgntggtggcttgggacatcagtggggccaagggttttttgtccctggttcaactgtgatttggctttcccgtgtttttcctggtaaacccttgtttggggttttgtgggtttgggtgggaaaagggccatttgcctgaatgtaacctgctagctttccaaaggccctgcgggcctggtttgtgtaagggtgtggacaatggtggccgccctgtgcctgcttgtgttgccaaaatgtccctgggtgttgagggggtgtttcagcctgcccccctcccttgttttataaaggctccttttgcccttttcaaataaaaatggagggcaagctca

SEQ ID NO: 488209 - DNA, 179 bp, Homo sapiens
cacttaatacattaactacaaagatactttcatcattagctaatgaaccaaatacaaagctaactccctccttagcataatctataaccgattgtactcccagagcaaccttgcttaaaacgtacttaccaacgctccactttaaaacagctaatgcaaagccaaattgaattaaaaat

SEQ ID NO: 488210 - DNA, 372 bp, Homo sapiens
tcaggtcataccgtgtcagaacctgtgtgggaatgtaaaaggtgagtataaaacctaaagcaaggagcccagacgcctggctttctgcagccagatcgtagttacatctgacgtcggtccgattaagctatctgacttttgcagagaacattcacaggaaagacacattcacaggtgaagacacattccctttcccaggaatgtgccgccgcccgatttttaagttagaagactctaagggaagtccggaccgctgcctactttccgagtggggctcacaagcggaatagagtcgggggcacacgcagagtggagctggctctgccacctaatttttagaggtggaggaagatattagaaacaaggccaggg

SEQ ID NO: 488211 - DNA, 894 bp, Homo sapiens
gaggagatatccatcaatagtcaaggtgaatatgaagaagcacttaagatggctaacattaagcaaggaaatcagctacagatgcaagtccacgaagggtaccatgttgtagatgaagcactccccaaaaatgtggtagaaaaccaagcggctgccaggacagggaagaagccacttgcacattattcttcactggtgagagtcttgggatcagacatgaagaccacagaggagcctgcaccagagcaatgttcttctgctccttgtgacacagaccagcctcaagacaagcccccagattggtttacaagctacctggagatgttccgagaacaagtggttaaggaaacggtggagaaacttgaacagaggttgcaggagaagcttgtcctccagaagccactcctgagttcctcacccacagaagtctcaatgcctatttcagaggaaaccctgtttttgccagagaaccagttcagctggcatattgcttgtagccactgccagaagaggatcgttggagtgcgctaccagtgtagcctatgcccatcctacaacatttgtgaagattgtgaagctggaccatacacccatgacactaaccatgtttgttacagctgcggagacctgtgtgatatcctctgaggccatttttcttactccaagtattccgctccctcgtctgctgtgctttggaaccaagtcaggctccaagaaacaggtggaccagaaccctggtggaagccgaaaaggcaggttgcgggtgagaacaaccgggaaggccagtccagaacttaaacccgtttaactccacaggaatcttgggaatcaacaggataatccaatcctgggcacgaaattgtgataaccgtgttttggacgtccttgcctcgc

SEQ ID NO: 488212 - DNA, 386 bp, Homo sapiens
agcgtcacttctcctgctgctcctgtttgtccgatgtgcacaaggccctctggaggcctggtggccacgaggtcaaagaagctgcatgttaagtgccactactcctgtacacgcaccatcgcctctgtctcctccgtgtctcgcgcgactgagaaccgtgccatcagcgcagtgtttcgcccttcctaggttcaaaagaagccgtagtctcatcaggcatcccataccttgtttttaatctcctgtttgctgagtgcactgactgtgacaccttcaccttttttgttgttcttgccaagctgcaggtttctaatgcacaaggctgattactgaaatttaagaaaaaggttcttttttcaataaatgctttattttaggaaagctca

SEQ ID NO: 488213 - DNA, 200 bp, Homo sapiens
tcgaagatggccggttgggtggtgtagggggtggtgatcatggcagcaggcctgctggaagactgggaggggcaccgttcctgccctcaccgccgccacctccggctaccactgagtgtcgcttgtgtgtggccctcgctcacccatgggggggcatctactccggcaagtcttcgaagcacggtcggcaatttggcctg

SEQ ID NO: 488214 - DNA, 413 bp, Homo sapiens
ctcgtgatccacccgccttggccttccaaagtgctgggattacaggtgtgagccaccacgccccacctattaatttatttattttgagacagagtctcactccatcatccgggctggagcgcaatagtgtgatctcgacttattgcaacctctgcctcccgggttcaagtgattcttctgcctcagtctcccaagtagctgggattacaggtgcccgcctccatgcccagctaattttttgtatttttagtagagacagagtttctccgtgttggttatgctggtcttgaactcccgacctcaggtgatccgccagcctcggcttcccaaagtgctggggttacaggcatgagccaccgcgcccggcctctcatattctttttatagtaggttgttgtgttggacttagttga

SEQ ID NO: 488215 - DNA, 137 bp, Homo sapiens
gggatgcatttctgtatacctgatctagtgtactggttgcataggtgagttctgtttgtgaaaatccatcaagcagcacacttaggatagatgctctttaatgcatgaaggttatactccaattccttaaaatgttc

SEQ ID NO: 488216 - DNA, 816 bp, Homo sapiens
acgacccaccgacggacgctgtactttcctcgaagacccctggagaggttcatcacggtatctatcctgcagatggcctcattagttctaagatgatgacttcgcaagattcgtgtacggtccccagccaagaattgagtgcgtaagagccaatacggtgacgactatgcctattaatagtagtgctaatgcactcagggagttttgacaatagtgactgaaggtgtgcggaacgtgaatgagtcacgtacgctgtccgtcagagatgcgctcgactgtgactagcgaagaatgcagcttaggcctagagtccaatgtatcgcagtgcttgaggcctggcaaatacgctgtaaacaccgataagactgcttaattagtcagtgggacatctgctattggttaaggtgccatgtgggtcgaatttctgtgggttccgtactattatcttcacatgagagttggaccacacatccaagtagaaattagaccaatagacaggggtatcacatgtttagtgcaatgtagtatgaagtgtaccaaaaagagttacctccttgggtctacgttatcaaatccttaccttccttatgtacgcagtcacattacaatcgccttccgaatagcaggtgtagcatggggggcatcatcaagtggaaacctggtaacagccaaattgttggttgcgtcgaattgcgttccccaagtagtgggaaaaaatggtcacgcggcactgtggagaaattcaccccggaagaagatcccactacggtgaatgggacgtgcataatgaaccacgtcggtcagtttcaaaagacg

SEQ ID NO: 488217 - DNA, 389 bp, Homo sapiens
caagcgataatgcggggggcggaaagtccctgggtgcctgccaggaacactcagctcataataacctcgcggaaaacaccgcggcctcggcctccagaaaccccgggcttgcgcaatcccctgcgggctgtgcctccctgggccccacgcagtgcactcaccagccctgggggttttccctctcttcccctcaggttcctgcacttggccatcatccatgaagagaaggcactgaccatggaagtggtccgccaagtgaagggagatctggcttttcttaacttccagaacaacctgcagcaggtgcgctgcttgcccgccccgtgcctcttgggttctgcctctctgaccccttgatggagctggatctagcacagttatttccaatg

SEQ ID NO: 488218 - DNA, 134 bp, Homo sapiens
atctgaggatcccttatggctcccaggtggtccagtgtgcagtggtctgaacttggcctgagggagaggatgggaaggcacaaagactggtgatcagaaagaccatgttagtggcctcccatggtcgctgggac

SEQ ID NO: 488219 - DNA, 840 bp, Homo sapiens
  misc_feature (840)..(840): n is a, c, g, or t
tacaggcggaactgccgggccatttttgtctatatggtgctctaccggcttattcctgtgtcggatcttcatcgggagagtgcgccaactgagatgtttgtgactccctcttgcttcctccgtgcttgtctcttccctctcgtttagtttgcctggggagcttgtactggagtagggctgcgtgcttcgcccgggatgtcccttcttgtcttgctgtccattgatgagtgcttgtaccgccatgagtcgcattgatctcctcccttcttcctcccgtactatattgggcatgaagtcgagtatgcgcattttgatggttggattggatgctgctgggcaagacaaccatgctgtataaacgtgaagtccaggggagatagtcaccaccattcctaccattggttggaaatgtggaaacaagtaagaactatgacgaacattttgtttccacccgtatgggatgtcggtggtcaagatagaataaggctctctggaagcattacttccagaatacccaggtcttatttggtcggtagcatagcacacgatcgtcggaaagaatcaggaagtagcagatggagctgcagcacaatgcttctggtcaccatgggattgcgaggatgccagtgctgctactttttgtgccaaccaaaccaggattggccaatggctagggcgctccgtgggactggccgattaactaagggcttcgggctcctcgtgaccggaccctggttttgtttcagggccctgtgtgccccaggactgggtctctgtgtttgcgcgcctcgcggggtgtcgttgaggctcccacggtgggggcgcggtttaccgggcgtn

SEQ ID NO: 488220 - DNA, 545 bp, Homo sapiens
attttgagacaatagttgcagaaagcactggaaataataaacttgatcttatacaaatcttctattgtgtggaaaatgttgtgaagggtgtgtaggtgtggtacatgtgtatgtcactaacaagtggcacatggtgacaaagtggtcactatgcttttgtctctcataggcactgactttttgttattatattatggtagctttcatttcctttactctttaacagtgcaggtggtcagtgacatcagtgtcactcagaagtgactgatttatcaatacatggacacaagtaaatcattgaccaaagctatgacatgtttcacaaagttttcctcttttgcataacacatgtcactggatgtacattcagccttgttctttgaatttggtgacactttcatggtcagaccgctgaggctggcatctcttgtgacattttctcttttagtttagatttcacgattgggccttagttgatcttcagcacagctgtctacttctctttattcctgggccccttgggtaattgtgacattcctgttttc

SEQ ID NO: 488221 - DNA, 318 bp, Homo sapiens
ttgtccgcaaccatgatcctccgaatctggttgggcatccagcatacgaccaatgtcacaacaatcagccctgggcagacacgtgcaggagggcgagactgagaaaagaaaaacaccgcctgtgaacacagtaaataaataaaaccctcaattagttagcccctctattctgtgcttactgcccaggaaatggtaccaatttttcagtgcttgacttgaccgcttcttttcccacaagcaagagagaatttaacactgtttcaaacccgggggagttggctgtgttaaagaaagacctataaatgctttcgacagtga

SEQ ID NO: 488222 - DNA, 1035 bp, Homo sapiens
agcgggcgcatttgtatcgcggcgaagcgcgactccaacatggtgtcgcagtcgcaaccgttctccacggagggaacgtaggccgttcccggtgccacactcgccgggagaagagaaacggacgcgccgaagaatagggtccgacggtctcgggagagagatcggaggaaggaggacgcatcgtagattccctcggacaacgacaggatggctccgcggagctcacaggaccgaacatagactccaggatcgtcacgtgtccccgttcgtcgagctgcacaggaagacgacgacgatgacgggaaaccgaaaacgaagcaactcgaaatagagaccacgcaaaggcaaccggcgacggatatactcgaaagggaaaccaccttacgagggcgctaataaccactgacggaacgatacttctggacattgcttgaagtaagactgggattctggccttcctgttcgacttccacaaaagaagggtataccacaggtgtgcatggccgtcttggtgccatggtgacgcgtgattgccctataaagatggtcgtcctcaagaataggagaggacagctacgacggcaggtacgactgcacagtcggaacagaagggtggaatgtccttgctagagagcacttctggcgagttatcgactttgctatgcatcaatactagcaagttagatcttgcatatggcagtggatttctatgtttattccacccgccttccgaggtccttgtgtgggtccatgtaaggcaaagatgtggaatttgtcggctattttattgatacctttttaaaggatttgaccatttgccaataggccacccacgtggcaatccttcgaggtatttctatcacctttgccgttgtgtacacctgtctgagagaaacctccttcgtcacttaccactggacttatttttgccgggctaaaaacgtttatgccgtagcctcgttcacaatccagatccgaacccgggtttaaccaatctttaccctgtcctgcattcgtttcaccgcaaatctagtc

SEQ ID NO: 488223 - DNA, 271 bp, Homo sapiens
  misc_feature (8)..(8): n is a, c, g, or t
  misc_feature (31)..(31): n is a, c, g, or t
  misc_feature (42)..(42): n is a, c, g, or t
  misc_feature (55)..(56): n is a, c, g, or t
  misc_feature (90)..(90): n is a, c, g, or t
  misc_feature (93)..(93): n is a, c, g, or t
  misc_feature (100)..(100): n is a, c, g, or t
  misc_feature (130)..(130): n is a, c, g, or t
  misc_feature (157)..(157): n is a, c, g, or t
cccgggcnccgcctcctgcccccgcggcggnccagaggggcntcggcagcggtgnncagggcctcggtcggagggaaaagctggctgcgngcnccgcggntaccccgcggcgggcctcccggcctccctngcaaggctgccgaggcgcccggggtcntggcgggggtcgggggcccctgcgggaggacgcggctgctctgctccctcaggaagttcaacaggaacggtacgaattctttccgcagggcccggagtgagctcagcgcggccg

SEQ ID NO: 488224 - DNA, 407 bp, Homo sapiens
tccgatctggcaggcttagatgtactcagtcacatgccaaacaacatacctccccatgccactttctcagattgctctctcctctggtctaattggtttcttctcacacagttccatagtgcttatggctccaagggaagatacgtctccagagagccatggaccagagtgctggaaaagcttggggcagacaggggtctccagttggaaggtcagggtttgaactggggtttaaactgaacccaaaagccaggaggaaggccaatgcctggcatgagagggtgcgcggcatcttttgcctgagttgagaacctgccttggtacctaaacggtgggttccacccttaagaattcccgcaaagcaactagtggccctacctggccatgggatgcggccaagcatgcca

SEQ ID NO: 488225 - DNA, 219 bp, Homo sapiens
gcggagctactctatgaggatcccccgtgtactccagcactttgggaggcgaggcaagaggattgcttgagtctagaagttcaagaccagcctgggcaacatagcaagacctcatctctactaaagaaaaaaaaattagctgggcgtggacaccccacaccgtgtagtcccatgttactccatgcaggctgaggctggtagggattaacttgatgccca

SEQ ID NO: 488226 - DNA, 299 bp, Homo sapiens
  misc_feature (45)..(45): n is a, c, g, or t
  misc_feature (115)..(115): n is a, c, g, or t
  misc_feature (132)..(132): n is a, c, g, or t
  misc_feature (136)..(137): n is a, c, g, or t
  misc_feature (139)..(139): n is a, c, g, or t
  misc_feature (144)..(144): n is a, c, g, or t
  misc_feature (147)..(150): n is a, c, g, or t
  misc_feature (155)..(155): n is a, c, g, or t
  misc_feature (170)..(170): n is a, c, g, or t
  misc_feature (175)..(176): n is a, c, g, or t
  misc_feature (188)..(190): n is a, c, g, or t
  misc_feature (241)..(241): n is a, c, g, or t
  misc_feature (252)..(252): n is a, c, g, or t
  misc_feature (261)..(261): n is a, c, g, or t
  misc_feature (264)..(264): n is a, c, g, or t
  misc_feature (270)..(272): n is a, c, g, or t
  misc_feature (277)..(277): n is a, c, g, or t
  misc_feature (286)..(286): n is a, c, g, or t
  misc_feature (291)..(291): n is a, c, g, or t
gcactgatacgcagagtcctcaaacatgccacgccaacttttcanctgaatctcttccagaacaagcactattctataaagaatatgttatcccttatttaaaaaaataaaagtngggggagggggaaaaanattnncntgtgntcnnnnctacnacctttctgtcggcnaaatnnttttggtttaannngatgggttttttcccccattttaaactttttcccccttcccgagtgacctnatgacttgttngagtgatgngtntaacannnaccanagtgggtgnatggntttgtttt

SEQ ID NO: 488227 - DNA, 153 bp, Homo sapiens
ttgggggggggggggggccccccttttttaaaacccggggtttttggggcccccgtttttttttccccttaggggggggttggggggggggcggggtttggacaatttttcatacccccttttttgcccttttacctttttccccccccccga

SEQ ID NO: 488228 - DNA, 412 bp, Homo sapiens
  misc_feature (56)..(56): n is a, c, g, or t
  misc_feature (58)..(58): n is a, c, g, or t
  misc_feature (62)..(62): n is a, c, g, or t
  misc_feature (68)..(68): n is a, c, g, or t
  misc_feature (72)..(73): n is a, c, g, or t
  misc_feature (85)..(85): n is a, c, g, or t
  misc_feature (87)..(87): n is a, c, g, or t
  misc_feature (120)..(120): n is a, c, g, or t
  misc_feature (148)..(148): n is a, c, g, or t
  misc_feature (154)..(154): n is a, c, g, or t
  misc_feature (173)..(173): n is a, c, g, or t
  misc_feature (187)..(187): n is a, c, g, or t
  misc_feature (200)..(200): n is a, c, g, or t
  misc_feature (221)..(222): n is a, c, g, or t
  misc_feature (245)..(245): n is a, c, g, or t
gcggctcaggttcaactggatcagatcctgctgttgatgctgtgaggtcggccgtntntggnctgggngtcnnccgggactgggnanctgagcagatgacaccagcatcttcatgatggncacagttgtgggagagccagccattgtnggggcngctccacaggtaggactcntgtcctgagcagcncacatcatccagnacaatgggtcctgagccctgnncaaaccgggcatttcctggggcngacgtggcccagccacagcccagctgcctgcagaccacattggcatcattggtatcccagctgtcatcacacacggtgccccaggagcctcggtataggacctctactcggccctgacacctgtcacttccattcaccagcctcagggtcaaactggattcagatcc

SEQ ID NO: 488229 - DNA, 819 bp, Homo sapiens
agagtagcagaagatcagttcaccgcaatgagggggcagagaattccggcacagaacgggagtgggatggtagcctccccaagagcagcgacgagctcagggacaccagtgtccctcatgatccggcagaccataccgcatccaagaggcctgctctctgtttccagctcagccaaggctgatggcggaagaagagcagactgacgtacgagtctggggaagacgaggaggatgaggaggaggaggaagaggaggcggaggactatcaagccatccgacggcagtgaaaacggaacatggagacagagcatctggactacgtgtgacagggcccaaggcatgggactacccatgaaaccggaccagacctggatgtactggccgtaatgagggagtccggggactacacacaatatgacaaccacagatgcccgggaatggcccgtacgagagagacctctgaggagaagcactagagatacccacgaccaaacgggatgaacgacttgaacacatacgcaacatgagctgagaccaatgcatgacatggatgcatgccatcaggagtccttgagaggggtcacgagacaataccccaaagggctataccccatggactacggaacaacaccatgaaacaccaagcccaggaaattacagccacagtggagctgtgaacaaccacaacaggcacatcacaggcaatgaaaaacacggtcaaatgcccgtgaaaatgacaccatgtggcaataaggaggaagcacgaagggacaaacaggaacagacaacgcatgtcacaacatgaatgtggaagaagga

SEQ ID NO: 488230 - DNA, 865 bp, Homo sapiens
ggacgcgtgggtcgacccacgcgtcgcgcgagcggcgcctatttatttttttttataaattttttggacatggagtttcactcttgtatgcccaggctggagcccaatggcgcgatctcagctaccgtgcaacctatcacctcctgggtgcacatcgatcttcctgtaggttcagcgaatctcagggggagctgtataaattacagggacagatgcgtacacccattgcctgtgtgcctcatatgttcgtgaccttatagatataacaaaacagtgggtttacaatcaacagatgtggacacggctgtggtctcctccaactctccagaacctcgagggtgattccacccgcgccttcagactccgcaaagagtgtctgcgatcaccgggcgcgcgcagggcgccgcgcgcccggtggcccccaaaagtcgcaaagatgtacagggtgctcaccagcggggcgaggcgcagagcacaagaacacgcacatacaagaggcccgcacgtccacggtaatcgacccacaccgaacgacagcaccagcacagaagagcagagaagcgcgggcgagagacacgcgcaacgagcaagaaaaacaagagcggccacacccgctccagcggatcaggccagccgggcggcgcgagcaccgaagaagaggacagcgggagggaggaagaaagaccgagagacgccacacaggcacgacgctcagcacgagcggcgacagagcacacgaagccgaacaccgccgagtgcgtggcacgacatccggggcaggggaactcagggcggcacgagccacagcccgacgccgcacgccgcacccccgtgacgcgcggcggcccgcacgagtcgccgacaa

SEQ ID NO: 488231 - DNA, 530 bp, Homo sapiens
ccccacaaagggaaagcccccctagaatgcaaaatttgccccaaactttttatgtcccccaaagcccccccaggtttcaaatttccctaagtgtcagttcccacgggaacccctttgcctccaaaatggcgatcgtttattttaaaatggtctctgggttcattctcccttaaacccacagtgaaaatcctttaaaaatttaacccttttaaccggccaaaagtcaccaaccaccatttttttatttccccttaaaaggtgtcaaatcaaaccctgagcttttttttcccggttttgcaaaatttccccgtaaaaaattttaaaccccccctagttaaaatcttttttttttcccaaacggattaattttcaatttctaaggccaatgcccccttcaacaaaaatttttgaaaagctttaaaaccccaaggtttaaaaatgcttttctgaaatcctgttttcaaaaccccccaaaaaacccgtgtttttggatccttaaaaactttatgaattaaccctttttttgggcc

SEQ ID NO: 488232 - DNA, 475 bp, Homo sapiens
ctactactactaaattcgcggcgctcgacgttatgagatgacttttagccacaagattccaaaagttagtcttggcaaaatggacattctttgaatgttgttggagctgaatggctctagatggtgtgctgagcccttcccatgagatgatgttccagaagaatcccagagatatgaggccatcctcttcagctccacaccaaagcaggcatccactcaaggccagctcaacacttcagctccacaccaaagcaggcatccacccaaggccagcccaacagttgaacccttccactagtaaggagcaaagcagcctggatcatggctgcacagttctcgggagaacagttgtctttgttttaatgggctgtctgtggccctgcagcttctctctactggccccaattctgagaatgcagttttaaaaatcactttttggaaagaaaaaaaaaaaatcgacgcgccgaatttagta

SEQ ID NO: 488233 - DNA, 369 bp, Homo sapiens
aaacttttggaggtcaaactgggggagctccccaactggatcttaatgcgggacttcagtcctagtggcattttgggagggtttcaaaaaggttacccccggtcctccaacaagtacatcaatttgaaaaaggggagcatttcggggattaccatggtggtggcatgctacgggctttttagaaactccttttcctacaagcatttcaagcgggagggggtccgcaaataccactgaaaagggccccttttgccccccccccccccccgcccttgggccgagcccctccgtgaggaacccaatttcaatcgttggtgaatccttttatatcctaataggaattaacctccaaataaaacatggctggta

SEQ ID NO: 488234 - DNA, 196 bp, Homo sapiens
gtcgaccttcctgtagagaattagtggccttaaataatcaaaaggaatgtattgaattttcacaagaatccccgacaaaggtctaatatccagatctacaaggaacttaaacaaatttacaagaaaataaaagcacattaaacagtgggcaaaggacatgaacagacacttctcaaaagaagatatttatgtggcc

SEQ ID NO: 488235 - DNA, 401 bp, Homo sapiens
  misc_feature (175)..(175): n is a, c, g, or t
  misc_feature (255)..(255): n is a, c, g, or t
  misc_feature (270)..(270): n is a, c, g, or t
  misc_feature (279)..(279): n is a, c, g, or t
  misc_feature (324)..(324): n is a, c, g, or t
  misc_feature (332)..(332): n is a, c, g, or t
  misc_feature (361)..(361): n is a, c, g, or t
  misc_feature (388)..(388): n is a, c, g, or t
gaccttgagccctcgaaagcgacatggcggttctcttaaagctgggcgttctctgcagtggccaaggagctcgagctctcctactccgaagccgggtggtcagacccgcttatgtgtcagcatttctccaggaccagcctacccaaggacggtgtggtacccagcacattcaccntgtcaccaaagccaccaactctggttccaaggctgcatctctccactggaccagtgagaggggttgtcagtgttctgttnttgggggctgatccntgcttgggnactttggaatcccctgcttctgtggtggaactactcttctggctngcaagccntcaaccctgcaacaagtcaacttgggggnctttggacaaagttgggttacccgacntacggttcaatgg

SEQ ID NO: 488236 - DNA, 195 bp, Homo sapiens
acactctcgcgccctggctaattaatatatgctaaagtgaagaagggggcaatactggagggaggggagaattggggagaccatttccctgtacttccttcacagataatggtaaatcctgggcacctaaggagtaaaagtcaaaccattcacttctcttaccagccttactttgagattcatcagaataggatt

SEQ ID NO: 488237 - DNA, 141 bp, Homo sapiens
ggcgcatttcttctcaattaacccatgcagcacatgctacgcatctgctgagtccgtttagaagcatttgcggtggcttagacttcagtgcagcggcaccaccatggctcactgcaactttgaacttctggctcacgtgat

SEQ ID NO: 488238 - DNA, 152 bp, Homo sapiens
aggagtacactacaaatgggatatggggagtgactcaggaagtgaagaatgcacaagaatggatcacaagatggaatctatcaaaccctagcctggctggtaaatttttttttttttttttttttttttttttttttttttttttttttttt

SEQ ID NO: 488239 - DNA, 1520 bp, Homo sapiens
  misc_feature (1163)..(1163): n is a, c, g, or t
  misc_feature (1192)..(1192): n is a, c, g, or t
ttttttattatctcgcgcggggaggttgacacgccccttttttagatcaggtggtttgttgcggtacacaaacaacgtcgctttctgtggacaacaccaccaatctttggtggggggctctttctcgccagcaggcgtccgcataattgtttggtatgatcgtgctgttgaatcacaactcctgtgcaacaccatctattggtgtgttatagattgaaagcgccgctttgtttcagattcccacgcgggttcccagacgaattttggttacaaaacgcccaccttggggggaggaaattattttacaacagacgtggggtggttgtagcatcgaataaggttggataaggtgagtcattacttgccccacaaacgtgtgttatggtcgcgtggtgatagagccccccaaccaatgtgtgtgaagacaaaaagggggggttgtcccgccgcctaatgaatgttgccatgtcccggacagcattgtttaaaaagggggtaaatagacctgtctttggtctcttggaaagacgatatgggggccctctgttgtcgtgctgttcttccccgccgcggagttaataaaagcctcgttgttcttcttgtggcgcttgggggaaaaaaatacctgcccctgtatcccccgcagagaaggggaaaagggaaaaagtggggaaaagagggagcctcgaagatggaaagacattgggagccccacacggtgatgagaaacttcggttgggaaactctgtggagatccccccacattccacggggaaaaagacccggggcggcccacacgtacacacacatgggagggaaagcgcacatattttggagaggagatcgagatggagaaacacatcatcttgctccacagagagggtgggtggttctacacaggggttctacagaaaccctctgttataatgggggggccacaggtgagatatatacacacacgtgcaccttggcgtgtgcgcacatcttataatcggggccaacgctataggtgtagaatggagaggtgtagagaggagcacgcgctagatatctcacatataatatatggcgtccacactatactgtgtgctctctctgtgtgtttgtgtgttgtttataatataaacctcatatatggtataggtgtgtttgtataaaagagnggtataaagtgagaagagaatatataacngcacacaatatataagaaaggcttctcgagatttgtggcccctcggtaatgtatatgagatgagacttcacagtggtgccacacagagatgaaagtcttataataaccctgtgtaaaactatcacaagaaagttcccctagcacatttttaaggccacaaaccttgtaaattgagcttcacgctaatggaacgtggagcaaagcttagacctgaaaatgctaaggtaataatgtaattgggttcacagtgtatgacccttcattgttaagctatgaaagttaaactctgtatttaactggccatgagggaaaaaaaattttgtagaga

SEQ ID NO: 488240 - DNA, 861 bp, Homo sapiens
gctctttcttcctgtctgctgtggaaagatgggtcccgcaaggaaggtaccggctctatgccacctcttccagctccaccgccggcgcagcagggaacggcaaaggcacaggggctcgggagatcagccgtgaacgcaatgtgcagatagatggccttgtggtataacagatactcaaacgattatcaagacagaaggacaaggaacctgaagtggtcaaggagtgctttggggtctggttgtagaagatcggtttgaaaattaaccaaggttgtttccttttccctcagcacacagaggaattgatgctgacttgggattgaagtccaaattattccagaatggacacatgattgcggacgcctttcggccagttgtacacacctttgtgatccattccttccacgggtgggctggccattcaggtccaaaattactaagttggcctccatttccggtatcaaccggggggacacttcccgtggaatctaccaggtttaaaggtttcaccaaggcagtgacaatttgacaaagacaatcgtgggcgtgctccattatattgatctcccataaaaaaatgtggcccagggatctcttcttgcacataaaggggaatacaagcgtgacttcataaacgtgatggcaatgtgtgtacaaggaaacggattttcccctcgtgaagccatggaaaaagcaaaatattaccttggaggtaacatgtttgaacgaagtggccgatgtgtacattaacaactcgcacattctgatcagtggcctagtgtgggaattggaaaagaagtcacgtggtgggataacattggatttggagagctgcaaggagcactatgtggggagcactac

SEQ ID NO: 488241 - DNA, 404 bp, Homo sapiens
tactgagaggatgctcctaaatagccagaattcattttatattaaaaaaaaatctggacggacgcagtggctcacacctataatcccagcactctggggggctgaggtgggtggatcacctgaggtcaggaatttgagaccagcctggccaacttggtgaaaccctatctctacgaaaaatacaaaaaaaaaaaaaaaaattggcccgtttggggggccccatccccgaggccctagtttttgggggggttgggccagaaaatttgcttgaccccacaagggggggtttgtggggggcaaagatcggcccattgcactcaaacctgggcgacagagggagactttgttttaaaaaaaaaaaagggtaattaaaaaaaagggttgttttttgaaaaggaaaaaaa

SEQ ID NO: 488242 - DNA, 130 bp, Homo sapiens
agagatccttatgtttcgaccgttactaggggacctgtgaatttattacactggtgctggtactagcgttacgcacagaaatgctagtcacgttaatgcccaaagtgagcctggtcctagggtctccaag

SEQ ID NO: 488243 - DNA, 1040 bp, Homo sapiens
  misc_feature (12)..(12): n is a, c, g, or t
  misc_feature (32)..(35): n is a, c, g, or t
  misc_feature (38)..(38): n is a, c, g, or t
  misc_feature (56)..(58): n is a, c, g, or t
  misc_feature (88)..(88): n is a, c, g, or t
  misc_feature (90)..(90): n is a, c, g, or t
  misc_feature (94)..(95): n is a, c, g, or t
  misc_feature (107)..(107): n is a, c, g, or t
  misc_feature (113)..(113): n is a, c, g, or t
  misc_feature (124)..(124): n is a, c, g, or t
  misc_feature (134)..(134): n is a, c, g, or t
  misc_feature (142)..(142): n is a, c, g, or t
  misc_feature (153)..(153): n is a, c, g, or t
  misc_feature (179)..(179): n is a, c, g, or t
  misc_feature (189)..(190): n is a, c, g, or t
  misc_feature (208)..(208): n is a, c, g, or t
  misc_feature (218)..(218): n is a, c, g, or t
  misc_feature (226)..(226): n is a, c, g, or t
  misc_feature (291)..(291): n is a, c, g, or t
  misc_feature (293)..(293): n is a, c, g, or t
  misc_feature (309)..(309): n is a, c, g, or t
  misc_feature (321)..(321): n is a, c, g, or t
  misc_feature (351)..(351): n is a, c, g, or t
  misc_feature (356)..(356): n is a, c, g, or t
  misc_feature (391)..(391): n is a, c, g, or t
  misc_feature (395)..(395): n is a, c, g, or t
  misc_feature (399)..(399): n is a, c, g, or t
  misc_feature (433)..(433): n is a, c, g, or t
  misc_feature (442)..(443): n is a, c, g, or t
  misc_feature (449)..(449): n is a, c, g, or t
  misc_feature (453)..(453): n is a, c, g, or t
  misc_feature (520)..(520): n is a, c, g, or t
  misc_feature (541)..(541): n is a, c, g, or t
  misc_feature (547)..(547): n is a, c, g, or t
  misc_feature (553)..(553): n is a, c, g, or t
  misc_feature (575)..(575): n is a, c, g, or t
  misc_feature (694)..(694): n is a, c, g, or t
  misc_feature (881)..(881): n is a, c, g, or t
  misc_feature (936)..(936): n is a, c, g, or t
  misc_feature (943)..(943): n is a, c, g, or t
  misc_feature (965)..(965): n is a, c, g, or t
  misc_feature (977)..(977): n is a, c, g, or t
  misc_feature (1026)..(1026): n is a, c, g, or t
cgagcctcgcgncccggggcacggcgccgccnnnnccnccccggcagtgcctcccnnncccctgccctccgctgggacatggcctgangncccnnccgccgcccggnaccccncccccacgctncccccggacnctcgcccnaggaccgcggngtctcttcccggccccgccgcccgcnccggcgagannaggcccggcgggcaaggnggcggcagancgagggangcctggcccggcaccggggagaagggtgcggcgcaccgagtttcccaccttttatcctggcccanangcggctggggcggacnggacctctcgcnctctgcctcctcctcttgcttcatggagcnatgcncctgggtgggggctcccgaaaaaagctggcctgcnggcnggcnggacgcgctgcgcggacgggacggggcgaaggangccggcagnngaggangaancggcggggcggcggcggcggcggcggcggcggcggccgagagaagaactaaaggtattccccgggcngctggaggacttaattgagcngggacncgagtnctccggtatcccagcaaccacnggagcagtgaggtaatggaggaagaatgtagggagtcctccggtggaccacactccttctagcgagccgcggaaaccatagagatcagggctcagccggagggccggcccactgctgtnacgtggcctccatccgtgcgctttattggctggtgctggctttacggggttgaattttggacgctgcctgccattcgtgggaccgagtttcaggcagctggaataaagagagatatcgggggaaagccgcgagaaggccagcgtccctcgctgggagcagagctagccgagtagggcgcccgctgtnaaactggccggcgcagtgcacgctgggccgccccggagcgatcgcagaccccgtngggagtngtagtccgggacgggcccgcgnatcgtccgcgangcagctcgggatccgggtcggggtgtcggccgggttgctgccgggcacntccgagcgttacca

SEQ ID NO: 488244 - DNA, 275 bp, Homo sapiens
ggggggggggttttcccctaaaggggtggctttttccctggggcccaaaaaaaaccaaggggcttttttggacctttggccctttttccccccccccctttgggaaaagcccccccattttttttccccttttttggggggggtcccccccccccccccccccccggggtcctttttttgggggttgggacccccccgggggggggggggaggggcccccggggggggccttttttcttttttttttttttgaaaaaggtcccctttttgggcca

SEQ ID NO: 488245 - DNA, 499 bp, Homo sapiens
  misc_feature (17)..(17): n is a, c, g, or t
  misc_feature (200)..(200): n is a, c, g, or t
  misc_feature (223)..(223): n is a, c, g, or t
  misc_feature (240)..(240): n is a, c, g, or t
  misc_feature (277)..(277): n is a, c, g, or t
  misc_feature (281)..(281): n is a, c, g, or t
  misc_feature (324)..(324): n is a, c, g, or t
  misc_feature (387)..(387): n is a, c, g, or t
  misc_feature (399)..(399): n is a, c, g, or t
  misc_feature (466)..(466): n is a, c, g, or t
gtatgatcatctgcttnaatgtatgctgaaagatgcgacgacgacttctgttagcgtcgacagtttcggtttccagtatagcgcactcgtacacacgtagctcacgtccggtgtagtcggtactcgtacgctctgctgtagtatatagagtgacatgatctcgatgtacaaagcacgtgagtgcgaggcacggaagcagnttgtctacgtgagcgtctcgcangatagtcgtgttagtcntgcgatacactgttgattatcgataacaatgtgagcnatcntagtatgcggcggagagcgtgctcacgcactcgtctacgagcnatgcgttaacatagttaaggaacgaggttattgagtagagatatggtcgtgagctgtgtctgntagcgtagaganatacggtctgacggatacatacacaagtgtctcatactgcgatctgtcgcgtagcgtcgcaatgtanctagtcgtgagtcgagtgagtcagatccgagcc

SEQ ID NO: 488246 - DNA, 369 bp, Homo sapiens
  misc_feature (31)..(31): n is a, c, g, or t
  misc_feature (245)..(245): n is a, c, g, or t
  misc_feature (297)..(297): n is a, c, g, or t
  misc_feature (304)..(304): n is a, c, g, or t
  misc_feature (343)..(343): n is a, c, g, or t
  misc_feature (354)..(354): n is a, c, g, or t
  misc_feature (360)..(360): n is a, c, g, or t
gtctaatttataagaggaacacactgtgagnttaaaaaaaattctcatagacataaagtgatataaatgaggatacacatttattagtaatatttaaaaaatcagttcatcccaaagctagcaattactttttatttagaaattttactttaatcataatttgatttttaaggtattttaaaataaatattaaacataaaagaatgattttcagtggctgtagttcaaaactgctgtggaatagnaattagtattgtgacaccatttaagtgccagttttaaattaaatggtgttgngtttccngctctcttagtttttattgtgggccaaccccccccaaancgtggagcttnaaatanccatttatt

SEQ ID NO: 488247 - DNA, 221 bp, Homo sapiens
  misc_feature (24)..(24): n is a, c, g, or t
  misc_feature (26)..(27): n is a, c, g, or t
  misc_feature (34)..(34): n is a, c, g, or t
  misc_feature (51)..(51): n is a, c, g, or t
  misc_feature (104)..(104): n is a, c, g, or t
  misc_feature (109)..(109): n is a, c, g, or t
  misc_feature (130)..(130): n is a, c, g, or t
  misc_feature (132)..(132): n is a, c, g, or t
  misc_feature (139)..(140): n is a, c, g, or t
  misc_feature (169)..(169): n is a, c, g, or t
  misc_feature (174)..(174): n is a, c, g, or t
  misc_feature (191)..(191): n is a, c, g, or t
  misc_feature (200)..(201): n is a, c, g, or t
  misc_feature (205)..(205): n is a, c, g, or t
gtcattactgtagagtgtaagttnanntagtttnaagacagattgttaccnttgctattaatatatatcccctatatttatcaccacaggataataatatttcnggtanacttcctatttataaggtgangntattccnncatcgcgtttttctattagaaattatganccttntgtgaaaatatcccatncaagaattnncccnaagggaaaatataaac

SEQ ID NO: 488248 - DNA, 1290 bp, Homo sapiens
  misc_feature (1290)..(1290): n is a, c, g, or t
gtagatttgtctgcaggacagctcttggttatggtaacaagtggacgctcgagtcccagaatctttcccaggttagccccagaaagaccagaccaactctgtcacagtgtgcagattgtcactggcaatagggaagcatacttcacttatatatgttcttatagtttcattgcaccttcaatgtgcccatgcatcgagcatgttagcgaatagcatggagtactaaattaaaactcacagactgggcattaatgagcatacatggatcatttgacacttaataatcataagctttttcgagtgacttcgtagtctggggaatggactattgaaaagcaatttgtgaagtggggctattccttgttaatcttaagagaagaatgtattgcttagctcgggaggcttggttggagcaaatactaaagtagaaagctcgtcacgacgtatcttcccaaggaagattcaagaatcatatggtctagaagttcaactcgggaggaaatgatcacattttaacgcgtttcaaagattttccaattttctagattggtgtgggccaaaaattatgagcacttcttgagaaacgagtggttaaactttggggaacctttgctgaagcgaagattcggtcccgagtggattttaacgcatctttgtatggcaaatacccagtttttccttttgtctgcacggagacataggggcaatctcagcatttggatagggatccactggcggaccacttttgaagaatggggttcccagtaattacttgacatatatacaaattcgagaaacaaatagggtggtgcaccctttttaacacacgggaagatcctcgggcccgcaatttatattgctgtggggacttacttaacccggtcctcccagaactgggaattcaggcgcgtggaaatttgcaaaacaaggccttatcggagttttggcccttgtataattctgcgagaatagcgccctgcaatttgcttaaagaattcttgcgtccaacccggggatattggtaggttccctggggggaataaagcttccctgaatacaacgcgtcttacctgcgcctgatgcattgtgtccaccttggaaaaacttcggggaggaacaataggcaaggttttaaccagtgtggagttgacttggacgaatccactagagaaagcggggttcacgccatcaagagatgacattttcggggacgggctttatattctttgaactttgtgcttggatggttcggcgaaacacacagattgtttgaactatggggcagcggcn

SEQ ID NO: 488249 - DNA, 285 bp, Homo sapiens
actctagaggacacctacatagtttcatggtatctacccagaagtatatattaattataaaggaaaatagagtaactttacataggaagaagtgacagatacagctattgtttctagagagatcacaattaaatattaccagtgttcatatacactgtaaattctacatacatgtgttagcatgcaatggagaagaacatagcagcatttatggttatattattgggcaaaccgattagagtccagagtctaaccacttagaaaatctaaagaaaagcaacaacg

SEQ ID NO: 488250 - DNA, 336 bp, Homo sapiens
gcccagactattggtctggaagatgcgctgactgccagcctgatgcttaatgcgttgttaattgtgggcgcgctgctgggattagttctgacgcacctgctggcacatcgcaaatttttgctgggaagttttttgctgctggcggcaacgctggtagtcatggcctgtttgccttccggcagttcattaacgctgctgctttttgttctcttcagcaccaccatttcggcagtcagtaatctggtgggcattttgcctgcggaaagttttcctactgacattcgctcgctgggcgtcggttttgccactgccatgagtcgacttggcgcggcggta

SEQ ID NO: 488251 - DNA, 1391 bp, Homo sapiens
  misc_feature (5)..(5): n is a, c, g, or t
  misc_feature (10)..(10): n is a, c, g, or t
  misc_feature (41)..(41): n is a, c, g, or t
  misc_feature (51)..(51): n is a, c, g, or t
  misc_feature (53)..(53): n is a, c, g, or t
  misc_feature (156)..(156): n is a, c, g, or t
  misc_feature (246)..(246): n is a, c, g, or t
  misc_feature (256)..(256): n is a, c, g, or t
  misc_feature (259)..(259): n is a, c, g, or t
  misc_feature (274)..(274): n is a, c, g, or t
  misc_feature (288)..(288): n is a, c, g, or t
  misc_feature (290)..(290): n is a, c, g, or t
  misc_feature (293)..(293): n is a, c, g, or t
  misc_feature (298)..(298): n is a, c, g, or t
  misc_feature (311)..(311): n is a, c, g, or t
  misc_feature (317)..(317): n is a, c, g, or t
  misc_feature (334)..(334): n is a, c, g, or t
  misc_feature (346)..(346): n is a, c, g, or t
  misc_feature (406)..(406): n is a, c, g, or t
  misc_feature (412)..(412): n is a, c, g, or t
  misc_feature (479)..(479): n is a, c, g, or t
  misc_feature (497)..(497): n is a, c, g, or t
  misc_feature (536)..(536): n is a, c, g, or t
  misc_feature (682)..(682): n is a, c, g, or t
  misc_feature (821)..(821): n is a, c, g, or t
  misc_feature (940)..(940): n is a, c, g, or t
  misc_feature (988)..(988): n is a, c, g, or t
  misc_feature (1079)..(1079): n is a, c, g, or t
  misc_feature (1117)..(1117): n is a, c, g, or t
  misc_feature (1391)..(1391): n is a, c, g, or t
ttaantaaanacacacatacaatagtacgctcccaccaggngtgatggggngncgtagcttttggtggcgcgtgtctgtcgttttattggtagggtgtgtgttagtgaccggtgggcgtcgtacaaagtcagggaatcttctagtttgaattatantcttcatcacactcgtgatgcgcgcgcttctcacctggtgctcgcctgtccgcctcgcgccgcgcttcgcgcggtgcgcgacgctcgcgngcgccccgcnacnccgtctcagcgccanacgcgcaccgaccncntcngaganaaagtcgcagacncgcagncacggcacgcgagcgangcgcgcgagcgngtcgcgtagacgagcgcgctcgacgatacacaatgtcgaacgcccaccagacgaccacancgccancacacacgacaccagaagcagccgcagagggcggttggaaggtgcgacgaacagcgacgagcgatantagagaatagaggtagtnctgctccaccgtcatcatgagaacatgtaggtgaagtangtagacttagtgtattgacgtcgtgtgctcgtgtcgtatcattatcactctagttataatttattatttttcatatttatttctgcgcatctttattctcgtagtactctttcattacacttctctgactattctcgtgtatacgngaacgttgtggttgtatcctgctatcgcgtacatgtcctacgcgctttacgttctccttacgtgctcgtagcgtcgctgatgatatgcgtaagtagcagtcgtatcgtcggttagtctgtcaacgtctcgatgagtacntattgattaagcttatttcgtgtatgagtatgtatcattcgtaccgttcgtcgccacttgtaggcatgtcgtctcgatctctgcatcgtccacacgcgagcggacactctcactcatantcactagtatgaagcggtttgaagaggtggtgctgtaatgctagtcgngattaggagtgtgtagtgttcgagggacggttaatgagaatcactcgctgacgacggctgtgcgctggtgttgtactagaatagttgatcnttgttatgatagaggcgtgtgacgtcgtcgcatcgcgntgagcgatggtggtgtatgactctggaccgtatgcggtccgcgctaccgtttgtacttcttagccgaattggatcaactactcatggcatatcttgctgatgcgttgcgcgtgtgtgatcgtctgtagctgctcctccgtgttcgtctactgttagtcgatatctcagtttacaacagttgtggtgcggcttgcgtcattgcgatctgtcgatctcggtctgtctgtcgcgcgacgtgtatggcggtgactgttgttgctatcttctacgctgn

SEQ ID NO: 488252 - DNA, 103 bp, Homo sapiens
tgggaagatggctgaattcagacgggagcgtgcctaccaaaagcagccggaccatctttcaaaacaagaggagggtcctgcggggagaaactgggcaaggaga

SEQ ID NO: 488253 - DNA, 141 bp, Homo sapiens
  misc_feature (7)..(7): n is a, c, g, or t
gcacccnagttccagcatttatctgagcgttctgagcagaatcggagatcagaggaggctcatagagctgaactcttgaccacagaggaggaaggaagagaatgttccaagcagagaaaacggggtgccgatgaatagcga

SEQ ID NO: 488254 - DNA, 97 bp, Homo sapiens
ccccccccccccctttaaaaaaaaaaaaggagccaaacttttgttgctagattctgaaggcacattttgcttcattaatctaaataagtaccttaaa

SEQ ID NO: 488255 - DNA, 887 bp, Homo sapiens
cgcgcacggagggactccggccctgaacctggcccatgccgaaacactcgttatcgaaataagagacaaatgaggatagattcctggcagactcttcactgtccagtgtgcagactgaggccatcggcgagtggcagcctggagccgtccccacagtcccaggcagaggatggcctggagccagtgctgtgcagttggggctggtaccagagggtgcctgtgaaggatactggcccagctccacaagagcgaggaggcggtgagttgtcggacagcgggtgcttgcgtgtattacctcttccagtggccagcgctatatctggatcgagacccagcaatgccttctaccgatgtcatgcctcctggaccatggcctgctcttgttgacgactgtccacctgctccctgccatggccgtcagccctccatggaccaaaagtggtgaggaagggccaatttactggacccaacgtgatcagcataccggtcaaggtcctacccccagcttgctggtggacgaggccacttgaaccccgtactatgggttcccagggccttcagcatcggcgctgtggcttggattgagcaatacttactggtacgcccttgtgcatcttcgctcatttcctccatctccatcgtccctgtcgctggtacaaggaccagaaagcaaagccagactcttatgggacatggtcgagtttgtcaatgcggggtgtgcgttgtgcacggccagtgggggacgaggcaagagtgggttggaactccaggttgacttaggtgcccgtggagacttggccttggtgctgcccgcaaggggggttgagcttggattgcctggtgaatgcgcgccttgtggcatggcgagttgcattggtgaatggaag

SEQ ID NO: 488256 - DNA, 197 bp, Homo sapiens
ccccccccccccccccccggggggggggccccttttaaaggcccccccttttttttgggggggggttttaaaaagggggggcccggggcccccctttttcccttggggggtttttttttctttttttggggggggggggggggccccctaaagggttcccccgggggggattttccccgggttttttttccccccca

SEQ ID NO: 488257 - DNA, 242 bp, Homo sapiens
ggccggctacagctactgatctgagacggtaaggcatagagactaaaatacaaatacctggccggaggcagtggctgatgcctgtaatcccaacactttgggaggccgaggtggatggatcacctgaggtcaggagttcaagaccagcctggccaacatgatgaaaccccatctctactaaaaatacaaaaaaaaaaaacattagccggggcatcgtggcaggcccctgtaatcccagctac

SEQ ID NO: 488258 - DNA, 164 bp, Homo sapiens
tcgtaatagaggatccccctagttctagaaggtaaatagcagcgttttgagaaacagaaagaggtgatcgatgggctaccgaaggaacgaagagtcactgagagaagtgcgtggaggattacctggcaggatcacccaggatggccagaggtaccaatgccctg

SEQ ID NO: 488259 - DNA, 233 bp, Homo sapiens
tcaagatggaaaatctgtcattatcctgtaactcataagtccttttgctggttacaatggacaggcttcctcgtttgggacagaaaaataggtagcagcttgggttgtctagctgtttttcgagtgtcgaagatcatcaaggttacatagctttgtcccctgatattttttgttgaacagcagattaatgcatcttcttagtgaagttattggccttgcctctattcccttga

SEQ ID NO: 488260 - DNA, 338 bp, Homo sapiens
gtccattaggcgcgtctgcgtgcaggaggcacgtaatgtttagaaagagaagtggaggccgggcgcggtggctcacgtctgtaatcccagcactttgggagactaaggcgggcatatcacgaggtcaggagttcgagaccagactggccaacatagtgaaaccccatctccactaaaaatacaaaaattaaccaggcgtggtggtggtgggcgcctgtaatcccagctacttgggaggctgaggcaggagaatcgcttgaccagggaggcggaggttgcagtgagccgagatcacgccactgcactccagcctgggcaacagagtgagactccatctc

SEQ ID NO: 488261 - DNA, 978 bp, Homo sapiens
  misc_feature (29)..(29): n is a, c, g, or t
atacactagccacagacgttgaccctatnaatgtcggtcctctctttatagtccttgcccatcgcttattccgctatgccctgtccccccccgtgggtccaatagggggccacaacatttagaatattggtttgatacaaaccccaacacatttgtcccccctttgataatacacattacggaccccttctgggaatatccccttatgtgcgaataaattttactcatgctacgtggttccttggactaactagcgcttgtcttcgcactgattcatattggttacaactcacgtaatttcaatccttttgtgccaccctttttgggcgcctcaaacccctaggttgtcccccgcccaaaattaattttataattgtcctcccccttaactaatactcgaggtgattgatttctccctaatctagaccttctctagttcgcttgctgccttcgagttccaatgttagtctcataaccccgccctcttcctaaaggtcttctagactactgtaaatcactcaccctactaagcgactgtatttaggtactttgtcaactcccaacttctgtcctttacgcttctactcgtatcatcactccctcctcgtgctctaaaaccccccttggaggaaccgagtctagtagggctacgccgcgtcttctctgggtgtcgcaaggtctggctgtcctgactagtcacggcgcatcggccaacaaatgtgtgcctcggcagaggatttcgcgctgtttcacaatatgtttcccgcggactcccccatagtggggggtcccatcccgcctcccctcccgctcagtcgactctcacgcatggcattacgctccctgctgtatgcgcactcactggagggtcgctcgcacgcctgcttagtgtttaaggtcacctcctacgcccgccgattattggtccagttctcccaccccccaaaactaaccacgggtcttcccttctacaaaaca

SEQ ID NO: 488262 - DNA, 199 bp, Homo sapiens
aagtggtggccctccgacgcctgctatcaccacacttacttgatgtcatcatataatggcaggttatacatagacagcaggtcaggtccaccactgaacacgttggcagtggaggacacggagaggccatgaccagtgacgcttcccgtatcagctcaggtgatgaccttagcccacagaccttggacagcgccaggga

SEQ ID NO: 488263 - DNA, 798 bp, Homo sapiens
gtgtcagcaagctccgcgccgatccctgacgcctgacgcctgtccccggcccggcatgatgcctgctacctgctgcctgctgtcggcgctgggcacggtagcaggctgccgccgttgctgctcaatggactatgtcaccgtgtggggcttgccccagcaaggccaccatccctgggaagacggtcatcgtgacgggtgccaacacaggcatctgggaagcagaccgccttggaacttggccaggagacggaggcaacatcatcctggcctgcctgagacatggagaatgtgttgaggccggcatgcaaaacggacatccgcggtgggagaccctcaaattcaccatgtcaaactgcccggccacctggactttgggctttccctcaaggtctatacctgagacgttctgcaagcaaatatcatttgacccaaggcaggacgcgacgtggcaccattttctaattcaacatacgcgcggttcgtgcatgccgtgctgaccccccacttggatccacctgtattgactggcttccgacgattgcacgtttgcgccgtataacccaacgctatggggatcacctattaacttctatgaccaaaacttgtgctggctggaaccaaagcctggaaacgagcccctacagccaccccgttatcgcgcgggaaatccactccaaaccctcctcggatacccccttgtgtcccaaattggtatgcacagcggcccacacttcagaacatgtggaaccgaaccgtttggtacaccttggccaagaccgatagcaaacggtatcttaa

SEQ ID NO: 488264 - DNA, 477 bp, Homo sapiens
atgattttaagaattagcgttgtacactgttaccccgggaagccgtcatcctataattattattattattactattattattttttgagacggagtctcgctctatctccccaggctggagtctcgctctatctccccaggctggagtgtagtggcacaatctcagctcactggaacctctgccttttgggttcaagcaattctcctgcttcaagctctagagtagctggattacaggtgcacgcccagctaatttttggtatatatagtagagacagggttttgccacgttggccaggctggtgtgaaactcctgacctcaggcagtccacctgcctcggcctcccaaagtgctaggattacaggcatgagccactgtgcccagcctgtttttaaatagtaaatatgaatataaattatatgcctaaactgagatatgagtgttataattttaacattaatgtaagatcagactga

SEQ ID NO: 488265 - DNA, 696 bp, Homo sapiens
  misc_feature (515)..(515): n is a, c, g, or t
ggcgatgtcctaccgcagagcacatagtgtgctgatacttaaagagaggagagctctgccgtcataatgtagtcgtcatcatcgtcgttgtgggccgcgcagcgcgtcctccgtgtggtcaccacctcgtgtgtgagagaacatgataacagccgcccttcgcgtagaagagagcatcgtggcagcccacctcagcgcgcaccagcagatagtaagctgatcatgtataagattaaatatgcgcgcgccacctctctcatcttcgtggtgtactctttcgcctgttgaggaaacaccctctgagggccccacacgtttattaaattatatcagtctcccggatgaaactttgtctcttctccctctctctctctatatataaagaagattatatgggtgagaaatatcaacctatgtttgtgcgtaggagagatctctatataagagaagataatagaaagatatatagatatacccgcctcctttatgagtcgtcgctgtgagtgaatctcgcnctcacacaacgcgtggtctatatacgtgtcttatagtttgcacgcccttttcacgggcgcgacaagataaatgttgtgttagatcatgctgtggcatggtttccatgctgataagccatatgagaatcacgacaattgtactgtgtggtgttctccgccccatcaatagatacaagaagat

SEQ ID NO: 488266 - DNA, 983 bp, Homo sapiens
acgaggacaggatccagtgaggagtgagttgcagagatctattaatgagatgaagtcggtcggaagaaatgtcataatatgttttcatagctctggaattcagcacctagcctccaaaagccaaacagtcccaaatccgaagggaatgacatgattcgagaggcgcaaaagagctagaactggttaggagataatgtgtggatgagatatagaacactacgtttaggctgtaggcggcgccccacacttgacgaggcacgccaccattggagctaggtaccgagattttggggaaccgtactacagtatgtgacactctcgggcaattcttcaagtgttcacgactggtacacaggagtacttgaaaataacctggtgatgccctggttaatcaaaactggtaggtgcatagcagagggcatgtggtcagtggattccgagcgtttcttcactggtgttaacccatatgccttatccaatgtagctctactgggatccaggtagtgatgttcgagcagagtgataagtagtcggcatccaggtaaatacaacaatggcatggtgattggtagtcagcgttgctgtgtggcagcaatccgagtagttgcacgagacgtctactctgaattcgtctacgggtcagaatcatatgatttcccagaagtggtgtatcccgttcgccctacaatggtcatattggatgcagaatggcgttttgactagctttacttagacgatagcaaggtgactaaatccccaatagcggtggtttccttcagcgtacgagcgattaaggaatgacactggggtgtgcccatgatgggcagttgccgagaaatttgccctggaaagaaagcttgcaaaattgggcccactccttgacaaagccaacgaactcattggagatttaccagtaacagggacttacattcttcaggataagccttcgggacaattgagtaagtggaaaggccaaggcaaca

SEQ ID NO: 488267 - DNA, 165 bp, Homo sapiens
  misc_feature (56)..(56): n is a, c, g, or t
ctgcggtgatctcacaggcatcccggccagcagccatcttcaaccacaggcacgtngtgggggcctcaaggtctccacatcacacagtcagcaacacaccaacacattggtggtccatctcttccacacagcacatcgcagcagggtcaccggcagctcgcacat

SEQ ID NO: 488268 - DNA, 325 bp, Homo sapiens
tcccgattacgaagaccctggaagtcacgctgtagaactaagacctaatcgaacaggacatcgtgaccccacttacatgaacaggggcaagataaggccacaaccagcatctcacgtgtttgactccagggtctccagcagcaggagcggaatggtcttgcagtgctcctcccagacaccaaggctgtctacccgcgtgatcttaagcagctccagaagggctcccttccgttcctccactcgctcaatgtgattggacagctcttccagaaggtcagccaccaggtcagaatggacgatgggcacgtctcgaagctgctccatg

SEQ ID NO: 488269 - DNA, 251 bp, Homo sapiens
ttcctccctgacattatttataaaagcatacactgaaacttatcaaaagatgggagcagcatgatcaacatagtgagaacccatctctacaaaacattttttagaaactagcagggtgggccaggcgtggtggctcacacctgtaattccaacactttgggaggccaaggcgggtggatcacttgaacccgggaggcggaggttgcattgagctgagatcgcaacactgcactccatcctggtgacagagc

SEQ ID NO: 488270 - DNA, 237 bp, Homo sapiens
gttctagaggatcccgtgtgttgccgtggcttgtggagttgcgtgcttggattaccgggccttggtgctgagcgagatgaggcagcctatggggagctcagggccatggtgctggacctgagggccttctatgcttgagctttatcatatcatcagcagcaacctggagaaaaattgtcaaccccaaagtgtgacagaaaagccatctactgtactagaacccgtgtacattgggta

SEQ ID NO: 488271 - DNA, 89 bp, Homo sapiens
ccttcctttttccccccctactgcggcccctccgggcctgttgctatagggcctccctgtttgtcaattacccccaggtggggccccca

SEQ ID NO: 488272 - DNA, 793 bp, Homo sapiens
ggcggacattcaggactgagcgtgcctaccaaaagcagccgaccatctttcaaaacaatgaagagggtcctgtcgtgtggagaaagctggcaagggatgaagctcccgacggtactacaagaagcatcggtctgggcttcaagacaccacaaggtaggtgcggcggaacctcagcaagacaagaaggggaacctggcagttcctgcaacgtgtgcgcacgacgagttgccctgcctgcatctaagtggcattctgggagctgctgggaattggtagattgcttaccctgaggccacgcccctggctcttttaaggaaccagcccgtaccaaggctcactcctttagtctttcctatcctttcaggctattgagggcacctacattgacaagaaagtgccccttcactggtaagtgtgtccattcgagggcggatccatctctggcgtggtgaccaagatgaagatgcggaggaccatggtcatccgccgagacgtatctgcactacatccgcaagtacaaaccgcttcgagaagcgccacaagaacatgtctgtaccacctgtccccgcctgcttcagggcacggtccagattcggtgacatctgtcacagttgggctgagtgccgtggctctgagcaagacagtgcgcttcaacgtgctcaaggtcaccaagggttgccggaacaagaacgcaggacgcagaaagttctgagggctggaccatcgggtcgcgctacccaataatgaaactaaagttaattactctcattcccaaaacaaactaatacaacag

SEQ ID NO: 488273 - DNA, 195 bp, Homo sapiens
cacgaggactacctctcaattcaggaaatatttctgttcaagacagctcatccatctgataatttgtcacctgttagcatcaagtatgccatgtacttcatacggcttatcagcacaccaggattggcctcaacatcaacactcagcacagacaatacagctatcttcacagaaacaggagacatctttgtctgg

SEQ ID NO: 488274 - DNA, 303 bp, Homo sapiens
  misc_feature (1)..(1): n is a, c, g, or t
  misc_feature (13)..(13): n is a, c, g, or t
ntcgttgttatcnccttccttgccaatgagacgccctacaaagttattatgggccaggatcttcaggggaacctcgtcagcccttgggaagacaaaggaagaagtggaagacaagagttccttcaattgtgggcttcatgaagactcaatcaccatgccaccccagacttggcatttccaagtaaaacatctcaaaacttatcaaactgcatactttaaaaatatgtatgatttattatacatcaattgaacatcaataaagccatggcctcgttggcctcagcggtggagctctgctggccg

SEQ ID NO: 488275 - DNA, 808 bp, Homo sapiens
gagcagtactgcggctcctctcctctcctaagcctcggctctcgcggctacctttacccgcgcgcctgctcggcgagcagaacaccttccaccaggaccacctcagtcaagttccgcacgttgaaataaaggcatcgaagcaggtgtacatgtcgccgtgccgtcagggggtgagaaagtccaggccatgtattatctgtgatcgagggtacttggagaaggacgtgcgctgcaagacgccggagccttgtgacagtgagccctaatgtgtgtggaagatgttgccatgagtggagatctcagagtggctcacagtacgtttacacgtcgtgacgggttaccaatcagtgacatgtatcgtcgtgcctgcatgctcattgttgtcgggatgctcgcttccgtaaggagcccgtaagcaagtctgtgtgttatgtgaagttcttcaagtacaaatcgaaggcctgcagagaccaatttgaggtcacagccgtaaacggagtaatggacatggtgagcaagcagcagccctggttaggatggagcaggagtataccctcatggggacagatgggcacgccccttgggttggcttccaaacggccttcccagggcccccagggtccatatcaccgtggtgtgggagcgtgacaaagcctagtggcagggagcatagtggatggccaataaccggggctggttgatgcgggcagccagaaggcgggaccaagccgagggaagacggccaaaggaaatccaatggcgctgtaggagaaccacgggagcctcggggggccgcactccaacgggc

SEQ ID NO: 488276 - DNA, 1077 bp, Homo sapiens
gcgccatactcgacgctcggtatggcgtcgctcaccgttgaaggcctatgcttctggggcgagagaggactgcggcgtcgcgagattcagctcggctgtcagtgtctcctgctcgcatgccccgagtcctgcaggcggaggggcctgtaaggactgcggccgagtgtcctgagagactcgcgtagcgaagtcaggcgtgcgtggatgccctggtgtgggccaggtcactgattcctcgcgcgtctgccgggggcatggcaggcattcgcaaggtcagcacttacacgtcgatgaggacgagggtacttggtcgcactttgcccgagtgacggatggagcattggttccattgggcccactgtcgcttatcaggtcggaagggctggacaaatctttcgagacctctaccagttacaggacggaagattcagagtgctctcgggcgggaccgacctcagacacaaggtccgtggttgctcatgggagtgcagccccgggaatactagtggttgcaaccccggcgaaatggtgactccagcgaagtgtgcttgccaagtggggcctcgatgtagttagggacaccctggatagcaaggtgcatgggttcatggccaggagcgtacgagctttgatgtagccgcttatgcgacggcgaaagtggtgcttgcaacctgggggcacaccatgaggcttcggcaattactcgccaggccccctttccgcggcacccttgatcttgcagggcttcatctgcaacaggcctgcatgggctccggaaaagggtgaaacactgggacacgttcgggctggccagggatgggaacactgggggtccatcgagtgaacacttggatccgccagcgtcctacctccgtgcaggggcgaaggccccgcacctttgggcaccacacgggaggacatccagttctggtccatccggacgcgatcccggagtgtgaactttccctgaaggaaccgtcagggcacgcagttgtgacaggtgcacgcataacccctactggagctagaatgatagcaaactcgacaggtggaccaggggtatgaaaagtgaggcgc

SEQ ID NO: 488277 - DNA, 310 bp, Homo sapiens
  misc_feature (30)..(30): n is a, c, g, or t
  misc_feature (96)..(96): n is a, c, g, or t
  misc_feature (99)..(100): n is a, c, g, or t
  misc_feature (104)..(104): n is a, c, g, or t
  misc_feature (114)..(114): n is a, c, g, or t
  misc_feature (117)..(118): n is a, c, g, or t
  misc_feature (147)..(147): n is a, c, g, or t
  misc_feature (167)..(167): n is a, c, g, or t
  misc_feature (182)..(182): n is a, c, g, or t
  misc_feature (184)..(184): n is a, c, g, or t
  misc_feature (193)..(193): n is a, c, g, or t
  misc_feature (212)..(212): n is a, c, g, or t
  misc_feature (218)..(218): n is a, c, g, or t
  misc_feature (221)..(222): n is a, c, g, or t
  misc_feature (310)..(310): n is a, c, g, or t
aaatgttttaaatgtgtggaaaaatgctanatctacacttggttggcttaatcaacctcttcaatggtgggccctgaggaagcaccaccagagggnggnnctcnaccaccaggnaannccccaggcattcctcctggcatgcctccngcactctggtacagcttggngatgatggggttgcnanctttctccngctctttctgttgatgttnaaattnttnnttctcggcagtctgattcttatcaagccagttgataatttcattacacttgtccagaatcttctgtttgtcctcatcgttaatcttgn

SEQ ID NO: 488278 - DNA, 387 bp, Homo sapiens
  misc_feature (10)..(10): n is a, c, g, or t
  misc_feature (12)..(12): n is a, c, g, or t
  misc_feature (229)..(229): n is a, c, g, or t
  misc_feature (258)..(258): n is a, c, g, or t
  misc_feature (300)..(300): n is a, c, g, or t
  misc_feature (322)..(322): n is a, c, g, or t
  misc_feature (356)..(356): n is a, c, g, or t
  misc_feature (387)..(387): n is a, c, g, or t
gggcaaggcnanccacaagctggacgcggacctggtcttcgtcggctacggcaccgtggcgccggaagaaggcggctggaacgacttcaagggcatgaacctgaagggcaaggtgctggtgatgatggtgaacgacccgctgccgaccgcgacggagccgaaccgcttcaacggcgagggcctgacctactacggccgctggacctataaattcgaggaaagcggcgcnccaagggcgccggctgccaatcccttgantccacaccgacaaagtcggcctcgtacggctggagcgttgtncagaacagctgggccaactccnagcgcttccagctcaccgaagcaaagtgggcacnggcctgcagggttggatgaccgatgacaccn

SEQ ID NO: 488279 - DNA, 571 bp, Homo sapiens
tgcataattagcatttaacaagagaattacacactcagtttgtagatattatatcacacttacgctggtaaaatagcatgtctgaaggtaacttcaattctgcagtgaatgtgtagccgatagctccagtctagggttgggaaatactaaaatactgatggatactgtgagagacatacccaataaggtactgactctttacttctaatgagaaccactcaactaaacaaaaccataaaattatatctatatattaaacaaagttctaaagctaacatgtgttaagtttacataagaacacttgaggacttcatatatcatgccacatgaccaagttactgacaagatcacttgtagatgaggtccttacataaatccatttgcctgaagttcaagatagactccccttacactatactgatttaaaaattcagtaacatctgcccatggcggcagacaatgctatatgaaccacttgaccagtgtacaaaaacctagtaaatcataaaggtttatcatacaacatttatcaggcatttcctgtgatcatctatatcagataacaaaagag

SEQ ID NO: 488280 - DNA, 173 bp, Homo sapiens
aggacctgtgcaacgaggaagtattccccaaggacatcactaagtggaactcaaatgacctcatggacaaaatggagaatccagagcctgaggacccacaggacggtatataccaccagagtagccctgagttcagggtggcctccagtgtggagcagctgaacatcatcgag

SEQ ID NO: 488281 - DNA, 174 bp, Homo sapiens
  misc_feature (2)..(2): n is a, c, g, or t
tngctgatgcttctcacggcatcacttgacagcaacactcctgagggagctggttgaggaagggcagacatccggtgagctgcggagagctcatggaaggcgagtgggaacccggctgcctgccttttttttttttttttttttttttttttttttttttataaaaaaaaaatt

SEQ ID NO: 488282 - DNA, 386 bp, Homo sapiens
cccgatgcggccagtgctgcgcccgctctccaggctggacaggaagcacggcagcatctactcggcttctgaggcgtcctcaggaaacctacaatcaaggtggaaggcgacaggggaagcagacatgttttatgtggctggaggaagaggaagagaagtggggggaggtgccacacacttaaacaaccaggtctcttgagaactccatcacaacagcaccacgaggatggtgctaaaccattcatgaaggatccaccaccacagtccagtcaccttccaccaggctccacctccaacactgggggttacaatttgaaatgagatttggtagggacacagaaccaaaccatatcagacagttcttaaaaatctttttcaatttaaaa

SEQ ID NO: 488283 - DNA, 108 bp, Homo sapiens
tcttaaggtggactcgtaatggttaccaatttaacatagtcctgcagaggatttatactgtgaacctgagagggcaagcgggtttccacatgttgctgctaccttatg

SEQ ID NO: 488284 - DNA, 307 bp, Homo sapiens
attctttcttcagttcagctgtatcatttagtggatataacatctcttgtggattatatgtacactacttgatattcagcactattcaggcatcttccatcttcctcactttgtacttaatctctttccaccctccattcagtctggacatcctgggatccctgctctgacccattttaagtccgtcgcattaatctttctctaacctcccattctgttgactccaccaattgcttcaaatctttttccaacaaagctttctgggcagcaccaaatactccagttcttatttgctatgttctcactc

SEQ ID NO: 488285 - DNA, 127 bp, Homo sapiens
cgctcgcgctcgttcccctacggcgacgacggtggactcacggacgaccgacgtgtgggcgcacttacacgggggcaacgggaccgacgctggccccggtcactcgtctgactcctgacttcttcat

SEQ ID NO: 488286 - DNA, 316 bp, Homo sapiens
gatcgtctcatgggcggcatgtagggatctccaggagcatgcagacacaggtagaacactcagcagctcaggttgatgtgcagtggaaggggactgacggcgccgtccaccttctcctgctcctggttgcgctcctgcaggctgcgcagaaggagggcctggccaaaaagctcctcggctcggccactcgactggatgtccagcagggcgttgtgtgcgtccttggtcaggccttgggggaagggcacagatgcccagttgcaccatgggtggggttgtaaaggatctgcactggggggtctgcatgctgaatgtt

SEQ ID NO: 488287 - DNA, 159 bp, Homo sapiens
  misc_feature (102)..(102): n is a, c, g, or t
  misc_feature (108)..(108): n is a, c, g, or t
  misc_feature (140)..(140): n is a, c, g, or t
agctcggtaccagcataacgccattatagctaaaaatgctaacaatcatctcagcaaggctcagcaagtcataatctttttgatggtggagggtctggcttngatgtngatggttgctgactaatcacaggatggtagtngctggaggccacggaggct

SEQ ID NO: 488288 - DNA, 310 bp, Homo sapiens
tctgcgagatttagcaggaagttcctgtgataattgggggaacggtaatgtgcattctcaaaatgggaaccagattcttccaagaaaggaatgacagttaagaaccttatgatgcagagattattaaaggtgcaaagaagttccagctgatagacaatctactttttgttcttgatactgataacgtgctgagtttatgggatatttacattctaactcctgtatggaactggccctctcttcacgtagaagagtttcttcttactacagaagcagactctccttcatcagtcacgtggcaaggaattac

SEQ ID NO: 488289 - DNA, 869 bp, Homo sapiens
aatctcaggagctgtggacttaaccaatagcaaagctaccactgtacttttctcagcagtatctctggcaagtcagcaggtgttagtatggttgcaaagttcacttgtcatcagcaaagttgaactgggctgctctctctacagctgtttcctcagagggaccaaatcttgagaccagatggtggagctctggagtctgaggacatgggtgtcttgcatcacaaacgtctgcttgctgtgaccttcgagaccacttctgacatcctggacataccgagcctggagatgtgtcgtgtgttgatctcagaatcgaaatcactttgatggagataacgtaagtcaaatactgtattgatagtcatgtgattttggctgagcaacagtaaatggaaaagtggccgttgaaggacttctcattttcggagctgttccttccagagtcctggtctgatggtgtgcgctgttacatctgagcccccaaaagtcataattacgtgatactggtcgcaacagtgcaaaaagcgcagactggatggatggtcgctatcaaggcattaagggtacactactgtgttcactgaccatacattttttcttagccctcgagtaatatagcacagagttgtgacatgaaattcccctaaaccattgcctcgtcagaatttggctcttccccttacatccgaaatttgcgaacggtctaaggccctgcgaacaattgggctggcctgtcagactcgtaccgtgcgcttgaagccatctgacctcataaaacttttcagatgaatggtcttatttgccgatgggggaccaactcattactggccggtcactccttctcactctaggggaaccccaggtaaatgtgc

SEQ ID NO: 488290 - DNA, 361 bp, Homo sapiens
gaaatgaggagcatgactaacaattctccgaacatgtttcaaaaaagaagtgtattgtatgcataggcataacagttctttcctttgtaaaagagatgtcgtacttccagaaagacagatatatctatatagacatagggatgtgtgtgtctatacatatacatacacatacagttgcaaatacacatataaatgtcatgaaggatgcagttcgaaaataatcttatgttgccgggcacagtggcctcactcctgtaatctcagcactttgggagggtaattttagattgctcataaggaaaacggtatagttccctgacactcgcatatagtctaaaatactgattaaagggaaaaaaat

SEQ ID NO: 488291 - DNA, 109 bp, Homo sapiens
tttgaactatttgcaattaggagaacacatgtaccgctttcggccaggggtcggtggctcacgcctgtgaagccagtcacttgggtgaggccaaggcgacgaggctcac

SEQ ID NO: 488292 - DNA, 728 bp, Homo sapiens
  misc_feature (7)..(7): n is a, c, g, or t
ggctggnagaggaaaccgggagaggggtccagtgaacatttgtcttaaagggaatcatttgtgtaggacgcatttttcatgataatctaagtagggcactttctcggtccactcttgatgaagcgctgattaattactgggtataacctaggatggcgattctacagttgttatagtggggttcttgcaactggccgtccgcacagagaagacgagaaaacctgcatgttaggtgatagtattaatggacacctaactttttgctaattcagtgtatttttgccccttttaggaagtatgctacatttctggtagcttactagtatttccctggtgttgttttgatttggtacgtctttcgggaacgccgatggaaatacattattatacaaccattttctattggagcggtggctattgtcacataacgaccatataattctagatccccacgacgcaaatctatgtgtcaagaaaacaaaaagtcaccaatgaacttttaacaacttactgtcggtggattaggtcgaacaaacaggcatagcggtttatccaggatacgtccgtggacggcacaggctcgcggatgccttatttttactagcgcctccaccttctctgggaacccgttaacaatagattaggcactttctcccttaagcctccttcggctttagatttcgcctttattgacatcgcacaggaggcatttaagtgattaaacaggg

SEQ ID NO: 488293 - DNA, 277 bp, Homo sapiens
gaaaaaatagggggggtttaattttttttttaaaagatggctcccccgggaatttttggaaaggattccaaaaaatatgggttggatatgtcccaaggtctttttttttaaagccccttggatataaaaatttgggtttttttttttggagggcgggccatttttgttcctttgtggaatgtgttgcctggaccccagggtttggggttttttaattttttttgcctcctgatgatggaaaaagttgggttaattaaaattatttaatgggccggga

SEQ ID NO: 488294 - DNA, 321 bp, Homo sapiens
ttaccatttgagcttccagattgaagtcgggcacgcttacgactcaggaaattgatgtacagttggagtccgaagacaggggaagatccacgtatcagatcatgcagtcaggtggatattccctcttactcagccattttgctctctttacgatctctgtgagctggatgaggtctcgtccttggggaggccccctgctttactaagtccaccaattcacatgccagtgtcatccagaaacaccctacgcacatgcccagaataatgtttggctaaatctctgggtaccctgtggcccagccaagttgaaacacgaaatta

SEQ ID NO: 488295 - DNA, 123 bp, Homo sapiens
taaaagtagatcaaatcagagattgacagcctgtggagggtgcctgaactatacagaattaacacaactatggcgttattttttgtacatactgctcagaataaaaacacttgaaatgtgaaa

SEQ ID NO: 488296 - DNA, 528 bp, Homo sapiens
tccgtttcacagggctataagaacatattatatttctgtttaaaatatgcaaagtataaccattaaatatgtaaacagtacactattaataaaaccatatttaaaagtgattttcagaaagttcagtactgtagactgaattcacaactctccagccatagctagccatgcctcagtttttatgcactactgtctacgtgatatctgcatgtagatattgtacaagaatcttcagtacattcaccatgaaattttcgattttaaccccaaaacttatttcttcctgtttgcctaagtcagtgcattactccaccacatacccaatagctcattccagaaccttggaggttttgtgtgattcctccccgtccctcaactccatctccagtgaggggtaagcccagtagattttacttcctaaaaatatctagaatctgtccacttctctccctctccattgccactgcctgagaatccgcactcaccttgttatagaaccacccaagaaactgcctacttgctgttttg

SEQ ID NO: 488297 - DNA, 125 bp, Homo sapiens
gtggggggcaccgaggttcccggacccgggtccaggtatgctcccagcgtccaccgtgccccagtcgaccacctctgtctagttccagacacctccacgcccagcgtggtctctcccatcgcccg

SEQ ID NO: 488298 - DNA, 242 bp, Homo sapiens
tgagtacccgttctacggtcatatgctctcccttctgcagcccaggccctgatggacagcatgggtgaagctagtgtggttagtgctgtgagcacttgctggtccacctagtcctcgtggcactcccaggagagaggggtgctgctggcacacctagcagcaagggagacaagggtgaacctggtctcagaggtcaaattggtaaccctggcagagattgtgctcgtggtgctcctggtgct

SEQ ID NO: 488299 - DNA, 221 bp, Homo sapiens
taggtgttgttatgcaggatcctcagccatgtacacgtgaagtaagcctgagccagtgctgtggactggtgccatgggagtgcctagtacaaatgtccccctgtgtcccacagctatactcctggcgccggaactgactctggtcttgatcgcattaagccctgatggcgccggtggcgcggtgggcatggttcttcaatgagcgccggctctccttttct

SEQ ID NO: 488300 - DNA, 133 bp, Homo sapiens
ccagttacaaagcttatatgacccccagctttaaggaaataaaccagtcaccaatatccaaattgcatgaagaggaaccacctcagaatatgaataccacaagtcaggaagacgactaagccagttatcaaag

SEQ ID NO: 488301 - DNA, 418 bp, Homo sapiens
  misc_feature (14)..(14): n is a, c, g, or t
  misc_feature (42)..(42): n is a, c, g, or t
ttttaaaaacttcnatttggaatcaaaccttgttgtgaattncccaaagtccttttttaagcatcccctgatttttggtgcctaagcctacattaaaatttccccaacatgtagatctttcaagttttgcccttcctaaaatgcatcatttgggcccctggtgcagtgcctcatgccctgtaatccccagcactttgggaggccgaggtgggtggatcacttgaggcccaggagttcaaaatcagcctggccaacatgggaaaccccactctactaaaaatacaaacattagccaggcatggtggtacaagcctgtaatactagctacttgggaggttgaggtgggaggttgaggctgtagtgagccatgatcatgccactgcactccagcctgggagacagagccagaccctgtctt

SEQ ID NO: 488302 - DNA, 132 bp, Homo sapiens
  misc_feature (44)..(44): n is a, c, g, or t
aggctgcagtagccatgattgtgccactgcgctcaagcctgagntgacagagtgacatcctgtctgcaaaaagtttaaaaaaccaaagaaatagaaaggtggagggttaggattgctataggaaaggggtcc

SEQ ID NO: 488303 - DNA, 224 bp, Homo sapiens
aaatactaaacataaaacctctaagtaaacatgtacctttatacttcccatcaaaaatgcataacaagatcatgctatatagatagacagacacaagaaaaaaaagacaatttatactagcactatttaagtcttgcagtcgcagtgctcacacactccgcagctgtatctagttaacctatttcaatcagcattcatatcatgtgcacatagtcacacaatta

SEQ ID NO: 488304 - DNA, 417 bp, Homo sapiens
ggaatttggaaattggaggggacgctggtggacggattgggtgcaaggagttggtgttgcatgtgaggagcaggacgccagagtcccagccctggaaccgtctcagagtggagcaggcaccacctgtaatctactatgtccctgacttcatctccaaacgaacgaggaggagtatttgcttcgacaggtttcttaatgccccaaagccaagagtggacccagtctctctgcggcagacacacgttacagatactgggcgtgcggcttccctcatccccgacgggactggttcctgcagcggctgcccccatggttccagcgctacgtggacaagtgtcagacctcaccctctttggacgcctcccagtctgtccatgtcctcgtgaaccagtatctgcctggggagggcatcatgcc

SEQ ID NO: 488305 - DNA, 331 bp, Homo sapiens
cacaaggaggatgtgttttagaacctgccccctaaaaacaaaagggaggagaaagttaaaaaacaccggtcagcaaacaaggaaaaaagcaagggttccctccaaaggaagtgaacggtgctgtcctcaggtggccatgcctcagccctgaccctgtggaagcattttgcgatgggcagactcccaacctgaacctaggagggccccctttttttgtaatttaaatgggtgcatcccccccccctttccctgaccctgtatatagcccagccaggccccaggcagggcccacccttttccttttgtaaataaagccctggggtccctgtga

SEQ ID NO: 488306 - DNA, 317 bp, Homo sapiens
gccctgtggtacacaactagggtcagttttgcaggtggtaaagccatttacgatagttgtaggtaaagaagggagatttattagagaaatgtgaaaatatgttgcagtgggcagctcagcagagaaggggctacctgcaaagaggcaagggctggaggaaagttttatagggtcctgctgaagggtgctacgtgtggaatgaggtcattgtgcccgcaggttgttcgtgattagctgtctctaacaattgttcatacaataattgttcattattgttctcaacttggggctctccccaacctggggacccttcctta

SEQ ID NO: 488307 - DNA, 135 bp, Homo sapiens
ccgttagtctaaggactccctatggaactctgggttccagtgccagtgtttcgaaggtgattatgaagaagctggtagcaccatcctgaaaagttttgggtaaagctcctaataacattgtaaactctggggtat

SEQ ID NO: 488308 - DNA, 347 bp, Homo sapiens
atcaacagtgcaggtgtttgaagtgggagccagtgaacaaggtgaacctggcaagagctgtcaagggcaagaagggtgtgctgtttggagtcctggggccttcacccctagatgttccaagacacacctgccagggtttgtggagcaggctgaggctctgaaggccaagggagtcatcgtggtggcctgtgtgagtagtagatgatgccatgtgtagacaagcgagtggggtagagccaaggaggcgtcaggcatggtacggctcctggctgatcccacgtgggcctttgggacggagacagacttataactagatgattcgctggtgtccatcttttgggaatcga

SEQ ID NO: 488309 - DNA, 682 bp, Homo sapiens
gtcagcctcatccaagtagaacaaacagagcttcagcaagaacagcttcaaacagaggttggcacttagcatggttccccagcaccagtcccatcaagtgactggtaaccagcatgagcctcctcagcagaacactggatttccacgtaagctatcagcgcctattacaatagtcgtggtgtgtctcgtggagtgctcccgtggtgctacgcaggcttgatggaatggcataccggggccctgccagtggcatctcagaggaggatatgatggttaccgtccttcattctctacacactccaaacagtggttatacacagtctcagtctcagtgctccccgggattactctggctatcaacgggatgagactatcagcaggaaatttcaagcgaggctctgggcaaagtggagccacggggagccccacgaggtcgtggaggagcccccaagagccaaccagagggatgccgcgaatgaatcactcagacaagtgactcaatctgagttcatcaggatgactgtttaagtcgccatgtaacacagtggccagtgtaccgtaactatgttacccagaaagagtttatccatcatattgtgttctccctgtttcgggcaaacctttatcggtaaaggggactgttttcgtcccagtaatgcactggactacaatcgtcactaca

SEQ ID NO: 488310 - DNA, 537 bp, Homo sapiens
aagaaataataagaatattcacaaatttggcaagagaatcaactttcagattcaagaagctgagtgaaccccaaaaaggataaagccaaagatatatgttccatgacacataattaaacttctaaaaactaaaaaaaaaaaaaaaaaattcttgacagcagcaagaaagaaatcataccttagctatagggtaaaacaattggaatgatagtagatttctcatctgaaaccataaaggttagaaggaagtggcaaaatatttttcaagtgctgaaaaaataattgtcaacccagaatcccatgcctggcaaaaaatatcttccaaaaaatgaaaggcaaatcaaggcattctcagatgacgaaaaactaacagactctgacacaagcagagctactctaaaagaatggttaaaggaagttctctaaacaaaaaggaaaaaataaaacaaaagaaaccttagaacatcaggaaagaaacagcagggtaagcaataggaacccctcctgagtttcctgaatcatgtgtgatggttcacg

SEQ ID NO: 488311 - DNA, 299 bp, Homo sapiens
acaggtattctgacaaagcatactgtaaagcacaaaccacccagccttcgttcacattcagcctccaaagaaagaattacgtggggggaaatgtcaggagtgctgaggttaagacaccctgcgttagttataccaaaccactttatttacagagagaaggggactgaaataaatatttgccgaaaaataattgagatgatcacattggctttgagcatatgctagctttttagaatctgtttctttgtctatgaagttataagggtcacttcataggatacagtagggagagggtaccg

SEQ ID NO: 488312 - DNA, 787 bp, Homo sapiens
atcaaaccaacagacagcagcatggtggtgcgcatctgtcatctcaggctggcggagtcggaggccctaatgctggccctgatggtcttattccatggacaaggtttgtaaggaaaatattaatgataaaaatttctccttctggccttggattgacaccatcctagagctcattaagaagcacctgctgtgcctctggaatgatgggtgcattatgggcttcatcagcaaggagcgagaacgcgctctgctcaaggaccagcagccaggacgttcctgcttagattcagtgagagctcccgggaaggggccatcacattcacatgggtggaacggtcccagaacggaggtgaacctgacttccatgccgtggagccctacacgaaaaaagaactttcagctgttactttcccagatattattcgcaactacaaagtcatggctgccgagaacataccagagaatcccctgaagtatctgtaccccaatattgacaaagaccacgcctttgggaagtattattccagaccaaaggaagcaccagaaccgatggagcttgacgaccctaagcgaactggatacatcaagactgagttgatttctgtgtctgaagtccaccttctagacttcagaccacagacaagctgttcccatgtctccagaggagtttgatgaagatgttcccggatagtgggcccgaatttgacagtatgatgagcccggattaaaccgaaatttctcggggggattttttcccatggggatcccttcgggaggggccttaatg

SEQ ID NO: 488313 - DNA, 183 bp, Homo sapiens
tcgtcggcatacatatcgtcagcgtgcaaaaaaccaacgacatcaccagatgcaagcttcaagcctttattgagtgcatcgtagatgccattgtctggctcgctacgcagcatagcgacgtgatccacgtaacgatgcaatatgtccatcgtgcgatctgtagacgctccgtctatgacgatg

SEQ ID NO: 488314 - DNA, 464 bp, Homo sapiens
caaagttcggttcggtctgagggggagagaaggctgcctcggaggggggttttcttcaagatcggggatacgacggccagctgtgtgtgtgatgctcaatatgccccgggctatgccatagtctgggtcatctcagaggtggtcacccctcggttcctttgttctggaggagtgagtccctatgctgtccccaatgcttgcagaggtgattctggcggccccttgatagttcactagagaagtcgtttcgttcgagttggtgtaatctgctggggagtagtggatgtctgcgaagccagtagcggcttaagcaggttcctgctcacgcccgggtctttctcatcggcctctttctagtgctgccctggctgttggagtaactcctgttgtggttttgggttttctataaggggtttcatgctggacaggggagtggaaataaaataaaacaaaaaaaacaacaa

SEQ ID NO: 488315 - DNA, 319 bp, Homo sapiens
acattcagctcggtacccacaccacctgagtcactgtggtgtaacacatggagacatgtagtcagcccactttgttgttgttgttgttttggagatggagtctcactctgccacccaggctggagtgcagtggcacaatctcggcctactgcaacctgtgcctcctgggttcaagcgattcttctgcctcagcctcccaaacagctgggactataggcatgcaccaccatacctggctaatttttgtatttttagtaaagatggggtttcaccatatcggccaggttggtctcgaacccctgacctcgtgatccaccca

SEQ ID NO: 488316 - DNA, 314 bp, Homo sapiens
gtctcgttgcccattcgcttcgtgcgcttcgaggactcccgagatcagaggatgctatttatggcacaaatggttatgattatagccagtgtctgcttcgtgtggaattccccaggacttatggaggtcgtggtgggtggccccggtgttgattgtgtttgcgccaactacaagaagatctgatttccgagttcttgtttcaggtatgttcctttcaaacagaatgagatgatacatgtaaaatacttaacacagagtctgtcttccaagaaatgatagctgttattcttcagtgcatgggacacgaatgttca

SEQ ID NO: 488317 - DNA, 164 bp, Homo sapiens
tgaatatgtcagtcattaaaagcgacaataagcctaaacgtttatgcccctaatgacagagcttcaaaatacatgatacaaaaagtggtagaattgcaaggagagatggacaaattcacaattatagttggagatttcaatacctctttcttaataattgatag

SEQ ID NO: 488318 - DNA, 92 bp, Homo sapiens
cgggtttttttttcccccccccccccccccccccttgggtttttttttggttttgttggggggggatggtttaattaaggggtttttttcca

SEQ ID NO: 488319 - DNA, 575 bp, Homo sapiens
  misc_feature (489)..(489): n is a, c, g, or t
  misc_feature (575)..(575): n is a, c, g, or t
ttgtgggtggtgaggggacgggcaatggggtcagtgtggcttgcagtgtgcctagagcatggcagctccctctcccgcctcctccccaggtggttcagtgctgcagtggtggccatgcatggcccttcagggcccttatcttgtgcctgtgaagtagtgtgtacatggccagcaggcccatgaaggacagggaatagatgccccacacagagagctgatgtccagagtaagagaagccaccctcccagcacctgcagccactggcctctggccccgtccagcgtcgggcctccatgctggccctcagggatgtcgagcatgctgcttggagctgctggcccacgcgccttgacctccaaatgggccccagatggcggttcgttctcaggcccttggacttcatgccagcaattgcaggccccctgttgtctcagcttgctccaagtgccacttgcccagagcggatggctcctgggtgcattcctctgnaagctcatgccatgtcgctcagtgaggctccctgggcctggttgcagctcctgaggccaggggtgcagctacaggggagtcgacgn

SEQ ID NO: 488320 - DNA, 893 bp, Homo sapiens
gagagaacgcgccaggtgggcaaggggaccagagaaagccggggctggaagtcactgtcgctcgccactgtctggagcgcacggagcgcagaggcccggcagccggcgtgccctcaacggggacggagccagtgatgcaggatcgctgagcggagatccgcgccgagaagtctctcggggccggggctgagacgcaatggctttcgagacgatgccaaagacccggattcggggcgactcttgcgggggacccgggggggccaagggttgcccaagctcaggacttggggcgagtctagcaaggatggtttcttaaggcacggacccggttccccttttccgcgcttccctcggattgacgggcaggggatcttgcgccggggcccccggtggcatttcggtttcccccgggggagccccggctgggtgccttcccgcgggaacaggttcgtgcacggccaccagggtgcggcacgggggaggattgtgggcatacggtacaagggcgcgctggcccgccgtgggctttgcctctggcacccttgtgggggcccaggcctatattggtcggggtgtgtttggcccgagggtcgcctctggtaggtttggccctcgtgggccggcaaggggcctctcaacttcgggcgggccggttggccggagattctccggaacgtcttgttgatgtctgtccctggacacggacgtttacggttcactgcgtggcgagcgggtgccagaccttgccggcccagttgcgggctgccgcggcgcaatacggggcccttgtgggggccctgcggagcacagggtggtttgctgggcgacaccaacgtctattcggcgggaggagtcttcccgatagggaggcggaacactgtgagggggctgca

SEQ ID NO: 488321 - DNA, 347 bp, Homo sapiens
ggatccccttaaagctacccgcggaacgtgagctgggattaagaccgtcgtgagacagtgttacttttaccctactggggatgtgttgtcgccatggctaatcctgctcactacgagaggaaccgcaggttcagacatttggtgtatgtgctttggcctgatcgagcccattgtggcgaagcttaccactctgtggagattctgacgtgaacgcctcgtaagatcagaatcctcgcggggcgcatggtagtctttgtaagcctacctcgcgtgcgccagattcttgcttcacccatggtgtgcgcccaactactgcacctccgcattcccagcgctccgggctccta

SEQ ID NO: 488322 - DNA, 360 bp, Homo sapiens
gatccagactctgtcgatgtaggtgtgctcactctgtaaatagtcaacgaagtgaacattgattatttctgttgtatgttatatgtgaacaactttatttatttttttttggaacatggagtatggcccagcgactatctcgaaatggattcacccaaggacaccccttctaaattccggctcggtttcttctcactatgaacaaaaacaagccccctatctcaatatattatcccaaatctctccctcactaaagtgtagccttctcctcactctctcaatattatccatcatagcaggcagtaaaggtgatttaaacccaaccccagttacggcaaaattctaagctatactcctcaa

SEQ ID NO: 488323 - DNA, 743 bp, Homo sapiens
ttggtcccgctggggcagcaggagcagcaggtgcccatcctgggagaagttttgctatcactccccatcacggaggaggggtgcctgtctagagcgcgctgccctgcaggaggagctgcaactgtgcaaggtggctggtgcaggcactgcaggaccaagggtgacccagcagggtgctgaagatggtggtgccctgtgactggatgggggcccagatcgccccgggagccctcacagcagtgaactgccctggatgttgtcgggctgcctgcgagtgattcagtctcaactgggaacctgcaggcatggagctggcgcattgtgctggcccaggagaggcccaagcttgccaagaggacacctcatgcatcacgcgaggcttccttggactccccggcaactcaaggccctgcatggacacgtgccgtggagaacatgcccagcctgaagatgacggtggtggaggtgctaggttggcacggtacacatggttatacaccgcgcattcccacaatgaggctcttggatcaagaccccacaatacaacatgctatgagagaatagaagactagaagagacagccggaaaggggagagccaccagagcccctggagagcattgcccaggctggagtcctgcaggaggcagagaggttagcccaatggccagaggtggatccagaagaacctgaccgcatgagcgaagaggtaagagcaaggattcatggtgtaaattgtcgtgtg

SEQ ID NO: 488324 - DNA, 163 bp, Homo sapiens
gcagagacagggttttgtcatgttgcccaggctggtctcgaactcctaggctcaagcgatccaactgcctcagcctcccaaagtgctgggataacagatgtgagccaccgtgcccggccacagaggcattatttttagcagggtgggcggtggattgtagccc

SEQ ID NO: 488325 - DNA, 172 bp, Homo sapiens
ccgacgaagtcaccatgacggctgtacagggcgacatggggctgctgatggccaccaacaaatgcgccagccagccggtcatgactgcctacggaacgagaagtcatctctatgaccccaagaaccatatcctgccccctagggaccactcgaccatcagcctcgagatgga

SEQ ID NO: 488326 - DNA, 330 bp, Homo sapiens
  misc_feature (257)..(257): n is a, c, g, or t
aagttcttatctgcccattctgaccagctggagtgaggacaaatgacatctcaggcagtgcatgcatgggacttcccccccatccagtttgaccctgaccccactgcatgaggctccctgctttttcagtcttacaggcagggtttgggaggccgcctcgtgactgtcatgtggatgaaccacgagacaggaaaagacttgtttctagatattctgtcctgattgacagtaaattttaaatagacgtctctcttttnttttggtttggagatggagtcccgctctgtggtctgggctggagtgcagtggcgcggtctgggctcactgaaa

SEQ ID NO: 488327 - DNA, 109 bp, Homo sapiens
gccgggaccgattacgctcatagacgggtgtgctcttttagcgtcttaggtagctcgtcgggtttcgggggtcttagcttgggctctccttgccgtctaggagcgtaat

SEQ ID NO: 488328 - DNA, 294 bp, Homo sapiens
agcactgtaggccaggagttcaagaccagcctgggcaacatagtgagaccccccccccatctctacaaaaaaataaaaaaatcttcccgttgctgtatgtggagcccctctagattgtcagtgatagaaaccacttcaaactggctcagccctaaaatagcgatgattttgtggctcacgtaactgaggattccaatgggcacagctggttgcaggccccgctggacccagctctctgctggccccagggcacttgctggcagcttcccacccactgtcagagcctgtcccccc

SEQ ID NO: 488329 - DNA, 304 bp, Homo sapiens
cggcacgaggtttaaaggtttcatcattatgttcaatgggttagtattgtttagggcaggacattaaactagaagggattctataggatgagtgtgatacatcgaaggtaacatattgtaaggcaaaagagcttagaagaaatggagaaaggatagtaaaaggcatgtcagattaaaggttgataacatgaagatattctcaattctatttctgcctatgtttgcttttctggttcaagcatctgctcgaagagacaaaatgtgacatggttcatcactaagagatgaattatttactctcgga

SEQ ID NO: 488330 - DNA, 892 bp, Homo sapiens
  misc_feature (536)..(536): n is a, c, g, or t
tagaggcgttgttcgtagttacgccgctttgcgcctaattactgggcctcccccggggcgccgggtgtgtcgcacgaccagcttgtctctctttggacgccccggtagggcgccccctctccctcagctgcaaaggtccgtggtttttgccaccgcggtcgctttacagggggttccccctccgctccacgacaattgttttggggcgattcttatattttggtgtgtgtctcccccgcaccccgcccatatatctgtcggggggacacccccagcgcgcctctgttacttcgtaggtctcactcttcgtccgccgcggatcgacggctcgctagagtgcctggtgcgcacttttggtgtgagtcacggacgccccctctcctgttctgtcccccgcccgcacgcacgcaggcagcacctcgctcgggtggggacagaaaaggggggttggtggttctctcttcttcggggtgcttagagttcttgtcttttgtttttttgcttttttttggaacatccattgtggggatcatgcngagccgtggggtttgttggccgcatgcgtgtccttttgtccctcccccagccttacttcccgcgggtgtgttgtccccccttgcgttattgccccctttttcccctctgggcaaccaccccccaccaccgcttgggggcccacccccctcctgcctcgtcccgtgtttttccccccccacccccctcttatgatttggggtgggaaagaaggaccgggcagagggggggggacccccccccccccagcgacttttggggggccccccccccattgggttttcacctttcccgggggttttttccccaacacacaaatttttttaaaccaaaccggaaaacccagattttaaattta

SEQ ID NO: 488331 - DNA, 644 bp, Homo sapiens
  misc_feature (28)..(28): n is a, c, g, or t
  misc_feature (606)..(606): n is a, c, g, or t
ctctgggaaagagggagagggggggggnccccccccttccctcctttccaaaagaaaaaaaaaaagacacccccccgcgggtgtgtttgtgtaaacacacccccttttttttttaaaaaacacaccctgctctcccccaacaaaaaaaaaaaaaaaaaaaaacttttttttttttttttaaacaaaaaaaaaaaaggggggggggggggcggcccccccccccccccccacccaaagaaaaaaaaaaaggggggggggtggcgccccccccccacagaaggggggggggggtttttttttttttttggagggggggggcggctccttcttttttaaggggggggggcccctttggggggttttttttttgaaacccccccaaaaagggcgcgcccaaaaaaaccggcccaaaatttttccccgcgggggttttttttaaaaattttaaaaaaacccggggggcccaaaattattattgggggcgcttaaaaaaaaagggtgttttccccaagaaaaatttttggggggggcccttttcccccctttttcacccggggagaaaaccccttttaacacccctctggggttttaaaagagggtaaaaanccacccaaaggtttggtcgccaaattccggggaaggag

SEQ ID NO: 488332 - DNA, 515 bp, Homo sapiens
aacttctaccagggtttgagctctctaggctcatgcacttccaccgtggcctcccagagtgctgggattatgccactttgcccagcctaattaggaagtttataattactgaatgagtattactgatatactgtgtgttgcaccattaggatttgaggtcttgatatagttccaatcatcatttcttatataacttacacagatgtctttccttatcagtgggaatagacgtggtactgaatgtttgagcctgttgtcacacattgattttaatataataagaaattggtacatttttttcataaatcgtacttattttaaatagttacaagggagcagagtttaaatctcgtctatgtgacgacttttgtcatgattcttcactagaagtttgtgatttaaagtttggtgatgaataaattccactatgcgagtggcatggcttcccagttataaaatctcagctcttgagagggcctcagagctaacttctaccccaggtactgtgccttgct

SEQ ID NO: 488333 - DNA, 135 bp, Homo sapiens
  misc_feature (9)..(9): n is a, c, g, or t
  misc_feature (11)..(11): n is a, c, g, or t
  misc_feature (48)..(48): n is a, c, g, or t
attcgttancngctgcaccatgacgggaactccacccctaacagtttnataccaaatcttaccatccatctgatctcagagagacagcaatgaatgatggcttgaagcaaggtcttaattctctgctgatgggag

SEQ ID NO: 488334 - DNA, 145 bp, Homo sapiens
aggggaattaggaattttggctaaaggataaatcaagctagaatgctaatctggatatcttgaagatcttggcttttctaaagtccaagggggtctttcgaggggttcaccaacattgtagatgtaaagattatttataggcagg

SEQ ID NO: 488335 - DNA, 444 bp, Homo sapiens
aatgaagaacaaatcccattaaccccgtcatgtattggaacaaacacttccagtttgtaattcatcttgtatttccttcccacttgtttcttgttaactaactcgccagatcttcctccgtgtcacctggatggtgtatatcttcttcatcttggatgctggttcacatcttcatcctcagtgatgcctcgctgagggtcattgaatatctcccgaagctcatcatgttctaatgagtcatggccctgcctgtgaccagacattcctggagaagagatatccaggccttgattttctgcctcctttgtttcatcttcggcaattatttcccaccgagtactaacagcttcagcatctgtactcagcaatcgtttcacttctttttcaacatctggagattcaatatatttcttctttgctgtcttccggaaccttctcttcctg

SEQ ID NO: 488336 - DNA, 142 bp, Homo sapiens
aggcggccgtggcggcggtggcggcgtttgggccgaggcaggcggcctcagtggccgaggtggctggacgcgtattagggttaggtagggagggagccgcaggcgcagacccacccgccttgatgccccccgcagcctgtgc

SEQ ID NO: 488337 - DNA, 170 bp, Homo sapiens
attgctgtggctcagcagaaggtgatccagactctgacttttgccaggcagcatgcatcttttcccacagcaaaacacatcgcatttcttcctcatcttcttgtacctcctcagagtctgctgctggtggtgggctgtgtgtctcctcatggagcaccagtggctcgggg

SEQ ID NO: 488338 - DNA, 1254 bp, Homo sapiens
ggccagctcgccgctcgctatagtgtcggtcaccgtgaatgcctaccttctgtgcaatgaggacgcggcgcgcgagattcgccgcttcagacttctgctgcagtcccgagcctgaggcggaagccgaggctgctcgcgggtccgcgggacccgtgcgatgcggcatgcattgagaccgggtggccgctcctgttccccgctgctgcggcctggtcggtgttccatggcgcactaccgcgatgagtgactggtggacttggttgctcttttctcagtgactgagtgaatttgagcagagtggccatgttccttactgtgaagggatgaccatcttccggaatctatcagtttaacacgagtacaaccaagccggttgctcggtggcggtgaccacctgccacacccggttgtgctcaagggaaggactgcctccagtcacaacgattgggtaggcagccacccacattgcttggattcttggcggacttgtcgcttcgccaacttggtgggcccttggttcgcataaggggaaaactcccgggcataacaaacggtttgccaaggccggcttcttgacccccaggaacctcaacggacacttttggttggttacggcgaggttcattgcgcgcacagtgcggcacacaaagctgtgtgcctttaggagactccccaggggtgtgtgagggccagtcaacctcaaagaaagccttacgtgcccaattttacgcccccgagagagattctctctctatttcccggtgggcacacaccccttaggttcccttccgacacgcgggcgccttatcctttccggcgacagccaagaggaccccaggacttagggggactttcccccgggagaacgagggggctccgaacagacagccaatctcggtggaactctaaccctttttaccaggggcgtcgttgaggccccaacggggcacatttgggggcggcagacaacttggcgacggggttaccccagccgccgaaggtggaagaacgaggctttggggtgaaaggtcccccccaagagcaggatatccgcatatccgccattccagtggttggccacaagcttggtgggagagaaaggagggcccccctagggcatcgccttcctttttgtggtgaccgcccacgaaaccgggggtagacaagtgagaaagaacataccagacggcgcgcttttttacatttagtggaattcacccaaaattcccgcggggaacgggggggaacaattcc

SEQ ID NO: 488339 - DNA, 173 bp, Homo sapiens
gtaagtcgaatctagagtatccccctaggttacgaaagttctttcactaggaatgttagacattgggacccaactgtcttcaggacttgtaggggtttctcgctgagaaggcccacggttagtctgacgggcttccccttgtatgtaacctgccctatgtctcagagcagtga

SEQ ID NO: 488340 - DNA, 527 bp, Homo sapiens
aaaaaaaaataagggaagaagaagaaaaatttttaaaaaagccctgggggaacgatccaccttcttttcttggtggattggacctcaggagccacctgctggacgcttcccaaaccttgccttgcttacgtgattcccaatagaagacttggaaagacaccgaggttggaggaggaggaagcctgcaatgtgaacacgatggctggagctccggcagccattctggaccaggaggtgacacttgtaagatgggaaaccacatgttgggatggtgaatccaaaagcatgaggagcctgtgtcccctgtgacaccaaaactggcataccagccctgggatcctacatgtatactgccttggtgtgggaaagaaatattgcttggatcttggtaggcggctgttgcaggcaaacacagtccgaactgatgtagactgagcatgatgacatggagtgcctgaaagacttctacaggagatgtgtcacaatcgagattaataaagtcccggtgcactcaagaaaaaaaaaaa

SEQ ID NO: 488341 - DNA, 280 bp, Homo sapiens
  misc_feature (135)..(135): n is a, c, g, or t
gaccaggctgagggctaatgtctcacataacagtagaaaacaaaatttgttgtcatctcttcaagaatcgagaattgcgtacaaaaaaaaactttaatataatttaaagaagtgaatacatttacaggcgtaaantgcaaaccgcttccaacttcaaagcaagtaaaaaggcccagggtgttcctgggccaaaagaacattcaagcttaaagaaaaggaacactgggtccctacgggtttggacttttccaaacccttaacaagaacccggcaagaaaaa

SEQ ID NO: 488342 - DNA, 147 bp, Homo sapiens
  misc_feature (58)..(58): n is a, c, g, or t
  misc_feature (82)..(82): n is a, c, g, or t
  misc_feature (112)..(112): n is a, c, g, or t
  misc_feature (136)..(136): n is a, c, g, or t
  misc_feature (139)..(139): n is a, c, g, or t
gggattctaggcactggtggcaaattcgaagggaatggagatggagagagcgttccanacagattgtggttgctgcagccgnaagtcgtcttcatcctgggggatatctttnatgaagggaagtggagcacccctnagncctgggcg

SEQ ID NO: 488343 - DNA, 185 bp, Homo sapiens
agaacaccaaatactgcaacggttctcactcaatgagtagggagttgaatattgagaacacatggacacagagagggaccagcacacaccagggcctgttgaggggtggtagggtgaggggagggaacttagaggacagtcaacagtgccgcaaaccacctggcacactatacctttaaacacct

SEQ ID NO: 488344 - DNA, 428 bp, Homo sapiens
  misc_feature (5)..(5): n is a, c, g, or t
  misc_feature (37)..(37): n is a, c, g, or t
  misc_feature (43)..(43): n is a, c, g, or t
  misc_feature (351)..(351): n is a, c, g, or t
  misc_feature (428)..(428): n is a, c, g, or t
ctggnccctccctctttgcccttgtcacctcccttgnaaaaanagatgaaattcctatttagggaaaaaacaggggaagggccattgtcttggtctcccaactcccccctaatccttcacttctggaagaggagaaagggaacaagaaggcctgggtgcagtggctcacccctgtaatccccagcactctgggaggccgaggtaggcagatcacttgaggtcaggagtttgagtttaagaccagcctgaccaacatagtgaaaccccgtctctactaaaaatacaaaaattagctgggcgtggtgacacacacctgtagtaccagctactcagggggctgaagcaggaganatcgcttgaagctgggaggcggaggttgcagtgaggtgagaatttgccactgcactccagcctgggcaacagagagn

SEQ ID NO: 488345 - DNA, 127 bp, Homo sapiens
  misc_feature (116)..(116): n is a, c, g, or t
tttaagaagcgggctcgttgcctgtcatacagcgccgcacaatcttctggctcacgcgggtcagctgggctgatccccactatccgcatgatgcccccggatgccattgcagtggnagctgccggtt

SEQ ID NO: 488346 - DNA, 2312 bp, Homo sapiens
gtcgtcattggatgttgcggctgtcaatcgccaggctataaataagggagtccggcggctcctctatcaggaagattgtgcatgccgtgggtctgacggcttgagtagcgctagggagaatccctgcaggtaatatttgacttttgcttcatattaatctgagtggaaaataaaagggccctcttctcctctcgcttccctgccgggcaggcgccatggcggaagcctcggcgacgggcgcctgcggagaggcgatggcagcggcggaaggctcctcgggcccggcgggcttgactctgggccggagcttctcgaactaccggcccttcgagccccaggcgttgggcctcagcccgagctggcggctgacgggcttctccggcatgaagggctgaggctgcaaggtcccgcaggaggcgctgctcaaactcctggcgggactgacgcggccggacgtgcggcccccgctgggccggggcctggtgggtggccaggaagaggcgtcccaggaagccggcctgccggcaggagcgggccccagccccacctttccagccctgggcatcgggatggactcctgcgtcatccccctgaggcacgggggcctgtcactggtgcagaccacggacttcttttaccccttggtagaagatccctacatgatggggcgcatagcttgtgccaacgtgctgagtgacctctacgccatggggattactgagtgtgacaacatgttgatgttactcagcgtcagccagagtatgagtgaggaggaacgcgaaaaggtaacgccactcatggtcaaaggctttcgggatgcggctgaggaaggagggacggcagtgaccggtgggcaaacggtggtcaacccttggattataatcggtggagttgccactgtagtatgccaaccaaatgagttcataatgccggacagcgccgtcgttggggacgtgctggtgttaaccaaaccgttaggaacccaggttgctgtcaatgcccaccaatggctggataatcctgaaagatggaataaagtaaagatggtggtctccagagaagaggtggagctggcctatcaggaagccatgttcaatatggctaccctcaacagaactgctgcaggtttaatgcacacatttaatgcccatgcggccacagatatcacaggctttggcattctaggacactcccagaaccttgcaaaacaacaaagaaatgaagtgtcctttgttattcataatctgccaataattgccaagatggctgccgtcagcaaggccagtggacggtttgggcttcttcaaggaacctcagctgaaacctctgggggattactgatttgtctgccaagagaacaggcggctcgcttttgttctgaaatcaaatcctccaagtacggagagggtcaccaagcgtggatcgttggcattgtggaaaagggaaaccgaacggcccggatcattgacaagccgcgagttattgaagtcctgcctcgtggggccacagctgctgttcttgctcctgacagttcaaatgcctcctctgagcctagctcgtgagatgaaagaacagaagttgtttggaccttagagccattgtccacaatcacggatggttctcaagagttgattgtaagaaatttccaaagaaggctgcctgcatagtggttccggctgccctttctaggtgattggaatcagcccatctaaagcagtctttatatgcattccgaggccagagtaacattttgaactttggggggatatttgttcatcacttgggtagaagaggagcaaaaatacctctgttttctcttgccaaagtaagatgaagctattccaggttgagggatttttctttgcacggggttgattaatttctgcacagggagtgagattattaaagtaacacacacacaaagtaaattgcaaaatgaaaaaaattagaagcaaatgagttttggaccaatattgttgataaatctaaattgttaagagagatcttataatgcaacatcaaattctttattcaattttactgaagtactggctctttcctgctctggacaagaattgagcaacttgtctgatgactgggaaaggaggacctgcaaccatctgacttggtctctgttaatgacgtctctccctctaaaccccattaaggactgggagaggcagagcaagcctcagagcccaggcctcagtggtcattaagatgttaagtcttttgcggcagattcctggtgatttgatcaataaagagtaatttcttgctaaataaataaaagaaaccttgttgaaaaacta

SEQ ID NO: 488347 - DNA, 2357 bp, Homo sapiens
gtcgtcattggatgttgcggctgtcaatcgccaggctataaataagggagtccggcggctcctctatcaggaagattgtgcatgccgtgggtctgacggcttgagtagcgctagggagaatccctgcaggtaatatttgacttttgcttcatattaatctgagtggaaaataaaagggccctcttctcctctcgcttccctgccgggcaggcgccatggcggaagcctcggcgacgggcgcctgcggagaggcgatggcagcggcggaaggctcctcgggcccggcgggcttgactctgggccggagcttctcgaactaccggcccttcgagccccaggcgttgggcctcagcccgagctggcggctgacgggcttctccggcatgaagggctgaggctgcaaggtcccgcaggaggcgctgctcaaactcctggcgggactgacgcggccggacgtgcggcccccgctgggccggggcctggtgggtggccaggaagaggcgtcccaggaagccggcctgccggcaggagcgggccccagccccacctttccagccctgggcatcgggatggactcctgcgtcatccccctgaggcacgggggcctgtcactggtgcagaccacggacttcttttaccccttggtagaagatccctacatgatggggcgcatagcttgtgccaacgtgctgagtgacctctacgccatggggattactgagtgtgacaacatgttgatgttactcagcgtcagccagagtatgagtgaggaggaacgcgaaaaggtaacgccactcatggtcaaaggctttcgggatgcggctgaggaaggagggacggcagtgaccggtgggcaaacggtggtcaacccttggattataatcggtggagttgccactgtagtatgccaaccaaatgagttcataatgccggacagcgccgtcgttggggacgtgctggtgttaaccaaaccgttaggaacccaggttgctgtcaatgcccaccaatggctggataatcctgaaagatggaataaagtaaagatggtggtctccagagaagaggtggagctggcctatcaggaagccatgttcaatatggctaccctcaacagaactgctgcaggtttaatgcacacatttaatgcccatgcggccacagatatcacaggctttggcattctaggacactcccagaaccttgcaaaacaacaaagaaatgaagtgtcctttgttattcataatctgccaataattgccaagatggctgccgtcagcaaggccagtggacggtttgggcttcttcaaggaacctcagctgaaacctctgggggattactgatttgtctgccaagagaacaggcggctcgcttttgttctgaaatcaaatcctccaagtacggagagggtcaccaagcgtggatcgttggcattgtggaaaagggaaaccgaacggcccggatcattgacaagccgcgagttattgaagtcctgcctcgtggggccacagctgctgttcttgctcctgacagttcaaatgcctcctctgagcctagctcgtgagatgaaagaacagaagttgtttggaccttagagccattgtccacaatcacggatggttctcaagagttgattgtaagaaatttccaaagaaggctgcctgcatagtggttccggctgccctttctaggtgattggaatcagcccatctaaagcagtctttatatgcattccgaggccagagtaacattttgaactttggggggatatttgttcatcacttgggtagaagaggagcaaaaatacctctgttttctcttgccaaagtaagatgaagctattccaggttgagggatttttctttgcacggggttgattaatttctgcacagggagtgagattattaaagtaacacacacacaaagtaaattgcaaaatgaaaaaaattagaagcaaatgagttttggaccaatattgttgataaatctaaattgttaagagagatcttataatgcaacatcaaattctttattcaattttactgaagtactggctctttcctgctctggacaagaattgagcaacttgtctgatgactgggaaaggaggacctgcaaccatctgacttggtctctgttaatgacgtctctccctctaaaccccattaaggactgggagaggcagagcaagcctcagagcccaggcctcagtggtcattaagatgttaagtcttttgcggcagattcctggtgatttgatcaataaagagtaatttcttgctaaataaataaaagaaaccttgttgaaaaactaaaataatacactgcgctataacaaaaaaataaattgcggccgtat

SEQ ID NO: 488348 - DNA, 393 bp, Homo sapiens
aatagtggatgtggtggacatactgtagtccatctattgggagctgacacggaaggacaattaagccagaagtttgatgctgcagtgagctaagaaggtgctactgcactccagcatgggcaagagagcaaccctgtctctaaaataaaattaaaattaaaattaaaattaaggcctggtgtggtggctcacacctataataccaccacttttgaaggccaaggtgggcagattgcttgagcccaggagtttgagaccagcctgggcaacatgacaagaccgtctctaaaaaaataaataaaaataaaaaacacaaaaattagccacggcatggtgccacacacctgtagtccaagctactagggaggctgaggtgggaggatcgcttgagcc

SEQ ID NO: 488349 - DNA, 333 bp, Homo sapiens
tcgatctctaagtgttcacagtgtctgtaaatcaagaccaaagagcctgtcgctgagactgtctattaccagattcacttctgaattggccagaggaaatctgactgtattatcctgtgtgtgtctaggtagagatacttggacggctgccatgggtgctttcgaagtttgcaacctttactaggctaactgatggcaatattcagacacgacgcctgcttttgcaaataacttacaagactgtaaacttccaaagatctgaatggggctttcctgatgttggtatctcaggcttaggcctatagattgatttaccctttgcaattgtgctca

SEQ ID NO: 488350 - DNA, 2258 bp, Homo sapiens
gtcgtcattggatgttgcggctgtcaatcgccaggctataaataagggagtccggcggctcctctatcaggaagattgtgcatgccgtgggtctgacggcttgagtagcgctagggagaatccctgcaggtaatatttgacttttgcttcatattaatctgagtggaaaataaaagggccctcttctcctctcgcttccctgccgggcaggcgccatggcggaagcctcggcgacgggcgcctgcggagaggcgatggcagcggcggaaggctcctcgggcccggcgggcttgactctgggccggagcttctcgaactaccggcccttcgagccccaggcgttgggcctcagcccgagctggcggctgacgggcttctccggcatgaagggctgaggctgcaaggtcccgcaggaggcgctgctcaaactcctggcgggactgacgcggccggacgtgcggcccccgctgggccggggcctggtgggtggccaggaagaggcgtcccaggaagccggcctgccggcaggagcgggccccagccccacctttccagccctgggcatcgggatggactcctgcgtcatccccctgaggcacgggggcctgtcactggtgcagaccacggacttcttttaccccttggtagaagatccctacatgatggggcgcatagcttgtgccaacgtgctgagtgacctctacgccatggggattactgagtgtgacaacatgttgatgttactcagcgtcagccagagtatgagtgaggaggaacgcgaaaaggtaacgccactcatggtcaaaggctttcgggatgcggctgaggaaggagggacggcagtgaccggtgggcaaacggtggtcaacccttggattataatcggtggagttgccactgtagtatgccaaccaaatgagttcataatgccggacagcgccgtcgttggggacgtgctggtgttaaccaaaccgttaggaacccaggttgctgtcaatgcccaccaatggctggataatcctgaaagatggaataaagtaaagatggtggtctccagagaagaggtggagctggcctatcaggaagccatgttcaatatggctaccctcaacagaactgctgcaggtttaatgcacacatttaatgcccatgcggccacagatatcacaggctttggcattctaggacactcccagaaccttgccaagatggctgccgtcagcaaggccagtggacggtttgggcttcttcaaggaacctcagctgaaacctctgggggattactgatttgtctgccaagagaacaggcggctcgcttttgttctgaaatcaaatcctccaagtacggagagggtcaccaagcgtggatcgttggcattgtggaaaagggaaaccgaacggcccggatcattgacaagccgcgagttattgaagtcctgcctcgtggggccacagctgctgttcttgctcctgacagttcaaatgcctcctctgagcctagctcgtgagatgaaagaacagaagttgtttggaccttagagccattgtccacaatcacggatggttctcaagagttgattgtaagaaatttccaaagaaggctgcctgcatagtggttccggctgccctttctaggtgattggaatcagcccatctaaagcagtctttatatgcattccgaggccagagtaacattttgaactttggggggatatttgttcatcacttgggtagaagaggagcaaaaatacctctgttttctcttgccaaagtaagatgaagctattccaggttgagggatttttctttgcacggggttgattaatttctgcacagggagtgagattattaaagtaacacacacacaaagtaaattgcaaaatgaaaaaaattagaagcaaatgagttttggaccaatattgttgataaatctaaattgttaagagagatcttataatgcaacatcaaattctttattcaattttactgaagtactggctctttcctgctctggacaagaattgagcaacttgtctgatgactgggaaaggaggacctgcaaccatctgacttggtctctgttaatgacgtctctccctctaaaccccattaaggactgggagaggcagagcaagcctcagagcccaggcctcagtggtcattaagatgttaagtcttttgcggcagattcctggtgatttgatcaataaagagtaatttcttgctaaataaataaaagaaaccttgttgaaaaacta

SEQ ID NO: 488351 - DNA, 735 bp, Homo sapiens
tggcaaagtgggcttccagagcttcttttccctaattgcgggacctcaccattgcatgcaatggacctattatcgtagtacacatgaagcagaagggaacgaagtaggcagacatgagcagattcgctcctccctgataagagtagtcccaaagggtcgcttaaggaatctgccccacagcttcccacatagaaggatccatgagcagatcaggacacttagcacatgtcaccaataccatctaactctcatttgacaagcagagaaagacaagttacaataccagatcagcttagactaccaggatagtcgcatccccttcctctcacgtacataagatctacatcacgtccaaaacaacaaacacaacacacccacgagcaaccatagacccgcggccagaaaccagcaccacgcaaagccacaagacaaaacagaaccagcccagatacaagacaacaggccacaagacgacacactaggatagaaaaaacgaacccaagacacccggcaagcaaccacaaaccgagcaacccacacaccagacaaaaaaaccaaggataccaagagacacaactagcacacaaaattacaacaacaagcaacataaacacaaacgcacctcgtaaagaaatccagaaagaaaatgaaaataggaacagaatacacaaaacataacacaaaagactacgaatcacaaactaaaacaagcaaaaacagccaataacacacatc

SEQ ID NO: 488352 - DNA, 534 bp, Homo sapiens
  misc_feature (14)..(14): n is a, c, g, or t
  misc_feature (119)..(119): n is a, c, g, or t
  misc_feature (143)..(143): n is a, c, g, or t
  misc_feature (150)..(150): n is a, c, g, or t
  misc_feature (331)..(331): n is a, c, g, or t
  misc_feature (468)..(468): n is a, c, g, or t
  misc_feature (488)..(488): n is a, c, g, or t
  misc_feature (510)..(510): n is a, c, g, or t
aataattaagcatnaaacacaacagcagaacccaggatacttgtctccgggccttcattgggcaggagcctgtggaaagtaggagctgctgatcaccatttgaaagaaggtatctttgnctcttatagaggctactattctgntctgctngctgcgtctgttagcttatattgctttaactactcagaagagcaaattcttttcatcatcctttgtacagcgattgtctttaatgggagcttttgctcagtagcggcttttttcactttatgtgccatgggagtatcatatcttactgttatttattgtaacctgctgctcgttaatacangttgtccactgacattcacctgagcttagtcttcattactgagactgctccgtctatttgtaaaacaacatgttccagattgctagttcttacttgacttttttccctcatttcttacacaaagctctgtgtgacantaagtatccatagacatcanctttgccgtttcgattctatgntcatgagtctagttctgattcttg

SEQ ID NO: 488353 - DNA, 2281 bp, Homo sapiens
gtcgtcattggatgttgcggctgtcaatcgccaggctataaataagggagtccggcggctcctctatcaggaagattgtgcatgccgtgggtctgacggcttgagtagcgctagggagaatccctgcaggtaatatttgacttttgcttcatattaatctgagtggaaaataaaagggccctcttctcctctcgcttccctgccgggcaggcgccatggcggaagcctcggcgacgggcgcctgcggagaggcgatggcagcggcggaaggctcctcgggcccggcgggcttgactctgggccggagcttctcgaactaccggcccttcgagccccaggcgttgggcctcagcccgagctggcggctgacgggcttctccggcatgaagggctgaggctgcaaggtcccgcaggaggcgctgctcaaactcctggcgggactgacgcggccggacgtgcggcccccgctgggccggggcctggtgggtggccaggaagaggcgtcccaggaagccggcctgccggcaggagcgggccccagccccacctttccagccctgggcatcgggatggactcctgcgtcatccccctgaggcacgggggcctgtcactggtgcagaccacggacttcttttaccccttggtagaagatccctacatgatggggcgcatagcttgtgccaacgtgctgagtgacctctacgccatggggattactgagtgtgacaacatgttgatgttactcagcgtcagccagagtatgagtgaggaggaacgcgaaaaggtaacgccactcatggtcaaaggctttcgggatgcggctgaggaaggagggacggcagtgaccggtgggcaaacggtggtcaacccttggattataatcggtggagttgccactgtagtatgccaaccaaatgagttcataatgccggacagcgccgtcgttggggacgtgctggtgttaaccaaaccgttaggaacccaggttgctgtcaatgcccaccaatggctggataatcctgaaagatggaataaagtaaagatggtggtctccagagaagaggtggagctggcctatcaggaagccatgttcaatatggctaccctcaacagaactgctgcaggtttaatgcacacatttaatgcccatgcggccacagatatcacaggctttggcattctaggacactcccagaaccttgcaaaacaacaaagaaatgaagtgtcctttgttattcataatctgccaataattgccaagatggctgccgtcagcaaggccagtggacggtttgggcttcttcaaggaacctcagctgaaacctctgggggattactgatttgtctgaaatcaaatcctccaagtacggagagggtcaccaagcgtggatcgttggcattgtggaaaagggaaaccgaacggcccggatcattgacaagccgcgagttattgaagtcctgcctcgtggggccacagctgctgttcttgctcctgacagttcaaatgcctcctctgagcctagctcgtgagatgaaagaacagaagttgtttggaccttagagccattgtccacaatcacggatggttctcaagagttgattgtaagaaatttccaaagaaggctgcctgcatagtggttccggctgccctttctaggtgattggaatcagcccatctaaagcagtctttatatgcattccgaggccagagtaacattttgaactttggggggatatttgttcatcacttgggtagaagaggagcaaaaatacctctgttttctcttgccaaagtaagatgaagctattccaggttgagggatttttctttgcacggggttgattaatttctgcacagggagtgagattattaaagtaacacacacacaaagtaaattgcaaaatgaaaaaaattagaagcaaatgagttttggaccaatattgttgataaatctaaattgttaagagagatcttataatgcaacatcaaattctttattcaattttactgaagtactggctctttcctgctctggacaagaattgagcaacttgtctgatgactgggaaaggaggacctgcaaccatctgacttggtctctgttaatgacgtctctccctctaaaccccattaaggactgggagaggcagagcaagcctcagagcccaggcctcagtggtcattaagatgttaagtcttttgcggcagattcctggtgatttgatcaataaagagtaatttcttgctaaataaataaaagaaaccttgttgaaaaacta

SEQ ID NO: 488354 - DNA, 2258 bp, Homo sapiens
gtcgtcattggatgttgcggctgtcaatcgccaggctataaataagggagtccggcggctcctctatcaggaagattgtgcatgccgtgggtctgacggcttgagtagcgctagggagaatccctgcaggtaatatttgacttttgcttcatattaatctgagtggaaaataaaagggccctcttctcctctcgcttccctgccgggcaggcgccatggcggaagcctcggcgacgggcgcctgcggagaggcgatggcagcggcggaaggctcctcgggcccggcgggcttgactctgggccggagcttctcgaactaccggcccttcgagccccaggcgttgggcctcagcccgagctggcggctgacgggcttctccggcatgaagggctgaggctgcaaggtcccgcaggaggcgctgctcaaactcctggcgggactgacgcggccggacgtgcggcccccgctgggccggggcctggtgggtggccaggaagaggcgtcccaggaagccggcctgccggcaggagcgggccccagccccacctttccagccctgggcatcgggatggactcctgcgtcatccccctgaggcacgggggcctgtcactggtgcagaccacggacttcttttaccccttggtagaagatccctacatgatggggcgcatagcttgtgccaacgtgctgagtgacctctacgccatggggattactgagtgtgacaacatgttgatgttactcagcgtcagccagagtatgagtgaggaggaacgcgaaaaggtaacgccactcatggtcaaaggctttcgggatgcggctgaggaaggagggacggcagtgaccggtgggcaaacggtggtcaacccttggattataatcggtggagttgccactgtagtatgccaaccaaatgagttcataatgccggacagcgccgtcgttggggacgtgctggtgttaaccaaaccgttaggaacccaggttgctgtcaatgcccaccaatggctggataatcctgaaagatggaataaagtaaagatggtggtctccagagaagaggtggagctggcctatcaggaagccatgttcaatatggctaccctcaacagaactgctgcaggtttaatgcacacatttaatgcccatgcggccacagatatcacaggctttggcattctaggacactcccagaaccttgcaaaacaacaaagaaatgaagtgtcctttgttattcataatctgccaataattgccaagatggctgccgtcagcaaggccagtggacggtttgggcttcttcaaggaacctcagctgaaacctctgggggattactgatttgtctgccaagagaacaggcggctcgcttttgttctgaaatcaaatcctccaagtacggagagggtcaccaagcgtggatcgttggcattgtggtgcctcgtggggccacagctgctgttcttgctcctgacagttcaaatgcctcctctgagcctagctcgtgagatgaaagaacagaagttgtttggaccttagagccattgtccacaatcacggatggttctcaagagttgattgtaagaaatttccaaagaaggctgcctgcatagtggttccggctgccctttctaggtgattggaatcagcccatctaaagcagtctttatatgcattccgaggccagagtaacattttgaactttggggggatatttgttcatcacttgggtagaagaggagcaaaaatacctctgttttctcttgccaaagtaagatgaagctattccaggttgagggatttttctttgcacggggttgattaatttctgcacagggagtgagattattaaagtaacacacacacaaagtaaattgcaaaatgaaaaaaattagaagcaaatgagttttggaccaatattgttgataaatctaaattgttaagagagatcttataatgcaacatcaaattctttattcaattttactgaagtactggctctttcctgctctggacaagaattgagcaacttgtctgatgactgggaaaggaggacctgcaaccatctgacttggtctctgttaatgacgtctctccctctaaaccccattaaggactgggagaggcagagcaagcctcagagcccaggcctcagtggtcattaagatgttaagtcttttgcggcagattcctggtgatttgatcaataaagagtaatttcttgctaaataaataaaagaaaccttgttgaaaaacta

SEQ ID NO: 488355 - DNA, 223 bp, Homo sapiens
tcgatcgccgtcgtgtcgattccgcgccagttgcctgtctcacattcggaggctggcgtccagggcctcagcgcggaggacgactcagagttggggtctcactgtgttgcccagactgggctcgaactcttggcctcaggcgatcctcttgcctcagcttcccagaatgccgagatgatagagacggagtctgactgcgttacccaggctggacttcaactct

SEQ ID NO: 488356 - DNA, 1098 bp, Homo sapiens
  misc_feature (1)..(1): n is a, c, g, or t
ncttgtgttgtgtgtcccccgaacacaagggcgcgcctttctcttttggggtggcgccacagtcagggttgtggctcaacaacggggcacgctatggggtcatcgtcggggtgccccgtgtttcagcttatgtcctcaggttggccctgcttgttattggcctctcacccccctgtgggcggttctcgatgtttttgtcccaaatccacatgtggcgcccaagtgctgtggctggtcgtttctgtgtagtcccccaggtggtcccccctgtgtaggggccgtgggggccgcccgccctcgtgggctacgtcccacggttatttttgtgaggggggtgttttacacggcggctctgcttgtgtatgatatataggggggcccccacactccgcgcttgttgtgccccacacgtttcactctttcacggatgtcgctccccgcttgcgtcgcgtatggtcccccgcgcttttttgggcgcccctctctctctctctggggacactctccaccgggggtttttagggacaccccttgggggcccctccgccaacaggcgccccttggcgccccacaccctggagttgtctgggcccacaaattattgtcgtggtgttctcctcgccttgtccactctgtcacagcttgcttgtgtccccagtgtcactgagaatgtggcgccacttgggctcaccgcggggtgccccctctgctctgcttgttgggactctccctcgtgctccctcgggccacgcgaagttgctctgcgttgaaggagaggttggaagccctctttttgaagggggcgcctttccctgctcaccgctcgttttccccaccacctcggggggctgggccctgcctcccccctgtaccctccctttccctcgcacggcctcggagcctcgtaagggctggaactgaaggttcacaggttctccccccacacctgttctcaccccccacactttgtgccccaccttctagagcccgggagacccctgggggaagaattgtgtctcctcttctgtctccccatggtttttgggtgtttttcttgttgtgtcccggattcccataaaatttaagaaattgcttcct

SEQ ID NO: 488357 - DNA, 2359 bp, Homo sapiens
  misc_feature (1264)..(1264): n is a, c, g, or t
  misc_feature (1270)..(1270): n is a, c, g, or t
  misc_feature (1275)..(1275): n is a, c, g, or t
gtcgtcattggatgttgcggctgtcaatcgccaggctataaataagggagtccggcggctcctctatcaggaagattgtgcatgccgtgggtctgacggcttgagtagcgctagggagaatccctgcaggtaatatttgacttttgcttcatattaatctgagtggaaaataaaagggccctcttctcctctcgcttccctgccgggcaggcgccatggcggaagcctcggcgacgggcgcctgcggagaggcgatggcagcggcggaaggctcctcgggcccggcgggcttgactctgggccggagcttctcgaactaccggcccttcgagccccaggcgttgggcctcagcccgagctggcggctgacgggcttctccggcatgaagggctgaggctgcaaggtcccgcaggaggcgctgctcaaactcctggcgggactgacgcggccggacgtgcggcccccgctgggccggggcctggtgggtggccaggaagaggcgtcccaggaagccggcctgccggcaggagcgggccccagccccacctttccagccctgggcatcgggatggactcctgcgtcatccccctgaggcacgggggcctgtcactggtgcagaccacggacttcttttaccccttggtagaagatccctacatgatggggcgcatagcttgtgccaacgtgctgagtgacctctacgccatggggattactgagtgtgacaacatgttgatgttactcagcgtcagccagagtatgagtgaggaggaacgcgaaaaggtaacgccactcatggtcaaaggctttcgggatgcggctgaggaaggagggacggcagtgaccggtgggcaaacggtggtcaacccttggattataatcggtggagttgccactgtagtatgccaaccaaatgagttcataatgccggacagcgccgtcgttggggacgtgctggtgttaaccaaaccgttaggaacccaggttgctgtcaatgcccaccaatggctggataatcctgaaagatggaataaagtaaagatggtggtctccagagaagaggtggagctggcctatcaggaagccatgttcaatatggctaccctcaacagaactgctgcaggtttaatgcacacatttaatgcccatgcggccacagatatcacaggctttggcattctaggacactcccagaaccttgcaaaacaacaaagaaatgaagtgtcctttgttattcataatctgccaataattccgttgtnccaaanttaanttggccaagatggctgccgtcagcaaggccagtggacggtttgggcttcttcaaggaacctcagctgaaacctctgggggattactgatttgtctgccaagagaacaggcggctcgcttttgttctgaaatcaaatcctccaagtacggagagggtcaccaagcgtggatcgttggcattgtggaaaagggaaaccgaacggcccggatcattgacaagccgcgagttattgaagtccccttttgggccccccttttccgggttgcctcgtggggccacagctgctgttcttgctcctgacagttcaaatgcctcctctgagcctagctcgtgagatgaaagaacagaagttgtttggaccttagagccattgtccacaatcacggatggttctcaagagttgattgtaagaaatttccaaagaaggctgcctgcatagtggttccggctgccctttctaggtgattggaatcagcccatctaaagcagtctttatatgcattccgaggccagagtaacattttgaactttggggggatatttgttcatcacttgggtagaagaggagcaaaaatacctctgttttctcttgccaaagtaagatgaagctattccaggttgagggatttttctttgcacggggttgattaatttctgcacagggagtgagattattaaagtaacacacacacaaagtaaattgcaaaatgaaaaaaattagaagcaaatgagttttggaccaatattgttgataaatctaaattgttaagagagatcttataatgcaacatcaaattctttattcaattttactgaagtactggctctttcctgctctggacaagaattgagcaacttgtctgatgactgggaaaggaggacctgcaaccatctgacttggtctctgttaatgacgtctctccctctaaaccccattaaggactgggagaggcagagcaagcctcagagcccaggcctcagtggtcattaagatgttaagtcttttgcggcagattcctggtgatttgatcaataaagagtaatttcttgctaaataaataaaagaaaccttgttgaaaaacta

SEQ ID NO: 488358 - DNA, 2016 bp, Homo sapiens
gtcgtcattggatgttgcggctgtcaatcgccaggctataaataagggagtccggcggctcctctatcaggaagattgtgcatgccgtgggtctgacggcttgagtagcgctagggagaatccctgcaggtaatatttgacttttgcttcatattaatctgagtggaaaataaaagggccctcttctcctctcgcttccctgccgggcaggcgccatggcggaagcctcggcgacgggcgcctgcggagaggcgatggcagcggcggaaggctcctcgggcccggcgggcttgactctgggccggagcttctcgaactaccggcccttcgagccccaggcgttgggcctcagcccgagctggcggctgacgggcttctccggcatgaagggctgaggctgcaaggtcccgcaggaggcgctgctcaaactcctggcgggactgacgcggccggacgtgcggcccccgctgggccggggcctggtgggtggccaggaagaggcgtcccaggaagccggcctgccggcaggagcgggccccagccccacctttccagccctgggcatcgggatggactcctgcgtcatccccctgaggcacgggggcctgtcactggtgcagaccacggacttcttttaccccttggtagaagatccctacatgatggggcgcatagcttgtgccaacgtgctgagtgacctctacgccatggggattactgagtgtgacaacatgttgatgttactcagcgtcagccagagtatgagtgaggaggaacgcgaaaaggtaacgccactcatggtcaaaggctttcgggatgcggctgaggaaggagggacggcagtgaccggtgggcaaacggtggtcaacccttggattataatcggtggagttgccactgtagtatgccaaccaaatgagttcataatgccggacagcgccgtcgttggggacgtgctggtgttaaccaaaccgttaggaacccaggttgctgtcaatgcccaccaatggctggataatcctgaaagatggaataaagtaaagatggtggtctccagagaagaggtggagctggcctatcaggaagccatgttcaatatggctaccctcaacagaactgctgcaggtttaatgcacacatttaatgcccatgcggccacagatatcacaggctttggcattctaggacactcccagaaccttgcaaaacaacaaagaaatgaagtgtcctttgttattcataatctgccaataattgccaagatggctgccgtcagcaaggccagtggacggtttgggcttcttcaaggaacctcagctgaaacctctgggggattactgatttgtctgccaagagaacaggcggctcgcttttgttctgaaatcaaatcctccaagtacggagagggtcaccaagcgtggatcgttggcattgtggaaaagggaaaccgaacggcccggatcattgacaagccgcgagttattgaagtcctgcctcgtggggccacagctgctgttcttgctcctgacagttcaaatgcctcctctgagcctagctcgtgagatgaaagaacagaagttgtttggaccttagagccattgtccacaatcacggatggttctcaagagttgattgtaagaaatttccaaagaaggctgcctgcatagtggttccggctgccctttctaggtgattggaatcagcccatctaaagcagtctttatatgcattccgaggccagagtaacattttgaactttggggggatatttgttcatcacttgggtagaagaggagcaaaaatacctctgttttctcttgccaaagtaagatgaagctattccaggttgagggatttttctttgcacggggttgattaatttctgcacagggagtgagattattaaagtaacacacacacaaagtaaattgcaaaatgaaaaaaattagaagcaaatgagttttggaccaatattgttgataaatctaaatgtaagaggttccgtcgagctacgag

SEQ ID NO: 488359 - DNA, 316 bp, Homo sapiens
  misc_feature (314)..(316): n is a, c, g, or t
agcaaactttttttttttattaaaaaaaagatatattaacagttttaaaagtcagtagaataaaatcttaaagcactcataatatggcatccttcaatttgtgtaaaaaagcagatctttttaaaaagatacttctgtaacttaagaaatttggcatttaaatcatattttgtctttaggtaacaccccccctttgaaaaaatgttttgtttgtttcacttgtttccctcccagccccaaaccttttgttctctccgtgaaacttacctttccctttttctttctcttttttttttttgtatattattgtttcnnn

SEQ ID NO: 488360 - DNA, 344 bp, Homo sapiens
  misc_feature (90)..(90): n is a, c, g, or t
  misc_feature (131)..(131): n is a, c, g, or t
  misc_feature (171)..(171): n is a, c, g, or t
  misc_feature (195)..(195): n is a, c, g, or t
  misc_feature (211)..(211): n is a, c, g, or t
  misc_feature (267)..(267): n is a, c, g, or t
  misc_feature (290)..(290): n is a, c, g, or t
  misc_feature (334)..(334): n is a, c, g, or t
cagtatatgttccaaaaattgcatgggatatgcttatactaaaaaaaaaaaaaaaatgttgctaggctggacacggtggctcatacccgnaatcccagcactttgggaggccgaggcgggcagatcacctnaggtcaggagttcgagaccaacctgggcaacatggtgaanccatctctactaaaaatacaaaanttagccgggtttggtngtgcacacttattaatcccagctactcaggaggctgagacaggagaattgcttgancctgggaggcagaggtcacagtnagccaagattcacgccactatactccagcctgggtgacagggtntagacttccg

SEQ ID NO: 488361 - DNA, 2258 bp, Homo sapiens
gtcgtcattggatgttgcggctgtcaatcgccaggctataaataagggagtccggcggctcctctatcaggaagattgtgcatgccgtgggtctgacggcttgagtagcgctagggagaatccctgcaggtaatatttgacttttgcttcatattaatctgagtggaaaataaaagggccctcttctcctctcgcttccctgccgggcaggcgccatggcggaagcctcggcgacgggcgcctgcggagaggcgatggcagcggcggaaggctcctcgggcccggcgggcttgactctgggccggagcttctcgaactaccggcccttcgagccccaggcgttgggcctcagcccgagctggcggctgacgggcttctccggcatgaagggctgaggctgcaaggtcccgcaggaggcgctgctcaaactcctggcgggactgacgcggccggacgtgcggcccccgctgggccggggcctggtgggtggccaggaagaggcgtcccaggaagccggcctgccggcaggagcgggccccagccccacctttccagccctgggcatcgggatggactcctgcgtcatccccctgaggcacgggggcctgtcactggtgcagaccacggacttcttttaccccttggtagaagatccctacatgatggggcgcatagcttgtgccaacgtgctgagtgacctctacgccatggggattactgagtgtgacaacatgttgatgttactcagcgtcagccagagtatgagtgaggaggaacgcgggacggcagtgaccggtgggcaaacggtggtcaacccttggattataatcggtggagttgccactgtagtatgccaaccaaatgagttcataatgccggacagcgccgtcgttggggacgtgctggtgttaaccaaaccgttaggaacccaggttgctgtcaatgcccaccaatggctggataatcctgaaagatggaataaagtaaagatggtggtctccagagaagaggtggagctggcctatcaggaagccatgttcaatatggctaccctcaacagaactgctgcaggtttaatgcacacatttaatgcccatgcggccacagatatcacaggctttggcattctaggacactcccagaaccttgcaaaacaacaaagaaatgaagtgtcctttgttattcataatctgccaataattgccaagatggctgccgtcagcaaggccagtggacggtttgggcttcttcaaggaacctcagctgaaacctctgggggattactgatttgtctgccaagagaacaggcggctcgcttttgttctgaaatcaaatcctccaagtacggagagggtcaccaagcgtggatcgttggcattgtggaaaagggaaaccgaacggcccggatcattgacaagccgcgagttattgaagtcctgcctcgtggggccacagctgctgttcttgctcctgacagttcaaatgcctcctctgagcctagctcgtgagatgaaagaacagaagttgtttggaccttagagccattgtccacaatcacggatggttctcaagagttgattgtaagaaatttccaaagaaggctgcctgcatagtggttccggctgccctttctaggtgattggaatcagcccatctaaagcagtctttatatgcattccgaggccagagtaacattttgaactttggggggatatttgttcatcacttgggtagaagaggagcaaaaatacctctgttttctcttgccaaagtaagatgaagctattccaggttgagggatttttctttgcacggggttgattaatttctgcacagggagtgagattattaaagtaacacacacacaaagtaaattgcaaaatgaaaaaaattagaagcaaatgagttttggaccaatattgttgataaatctaaattgttaagagagatcttataatgcaacatcaaattctttattcaattttactgaagtactggctctttcctgctctggacaagaattgagcaacttgtctgatgactgggaaaggaggacctgcaaccatctgacttggtctctgttaatgacgtctctccctctaaaccccattaaggactgggagaggcagagcaagcctcagagcccaggcctcagtggtcattaagatgttaagtcttttgcggcagattcctggtgatttgatcaataaagagtaatttcttgctaaataaataaaagaaaccttgttgaaaaacta

SEQ ID NO: 488362 - DNA, 821 bp, Homo sapiens
  misc_feature (7)..(7): n is a, c, g, or t
  misc_feature (99)..(99): n is a, c, g, or t
  misc_feature (104)..(104): n is a, c, g, or t
  misc_feature (125)..(125): n is a, c, g, or t
  misc_feature (132)..(132): n is a, c, g, or t
  misc_feature (146)..(146): n is a, c, g, or t
  misc_feature (179)..(179): n is a, c, g, or t
  misc_feature (186)..(186): n is a, c, g, or t
  misc_feature (188)..(188): n is a, c, g, or t
  misc_feature (192)..(192): n is a, c, g, or t
  misc_feature (200)..(200): n is a, c, g, or t
  misc_feature (218)..(218): n is a, c, g, or t
  misc_feature (223)..(223): n is a, c, g, or t
  misc_feature (230)..(230): n is a, c, g, or t
  misc_feature (276)..(276): n is a, c, g, or t
  misc_feature (301)..(301): n is a, c, g, or t
  misc_feature (309)..(309): n is a, c, g, or t
  misc_feature (341)..(342): n is a, c, g, or t
  misc_feature (346)..(346): n is a, c, g, or t
  misc_feature (348)..(348): n is a, c, g, or t
  misc_feature (357)..(357): n is a, c, g, or t
  misc_feature (360)..(360): n is a, c, g, or t
  misc_feature (417)..(417): n is a, c, g, or t
  misc_feature (428)..(428): n is a, c, g, or t
  misc_feature (430)..(430): n is a, c, g, or t
  misc_feature (432)..(432): n is a, c, g, or t
  misc_feature (435)..(435): n is a, c, g, or t
  misc_feature (442)..(442): n is a, c, g, or t
  misc_feature (448)..(448): n is a, c, g, or t
  misc_feature (453)..(456): n is a, c, g, or t
  misc_feature (458)..(458): n is a, c, g, or t
  misc_feature (464)..(465): n is a, c, g, or t
  misc_feature (471)..(471): n is a, c, g, or t
  misc_feature (473)..(473): n is a, c, g, or t
  misc_feature (478)..(478): n is a, c, g, or t
  misc_feature (484)..(484): n is a, c, g, or t
  misc_feature (489)..(490): n is a, c, g, or t
  misc_feature (493)..(493): n is a, c, g, or t
  misc_feature (503)..(504): n is a, c, g, or t
  misc_feature (523)..(523): n is a, c, g, or t
  misc_feature (550)..(550): n is a, c, g, or t
  misc_feature (561)..(561): n is a, c, g, or t
  misc_feature (819)..(819): n is a, c, g, or t
ataagtntgttctaatacatgacaccaatgggatattatagcttcttatttaaaaagaatatcatttgtaagtatacagttattataaacagttaattntatanattcattatctgtattcaaanaatcttntaaggactgaacgnattcccatactgcttacattcatagggtttttntcctttntntttncttccttncttttgttggtgcgtggntgttntgtgggntttccctctttgctttttttctttgggcttctctcctgtgtgtgtnctttcttgtttttgtcgggttcttnttgtcttntcctcttggctttctctctttgggtttctctnncttntntctcctttnttntttttgttttgttgtggttgtctttttggcttttgccctttgctttctttgtttggntttctcccttntntnttnttttttntttttnttttnnnntngttgtnntgtttncnttgcntctttntttgnnttntttgtgtttnnttcctgtgtgggtgttttnttgtctttgtgtgggtgttggcttgcngtttgcttttntgctttcttttctttctttgggtttctctcctttgtgtgttcttgcatgtattcaaaggatcttggcagatatgaatgctttcccacaatgcttacattcacagagcttctctcctctgtgcatcctttcatgtatttgcaaagaagagaaattatggaatgcttttctacatttcttacattcacagggtttctctccagtgtgtgtccttttatgagatcgaagatttttgacagatctgaaggctttcccaaatngc

SEQ ID NO: 488363 - DNA, 2253 bp, Homo sapiens
gtcgtcattggatgttgcggctgtcaatcgccaggctataaataagggagtccggcggctcctctatcaggaagattgtgcatgccgtgggtctgacggcttgagtagcgctagggagaatccctgcaggtaatatttgacttttgcttcatattaatctgagtggcctcggcgacgggcgcctgcggagaggcgatggcagcggcggaaggctcctcgggcccggcgggcttgactctgggccggagcttctcgaactaccggcccttcgagccccaggcgttgggcctcagcccgagctggcggctgacgggcttctccggcatgaagggctgaggctgcaaggtcccgcaggaggcgctgctcaaactcctggcgggactgacgcggccggacgtgcggcccccgctgggccggggcctggtgggtggccaggaagaggcgtcccaggaagccggcctgccggcaggagcgggccccagccccacctttccagccctgggcatcgggatggactcctgcgtcatccccctgaggcacgggggcctgtcactggtgcagaccacggacttcttttaccccttggtagaagatccctacatgatggggcgcatagcttgtgccaacgtgctgagtgacctctacgccatggggattactgagtgtgacaacatgttgatgttactcagcgtcagccagagtatgagtgaggaggaacgcgaaaaggtaacgccactcatggtcaaaggctttcgggatgcggctgaggaaggagggacggcagtgaccggtgggcaaacggtggtcaacccttggattataatcggtggagttgccactgtagtatgccaaccaaatgagttcataatgccggacagcgccgtcgttggggacgtgctggtgttaaccaaaccgttaggaacccaggttgctgtcaatgcccaccaatggctggataatcctgaaagatggaataaagtaaagatggtggtctccagagaagaggtggagctggcctatcaggaagccatgttcaatatggctaccctcaacagaactgctgcaggtttaatgcacacatttaatgcccatgcggccacagatatcacaggctttggcattctaggacactcccagaaccttgcaaaacaacaaagaaatgaagtgtcctttgttattcataatctgccaataattgccaagatggctgccgtcagcaaggccagtggacggtttgggcttcttcaaggaacctcagctgaaacctctgggggattactgatttgtctgccaagagaacaggcggctcgcttttgttctgaaatcaaatcctccaagtacggagagggtcaccaagcgtggatcgttggcattgtggaaaagggaaaccgaacggcccggatcattgacaagccgcgagttattgaagtcctgcctcgtggggccacagctgctgttcttgctcctgacagttcaaatgcctcctctgagcctagctcgtgagatgaaagaacagaagttgtttggaccttagagccattgtccacaatcacggatggttctcaagagttgattgtaagaaatttccaaagaaggctgcctgcatagtggttccggctgccctttctaggtgattggaatcagcccatctaaagcagtctttatatgcattccgaggccagagtaacattttgaactttggggggatatttgttcatcacttgggtagaagaggagcaaaaatacctctgttttctcttgccaaagtaagatgaagctattccaggttgagggatttttctttgcacggggttgattaatttctgcacagggagtgagattattaaagtaacacacacacaaagtaaattgcaaaatgaaaaaaattagaagcaaatgagttttggaccaatattgttgataaatctaaattgttaagagagatcttataatgcaacatcaaattctttattcaattttactgaagtactggctctttcctgctctggacaagaattgagcaacttgtctgatgactgggaaaggaggacctgcaaccatctgacttggtctctgttaatgacgtctctccctctaaaccccattaaggactgggagaggcagagcaagcctcagagcccaggcctcagtggtcattaagatgttaagtcttttgcggcagattcctggtgatttgatcaataaagagtaatttcttgctaaataaataaaagaaaccttgttgaaaaacta

SEQ ID NO: 488364 - DNA, 1625 bp, Homo sapiens
gcaccttggcacaagctatgcgccccatcatgtagggatcttctaccaaggggtaaaagtagtccgtggtctgcaccagtgacaggcctccgtgcctcagggggatgacgcaggagtccatcccgatgcccagggctggaaaaggtgggacggcagtgaccggtgggcaaacggtggtcaacccttggattataatcggtggagttgccactgtagtatgccaaccaaatgagttcataatgccggacagcgccgtcgttggggacgtgctggtgttaaccaaaccgttaggaacccaggttgctgtcaatgcccaccaatggctggataatcctgaaagatggaataaagtaaagatggtggtctccagagaagaggtggagctggcctatcaggaagccatgttcaatatggctaccctcaacagaactgctgcaggtttaatgcacacatttaatgcccatgcggccacagatatcacaggctttggcattctaggacactcccagaaccttgcaaaacaacaaagaaatgaagtgtcctttgttattcataatctgccaataattgccaagatggctgccgtcagcaaggccagtggacggtttgggcttcttcaaggaacctcagctgaaacctctgggggattactgatttgtctgccaagagaacaggcggctcgcttttgttctgaaatcaaatcctccaagtacggagagggtcaccaagcgtggatcgttggcattgtggaaaagggaaaccgaacggcccggatcattgacaagccgcgagttattgaagtcctgcctcgtggggccacagctgctgttcttgctcctgacagttcaaatgcctcctctgagcctagctcgtgagatgaaagaacagaagttgtttggaccttagagccattgtccacaatcacggatggttctcaagagttgattgtaagaaatttccaaagaaggctgcctgcatagtggttccggctgccctttctaggtgattggaatcagcccatctaaagcagtctttatatgcattccgaggccagagtaacattttgaactttggggggatatttgttcatcacttgggtagaagaggagcaaaaatacctctgttttctcttgccaaagtaagatgaagctattccaggttgagggatttttctttgcacggggttgattaatttctgcacagggagtgagattattaaagtaacacacacacaaagtaaattgcaaaatgaaaaaaattagaagcaaatgagttttggaccaatattgttgataaatctaaattgttaagagagatcttataatgcaacatcaaattctttattcaattttactgaagtactggctctttcctgctctggacaagaattgagcaacttgtctgatgactgggaaaggaggacctgcaaccatctgacttggtctctgttaatgacgtctctccctctaaaccccattaaggactgggagaggcagagcaagcctcagagcccaggcctcagtggtcattaagatgttaagtcttttgcggcagattcctggtgatttgatcaataaagagtaatttcttgctaaataaataaaagaaaccttgttgaaaaacta

SEQ ID NO: 488365 - DNA, 689 bp, Homo sapiens
gtctttacaaccctgcgtgtgcaatccctgacgcaccgactgtgcatgccccagggcaagcaccagggcgaccgtggcaagtccaacatcacttccattcaagcatccatccaaactcatttggcatgcattcatcctgacacattgtttccatatgttgggcagccagcacacattgtaggtgctcccacagccaggaatgccagccatgcatcactgcccattgtctcctaatctgcagagtgcacaggccatgttgagtatgcttgcattgagtgccaatgcacaccacccattgcattgcatgctacatggcactcatcacctgaatgtgtggcacaccattagtgacacaccagacgcacaacacaccaagcctacctagtgacaagccacacacgttatgcattggcaacgtcccattcattcccggggagtgggacaacaataggtaggggtgctatcttgtatgctttatcgcaccccacaccatgtgccaaggcgcaccctcattcaaaccgtgcacgcaacgtcaacgagggaaccacagtagatttggcatcttggccaccacacattacactgtggattgccccacaggaccttgaccgatgtccccactggattggcctctgggggttggcccccacttattggcaacacccccactggcatctgacacgggatca

SEQ ID NO: 488366 - DNA, 1034 bp, Homo sapiens
ctgctgctattctccgtgacttcgcatgccgactaagagatgagagcaccaagaacgagagctaggctacctcgaggcacagactagacagagcaaccacgctgtactcatgatccgggggtagtggcaagatgaatagagtggtacgcgcgaggcaaccttaccggagcctaggctcatatgaaaggtaggcctcgtgatgacgaattctttagctcatgcattataactcttgtgcccgcaagtaaccctcttaatatacactttttgtaaacaccagcatgtgtggtcgtctcgaagaagaactagccagaatcctgaggctcccttagggccaagagggccgtcgctatgcaagagagctcctataagttaaaggacttattacgtaagcgtggttatacagagagcccaacgagttcaggatagtgtacacccgtcaaatacccaggtatcgtagatgctcccgctgctgttgcatggaatgtcctgcaaatagcgctccaagcagcatgtcatcatcatggcatataagtaagcaattttatgttagtcataccagataaacaatgaaaggggtgctcgtccgaaataagacctgcgtcgggattccaagattggaaactgacccatgttattatgtcgcagcaaagggggccctaatagtgaaggtcgtcattataaagctaggccactggcccgctcgtttaccccacgtcgtagacctgggcacaccttgctacgcctgggcgatcttgggtgaaggaccccttaacttctgtggcgttggaccatactttgcgacaaacctaccctcacggagattaaaacctctaagggtacatctcaccatttaacgcggtaaacgggttacccaactgcatatttcatggcggtggaaagttttggttcccggatgtatatggaattacggaaacacacaacacttagctatatatactaccataacatataatatcacacacagaaccactcttcaactatgaactgatacacccgccatctgacatcaa

SEQ ID NO: 488367 - DNA, 436 bp, Homo sapiens
tatttggcccaaggcccctttttaaagttgggtggcctgaaggttgggttaaggttgtgttttaagcctggtcactgaaatacctaagagcctgaaaaaatgcttggcctgatttgacaaataaagggctggtctgttaatcagactgtataagaggtgggaaggctaaatttgaggaattacgtctgacagaagggaatgataaggctaaactgaagaattatgtctgacagaagggaagaaatgactgtggtggccttctcagaccctgtaggaaaggactctacttatccagtgaaagtgtctacctagactaagaggtgttttagttatcttactcggggcatgttgagtaaagctaatttgccagtccatgggtgggggcaaatcctcgattttgggccccggtcccaatacagcctatcgtgcgccgttc

SEQ ID NO: 488368 - DNA, 1092 bp, Homo sapiens
  misc_feature (619)..(619): n is a, c, g, or t
catcagatggtcccgacagctagcccatgggcctgtgctgtggggcctgaccaagggtggagaggccctgaggggagctgttctgggacgatggagagagcctggaagtgcttggatgcgaggaggcctacactactagtgtcatcttcctggccaggaataacactgatcgtgacatgcatctcggtacagtgtgatcgagtgagggagctggcctgtagctgcagacggtgactagtccgtgggccgtggtcaacggcgcaccgcagataggatccaatctcacaacgggggatcccgatgatcttcccaaaaatatcatacctacatgacccgcgatcagctcaagggtcacctggactattactggtgatcatcagctatgctctgactgagagaagaagcacgctttcctggtgttaaggctgagtgtattatggccgggacaggaagtagttgattgctgtactacatacgcagaaagggaacggccatgggtttccacacaaggggaacaagccacgaagtcgcattgatggtcgccggagcacgtcaagacatggctgatgcggagggcctggcggggtcgtcaatgctggttcatcccatggtgagacanttgttgtgacactttaatgcacagttttttgcataaggccccgggcccgtctactacggcataaggttttaatggcgcaaaaccctagcccttgggcttgcccgtggggggtgccttccttgggggcgcccggccgctttccgaataaaaccgggctggttttctatttgacgcgacgggccaacagggcacaaacggtgtccccgcaattgcgctcctcacctggttttgcgacccgcgcccatttataaacagggccgcaaaaggctttttccgcgccagcgggcgcggcgaaccaacagccgccctctttttaggaagggtgtttctgagcgcccagtcgtgtagaggcaccccccatgtggacaggtgtgtgtgggggccacacccatcttgggcggcaaaatttggggggggcctttagggtttccccttcgggcttggggttcctaaaacataaagacacggcgatg

SEQ ID NO: 488369 - DNA, 355 bp, Homo sapiens
  misc_feature (86)..(86): n is a, c, g, or t
gtcggtatatctcgcactgaaacaagctaacatgactaacacccttaattccatccaccctcctctccctaggaggctgcccccgntacgcggtttttgcccaaatgggcctttatcgaagaatcacaaaaaacaatagcctcatcatcccgcacgattatagccaccatcaccctgttaacctctattctacctacgcctaatctactccacctcaatcacatactccccatatctaacaaggtaaaaataaaatgacagtttgaacatacaaaaacccaccctattcctccccagattcatcgcccttaccacgctactcctactctatctccctttttatagctaataatct

SEQ ID NO: 488370 - DNA, 218 bp, Homo sapiens
tgctggactaggtcgatgaatcaactttcatctgtcacaagacgtaacagaaccagtttgtttataatcaaacgctgtgcgcatagccacatgagataacgcaggatgctggaccaaaaatagcagttattttataaacgcaactggttacaatcattctatctcggatgaaagccgtctctgagagacaagcctgatcaatgaccaacaatttattg

SEQ ID NO: 488371 - DNA, 164 bp, Homo sapiens
cctacatgatgatgatgaagatgaagacatgttagagactgcagatggagacagcatgaatacggaagaatcacatcaaggatctactccaagtgaccaccagccaaacacattacgagttcatagacgagatttgttcaaccactccattgtttgttagatgt

SEQ ID NO: 488372 - DNA, 308 bp, Homo sapiens
  misc_feature (3)..(3): n is a, c, g, or t
  misc_feature (5)..(6): n is a, c, g, or t
  misc_feature (40)..(42): n is a, c, g, or t
  misc_feature (51)..(51): n is a, c, g, or t
  misc_feature (53)..(53): n is a, c, g, or t
  misc_feature (76)..(76): n is a, c, g, or t
  misc_feature (147)..(149): n is a, c, g, or t
  misc_feature (151)..(152): n is a, c, g, or t
  misc_feature (160)..(160): n is a, c, g, or t
  misc_feature (169)..(169): n is a, c, g, or t
  misc_feature (202)..(202): n is a, c, g, or t
  misc_feature (222)..(222): n is a, c, g, or t
  misc_feature (224)..(224): n is a, c, g, or t
  misc_feature (233)..(233): n is a, c, g, or t
  misc_feature (289)..(289): n is a, c, g, or t
  misc_feature (291)..(292): n is a, c, g, or t
ggnanntgcagcatagtagaagcgctatctgggaagctannnttttgcagntntgatatgtctagcttatctactnccaaactaatttttgtttttgctgagactaatgcttattcattttctctaatatggcaaccattataaccnnnanntattattnacatacctnagaagtacagtgttacctctatataccaaagcnacattttaaaagtgccattnanaaatgtatnactagccctcctttttccaacaagaagggactgagagatgcagaaatatttgtganannaaattaaagcatttag

SEQ ID NO: 488373 - DNA, 1011 bp, Homo sapiens
gcgccaactgtgaatcagcgtgactgtgagtactgtcagataccatgtccaggctcagctacaagaagctcagccgcagaagcgtgcaggatctgcagcccaccttctctgagaggacgaattccaacagaagtagcccgcagaggcacacagcctctaagaacggctgtgcccgaaagatggctttaactacgtgatggggtgactatctgcctcgtatgccgcttcaatgcagcagctgtggatcctaagaagaagattcacaccagtctgagtaatctggtagtgaagggacacaatacttgatcatccaggaaacacggaaaaacctcggaataccccagaagagcctgtcttgctctgaggagttcaaggaagtgatggacctgccgacgtgtggagccaggaacttaaagacaacattataaggacaaaagccacaggttcagggattatggggagcccagaacacaggcgatcaaagtccatctcggcctcagacacgtcttgaagcaagcagaagcaggggatgtggagatgaggagaaggcactcagcaagaaataccgaagcgatttcctggagagctcaagtgccccgatggggagccacaagtagggccatcatacatcgaaggaaaggccacgtgtcacagacatcgacggacagggcatccgacgtccccaggctggagggagcccggcagaaggagcccaacatgtggcgaggcgatgcacgagatggagtctcacacgacgagcacccacaccggacaaaacgggagggtagtgaaggcaaaaggtagctgaatcacactaggtacgggggtcctcaaaaaccatggagtaccagcgaaggcctgacggcgggcgagcagctaaaagcacgtcgcaggaaatggggacgaaaggaaacttgccggatgctgaccacaaccgacgccaaggcgagcccagcgaaggcacagacgagccgacaccgcacgatgcctcctgacctgccggcagcaaca

SEQ ID NO: 488374 - DNA, 205 bp, Homo sapiens
gattttttttttcccccccccccccttttttggtattttttcaggcggggcaaaacttaaagaaccaaaagcattttttcattcccatgggggacaggaggcccccaaacggtttaattaaaaaattttcccttttttttcaaacaaggaagaatttaggggggggaggccctttttttcatgacaaaaaaaaggatttttttta

SEQ ID NO: 488375 - DNA, 448 bp, Homo sapiens
  misc_feature (339)..(339): n is a, c, g, or t
  misc_feature (429)..(429): n is a, c, g, or t
  misc_feature (444)..(444): n is a, c, g, or t
ccattacggggtatatacccaaaggattataaatcattctactataaagacacatgcacacatatatttattgtgacactgttcacaatagcaaagacttggaaccaactcagatgcccatcaatgatagactggataaagaaaatgtggcacatatataccatggaatactatggcagccataaaaaaggatgagttcatgtcctttgcagggacatagatgaagctggaaaccatcattctcagcaaactaacacaagaacagaaaaaccaaacactgcattgtaggagagccaggcaaagggattgtggaccaactcaggcattccacttgaggantatttggatccaaacagcaaactgttttattcctggattgcagggtgttggggccaaacttaacttctggttcccgctggcccggagggntttgtttgaagggcnttca

SEQ ID NO: 488376 - DNA, 307 bp, Homo sapiens
cctctgcatattcaatcccatatgcatttcactccaagcagcatattttacacacagctgaaggaaatatctctcagtgcgttcagtgtgtgtgtctatgtgcactctatgtatagggcataggtgtaattaggtgaagggcggaccgaaccacattgatatgtacatgctagacgtccgctcgatggtcggtaacaacagactgttacactgtcctcatattcaaagtcttcacggggatagtcttctgtactttgctgtctgtaagggatctcatccagtaacacagcttaccgttatcggggga

SEQ ID NO: 488377 - DNA, 1403 bp, Homo sapiens
  misc_feature (1403)..(1403): n is a, c, g, or t
ggaagctgaggccgctacgggcaagcgggcagcggaggatgatgaggatgacgatgtcgagtaccaagaagcagaagaccgacgaggatgacgtagacagcaaaaaaggaaaagttaaacgtaaaaaaaacaaggccgccgtgaccctattcagcctcctccgacttcccgtctcagaatcgtaaacggtgggtcaccttcgagttagagaggcccgcccgcgccaccgtagggcagtgccagcccgcgagactgacgacgcgcgtcgtccagccagccaaggccaagaccagtgagaattgtgcaacagggggaggaaaagaactacgaatcgcaatagacgtttcccaatagggccgcttgcgtctgtattgttcgtgtaagagagggtacctgttaacagacgagcgacaactatgtgatatcggggtagtcttgtgtcattacgttgtagcgacttttgaagtaattgttagggtagcacttagtgtgggtataagggcgattcaaggcccaagtatttgtgcatagtggagtccttcggggaattggacgcaaaaacccgaaggcgccgtttcggatgaagggcggttttccttcgtgggtccgcgtaacattttccgtgggaagctgtgtaaccttttgattgcggtgggtgtaagcccaagtggttatccacagtctgacgataagagagtacgttgcacaacaggggtagcaaatctcagaaagaacacctcttttgggttttatgcacatcacatgtagtgaacaagcagattgaggtggtcgtcgagcccagcagaccagatagacaggctaactcaaccgccttgatcagaagggggggggtccaccataagggatattaaacagcggtggtgtaaaccaccaaaggaggtatgattgagtaggtgtgtgaaccacaaaacgggtgagggtcacacacgtatatgatatgtgagggaagaatgatacggactaacacacaatataacggggccatatcgaagcagacatcattttggtgccgcggacgtcaggagtttaacaccacaacagcagcgatcctggtcagcacacatatcgggggaaacaaaaatcctgttgatcgctatgcacgcccatagtaggggaggaaacatcccgttatgagttgttgaaaaatcggatgacagtcacccatttttataaacatgtccaccatggtcatgatggagagtgtgttcgcaacccatatatatcatttgttggagcaccaacagaaacatgctagacgcacttgtaacgtggctactaatgaatgttacaacaggcgaggtcgtttagcatgggtcgttcaaacgtgtagtgtagcagcaatgtgttgttgttaaacagcgagtgcgtatctcacagaacgn

SEQ ID NO: 488378 - DNA, 257 bp, Homo sapiens
tcctaacattatgtctggggctagatacaaacccacgtaatgaaaaagtcagttttacaagcctaattctgtgtcttttttttttatatcaattaaggttaaaaatggcatcaactatttaattcatgaggttctttcattttaaaatttaaccttaagattcaaccgccaggtgcttttatacaggaaacatttttaagaagacgtctgagctcacttttacatgggggtgcctacggccgtcaaggtaagagata

SEQ ID NO: 488379 - DNA, 420 bp, Homo sapiens
tagtcacagaaagatggcacacacacagtctttgaataatgagatcccgcttgttctcattgacaacatcttcacatcaggtaatcacttctctcgttgtaggtaatggagaggtgtttgtctttggcatgtgtgagcgtgtttaacgggatcattctgtgttgggggccagtgccctcatattgtggagaaagagactagagtcatctgcaaaaaggccaaaatatctcttgcgaaacaaaaagtatatgtggcaatctgtagagatcatacggcccgaggtctctctttgtacacatgttccctacaccacctggtataccctttcttgtgatacccggcgcccgctgcggtatattcttagggatcttctcacccgcaaaagtgcgtttcgcgatagagtgctaatctgtgctcacg

SEQ ID NO: 488380 - DNA, 444 bp, Homo sapiens
acaacgtgagtcatcaaattaggaaaaagtgctaaaatatttgttttgaatttagctgaagtaaccaatcagactatcttggagctggaaggaacttggcttatcctcaactcattgactagggatgttaggaatgctggaattgttatagatttcatccttattggcaaatgtacagcctgggcaattgctaatatatcctattgtacttggattaatgactcaggccaaatggaaatctctattaagaaacatgaggaagaaattatccagctctccaaagtagacagcaataatttctttttttatccattacttcaagcatttatcctttgtgttataaacaatcccattatactcttttagttgtttttaaatgcaaaattaaattattttttactatagtcagcctgttgtgttagcaaataaatactaggtcttaaa

SEQ ID NO: 488381 - DNA, 589 bp, Homo sapiens
tcagcgtatcatgtgtatgtcaacttacatatatgagatattctagttatctttctgttgtgaatttctgggttccatgtgtggtctagagagcagactctttatgatttcttttcttttaaatttgttaaagtatagttatagtggcccagaatgttctaccttggtgactattccatgtgaatgtgagaagaatgtgtatactgtggtggtgggatgaaagagagaggtgaattctatccagttgattaataagtagtgtgtcgagttccaagtgcgtcccttaataagcttcttgtctgctggcatcttgtctacgttctgatagagcagtattgaagtctacagctacaaaggtagattcgtctatatcttcttgccgaacctgttagtttatatctcatgtattgggatgcagtgtggtaaagtgacataggcattaaagaactgtgtcgtaggggagaatggagccctttattattatgtaatggcgttcttgatctaataacattatttgcttagaagtctgtactatctgaaatgattcagatacttctatttacttttcattagggttagcatggcgtat

SEQ ID NO: 488382 - DNA, 890 bp, Homo sapiens
  misc_feature (805)..(805): n is a, c, g, or t
gtttcgtgcttttctttcgttcacttctttgtttctgtgtttcttctttgttttttttgtgcctgtttctttttttttttgtcgtcgtcctcgttgttggttctttttgttgtattggtcttttgttctggtgtctctctatcttttacgtttttgttgtccttcaggtaatttgtttttgcttatgtgtttttgtgttttttttttttttcttttttttcttttttttcttgatttccttcctcttttttcgtctttgtcttttttgttgtctttttctctcgtcttcgttttgtccttcgctcttctggttctttggtcttttattccttagtcttttctctcctttattgccttctctttgccatgttttctgtgttgttccttcgtgttgtgatttgccattgttactttgcattagtcacttttcttctgtctcggagctatatattatgtaactaacttgtggaccaactgtagcccttcatggcacatgatagtgatgttaagtcttcagttagtacaagatggtgtctctgttgactccatacattgcagttcgctcatgttcgctctgaatgatgtaagagtctggtagatcaagacatgtttttgaggagtaatctaacaaataatcatctgtgtaatttgcttaagatgccccctgcatttgggaaatattttcttacaatatgagtgttaaattctactaggtggtattaaatgtctcctaggtagatatcttataagtcaaagcagaatagcacatccaggaaccttaatattttaggacaggactttggcnccccccttcttcaccactgatttactttgtgacattgggtaaattagttttcctctctacttttaactaacccggtgatatccta

SEQ ID NO: 488383 - DNA, 181 bp, Homo sapiens
tggggtggggaggaggttatttcatggaggagttatttgcagatgcagagagaaatgagggaagttcgcctacaccgggcatctgcggggtcagtgggggctgctgtatgtctgtggctgccgaagcggggacaggtgacatacggcatcatacgccatagaaggcacgtagcagattagg

SEQ ID NO: 488384 - DNA, 603 bp, Homo sapiens
gcacgccttatcgagcgccgaccaggccttcgcagtcgagtatagccactgggtcaccgtataagccggcgtgagggcctcgctgatgccaccgatgtagcccgcagaacacgggcacactggccgaggctgtaggtcaggccggtttcgaactccacgtgttctacgccgtgcaattccttcaggccgtattggccgctgctgtcgttcaagaacaacgtgccatcgttgagtgtcaccgcttcgtaggaagatgcggtgccgtttgaggaagactttatcgtcgtcttcaccgccggcgacgatctcggtaccggtactcaggcggaaacggtcgtcgcccttgatacccatcccaggaagtctatcgctgtgcaccggactgtagcttgtccgaactgtcggtgcccagcaggacggccggtgtgccgtagtggttggaggtggcggtctgtttgtcgccgacccaggtaaagctgcggctgatggcgtcgaggttactgatgatgatggtgctgtcgcgttcgatgtaatcgtagaacgtcgattgggcgatacgctggatagggtagatgaacatgcttccaggtgcgtccgtaacgg

SEQ ID NO: 488385 - DNA, 200 bp, Homo sapiens
gacacggctacttccagacagagcccctggcttgcttggtaggcaccgcaggacctcagagaacccttacttgagaacactactgtgcaccctctgcaaacctcaatcgggagctgtgaatgccggagagctgtccatcagggtccgtgcacctcctgaatgaacctctcaaagccagccgaacacccgctccagaccca

SEQ ID NO: 488386 - DNA, 321 bp, Homo sapiens
cggggggggggcctttttgggccccctccgggggtttttttactttccctttccgggtgtgcgggcaagggggctgcccctggaacggttcgctccccccccgggttgtgggggggggggttttggcccctttttggcccaaaaattgtttttggcccctttttggcccccaaatttggcttgtggggggggggcccccgccctgcccgtgggcccccccggggggcgggtgggtcccgggcccccgttccccgggccccccggggggtttttccggggggggggtggggggttttttttttttttgttttttttccggta

SEQ ID NO: 488387 - DNA, 287 bp, Homo sapiens
  misc_feature (22)..(22): n is a, c, g, or t
  misc_feature (104)..(104): n is a, c, g, or t
  misc_feature (109)..(109): n is a, c, g, or t
  misc_feature (114)..(115): n is a, c, g, or t
gaaaccctaagagatgggcganaggtaaagtccaccaacccttgggctaatcaggacgaaagagaagggggtgtggggggcagagcgtaaaccaaggcccccangcccnaatcnngcccccaagccatcttcccaatcccagaggccccggcggcctgtgctcctcaccaccctggtcaggggaatagaaggaaatgcaatttccgcctgtctgcccgacttccaaaaactgcctcctcctgcccaggcctcttcccaccaccacctccctccaaagataaccgtgt

SEQ ID NO: 488388 - DNA, 141 bp, Homo sapiens
ctcggatcccagtacaacagctttgaatgagtgttttttcctgttctgtttgaagttatgaatggtactttacagaattcaaatgtatagttatgaatagtatctcagaatagttaccatttatgcaaatgaaacacactt

SEQ ID NO: 488389 - DNA, 139 bp, Homo sapiens
  misc_feature (94)..(94): n is a, c, g, or t
  misc_feature (133)..(133): n is a, c, g, or t
gcggcagtatacagaagccatatcagttgggaaaaactttatcaatcatagagccttttgaagaaaaatttgccaagcgtggttttttgcttgnagacctatatatattacctacaggctgagaaagctttgnatttct

SEQ ID NO: 488390 - DNA, 233 bp, Homo sapiens
atgcactttgtacagtttacaggtgctttttaaatttattttattttattgttttgagatagagtctgctttgtcacccaagctggagtgcagtggtgcaatcatggctcactgcaacctcaacctcccgggctcaagtgatccttctgtctcagcctcctgagtagctggaaatgcaggtgcacactaccacacccagctaattctattttttgtagagacagggtctccct

SEQ ID NO: 488391 - DNA, 242 bp, Homo sapiens
gtccagggctgtgggagatgcagacgactcacgcaggtcactggcttgtcaggagtggatgctgcataagatgagacaacgtccattctgtgcgctgttgcagctgtaaactctcatggtggctctccaggcttcataatcccatgatgaccttgtagtgatgagtgagaagccaagactcgaagtccacagtgccgtgcagcgataacttctggtactgtactcatgccaaccagcgcctg

SEQ ID NO: 488392 - DNA, 193 bp, Homo sapiens
tcctcccgcgagcaggtccaccagaccaacccgctgaggactcagctaccccggccggccacccaggaggcaagggagcagccgccccatctgccccacagtctcacggcctctccagcctcaaccccctgcatcagtccctatccccatgcttccttgccatgatgacaataaagcttgtagactcagcaaa

SEQ ID NO: 488393 - DNA, 240 bp, Homo sapiens
gcacgagaaaaaaaaaaaaaaaaaaaaaaaaaaaaaaaaaaaaaaaaaaaaaaaaaaaaaaaaaaaaaaaaaaaaaaaaaaaaaaaaaaaaaaaaaaaaaaacctggggggggggcccggcccccattcccccttataggggggggaataaaaattcacgggccgtggtttaacaacgtggggaggggaaaaacccgggggttccccaattaaatcgcttggaaaaaaatccccttttcc

SEQ ID NO: 488394 - DNA, 827 bp, Homo sapiens
gccggctgttggtaggctattcagactttgagcaaagcgggctttcggccgcatctaagtttattataagcatgaggtggcacgaggcaggcgttggcgatgccacctgggggtcacattgagtctggagctttcttcatcccaagcgctggcagtgacggggacaaaggtcttaagcccaggtaaaaaggggaggttctagaagcatggccatgtctagcattaacatttggccaccgagcaaaggggaggcaccgacggaggtgtttgttgtgggtatttgtatagatatcgcacacccatttcgtgatcgctacgtttcccttcacgggttaaatagaaccggcaatgtaaatcgacttcagtgccacctgtgagcatttcgatcgaccgatattgtggggtctagttgtgggggattttttaggttatgtgtttagttatcagtaagggtaaatttttattcgtcagggcgggtacaagaagatggtgttgggtgatctatatcgcttgctaattattttaatcctgtattattgaggtagtgggcgtggccggtccggcctagttttgtcccgcggcctgctgagggttatttattttttctcttcttttctgtgttttccgtattggaagaataaaaaaccgccgtatcgcggagattttgagaatgtagttttagtgacggtggtgttctaggagtgttcgtagatattgtgcctcggtatacaagtggtggcaattgcaggaacgatagaagctatttagcgtttttattgttattgatgcgaccccgcggcggttggttgggtggttgtgcggtgggg

SEQ ID NO: 488395 - DNA, 153 bp, Homo sapiens
gaagtaattgttgatggtcaacatacactgggataattatgaaatccagtaaagggccgggcgccaaacgcacatcctgaggtgacaggaaactggcaaatgaaattggcaaattgctaggccccgggtaagggaaagggtacccttcctatg

SEQ ID NO: 488396 - DNA, 1585 bp, Homo sapiens
  misc_feature (714)..(714): n is a, c, g, or t
cgtggtggctcacgcctgtaatcccagcactttgggaggctgagatgggtggatcacctgaggtcatgagtttgagaagagaccagcctggccaacatggtgaaatcccgtctccactaaaaatacaataattaactgggcatggtagcatgcacctgcaatcccagttactcgggaggctgaggcaggagaattgcttgaacccaggaggcggaggttgcagtgaaccaaaattgtgccactgcacctccagcctgggtgacagagtgaaactatgtctcaaacgtaacaaaacaaaacaaaacagtatttattattgtcatcataatataaaagacacagcatcttaacacaaaagaccgaataaaaaacaaggacaatattttaaacatgtactctattctgttttatgaaaaactcaatgcatcgtgcttaattttcttatattgctgtggactattatctcggaccaatgattcatatatggccctggatttcaggatccatgccctttgaacatgtgcttctgcagaaatgcctgcaaactggttacctcacatgattatcagagcctactggagcacgcaaataatatgcggttactaactcatcagattcaaccagtctgcctaatgcacctggaacaaactgctgtccccagtgctgcagggaggccagcattccctgcagattctcacctcacgtgaagggtanaaggccactgttgccccacacagtaccgggcctccaggaggggtagaagacacaccacgttgttgtgcttagtattctattgtattgaacgactaatactactactccacaccgcgagactcgccaccacgacctcatcacagccaaccactcgacctacccacaacgcacacacacaaccaacatagaaaccaccaccacaacacacccaggggaagacgaggagcgcggagacggagagcgcagaacagcgagacgccgcccaccccgactcacacgaagcgacacccaacggcagcagcgagacgcgcagccccaccaccgccccgccggaccacgcgcccaccgcaccgcaccgcaaccaagcagcgcaccgacaagacggcgcgaagcgaccaccagcgacaacgcgggacgggagagcgaggggagggggggggggcggtcgggccccgcggccccgacgagcaccgcagcgggcaggaagagcaggagcacagcgcgcccgcgccgggcacgcaggagacacgccggcaagcggaagcagaggccaggcggagggggagaggagagcacgagggacaggaggacgagaagccggaggggcgcggccggaagaggcgcccacaacgcacccagagacagaccaggagacgacacggaacagcccgaagagcgggcaacaagcaagggagccacaacgacggagcgacgcgaccaccacaagcaagaggaggcaacagagaacaaggacacgagaagcgaggagagaagcaaggagaggaccgccggcgcagaccagacgcgagacagtgcaagcgggagagcacgggaggagcaggagcgagagcgagcaggcagaaacagacag

SEQ ID NO: 488397 - DNA, 882 bp, Homo sapiens
  misc_feature (17)..(17): n is a, c, g, or t
  misc_feature (70)..(70): n is a, c, g, or t
  misc_feature (72)..(72): n is a, c, g, or t
  misc_feature (77)..(77): n is a, c, g, or t
  misc_feature (82)..(82): n is a, c, g, or t
  misc_feature (90)..(91): n is a, c, g, or t
  misc_feature (93)..(94): n is a, c, g, or t
  misc_feature (119)..(119): n is a, c, g, or t
  misc_feature (126)..(126): n is a, c, g, or t
  misc_feature (132)..(132): n is a, c, g, or t
  misc_feature (155)..(155): n is a, c, g, or t
  misc_feature (164)..(165): n is a, c, g, or t
  misc_feature (173)..(173): n is a, c, g, or t
  misc_feature (179)..(179): n is a, c, g, or t
  misc_feature (181)..(181): n is a, c, g, or t
  misc_feature (203)..(203): n is a, c, g, or t
  misc_feature (208)..(208): n is a, c, g, or t
  misc_feature (212)..(212): n is a, c, g, or t
  misc_feature (231)..(231): n is a, c, g, or t
  misc_feature (246)..(246): n is a, c, g, or t
  misc_feature (254)..(254): n is a, c, g, or t
  misc_feature (256)..(256): n is a, c, g, or t
  misc_feature (271)..(271): n is a, c, g, or t
  misc_feature (274)..(274): n is a, c, g, or t
  misc_feature (277)..(278): n is a, c, g, or t
  misc_feature (281)..(281): n is a, c, g, or t
  misc_feature (283)..(283): n is a, c, g, or t
  misc_feature (297)..(297): n is a, c, g, or t
  misc_feature (300)..(300): n is a, c, g, or t
  misc_feature (319)..(319): n is a, c, g, or t
  misc_feature (322)..(322): n is a, c, g, or t
  misc_feature (324)..(324): n is a, c, g, or t
  misc_feature (329)..(329): n is a, c, g, or t
  misc_feature (343)..(343): n is a, c, g, or t
  misc_feature (346)..(346): n is a, c, g, or t
  misc_feature (357)..(357): n is a, c, g, or t
  misc_feature (368)..(368): n is a, c, g, or t
  misc_feature (375)..(375): n is a, c, g, or t
  misc_feature (382)..(382): n is a, c, g, or t
  misc_feature (394)..(394): n is a, c, g, or t
  misc_feature (399)..(399): n is a, c, g, or t
  misc_feature (413)..(413): n is a, c, g, or t
  misc_feature (472)..(472): n is a, c, g, or t
  misc_feature (478)..(478): n is a, c, g, or t
  misc_feature (484)..(484): n is a, c, g, or t
  misc_feature (486)..(486): n is a, c, g, or t
  misc_feature (493)..(493): n is a, c, g, or t
  misc_feature (502)..(502): n is a, c, g, or t
  misc_feature (519)..(519): n is a, c, g, or t
  misc_feature (759)..(759): n is a, c, g, or t
  misc_feature (797)..(797): n is a, c, g, or t
  misc_feature (876)..(876): n is a, c, g, or t
cttgtcccacaatcccnaacctccctcggcagaggggtcttcagccattcagaggagagaagagaaccgngnaaggnaaaantttttttnnannaaaaaaagcaaagtttttttttttnttttagntttttnttcccaggctccctcccccaatnccttaaaannatgaattncagttntnaaaagcagggcagagaaggttnggggnaggnggggggaaggaggaagctntcggggcctcccttnaggctatngntggggagaggggctnttnttnnttntnacaaaccccctttnatngggaggaaaaaggggactngtntnttganaacctggtcgtgtnttnagaacccagtncgaacagaatnaggcctntggactnggagcaacactnccttnacccccaaagattnaggaaaagcaccccaaggacaaggaaaccaatgaggtctgggctagctctgcagctttnggatantagttntngggaagntttttttcntttttaaacagcgtctnactctgttgcctaggatggagcacagaggcaccctcatagctcactgcagcctcaaactcctgggctctggcgatcctcccgcctcagcctcccaagtagctgagaccacaggcacgtgccaccatgctcctagggaaggagcttgagaagaaactgccaggagtggaccagggctggctgctctgtgatgttctctccccacctcccctccagctctcaacttggtggcagggccggcnaccctgctctccctcctaactcccagcctgctgctgcncccttctgggaccctaattttctggactttgagaaatgggctgccctgggggtgcctccaagagccatttgagggattnggtggg

SEQ ID NO: 488398 - DNA, 620 bp, Homo sapiens
  misc_feature (5)..(5): n is a, c, g, or t
gcggngggtggggctggcagggaattagaatttctctctctcttttaatagttttattttgtctgtcctgtttgttcatttggatgttttaatttttaaaaaaaaactttgctgatatttataattttgtatcataagaatgttttcctctacagtatttgtcatgccagtttataacagacagaatttttatttgtatagagtgcttactaatgttaaatagttcagagtatataacatttacattaaggactcatggtaggttttagggtaaggagtttaaaggaaataaatattgaaactgggtctcattgccaattttggtgccaatgagttcgcgtcattccaattacaacgataaatgtatgccatataatctattcatatgaagacttattcttgtcgcgcacatagtacctcatcaagtcttttgacacacgtctatctttaaagaattcatatgtgatgatcccataatgtcctgcctttgtgagacatgactgctcccaagtttcactgcacacacccaccccgaacgacacagtctaccctctcatcactgtcatagctcttccgctctctcatcccttatccgttcacattctctaccctcgtctcct

SEQ ID NO: 488399 - DNA, 131 bp, Homo sapiens
actccctggggactatgggatcactgtccccccacctgtgtggaaggaaggaggaggtgaggggtagggtgagcaaagcggggctgctggcatcaggctgtggctgatctgtggtcagcctggagctcaga

SEQ ID NO: 488400 - DNA, 308 bp, Homo sapiens
tagctgtacggacatagcctgctcactatgacagatacattcggttaactggtactaagataacaggaaaaagacgattaacaaagaaactgtaatcgtccataaactaatgaacataaagcaagtctgttgggaatttaatgaacctttgttaaaaacaccaatattaaaggaagtttattatacccgtcctgggtcgcttaacccggggggtaccatctgatccgagaaatgccttgctaggtaatttcctccttgtgtgagcatcaccgagtgtattacacaacagctacacaggtaagctacag

SEQ ID NO: 488401 - DNA, 779 bp, Homo sapiens
gaggctccatgaatggtgctgggtgcccacggagcgcctgggcaccctgtgagcggctctacgagtggatcagcattgcataagtgatgatggcaggagcaaatgagcaaatgccccctctgtgtccctgatgggagccatgtgatgcccatggtcagtggagccgcaatgccagccttcacagagtgcctcctgccctgctctccagtgttatttgaatgaaccagagaaacctgcaccaacggggaggccccacatgacccagcccgatgcagctccccgggaggatgcccttgaaccccacagtgttgaaagccatgagggatgctcctgaaccatgaaggggtggcaaggactcacccaaacacgaagaataagctatacaaattacaccctgatcgtacctactggtgctatggacgagggtccacgcaaccaagcttgcttgcaccccgggaaggccacaccatcgccatgacaagaggctcccctgttcacaatactgcacacccaaagaaaaccaaagttggaccatatacagttgacaatgcgtcgcgacaagctatgagggatacccagaacggagaacgcccctttccggatgcttgcggaccgatgtgcggaaagtaccttctcgcagacttgatcgggaacgatcatagagaaccgcgcactaactttggcccccacggtcagagaaccacccccataccatacagtaccaatagcatgcacgaaacagtccaccgccgtcttactagcgggcgcacacgaaaaaa

SEQ ID NO: 488402 - DNA, 246 bp, Homo sapiens
ctctacgagcgcaccccagaggttatacttctttcatcatggattacttgcctgttcttgaacttcatataaatgtgaatcatacagtattaatcactatacctgtgataatgcaatattgttgtagtggatatgtaggctaattattcatttatttactttttttggagacggatgttttgctactttattgcccagtgctggagatgcaactggcgctcagtaggcaggggtaccgacgctcgc

SEQ ID NO: 488403 - DNA, 148 bp, Homo sapiens
gttatcaactctcccccgtgtctcatcctgcaaattatgtggacagactccctggcacatgtttggggcttccacctagggccacctagtggtctctctgggtctttccttggtcagatgtttattctacattgttccccaggaacag

SEQ ID NO: 488404 - DNA, 379 bp, Homo sapiens
tgacgatggcttgtgtggccgacgcctgtaatcccacgtcactttggaggccaaggcgggcggatcacctgtaggccaggagttcgagaccagcctgggcaacatggtgaaaccctgtctctactaaaaatataaaattagccaggcgtggtggtgggcacctgtaatcccaggtactttgggaggctgcaggagaattgcctaaacgcgggaggcagaggttgcagtgagtcaagattgtgccactgcactctagcctgggcaacagagcaagactctgtctcataaataaataaataaacaaacaaacagctgttcaccttttccagttattttccatgatctttcttttagctctcctacttctttaattgctgct

SEQ ID NO: 488405 - DNA, 303 bp, Homo sapiens
cgtagaggttcccgtgatgttatcgcccaacactttgattaggcgaagggtgggcggatcacttgaggtcaggagatcaagaccagcctgaccaacatgaagaaaccccatctctactaaaaatacaaaattagccagacgtggcggcgcatgcctgtaatctcagctactccggaggctgaggcaggagaattgcttgaacccgggaggtggaggttgcagtgagccaagatcgtgccattgcactccagcctgggcaacaatgagtgaaactccgtctcaaaaaagaaaatccaacacatt

SEQ ID NO: 488406 - DNA, 361 bp, Homo sapiens
tgcagtggcatgatctgggtttactgcaatctcctcctcctgggttcaagcgattctcctgccttagcctcctgagtagctgggattacaggcctgtgccaccacgcctgactaattattgtactcttagtagagaaagggtttcactatgttggccaggctgggcttgaactcctgacctaggtgatccatctgcctcagcctcccaaagtgctgggattacgggcgtgagcctgagaaaaaaagggcccagcctttttttttttttggcagggtctcactttgttgtcgacgcgggccgcgaattttagatgttatttggcgacacccggaatttctggcccgggcccttgacggcttc

SEQ ID NO: 488407 - DNA, 283 bp, Homo sapiens
gaatgaagcatattttcgtagatgcttcacatgcttcgtaatgatatcagcaaaagaaactgaagatttataatgtgtaacaaatgaaaacaagataaatacgatgggtacagtggtgtgtgcctgtgatatccagctagtcaggaatctgacagctgcaagggagcactagacgaacgagtacaattatgagcctgagcatgggggaccttcatggcaataacaaataggaagcgacagaaagataaaaaaacaagaaagaaaaagaaaaagtacagaacta

SEQ ID NO: 488408 - DNA, 146 bp, Homo sapiens
gcaattaatagaacatcgaccgggcattcaccccggcctgaactcagatcacgtaggcctttactcgttgaacaaacgaacctttaatagcggctgcaccatcggattgtcctagatccaacatcgaggtcgtaaacccatatgtg

SEQ ID NO: 488409 - DNA, 872 bp, Homo sapiens
  misc_feature (300)..(300): n is a, c, g, or t
  misc_feature (346)..(346): n is a, c, g, or t
  misc_feature (462)..(463): n is a, c, g, or t
aagtcactttttcctctctggggtcctgtgtccaaaaggcttaatgagccctttctaatggttctttgattgctttatgagttaggggctgtgaccctagccccagtgccctacaggaaggtgctgacctggacgcccgcaggaccacctgctaaatcaggcccacttggggagcaagccctgaagtgctttattaccttgcctctgagcttagcttccaggttagcctcttagaagcagctcacaaggcctcacagtataattcccataggttagctaactactctcttacctgtgcanaatgaagacaggtcactatccatccctgaagagaaactggggcatnccaggtctgccctctgctctgtggccaaaggccgagcagatccttctctaatctcttcctacgtggaatgctcactgcacttcttcttttctatgaacaggagagtccctggccanngctgccacgttgtcagcacatcatgccacagctgaactaccacagcacacctacatctattccaaccaaagtcttattctgtccaactctttccagtttcacaagtactacgagttcatccatattattaaaactaatttatttttatgcattctttactgcttacgtaacattaaaacacgatgcactaaccccatcggaactagcctttacaagccaaagacttggaactccgcttcctgtacttcagggcatcattttgacctatacgctccttggaactcctgttctcaacaaattttcagatgatagccctggcctctcactccttgcaaggcagtgtttcttttatttcctctcatgttatcccactctctacaaatccgcatacattccgtctgcttccact

SEQ ID NO: 488410 - DNA, 1813 bp, Homo sapiens
  misc_feature (128)..(128): n is a, c, g, or t
  misc_feature (223)..(223): n is a, c, g, or t
  misc_feature (626)..(626): n is a, c, g, or t
  misc_feature (964)..(964): n is a, c, g, or t
  misc_feature (1501)..(1501): n is a, c, g, or t
gattctatatcatatacctagggttctttcagagttagaggaaatagtggcgcttggtaggggttgaagagaaatgtggagtgggatagtgtgggaatacttgtgatcactactatgacatagtagantgttgaccactctaatacttagtgacatataagagtagtgtgattaaatttcattctccctgttagaagtgtattcctaggcaatgtacgatggnctatgtacatgtgttgactcactggtgtgtgccggtgttatagggtagcgatggtggggttgagctattagagattctctgtatattgttgtagcagtggagcataagtggtacggaaacacttaaggtaggtggacatggtctcggttatcccttctcttgaagagtttttaatatatcacatctacgcaaaaggactatgatgctatttatatgtatagttcctgagtttggaccaagctctatagcatggataagaaagtagtatacgactaagaagtttaaaacgctctcactttggatcccatattaaaattcaccctacgaattacatttataagggtaactttttggttagaggtctaggtcacctatatttcggtttatagtaaaacacatcgtngtggaaagaggggcatggtctacgctaggggggtacgtaaggggagaacctaggggacaccaggtttcggaatttggactagcgtaaggtttgtttgcgccaagtgttttggtcacataacctcccaaccggtggatgtagccacaccttaataggcggggtagacaatgccataagggtcttgtggcaattagcgttacaaatacccatgattatatgaaaaaacaccccgaacctaataggcggccggaatttaaaataccgcctaaaggtataccttaggatacaagtcgcggcgtactccacatcggcacttggtggtcgccgcacctccattngtttgaagccgccaatgccggcggtgttttggtggcgacagtgtgcagggaaccccgcgacgaaactacaaggtttccttataaaccgccgcgtaggcggaaaaagtaggctacttccggaattgtgttccccaacaggagagggcgagatatacaccccgggactgtttggtgacgacccgtttcaccaccgaggctaaggccacccggccgagctttttacattcaaaagggggcccacgttgtgcgttgccccatagagggacatatggcctgtcgagacggggttaacacccttgggaataaggagcaaaagcgcgcccacaattgtgttccaatttcgtgggggactcccaggagccgccttcttcgtggggtgtagaacagctataaaccgagggataataaacgggtcacacaacatcatcgggggcgaaacggcactcctcccctcacagcgcattatgagggagcgcacttacaaccccactgtggttctttaggacaaacacacacgtgtgggagattgagacgacnatacgtagggcgcgggaacacccatttatgttgtcaaaacgagtttgggggcggccccctatttaaaacaaccagcgcgatgtattttggcgccgccgactatacttctttcctcgcggggagcaaacaaccttgagaacgcgtcttataagacaaaataccgggggatgagaactacccaccaatagcagacacaaagaaaggaggcacaaaacaagtagctttcgtgcgagcaggttcacacacacaagtggtcggcgccgtagcatagacaagactactcctgcacgcagcggacgaccaaacattgcg

SEQ ID NO: 488411 - DNA, 113 bp, Homo sapiens
atagtggctggtgctcttcgtggcgacatagagattgatcataacccaagtgacatttcttaagaatgttataggaatagatgagacttatgaaggaaagtaaaggtttcaca

SEQ ID NO: 488412 - DNA, 444 bp, Homo sapiens
actccagaggatccccttattcgtgttgcactacccatcaattgaaatcactgtaaggaatataaaaatgatagtttaataacatttcaaatatgaagctatttaaatgtcaactgtgcaggcaatttttaaatatttctagtcaatcataatcactgctttctcagtctttctattcttcctataagcattcgattaaagttgattacacagaattctcttttaatatgcattctgttggggataccaattaagatatctttaacttgtttattttagaaattgattataacgccaggcaacagttgtaaagaggataacattcccagccgatggttttgaaaactactataatatctaattatgtatagatccagactgcttatgtttggcatacaaataattgctgggagttagaatggattgagcaatacatgcaattta

SEQ ID NO: 488413 - DNA, 1657 bp, Homo sapiens
gtattgtgtggttgtgatgatatagtgaatgagtgagtagttttgagtgtgttgtctaccccgtgtattgggactaatcatgaggtgtgttacatgagtagcgcgagctacgtgagtcaagggagtaggtggttgggtggcttcgtctgttcgtttgcttggatttatatgatctgttggtgtaatgataatggtgatcgttcttgtgtctgtgtctgacgaatggagggatataggaattgtgtggtctgttggtctccttctagtgtgtgtaggagacaggtgttttgggttggtgtgtgtgtgggtgtgggtgtgtgtgtttgtcgtggtcctctgctggggtggtggtgggctgttggtggtgggtggtgagtgtagtcgtgttgtgtgttgtgttggtggtgtggtgttgttggtgttgttgtgggcgtctgctgcggtgggggttttttgggtgtgatgagtgtggtgggtgttctcgtgagtgtgtgttgtccgccttccctcctcctgctgttgggtgtgtggttgtggtgggtgtggtgtgtgttttttatgcgtccccctcctccgggctggttgcggactattattgttgtttcttgtggggtgttgttgtgggtcgactacgcgtgcttcttgttttgtggtactacgtgcttgttgtggtggggtgttgttgttgtgttgtcgccgcctgctcctgctgtggtgggtgcgtgttctagcaggagtaggatgagtagtagatactactcgctggctgcttgttggttgttgtggtgtggaagagagctaccatcatcagctctgtgttggtgtgtgtgttctgtgttgtggttgatgtagtttttcttgctgctgttggtggggttgggcggcccaccaacaccacactattgctcgtcttgtgtggtggtgctgtgtggcgcagcagcggcgtgatgtttgtctaaccacgctctgctctgcacagcggcggtgtggtagtgtgtgtttgttgtgggattgtgtttgctctctgtgtagcagaggggggtggctcgccgtctactccgcctgctctggtggtgtgtgtgtttttgtctttggcgggggtggtgtctgctctgcgcgcgcgtgggttggggtgagagagatcttccttccccccggctctgtgggaggcacccgcgctgtgtgtctctctgtgtttgtgtgtgtgctatgaggtagtgtgtttgtggtctcgcgccgccaccccgtcgcgcggtgcgtgtgttgactcttgtgtgtctgtgtgagtgtgtgagaacgacgcgcggtggttgtacatgtttgtatacgcaacgcgagagcatatggggtggtgtacgtgttgtgtggaggatgatatgtgataagaggggttgtgttgtgtgtgtgacacgccacgtctcgtgtgtgcgtgtgattgtgtgtgaagaagaggaagacacacaccccctctgtgtgtgtgtttgtgtgtgttcgtgttgtatgtatgtgtgtgaggacacactctggtgaggctcccctctccctccaccctctcttctggtgtgatagaaggagaaattattaatgtgctccgcctgacaccccacacaaataataataaaaacaaaacatataatcgtacaaagagaaaaataac

SEQ ID NO: 488414 - DNA, 716 bp, Homo sapiens
caaccaccagagctctctcgatctgcttgtggatgatggatggtactgccagtgccgctgtgtgcccattgccaagctgcgagctactgtggtgctggctctgccggtgctggcctgcttggctggcaggagtcatcttcatctgacctggaatgctgcactgtgggtgatagccatcatgtgtcattgtcttgatgtgtctgcccagagccctgctcacccagtgactgtgatgtgtgtcttgggatgtttcactgaagggcaacgatgaaagccgcaattgtgctccatgcttgccccttcagaactgtgtgctgcacttccagtctttgcatgtgcattggcccatgtgttcccagttgtcccctatagtcatgtcctccataccaatgagcttctacttgcaagaatgtgagcgtcgcattcacctcgggggacaaattgtcatggtgctggggtgcttgccccacaatgtgcccactgtgaatgtggctatgacaccaggattgacggtcccaagctcttggcttgacagacgtcctggcacctccaatcgctcaactggttttccctgtgtgcacatcctccgacttgattgggccggtggttgcttggttgacttatcttgctcgtgcagccttggtagtgcgggttgggtgaaccctttgtgttcctgagctctccttcccatcttgcccccatcttttcctccccag

SEQ ID NO: 488415 - DNA, 138 bp, Homo sapiens
tctagaggactcccgggcgtgggggactgattgccaaaggcccgtctcaaagtactcccaggcggtgccagccgtgtaccgaggggcccattcccaaagtagccacacgacgagccgcacgaagagcctcacaatgcg

SEQ ID NO: 488416 - DNA, 237 bp, Homo sapiens
gggagagggggtgggaccaggcatcaggagcgggatgcagcgatttcgtcacatgaccttgtcggccctggccgttcctgtccggcctccagtgggcaccagatctccagccattgcgtgaccacgtcccgtcgccagcaatccgctcagcgagattctagcagaggggagaaagccaggggccgtggggacccagggggtgagaaaggggcgggcagagagcagggagtccaccca

SEQ ID NO: 488417 - DNA, 627 bp, Homo sapiens
ggtaaaatgactagaaccccggagatgacggctacttcgttaaatgggtaggatgaatggctcggaaaaagtgaaacagagatggtactctccttaccgaacgaattgcccattaagtgatcgaggaatagagatgtagtggtcgtcgagggatgtacctctaggaaacgaggaggacttggtgtctagattggggatgggataaccgagaccaaacctgccaagagggggagaaagaggaataaggtcggtgacaccattttcgttacggcctaaccctgaaccctcgtgataacccatttttaacatcatatcataggcaatatcagaataatatgaagaaataagggagtaagagatcatacctgtggacacaggacagacgtcgtatccgtttagctcaatgcccggagcggatgcgagaacagataccaaagttatggaggtaggctctctgaggatggtgatgatcttaccatcgttgatcatcttcaactgttggttggaacgttgaagagaccgctgtgaccttggtgtcgccatgggcatcccagaatgagatggtctggtggttgcatgtccatgacggtgcagtccacgtcgagttgaactccgcaccctttactt

SEQ ID NO: 488418 - DNA, 153 bp, Homo sapiens
gagtgagattctgtttcaaaaaaaaaaaaaaggaaaaaaaaaaaaattgatgggttttcaccatttgtgtttaacattacggccccacccaaaaaaaacccggtatatatgtataatctatttcaaacataagggggggggaaacattgaacc

SEQ ID NO: 488419 - DNA, 106 bp, Homo sapiens
ctggcagtacggatgtggtgtgaaaaatgaggtggccattaccctcccccgcaaacatacaagtatctagctttgaacagtggttccactacatgaaaaacactgt

SEQ ID NO: 488420 - DNA, 125 bp, Homo sapiens
catgggctggtggacttataacgtgctcgtgctgttcacccgttggtagtttggctgcgttgggtggtggcctcggcttccttggacctttaaagccctgttgatgccgttactactcctacaag

SEQ ID NO: 488421 - DNA, 282 bp, Homo sapiens
gtgagtgcagagagaatggcaactatctgccacatccagttgctatgggagcatcggctactgtttggtgtgtcttccccaacggcacggaggtccccaacaccagcaagacgcgggcagcataactgcagtgagtcacaggaactggaggatccgtcttctgggctgggtgtgagcaagcaggatctggggccagtcgccatgtgagagcagtagaggcaggtcttcaacatcctgccagccccatacagctacagctttctggctcacttcagccccctt

SEQ ID NO: 488422 - DNA, 360 bp, Homo sapiens
  misc_feature (76)..(76): n is a, c, g, or t
  misc_feature (96)..(96): n is a, c, g, or t
  misc_feature (104)..(104): n is a, c, g, or t
  misc_feature (127)..(127): n is a, c, g, or t
  misc_feature (200)..(200): n is a, c, g, or t
  misc_feature (315)..(315): n is a, c, g, or t
ttaggcccgggcccctggcaagtcctccaccggtgcctcctttggggaagggaaccagccctccaaagcaggagantggcaaaagctttttgtttnaccaggtnagccccggccactccctgccaantccatgaccaggcccccatttgtaccctgcttcccaaactcccaggacctggaaacaggattgtttggggccnaggggccagggtgtgaggtttcccctccgttgcggctgggctcctgtggataacattgctaacgaaccgcctttggttcccctcaggttggttcctgccccccccctgctgtatnatattaatgtggaaggtcatcaataaaggggaattgtgttggtga

SEQ ID NO: 488423 - DNA, 1049 bp, Homo sapiens
ccctactcggcgctttgtcttacacttgcgctttcctctcgtcttcactcctgcttattgacctccccccaatgatctctacgttagcctgatcgtcctctttctccgtcatgctttctgtcttcggaaacccgctcttggttactctttatcgcgttatcgagcctccaatgctcgtgccctccttagcccgtcttaacttctaactggtcccgaacccctcgcaatcacttatacttacgccggtactccccaatccgttgttgctatcactagattgttcagattgtctttctgcgtaactctgccgttgataatcgtccctttgtgggtccccccctctttctgaatcggggaatttatactttcctttcgagtgtcttgtgtcccctgtcttccgcctgatcttctcttacgggaaatcgtgccaatgggccgtatcccttctgtgtatgtatgcattacactgcgcctcggcaagtggcatcaccagtcgattgttccgtgtcgtacctggttcgctctgttacacactgcggggtggtagtccttggaacgtccatggccatgtctcccgttgatatgtgccacatacacagtcatgctcatctaatgccatcccccacacgtaatctcaccgtggattcagtctcactgcggtgtcaacaccatcgaccgtgtgacgactgcatgcgagtctgctcatcactcgttggtgtccagccctgtgtcctcacagccaagacacctgccagcatgttccaggtctggggcgatcatcaggggatccacggtggctgacctgccactcgtacacaccactgcgctgtggcgtctcacacacgggctcacaggcaccattcctcttcatggtgcatggagctcgctttggggaggcacacaggtctgtggcatgtgcacaccacgattccatggagttaccagccgtgcctacgaggctgcccgtgcatgccccacactcaacccctgcgaggtggcgcgtgcacatgatggggctgggtgctggggatagaatctggtacggagga

SEQ ID NO: 488424 - DNA, 406 bp, Homo sapiens
gtggcataaagcatggggtcatggggtcatggcctcatggccatggggtcatgcgtaaagcagagctgtgggtccagggtctgacagatgggactcactgcagggcccctcctctctgtcctcacctgaagcagttgcatccatcagtccttcgcccatcccagagttttggtgatggcttccctgtgccaggctttccgcaggagactggaggccaagacaagtacaagccacggggctctatcatcaaggacccaacaggcagcaacataggctgtggtgaagaccctgaattctatgttcttgtgggtcttgggagtttctctgttgtctctgctccatgctaattgcatagcatttctttcttcccctatgtaacaccgagaaatacagtatccaaactgct

SEQ ID NO: 488425 - DNA, 320 bp, Homo sapiens
gtggcctactggagacagggtggactcagctacatccgatactcccagatttgtgccaaagcagtgaaagatgccctgaagacagaattcaaagccaatgctgagaagacttttggcagccacgttaaaattgtgaaagtaaaaaaggaataattttccctgactaaagcctgaaatgctacatttccaaggggaaaatgtgtgggcccatgttatggcagatttaaaaggatctccttccatgggaaaaaaaaaaatcctgttttgttcataaattggcaatgtccataaattgaaaaatggttccctgttactcttga

SEQ ID NO: 488426 - DNA, 1049 bp, Homo sapiens
  misc_feature (1049)..(1049): n is a, c, g, or t
cagcttacggctaggtacgaggctgggtttgaatcggccgagggcctgcccggccctgtccatggcccggcgcagaggactccgtgctgcgcagtcccgatagcatcgtcgaggtgaagagcgaatttgactgccgagttccgactgcttcgcgctgcctcgatgcttcggtgagcggttccagtgagttctcgcggttgctttgctgtggctgtgtgcaaccaagatcaccggaacatggacagtgcatacattaggctatacagagaatgctacactgagcagaccctgcatgccaccatcacctaagcagacagacagacatgcaccatggagccctgcgcacaagatgagtgccccacagaacaactagcagcacatatctagcgtgcatacaaaatcagtcgagattgaaggcacggagtgtaacaaagctagagagccaagaccgatccttgataggatgcaaagaaacgccattgaaactctcaatgcagtcgactttgaggcatattattgcacatccaaaaccatacatcataagcaacgacagagcaggcaaaacagacaccagcgaggcacacatcatagcaaacgcagtgaccaacagcagagcaaaccccacattagacaacacacaccccgcggacaaccaaccatatagacataacctcaaaacacaatagacacaccaagaaagaataaacacagaacaaaggagatcaacaaatacaagaaccaaaacgacctatagagaacaataacaaagaaaacagcacgaacacacaaaccagaaccaagggcaagcagcggaattgcacgaaacagcaaatagaaacacacagaacacaagccaacccaggcagcattcataccacatcccaacaaaaagcgaacaaaacagcaagatcagtagtggagaacaacaaaagagcacaattgaactacaaggcggataccaaacgaaacctagtcaaaagtacaccgaccgcggaacagagcaacaacaagaacaaagaagcaaaagaaaagcaaagacaacaaaaaan

SEQ ID NO: 488427 - DNA, 984 bp, Homo sapiens
  misc_feature (264)..(264): n is a, c, g, or t
gtgggcccaagggtgtgcgcgcccccccggggtggggcgcgttctgtttctctgcgggcgtgctatgtggtggccacgagggctattctgtcgggaggcccggcattcgccgcttggggtgacaccgagggagcgcgcttttcgggcggccacgcgattctcgtccccggggaaagctggagaacctttgttcacgggggatgcctttgttgggccgcgtccgacgccctgtggctcagtgccaggtcggtcaggtcaaaccancgctggcctcccctgtaaggcaaactgaactcgcgcggttccctgactggaatactgtcccttaagtcgaatgcttgctccgggaaaaatgatttcccctccagtgtcaagggtaagcaacccccgacttgcagcaggtgcggggcaatttgtttgccccgccctcccgaggttacatgtgggctatggttgaggctccgcactagcgttgtcgcaccgcttctattattggacaagctatcgggccaatatcacaatactttaattgcaggaactgcttgtctacaagtttgttaaagattaagtgggagatgtgaatccaaccagttttgggtataacatacatacgcgagggccccacacacattatgtgggtacacgggtgataaacaatacaaaaagcttaaatttcttgcgtaaggatgattgaagtgcgtggtgcacagaaattttattcgtaagagaagctgcgcccggtagtaaggggggtgattcatccgtgttattatcccacacatgaatagtggggtggtcgcccacggggtaattgctcacctacactttcgtgcgcccgtctgaaggccgaggaagagagatagctcgcatctgtagccccgcagcagtgctgggcgactgcgcgtgacaccagcagctgatcgcccctctggcgcgatgtccacccgcgggacacaaagagaacctccttctctacatagacac

SEQ ID NO: 488428 - DNA, 392 bp, Homo sapiens
agtggcttcacgtggcttcacaacaatcatttgttatttctagtgagatctgtggagttgattgggatcagactgagtagttcctctgtatattctgtgatgtagctgaggatacacccacattcagctgggagcttaaggctggaacatccacgataatctctcatcctcaaaagtctcatatccacatggacctctcatctttcagtaatccagctgagaatctttgcagcatgatggctagcttccaaaaaggaatcacaggacagctgccagtctcttacagcctaggctaggacatatactaaatttcttctgctgcactatagtaagcaaagccatacataaggccagccaaaaatcaagagaaacagactccacttgtagcacga

SEQ ID NO: 488429 - DNA, 344 bp, Homo sapiens
gtttctccatacacataaacaatgtccccctggtcacattcccctcacccccaggcaatcatcattttcttttctgcctctatgatttttactactctaagaatcttatataagtggaatcacacagtatttgtctttttgtgactggctgatttcattgaacatgagctagagtttcatcaatgacggaatgcagaatttgcttcctttttaaaggctgaatactattccaacgtataaatatagcacattttgtatatccctgttcatagcagcattattcacaatagccaaaatgtgaaagcaacccaaacgtccactgccagatgaatggataaacaaaa

SEQ ID NO: 488430 - DNA, 103 bp, Homo sapiens
  misc_feature (19)..(19): n is a, c, g, or t
  misc_feature (59)..(59): n is a, c, g, or t
  misc_feature (79)..(79): n is a, c, g, or t
cgctgcatgcgtcagcgcnacgcgacgacagcgcgcgcgacgcgcgcgacgcacaaaanaaatgcatgccaacacgaanatatgtgcacacaaacgcaaacgc

SEQ ID NO: 488431 - DNA, 288 bp, Homo sapiens
cggcgcgatacgctctagacggggttcgctgttcttggcggctggttacgacactcatgacctcaagttatccagttgcctcagcctcccaataatgctgggattacaggcctgagccaccatgcctgacctaaggtgttacttgggcagtgtaggtatacatacaagggctaccggtatggggtcccaatattatactataagaaccatttaatcaaatggtggcaacaagtcggcaaacactgtgtgtatgctaacgtccacggggcacacatcaaaagcacgaaa

SEQ ID NO: 488432 - DNA, 563 bp, Homo sapiens
tatatgctgtctcatgctttgaccgttgtctgaaaaaaaaaaaagggggggggtcataaacaaggggtctggttaaactagtaaagggtggtaaagggagtcttggtgaaattttcctaagaaaccagaaggtctcctattgggtagaaaagtgacatcaagattataacaagtacccgtactataagagaataacatatatggtccagatgggagatgcaactatgagggcagaagggttatacaatgatccagatggtagtaagcagaaaacctcactagacacaaaaggtcatcgggggtccccatcccagggtgacagctctgcaagaatatgcagcagtcccagtgaaacggctatgattggagctaatatgctggtacagctaaaggagcaatctctttaaaccccgggctaatatatcgggggcactacggcctaatattattaatggaaaggaagacctcctttaatggtgccggttaacagaagggcagatgtgcctagaaagggagtagtcatacacaagttgcactcgggataatctctgaagggcagctaa

SEQ ID NO: 488433 - DNA, 189 bp, Homo sapiens
cgatcctattatctgttcgtgatactaggttagtcattttgattcttcgaggttagtatagcattagtctttgcttgggtcttgagttaaacggttgttgatgagatatttaggaggtggggatcaatagagggggaaatagaatgatcagtactgcggcgggtaggcctaatttctctcggaccaatg

SEQ ID NO: 488434 - DNA, 107 bp, Homo sapiens
ccggtgtatgtgggtacttccggtgatgacacgcgggtcgaacacgcatgtagacatccaatgagtgcagcagcaggccctgtagccaggagtgtgccaacgtctac

SEQ ID NO: 488435 - DNA, 181 bp, Homo sapiens
tggagccggagagttctcttttctttgtgagggcaggcgccttaatggttcgccgaataggggcgtgcctttgaaagcgcctgtgtccggcgtgtctgttgagctctcgttgcccttgaaaatccgtggcagagggtgtaaatctcgcgcctgggctgtacccatatcggcagcaggtctc

SEQ ID NO: 488436 - DNA, 771 bp, Homo sapiens
cccaatgcacacacaattaagccaggaagcagcttgcaaccactagcctggggagggtccgcatgtgtcaagggtgagggcaacagatgctggacccaggagctctctgccacaggtcagtctacaaggcctcagggaccaacttgccaacagctggacttgatcactagctggcaaactgagctcacgtatcgggtggaataacaagcggactttgctctctgctgtgcaaaacgctgtttttagaggatttgccacagcagcggatagagcaggagagcaccaccggagcccttgagacatccttgagaagagccacagcataagagactgccctgcttggtgttttgcaggatgatggtggcccttcgaggagcttctgcattgctggttctgttccttgcagcttttctgcccccgccgcagtgtacccaggacccagccatggtgcattacatctaccagcgctttcgagtcttggagcaagggctggaaaaatgtacccaagcaacgagggcatacattcaagaattccaagagttctcaaaaaatatatctgtcatgctgggaagatgtcagacctacacaagtgagtacaagagtgcagtgggtaacttggcactgagagttgaacgtgcccaacgggagattgactacatacaataccttcgagaggctgacgagtgcatcgtatcagaggacaagacactggcagaaatgttgctccaagaagctgaagaagagaaaaagatccggactcttgctgcaatg

SEQ ID NO: 488437 - DNA, 435 bp, Homo sapiens
  misc_feature (317)..(317): n is a, c, g, or t
  misc_feature (341)..(341): n is a, c, g, or t
  misc_feature (345)..(345): n is a, c, g, or t
  misc_feature (348)..(348): n is a, c, g, or t
  misc_feature (352)..(352): n is a, c, g, or t
  misc_feature (356)..(357): n is a, c, g, or t
  misc_feature (365)..(365): n is a, c, g, or t
  misc_feature (377)..(377): n is a, c, g, or t
  misc_feature (386)..(386): n is a, c, g, or t
  misc_feature (388)..(388): n is a, c, g, or t
  misc_feature (399)..(399): n is a, c, g, or t
ccacacctctgcagagagaatggccagcaggaaggcggggacccggggcaaggtggcagccaccaagcaggcccaacgtggttcttccaacgtcttttccatgtttgaacaagcccagatacaggagttcaaagagccttcagctgtatcgaccagaatcgtgatggcatcatctgcaaggcagacctgagggagacctactccagctggggaaggtgagtgtccagaggaggagctggacgccatgctgcaagagggcaagggcccatcaacttcaccgtcttcctaacgttctttggggagagctaattggacanaccccccgggagccatcctgagtncctnccncatntttnncccagccncaaaggggtgtnacaaggatnanttcagcagctnctccccccaaggagaaatttcctcagctgggtgaca

SEQ ID NO: 488438 - DNA, 164 bp, Homo sapiens
tgctgggtacgtgcttgatcttaaagatgttttacactatccctgcacccctcgtcccagcctctcttcactttcacttggactgaccctgacaccctttaggctcagcaaattacctgggctgtactgctgcaaagcttcacagacagcccccattacttcaa

SEQ ID NO: 488439 - DNA, 280 bp, Homo sapiens
ccacacctctgcagagagaatggccagcaggaaggcggggacccggggcaaggtggcagccaccaagcaggcccaacgtggttcttccaacgtcttttccatgtttgaacaagcccagatacaggagttcaaagagccttcagctgtatcgaccagaatcgtgatggcatcatctgcaaggcagacctgagggagacctactccagctgggaggtagttccagagagagctgacgcatgtgcagagggcagggcccatcacttacgtctctagtcttgga

SEQ ID NO: 488440 - DNA, 128 bp, Homo sapiens
caaggtttctggtcctggcccttcctgctcctgatggccccttcctatgggtgccacgcggacttctttctagggtggcctttcccatctgtggtgtggcagagcccagcacgtgggggatcacacag

SEQ ID NO: 488441 - DNA, 470 bp, Homo sapiens
  misc_feature (43)..(43): n is a, c, g, or t
  misc_feature (84)..(84): n is a, c, g, or t
  misc_feature (90)..(90): n is a, c, g, or t
  misc_feature (397)..(397): n is a, c, g, or t
  misc_feature (401)..(401): n is a, c, g, or t
  misc_feature (407)..(407): n is a, c, g, or t
tgcgggctggttggctttggggctggggtgttggggcgccctnttctgtttttttcttttctgtttttgctccgcttcttgccntcttcntccgctttttgtgttttctgctgctgccttcgttctttgtcctcctttccgctttccgccccccgccgcgccgtttggctctttctttttttccgctcttccccctttccggctccggttttttttgctttcttctgcttctttttttttttctgtttgctttttctgtggtttttcttttttggggctgttcttctttttccctttgttcttttgttcctgcccttctttttcttttctgctggggctggcgcgagtgcttttggttggcgctttgtgtttttggtgcggtttcgccacctatcgntgcngtggcngcggcgccactttcgtgctctgggcttgttctttgcctttttgtttttggcgctatcctcttt

SEQ ID NO: 488442 - DNA, 291 bp, Homo sapiens
ccacacctctgcagagagaatggccagcaggaaggcggggacccggggcaaggtggcagccaccaagcaggcccaacgtggttcttccaacgtcttttccatgtttgaacaagcccagatacaggagttcaaagagccttcagctgtatcgaccagaatcgtgatggcatcatctgcaaggcagacctgagggagacctactccagcttggtgcgtgcaccaccttccaccctgcgcacttgggtacctactctgagcttcttgcggtggagttgcttgggacaagacctg

SEQ ID NO: 488443 - DNA, 245 bp, Homo sapiens
caccctgggttcttgttaaaaatgtagattacaggcctgagccaccgtgcccgggcttttgatttttttgggggccgggggaaaggagtgtcgttgtgttgcccagctggagtgcagtggtgcaatcttagctaactgcaacctctgcctcccgggttaaagtgattctcctgccccagctactcgggaggctgaggcgggagaatggcgtgaacccgggaggcagagcttgcagtgagccaaga

SEQ ID NO: 488444 - DNA, 404 bp, Homo sapiens
  misc_feature (288)..(288): n is a, c, g, or t
  misc_feature (298)..(298): n is a, c, g, or t
  misc_feature (302)..(302): n is a, c, g, or t
  misc_feature (308)..(309): n is a, c, g, or t
  misc_feature (317)..(318): n is a, c, g, or t
  misc_feature (324)..(324): n is a, c, g, or t
  misc_feature (328)..(328): n is a, c, g, or t
  misc_feature (345)..(345): n is a, c, g, or t
  misc_feature (349)..(349): n is a, c, g, or t
  misc_feature (353)..(353): n is a, c, g, or t
  misc_feature (356)..(356): n is a, c, g, or t
ccacacctctgcagagagaatggccagcaggaaggcggggacccggggcaaggtggcagccaccaagcaggcccaacgtggttcttccaacgtcttttccatgtttgaacaagcccagatacaggagttcaaagaagtctctccccacctcccaccttccctagagctggggctgctccaccttaaggccccatcccacaggccttcagctgtatcgaccagaatcgtgatggcatcatctgcaaggcagacctgagggagacctactccagctgggaaggtagtctnagagagagtngagnatgctnnagagcagnnccatantcangttcctagttttggganagtnatgnaanccgagagcatctagtcctcgatttcaccagcgcaagggtgtacagata

SEQ ID NO: 488445 - DNA, 114 bp, Homo sapiens
agtgggcgcgattcggctcagggcgggctcgcctccggggttcacgccattctccggcctcagcctcccaagtagctggtagagccagacagttctgagttcaagagctgggcc

SEQ ID NO: 488446 - DNA, 429 bp, Homo sapiens
ggacctgcttactgggcgttgcaaaaaacatttaactggttcacttacttgagaatttttttttcatttatgggtctaactttactaatgttatatattatgttctccttttcttagtcctatatcccttaaagcagtgacttcatctgctgtgtgacagcacatcaatgagatcacagcagctctgctgttacaagacaaagacttggcggtactgagtgggtaatcacttgcagacacatacatacacgccctggtttcaatggcatttcctagtaattcacttcgacagaaatctccaacagaaatctccactcacaggtgtcacagcccaaagctgtctttgtaatggtgacctcaccctggtatcacagtgactgtcagggaaagaaagcagctgccacttcctggttcactttcaacaccaag

SEQ ID NO: 488447 - DNA, 187 bp, Homo sapiens
taatgtaggattttgagactgtgcatttgtagtttgacacttgacatcagatttactcaggattctaagagattccatgagatctttgcagatctcagacatactctgtaagttgtgatatagactctctaaatgatgacataaagatcagtctaaatgcactttacataaatatattcatcacatg

SEQ ID NO: 488448 - DNA, 375 bp, Homo sapiens
  misc_feature (259)..(259): n is a, c, g, or t
  misc_feature (269)..(269): n is a, c, g, or t
  misc_feature (273)..(273): n is a, c, g, or t
  misc_feature (279)..(280): n is a, c, g, or t
  misc_feature (288)..(289): n is a, c, g, or t
  misc_feature (295)..(295): n is a, c, g, or t
  misc_feature (299)..(299): n is a, c, g, or t
  misc_feature (316)..(316): n is a, c, g, or t
  misc_feature (320)..(320): n is a, c, g, or t
  misc_feature (324)..(324): n is a, c, g, or t
  misc_feature (327)..(327): n is a, c, g, or t
ccacacctctgcagagagaatggccagcaggaaggcggggacccggggcaaggtggcagccaccaagcaggcccaacgtggttcttccaacgtcttttccatgtttgaacaagcccagatacaggagttcaaagaagctggggctgctccaccttaaggccccatcccacaggccttcagctgtatcgaccagaatcgtgatggcatcatctgcaaggcagacctgagggagacctactccagctgggaaggtagtctnagagagagtngagnatgctnnagagcagnnccatantcangttcctagttttggganagtnatgnaanccgagagcatctagtcctcgatttcaccagcgcaagggtgtacagata

SEQ ID NO: 488449 - DNA, 553 bp, Homo sapiens
agcggggtggtctaggcgctgtgaggctgaggcagcgcagccgctgccgcagggtgcgcgatgccttgaacctgggaaactatgtgacgcaacactctggattggaaagacatctatttcatcatgggacaggcaaatttcggatcgagacacagttggttattaacaagtttatcagaaaaagtagcaaaagatgttacgttaggtatcgagagagtggctccttaacttatgaagaattcttgcggagactcgctgagcttcactgattgtacacggctaacagtggcttctggccaggacacaacctcttctctttgaggtacaacctgggtctgattcctctgcttattggaaagttggttgtacgggtgcgtctgtaccaacgacttaacacacaacgcagtgcgcactcgaaggcaggccatccacggactcatgacgttgagtacacagcgtcacttccaactactctcgtgaacgatatcagcaagtcaacccagacaggagctcttggcccagacgcgtccacctactgaagaccctgcatgcc

SEQ ID NO: 488450 - DNA, 501 bp, Homo sapiens
  misc_feature (383)..(383): n is a, c, g, or t
  misc_feature (407)..(407): n is a, c, g, or t
  misc_feature (411)..(411): n is a, c, g, or t
  misc_feature (414)..(414): n is a, c, g, or t
  misc_feature (418)..(418): n is a, c, g, or t
  misc_feature (422)..(423): n is a, c, g, or t
  misc_feature (431)..(431): n is a, c, g, or t
  misc_feature (443)..(443): n is a, c, g, or t
  misc_feature (452)..(452): n is a, c, g, or t
  misc_feature (454)..(454): n is a, c, g, or t
  misc_feature (465)..(465): n is a, c, g, or t
ccacacctctgcagagagaatggccagcaggaaggcggggacccggggcaaggtggcagccaccaagcaggcccaacgtggttcttccaacgtcttttccatgtttgaacaagcccagatacaggagttcaaagaagtctctccccacctcccaccttccctagagctggggctgctccaccttaaggccccatcccacaggccttcagctgtatcgaccagaatcgtgatggcatcatctgcaaggcagacctgagggagacctactccagctggggaaggtgagtgtccagaggaggagctggacgccatgctgcaagagggcaagggcccatcaacttcaccgtcttcctaacgttctttggggagagctaattggacanaccccccgggagccatcctgagtncctnccncatntttnncccagccncaaaggggtgtnacaaggatnanttcagcagctnctccccccaaggagaaatttcctcagctgggtgaca

SEQ ID NO: 488451 - DNA, 230 bp, Homo sapiens
gctatttggttaagcactcacatatatccatttcagccctaaaaaggaatacataatagatgtgtctagcactactagcactgttggtatggcctttccaaaggtcttccactaaagtcccgagaaattcttaatcttgtctacttctcttattgccgtgttaaattttctgagccattagagattttcaaaatcactttgatttttaaaaactcatcaaatgtgaatca

SEQ ID NO: 488452 - DNA, 438 bp, Homo sapiens
cgcgaggatcataccgtagacatcacagaaaagtagagagtccggatcccttatgaatacatgatgtaaaaatcttcaacaaagtagcagcaagaccaatatctgagcaacatataaaagcattatacaccaaaaaaatatggaaaaagggagagtaggaataagccctgtggtactggactggacttaacagtacagatttgggctgttaatggtttttattatatagataaatgcagaaggataaataaatgttcatgtgtataggtctatttgctgagagggcctaaacaaagacactcagtaacaattagcttaccaagcacccagatctcggtttccaaatcctacaagccacacacacacacacacacacacacacacacacaccagtctggaggctcggcgtgtgcaggatggaccctcggcgtgtgcagg

SEQ ID NO: 488453 - DNA, 180 bp, Homo sapiens
ggtcatttttcctcttttttttttaattgggtaggaccccccatataaaaacagtcaatatttggcaatgtggaatttcccaatttaaaaagaatactatgaatggattcatattttttttatattgaataaacaatgtaacatagataaccatataaataaaagtggtatggccagtta

SEQ ID NO: 488454 - DNA, 337 bp, Homo sapiens
  misc_feature (12)..(12): n is a, c, g, or t
  misc_feature (30)..(30): n is a, c, g, or t
  misc_feature (65)..(66): n is a, c, g, or t
  misc_feature (309)..(309): n is a, c, g, or t
  misc_feature (327)..(327): n is a, c, g, or t
gattcggcacgngggggaagattgaggtcnttcttttgcagtgataaaaatgtcctaaaattganngtagcgatggtcacacaactctgaatatgcttaagaccattgaattacacactttacgttggtgaattgtatggtatgtaaattatagttcaataacatagttacaaaagataatcaaaagcatgaaagcactattgatgtggtttggatctgtgtcctcacccgagtctcatgttgaaatgtaagccccctggtgggaaggcgaatgggattatggggcaaagtccccacaaacgggttaanaaccaacccggtcaattnctggtccccc

SEQ ID NO: 488455 - DNA, 159 bp, Homo sapiens
tcaatcgacggttctccaatacacttataactgcattatagttgatatctgtgtgggcgagtgacacaaagagcactctaaaaggctgcgaaaatacagatcatgggggggaattttttttttttttctttttctggggaaaaggttttcccaggggat

SEQ ID NO: 488456 - DNA, 87 bp, Homo sapiens
cagccctgggcttatcttaagaacataaaacctgtctcactggacccaactctctgtcctgttccttattctttctcagtgtcacca

SEQ ID NO: 488457 - DNA, 159 bp, Homo sapiens
tacggtgctacagtgtctagagtctagctgtgatctcgagtcagtactcgtgtgccctctttaagtgtctaacaactaacatttggcgttcaacgttgcgtgtacactcctgccatcggtgttcaagctccagaagtgctctgtcagtgccttcgaggg

SEQ ID NO: 488458 - DNA, 999 bp, Homo sapiens
cccacgcgtccgggggaggggggtccgacccagcgcggacctcgccggagacaccccgcccgccccggcccggtcctgcgggggcatgcgaggcaggggagggggcgcgcccggggctcccaccgacgctcgacccgggcgcaagggccggagcccccgggttcccgagcctcggagccgcgcggctgtgctgccgccctgatggcctggcgtccgcactgcgcctcgggcccggccgcgctccagcgcgtgcaccccggactccgccctgtccctggacctccgctgggccccgagtcttcctgccagacccctcgagccccagggaggcaggggcgggcgccaggggtagacaggcggggccaatgatgggcaaggcatagctcgggagcgagggcggaggtgcgcgcaggctgcagagggagccggggaccccaatggcccaggacgggtcaggggctgcccttgagcgcaagagggaacgcgggcaggtaaccccgatagcgacatcgatgggcatacctggcaggcccatagaaaggaccccacaggacgagggatctgggaaaacgtgaaccctacaaagatcctaaacaagcagacatggcaaagggtgtgcccgaacatcccacgcggcccgatggggcaaagggagggcccatgagcccgcaacgacgaaacagagacacacagaaaggaccaccgtggcaacgcgaccaaaaccacaagagtcacagaacagggaacgggaagcccgagcacccggggcagcccaaacccctcaaggaaccggacgagaagcagggacccacagggggcccacgaaagtgaccgggctcacgcgtaacacccgaggaagcacggcaggccaggaggaaaggcacgccccaggaacaggaccaggacccaggcacggggccggacccagagaggcacacaacacgggagagagacagggccaggaaggaggaagccagcaacgcagcaagacgacagggg

SEQ ID NO: 488459 - DNA, 672 bp, Homo sapiens
taggcacctgtagtcccagctacttgggaggctgaggcaggagaatggcatgaacctaggaggcggagcttgcagtgagccgagatcgcgccactgcactccagcctgggcgacagagcgagactcagtctcaaaaaaaccaaaaaaacaaaaaaacaaaaaacgggctgggtgcggtggctcacgcctgtaatctcagcactttgggaggctgaggtgggtggatcatctgaggtcagaagttcgagaccagcctggccaacatggtgaaaccccatctctactaaaaatacaaaaattagccgggtggcagtggtgcgcgtctgtaatcccagctactgaggaggctgaggcgggagaattgcttgagcctgggaggcagaggttgtggtgagctgagatcatgccactgggctcactccagtcggggtgacagaatgagaccctgtctcaaaaaaaaaaaaaagaaggacattacggtttttaaatgtggcctctaaattggcctgtgaaccaactatgggacagaatggatgaattatttggtcagcgatgataatgtgtgtgactatacagaaaaactttatttttcacttgtgccctggagtatataacggtgtctgaagacatgatggtgtgtctactgagaaatatgtcagataaaacataaag

SEQ ID NO: 488460 - DNA, 117 bp, Homo sapiens
gtgaatatgactcgggtactggaggatctctagagtaaacaaggatcagcaacgatatatggaggtcagcacggtgctcacgtagtccgacgagaactagtacaggagaggcatagc

SEQ ID NO: 488461 - DNA, 1294 bp, Homo sapiens
gtcccagctactcgggaggctgaggctgaagcgatccacctgctttggcctcccaaaacagtgggattgcaggcgtgagccaccatgcctggctgaaattcaccttttaagatgtacaattcagtggtttttagtatattcacacacaaaattgcacaactatcactaacatctaattttagatcattttgtaacttcaccaagaaaccccaggtctgtcagcagtcagttccattcccccttcatcccagcctctggcaaccactaatctgctttctgtcactattgatttggccagacactattcttctgtgcttctcatgcatctcctgtaataccagtgctacaattctcattttatgtggaaaattgaggcactgagaggttaagtaaattgcccacggtcacacagtaatttgatttacaacagtaataacacattagatgagaacacagtaggacacaattttgaattccatttttatgtacctgaaatgaatacacccctcccccaaggtattttccctattgttagcctttgtaccctaggtacaaatataggtattttccctattgtgttatgtacctgaaatgaatacacccttcccccaaggtattttccctattgttagcctttgtaccctagaactgactggatgtagataacatttgttttcagagtaatggaacactgtatcagcagcatctgagaacataagaacagttggacattggaaagaggtttgttgccctcatccctccttgaacctcttttctctcccgcttccaccaccaccacacatatatacccctttttctcagtcttaagcatcaaacaatttctgcctctttctttttaattctcccagagggatggttaatgcatcacaatttaacttgtctattcaggtattaatagtcaagggatgcatctgtttgcttatagtaccagttatattcctaggaccttagagagcagtagtgtgagaatagaatgcctttctatttgggttaaactatgtgggaggaaaaagtaacagagtaaaggctttgccttaatgaagtcaagtgttctgcctggtgggaagtggccacacgctgcactgcgctgctcttgtttactctgttctttcagagcctttgtactttgccatcactgctagtaatttcttggtccttttcaatactccattttaatcttgatttttttctataaataataaatctgtgaaaaatctgtaaaaagatttgtgactattaaatgtgcaactaaaaacactggaaaaagaaaaaa

SEQ ID NO: 488462 - DNA, 594 bp, Homo sapiens
ggcccccagaccggggcttccacccgccgtgttgatgcccctcgtgggttccgcccctccgttgaaaccacgaccgggtgtattccgccctcacggcggttattgcctggcccccgggggcctccccactggtgtgttagtatagtgtccccccgcgcgtggccccgttattctgccgtcccgtggcgtgttcgcgcacgcttgtcaacgggtctgtttatgtttgttccccccctcccagcgcccctcggtgtcttctgcgttcctcccgtccccctatttccgccgggctcctttccgggtgcccaccacatttcttgtgaggcaccaccgcgggtctcccacggcgttctcactcggccttatttgtgggcgccccccttcgcccctccttactggtgttctcctccccccgccctcggtaatgtttccctcttcaccggccccacacccactttcggtttgtaagaacccccgcccggagatacttgcgcgtttttttatgagaagcgtgtgttgaggataatattcttgagtatggttactcctgctttttgtgtgggagggcgcccgccaaacaaatgacaaagaaaa

SEQ ID NO: 488463 - DNA, 6697 bp, Homo sapiens
  misc_feature (263)..(263): n is a, c, g, or t
  misc_feature (301)..(301): n is a, c, g, or t
tttatcttttaagttattgtcacaatagttactctcttttagaccctgaacattttcagtacttgctccaaatggtttagcaacttttgaagtgggattaacaagtttggccaatgaagcttcttccctgcccaccgccagaggtgctggagaaaagtaatcctggagggtcggcgtggaggcagtagagaggtttataaaagtcaaggaagtgggaagaggcttgcgagcagcaggagaggcgcagagtcagaggggcaggngcggcggcggagggagcaggaggttggggcttgagccngtcattccggcgcacgaaaacttgaagtcgctcggtagccggggaagggaaggaagagaggcaggctctttcctagaggtgccgtgatcgagggtctggcactccaagccaactcctgagaacgggaaatgggcgggagtcggtggggtggagagggcagccgtggtcgcgagagcgaaggagcggtctgagaatccggcttgagtgttaaaggctaagcgtgtctagctggacccgtggccccgaagaagcgagacaaggcgacgcggagctgtccctgacaccccgaggaccgagggacagcgaagggccggggccgccggccattgccaggcgccattaggtgacgcggccgtcacgcgatgacgcgctgaccggcagtggcctccacgtcgcaggttccgcaaagacctgtgggagcgacccgggagaaggagggccaagatggcggaagcggaggagtctccaggagacccggggacagcatcgcccaggcccctgtttgcaggcctttcagatatatccatctcacaagacatccccgtagaaggagaaatcaccattcctatgagatctcgcatccgggagtttgacagctccacattaaatgaatctgttcgcaataccatcatgcgtgatctaaaagctgttgggaaaaaattcatgcatgttttgtacccaaggaaaagtaatactcttttgagagattgggatttgtggggccctttgatcctttgtgtgacactcgcattaatgctgcaaagagactctgcagatagtgaaaaagatggagggccccaatttgcagaggtgtttgtcattgtctggtttggtgcagttaccatcaccctcaactcaaaacttcttggagggaacatatctttttttcagagcctctgtgtgctgggttactgtatacttcccttgacagtagcaatgctgatttgccggctggtacttttggctgatccaggacctgtaaacttcatggttcggctttttgtggtgattgtgatgtttgcctggtctatagttgcctccacagctttccttgctgatagccagcctccaaaccgcagagccctagctgtttatcctgttttcctgttttactttgtcatcagttggatgattctcacctttactcctcagtaaatcaggaatgggaaattaaaaccagtgaattgaaagcacatctgaaagatgcaattcaccatggagctttgtctctggcccttattttgtctaattttggaggtatttgataactgagtaggtgaggagattaaaagggagccatatagcactgtcaccccttatttgaggaactgatgtttgaaaggctgttcttttctctcttaatgtcatttctttaaaaatacatgtgcatactacacacagtatataatgcctccttaaggcatgatggagtcaccgtggtccatttgggtgacaaccagtgacttgggaagcacatagatacatcttacaagttgaatagagttgataactattttcagttttgagaataccagttcaggtgcagctcttaaacacattgccttatgactattagaatatgcctctcttttcataaataaaaatacatggtctatatccattttcttttatttctctctcttaagcttaaaaaggcaatgagagaggttaggagtgggttcatacacggagaatgagaaaacatgcattaaccaatattcagattttgatcaggggaaattctacacttgttgcaaaaaaaaaaaaaaaaaaagcaaagggcctctaaagaatcagcctctttggtccctttgtgctgtcacctttttgccatgtttaacagcatcttggttggcactctagtcttaatcttgctccttaactttgaatatgcagtctaaaatgtcagtagtcaacatgtaattttcctttgaaattctgaatattccagtgctggaacttatccaaaaagaagacctcagaaacttagattggtagatctctagtgcatattatcatgtgggcaccttctcttagggtggaatgaggcagtctggatgcagcatagttaaaaggagctgtttaatattctctgtagtctggcctcttaactagaaagtaaagctaaatcagaagcctgtatttaaccatgtgaacagggagggatttagtgttctgatggctgattaatagaacagctagatacttagagcatgacgtgggatgggatgagtttacagctgctgccttttcatggtgagcttagcagttttctcattagatgtgtttttttgggttggggaatagcaatttattttattgattttagactttatcaagctaattagctcccctttagataagtacatgttgcacatgtgcacctacttgtaatctcagatatttatgcacacaagtgtgaaggtttttcagggagcagagcatctgggacaggctgattctgagctaaacagggctcctttaaggcaatatgaactgttgccttctataaattgcacattgaggaactctaatagacaaagattaggtgtcaggcagaaaacactcattgtaaatatactattagttgataaacataggactttcttattccccagtttttctttatcatataatttaaatatttattcattttgtatttaaagactacctacacatagatatatgattccaaagtcatactttctccatccccacattagccaagtgaatacagggccaaatgggttcttggaatgataataacaaagcattacaaagtgggtccccttggttccagccttgtccagagtttttggttatatatttctatttattacaatttaccttttaaattgtaaaataaacctttgtgtggacagagccaatgtttcaatcttgaatgagtaaagaaaatactttggaactgatcctcattttgaaattggttctaaattattatccatttccaatgtctgaaattctcttacttcctgctaaaactctctttctgccaaagttgtttcgtaatctgtctcaatgactataatgtaaaattaaagaagtaaccatgcttctcaagggggaattaaaagtgtttattgaattttactcaggctaattgtttggtcagaaattcctaaggccacagctttggggggttcgtgtagatgtacatggtgggtgggttataaatattgggacttaaggcagcttgttctatgtatttatctttgctcttgggtgacttagggaatgattttatttgatttaaccttctttctgtttgccccgagaatactcgccagtggcgcttgcagttgtagcatttaccccaagataactttgcctacgaaatatttcgcttttattattttcacatcattctagtatatggactttggaaacaaaagacattgttctatttatagcattcttttttttttttagtagcggtatttccatttacaaaatatagtaactcttgattactgaaaatgtcaaatcctagaaaacgtagcatgcctatacatgatgttaacatcattctcgaacagttgttggccgaagattcatttgatgaatccaatttttttgaaatagacaattctgatgttctctttagaaataactcagtttttatcttttttcacattgaaaatcagttagatttgcttaagcctcaaagagaatgtttatgtaaattagcgctggcaatttttttttttctaaacaggaaaagggttaaatgaaggttgataaaatggatgttcaattgtctttctgaaagtgagtggcttgaagggatgaataaatattttcttaatatattcaaaaaagtgcattgctttctgtgatggaagttaagacctaaatgtctggaagttgtaaccctcaacacagcttttcctgatttgctgcaaaggcacatagctgattatagaagtgaagacggcaaggacggggactccaacaaaggaaaccctgttgcaggatttgggaactttcatgcttcagatgaaattcaggcatgtgagcatcactgcagaatgtggtgcatcattgccatcatgagtaatcacttgctgctcctacttctgagaccaagactcttttgtcatattctttagcaataggacgggtaaagactggatttaattgctgttcagagtataaaaactcaattgattccaacatatctgaatgtgcagtaaagtcttaaaagtcaaccgttaatcattaagtcttttgcctctaaagtcttttgcctctgaagaggtttattacatgagttgattttcatattttcattttggtggggttttcctgttgttgggcaaggtggggtcacaggacatgggactagtaagcattttactgtttactatatttgtctttttataaacagtatctcccaaaatgtgattagaaggctaccaagcctgtatttggacatttaattgtgtgctttatataatgtaactactaacagtatttggactgcctgttcattcctggagacaaaaatgaaaatctgtcagttcaagttcttgggtaacatcaagtcattagaatttatctaaagcttatcatgatttgataagacatccattgcatgcagctgttttagctcagtgcaaaacactgaaattgtgattcttagactgtttctgagacatttggatggaaataaatgtataaatgttaattcatgtatataaattagaaacacttttctagattctgtaggcttttgttaaaaatagagaatttcttggggtttacttaggccacagaatggccaaataataataatgacaatgatattactaataataatagctaacctttatttggcacttactgtgtgccaggcactattctatttttttaagaatttttaaaataacagctttattgaaatacactttaccataaacttcacctttttattttttatttttatgagacagggactcacccaggctggagtgcagtggagcagtcatggcacactgtagcctcgacctccctgggctcaagcaatcctcccacttcagtgtcccgagtagttgggactacaggcatgcgtcactacacctaattggctaatttttgtagtttttgtagagatagggtttcgccatgttgcctaggctggtcttgaattcctgggctcaagcgatccacctgctttggcctcccaaaacagtgggattgcaggcgtgagccaccatgcctggctgaaattcaccttttaagatgtacaattcagtggtttttagtatattcacacacaaaattgcacaactatcactaacatctaattttagatcattttgtaacttcaccaagaaaccccaggtctgtcagcagtcagttccattcccccttcatcccagcctctggcaaccactaatctgctttctgtcactattgatttggccagacactattcttctgtgcttctcatgcatctcctgtaataccagtgctacaattctcattttatgtggaaaattgaggcactgagaggttaagtaaattgcccacggtcacacagtaatttgatttacaacagtaataacacattagatgagaacacagtaggacacaattttgaattccatttttatgtacctgaaatgaatacacccctcccccaaggtattttccctattgttagcctttgtaccctaggtacaaatataggtattttccctattgtgttatgtacctgaaatgaatacacccttcccccaaggtattttccctattgttagcctttgtaccctagaactgactggatgtagataacatttgttttcagagtaatggaacactgtatcagcagcatctgagaacataagaacagttggacattggaaagaggtttgttgccctcatccctccttgaacctcttttctctcccgcttccaccaccaccacacatatatacccctttttctcagtcttaagcatcaaacaatttctgcctctttctttttaattctcccagagggatggttaatgcatcacaatttaacttgtctattcaggtattaatagtcaagggatgcatctgtttgcttatagtaccagttatattcctaggaccttagagagcagtagtgtgagaatagaatgcctttctatttgggttaaactatgtgggaggaaaaagtaacagagtaaaggctttgccttaatgaagtcaagtgttctgcctggtgggaagtggccacacgctgcactgcgctgctcttgtttactctgttctttcagagcctttgtactttgccatcactgctagtaatttcttggtccttttcaatactccattttaatcttgatttttttctataaataataaatctgtgaaaaatctgtaaaaa

SEQ ID NO: 488464 - DNA, 6746 bp, Homo sapiens
  misc_feature (263)..(263): n is a, c, g, or t
  misc_feature (301)..(301): n is a, c, g, or t
tttatcttttaagttattgtcacaatagttactctcttttagaccctgaacattttcagtacttgctccaaatggtttagcaacttttgaagtgggattaacaagtttggccaatgaagcttcttccctgcccaccgccagaggtgctggagaaaagtaatcctggagggtcggcgtggaggcagtagagaggtttataaaagtcaaggaagtgggaagaggcttgcgagcagcaggagaggcgcagagtcagaggggcaggngcggcggcggagggagcaggaggttggggcttgagccngtcattccggcgcacgaaaacttgaagtcgctcggtagccggggaagggaaggaagagaggcaggctctttcctagaggtgccgtgatcgagggtctggcactccaagccaactcctgagaacgggaaatgggcgggagtcggtggggtggagagggcagccgtggtcgcgagagcgaaggagcggtctgagaatccggcttgagtgttaaaggctaagcgtgtctagctggacccgtggccccgaagaagcgagacaaggcgacgcggagctgtccctgacaccccgaggaccgagggacagcgaagggccggggccgccggccattgccaggcgccattaggtgacgcggccgtcacgcgatgacgcgctgaccggcagtggcctccacgtcgcaggttccgcaaagacctgtgggagcgacccgggagaaggagggccaagatggcggaagcggaggagtctccaggagacccggggacagcatcgcccaggcccctgtttgcaggcctttcagatatatccatctcacaagacatccccgtagaaggagaaatcaccattcctatgagatctcgcatccgggagtttgacagctccacattaaatgaatctgttcgcaataccatcatgcgtgatctaaaagctgttgggaaaaaattcatgcatgttttgtacccaaggaaaagtaatactcttttgagagattgggatttgtggggccctttgatcctttgtgtgacactcgcattaatgctgcaaagagactctgcagatagtgaaaaagatggagggccccaatttgcagaggtgtttgtcattgtctggtttggtgcagttaccatcaccctcaactcaaaacttcttggagggaacatatctttttttcagagcctctgtgtgctgggttactgtatacttcccttgacagtagcaatgctgatttgccggctggtacttttggctgatccaggacctgtaaacttcatggttcggctttttgtggtgattgtgatgtttgcctggtctatagttgcctccacagctttccttgctgatagccagcctccaaaccgcagagccctagctgtttatcctgttttcctgttttactttgtcatcagttggatgattctcacctttactcctcagtaaatcaggaatgggaaattaaaaccagtgaattgaaagcacatctgaaagatgcaattcaccatggagctttgtctctggcccttattttgtctaattttggaggtatttgataactgagtaggtgaggagattaaaagggagccatatagcactgtcaccccttatttgaggaactgatgtttgaaaggctgttcttttctctcttaatgtcatttctttaaaaatacatgtgcatactacacacagtatataatgcctccttaaggcatgatggagtcaccgtggtccatttgggtgacaaccagtgacttgggaagcacatagatacatcttacaagttgaatagagttgataactattttcagttttgagaataccagttcaggtgcagctcttaaacacattgccttatgactattagaatatgcctctcttttcataaataaaaatacatggtctatatccattttcttttatttctctctcttaagcttaaaaaggcaatgagagaggttaggagtgggttcatacacggagaatgagaaaacatgcattaaccaatattcagattttgatcaggggaaattctacacttgttgcaaaaaaaaaaaaaaaaaaagcaaagggcctctaaagaatcagcctctttggtccctttgtgctgtcacctttttgccatgtttaacagcatcttggttggcactctagtcttaatcttgctccttaactttgaatatgcagtctaaaatgtcagtagtcaacatgtaattttcctttgaaattctgaatattccagtgctggaacttatccaaaaagaagacctcagaaacttagattggtagatctctagtgcatattatcatgtgggcaccttctcttagggtggaatgaggcagtctggatgcagcatagttaaaaggagctgtttaatattctctgtagtctggcctcttaactagaaagtaaagctaaatcagaagcctgtatttaaccatgtgaacagggagggatttagtgttctgatggctgattaatagaacagctagatacttagagcatgacgtgggatgggatgagtttacagctgctgccttttcatggtgagcttagcagttttctcattagatgtgtttttttgggttggggaatagcaatttattttattgattttagactttatcaagctaattagctcccctttagataagtacatgttgcacatgtgcacctacttgtaatctcagatatttatgcacacaagtgtgaaggtttttcagggagcagagcatctgggacaggctgattctgagctaaacagggctcctttaaggcaatatgaactgttgccttctataaattgcacattgaggaactctaatagacaaagattaggtgtcaggcagaaaacactcattgtaaatatactattagttgataaacataggactttcttattccccagtttttctttatcatataatttaaatatttattcattttgtatttaaagactacctacacatagatatatgattccaaagtcatactttctccatccccacattagccaagtgaatacagggccaaatgggttcttggaatgataataacaaagcattacaaagtgggtccccttggttccagccttgtccagagtttttggttatatatttctatttattacaatttaccttttaaattgtaaaataaacctttgtgtggacagagccaatgtttcaatcttgaatgagtaaagaaaatactttggaactgatcctcattttgaaattggttctaaattattatccatttccaatgtctgaaattctcttacttcctgctaaaactctctttctgccaaagttgtttcgtaatctgtctcaatgactataatgtaaaattaaagaagtaaccatgcttctcaagggggaattaaaagtgtttattgaattttactcaggctaattgtttggtcagaaattcctaaggccacagctttggggggttcgtgtagatgtacatggtgggtgggttataaatattgggacttaaggcagcttgttctatgtatttatctttgctcttgggtgacttagggaatgattttatttgatttaaccttctttctgtttgccccgagaatactcgccagtggcgcttgcagttgtagcatttaccccaagataactttgcctacgaaatatttcgcttttattattttcacatcattctagtatatggactttggaaacaaaagacattgttctatttatagcattcttttttttttttagtagcggtatttccatttacaaaatatagtaactcttgattactgaaaatgtcaaatcctagaaaacgtagcatgcctatacatgatgttaacatcattctcgaacagttgttggccgaagattcatttgatgaatccaatttttttgaaatagacaattctgatgttctctttagaaataactcagtttttatcttttttcacattgaaaatcagttagatttgcttaagcctcaaagagaatgtttatgtaaattagcgctggcaatttttttttttctaaacaggaaaagggttaaatgaaggttgataaaatggatgttcaattgtctttctgaaagtgagtggcttgaagggatgaataaatattttcttaatatattcaaaaaagtgcattgctttctgtgatggaagttaagacctaaatgtctggaagttgtaaccctcaacacagcttttcctgatttgctgcaaaggcacatagctgattatagaagtgaagacggcaaggacggggactccaacaaaggaaaccctgttgcaggatttgggaactttcatgcttcagatgaaattcaggcatgtgagcatcactgcagaatgtggtgcatcattgccatcatgagtaatcacttgctgctcctacttctgagaccaagactcttttgtcatattctttagcaataggacgggtaaagactggatttaattgctgttcagagtataaaaactcaattgattccaacatatctgaatgtgcagtaaagtcttaaaagtcaaccgttaatcattaagtcttttgcctctaaagtcttttgcctctgaagaggtttattacatgagttgattttcatattttcattttggtggggttttcctgttgttgggcaaggtggggtcacaggacatgggactagtaagcattttactgtttactatatttgtctttttataaacagtatctcccaaaatgtgattagaaggctaccaagcctgtatttggacatttaattgtgtgctttatataatgtaactactaacagtatttggactgcctgttcattcctggagacaaaaatgaaaatctgtcagttcaagttcttgggtaacatcaagtcattagaatttatctaaagcttatcatgatttgataagacatccattgcatgcagctgttttagctcagtgcaaaacactgaaattgtgattcttagactgtttctgagacatttggatggaaataaatgtataaatgttaattcatgtatataaattagaaacacttttctagattctgtaggcttttgttaaaaatagagaatttcttggggtttacttaggccacagaatggccaaataataataatgacaatgatattactaataataatagctaacctttatttggcacttactgtgtgccaggcactattctatttttttaagaatttttaaaataacagctttattgaaatacactttaccataaacttcacctttttattttttatttttatgagacagggactcacccaggctggagtgcagtggagcagtcatggcacactgtagcctcgacctccctgggctcaagcaatcctcccacttcagtgtcccgagtagttgggactacaggcatgcgtcactacacctaattggctaatttttgtagtttttgtagagatagggtttcgccatgttgcctaggctggtcttgaattcctgggctcaagcgatccacctgctttggcctcccaaaacagtgggattgcaggcgtgagccaccatgcctggctgaaattcaccttttaagatgtacaattcagtggtttttagtatattcacacacaaaattgcacaactatcactaacatctaattttagatcattttgtaacttcaccaagaaaccccaggtctgtcagcagtcagttccattcccccttcatcccagcctctggcaaccactaatctgctttctgtcactattgatttggccagacactattcttctgtgcttctcatgcatctcctgtaataccagtgctacaattctcattttatgtggaaaattgaggcactgagaggttaagtaaattgcccacggtcacacagtaatttgatttacaacagtaataacacattagatgagaacacagtaggacacaattttgaattccatttttatgtacctgaaatgaatacacccctcccccaaggtattttccctattgttagcctttgtaccctaggtacaaatataggtattttccctattgtgttatgtacctgaaatgaatacacccttcccccaaggtattttccctattgttagcctttgtaccctagaactgactggatgtagataacatttgttttcagagtaatggaacactgtatcagcagcatctgagaacataagaacagttggacattggaaagaggtttgttgccctcatccctccttgaacctcttttctctcccgcttccaccaccaccacacatatatacccctttttctcagtcttaagcatcaaacaatttctgcctctttctttttaattctcccagagggatggttaatgcatcacaatttaacttgtctattcaggtattaatagtcaagggatgcatctgtttgcttatagtaccagttatattcctaggaccttagagagcagtagtgtgagaatagaatgcctttctatttgggttaaactatgtgggaggaaaaagtaacagagtaaaggctttgccttaatgaagtcaagtgttctgcctggtgggaagtggccacacgctgcactgcgctgctcttgtttactctgttctttcagagcctttgtactttgccatcactgctagtaatttcttggtccttttcaatactccattttaatcttgatttttttctataaataataaatctgtgaaaaatctgtaaaaagatttgtgactattaaatgtgcaactaaaaacactggaaaaagaaaaaa

SEQ ID NO: 488465 - DNA, 325 bp, Homo sapiens
ttcctacgcttttctttttgttgacctgactgctgcatggggccctctgagaaggccctgatggagggccaccttccacagactggcaaagaggggacagttagctaacagtcaaactaaggactgtgacccggagctgccacttttgggggggacttcagaactggcttctgcctgcatgcatgaggaacgaattttgaggttccaataagcagccagagaaagaactcttgagggtggggttgcagtgggcctcctgcgcaggggcctttttttcacctgctcttagaccggcttgagctacaagtataaagattttggagtt

SEQ ID NO: 488466 - DNA, 7113 bp, Homo sapiens
  misc_feature (263)..(263): n is a, c, g, or t
  misc_feature (301)..(301): n is a, c, g, or t
  misc_feature (6816)..(6816): n is a, c, g, or t
  misc_feature (6820)..(6820): n is a, c, g, or t
  misc_feature (6831)..(6831): n is a, c, g, or t
tttatcttttaagttattgtcacaatagttactctcttttagaccctgaacattttcagtacttgctccaaatggtttagcaacttttgaagtgggattaacaagtttggccaatgaagcttcttccctgcccaccgccagaggtgctggagaaaagtaatcctggagggtcggcgtggaggcagtagagaggtttataaaagtcaaggaagtgggaagaggcttgcgagcagcaggagaggcgcagagtcagaggggcaggngcggcggcggagggagcaggaggttggggcttgagccngtcattccggcgcacgaaaacttgaagtcgctcggtagccggggaagggaaggaagagaggcaggctctttcctagaggtgccgtgatcgagggtctggcactccaagccaactcctgagaacgggaaatgggcgggagtcggtggggtggagagggcagccgtggtcgcgagagcgaaggagcggtctgagaatccggcttgagtgttaaaggctaagcgtgtctagctggacccgtggccccgaagaagcgagacaaggcgacgcggagctgtccctgacaccccgaggaccgagggacagcgaagggccggggccgccggccattgccaggcgccattaggtgacgcggccgtcacgcgatgacgcgctgaccggcagtggcctccacgtcgcaggttccgcaaagacctgtgggagcgacccgggagaaggagggccaagatggcggaagcggaggagtctccaggagacccggggacagcatcgcccaggcccctgtttgcaggcctttcagatatatccatctcacaagacatccccgtagaaggagaaatcaccattcctatgagatctcgcatccgggagtttgacagctccacattaaatgaatctgttcgcaataccatcatgcgtgatctaaaagctgttgggaaaaaattcatgcatgttttgtacccaaggaaaagtaatactcttttgagagattgggatttgtggggccctttgatcctttgtgtgacactcgcattaatgctgcaaagagactctgcagatagtgaaaaagatggagggccccaatttgcagaggtgtttgtcattgtctggtttggtgcagttaccatcaccctcaactcaaaacttcttggagggaacatatctttttttcagagcctctgtgtgctgggttactgtatacttcccttgacagtagcaatgctgatttgccggctggtacttttggctgatccaggacctgtaaacttcatggttcggctttttgtggtgattgtgatgtttgcctggtctatagttgcctccacagctttccttgctgatagccagcctccaaaccgcagagccctagctgtttatcctgttttcctgttttactttgtcatcagttggatgattctcacctttactcctcagtaaatcaggaatgggaaattaaaaccagtgaattgaaagcacatctgaaagatgcaattcaccatggagctttgtctctggcccttattttgtctaattttggaggtatttgataactgagtaggtgaggagattaaaagggagccatatagcactgtcaccccttatttgaggaactgatgtttgaaaggctgttcttttctctcttaatgtcatttctttaaaaatacatgtgcatactacacacagtatataatgcctccttaaggcatgatggagtcaccgtggtccatttgggtgacaaccagtgacttgggaagcacatagatacatcttacaagttgaatagagttgataactattttcagttttgagaataccagttcaggtgcagctcttaaacacattgccttatgactattagaatatgcctctcttttcataaataaaaatacatggtctatatccattttcttttatttctctctcttaagcttaaaaaggcaatgagagaggttaggagtgggttcatacacggagaatgagaaaacatgcattaaccaatattcagattttgatcaggggaaattctacacttgttgcaaaaaaaaaaaaaaaaaaagcaaagggcctctaaagaatcagcctctttggtccctttgtgctgtcacctttttgccatgtttaacagcatcttggttggcactctagtcttaatcttgctccttaactttgaatatgcagtctaaaatgtcagtagtcaacatgtaattttcctttgaaattctgaatattccagtgctggaacttatccaaaaagaagacctcagaaacttagattggtagatctctagtgcatattatcatgtgggcaccttctcttagggtggaatgaggcagtctggatgcagcatagttaaaaggagctgtttaatattctctgtagtctggcctcttaactagaaagtaaagctaaatcagaagcctgtatttaaccatgtgaacagggagggatttagtgttctgatggctgattaatagaacagctagatacttagagcatgacgtgggatgggatgagtttacagctgctgccttttcatggtgagcttagcagttttctcattagatgtgtttttttgggttggggaatagcaatttattttattgattttagactttatcaagctaattagctcccctttagataagtacatgttgcacatgtgcacctacttgtaatctcagatatttatgcacacaagtgtgaaggtttttcagggagcagagcatctgggacaggctgattctgagctaaacagggctcctttaaggcaatatgaactgttgccttctataaattgcacattgaggaactctaatagacaaagattaggtgtcaggcagaaaacactcattgtaaatatactattagttgataaacataggactttcttattccccagtttttctttatcatataatttaaatatttattcattttgtatttaaagactacctacacatagatatatgattccaaagtcatactttctccatccccacattagccaagtgaatacagggccaaatgggttcttggaatgataataacaaagcattacaaagtgggtccccttggttccagccttgtccagagtttttggttatatatttctatttattacaatttaccttttaaattgtaaaataaacctttgtgtggacagagccaatgtttcaatcttgaatgagtaaagaaaatactttggaactgatcctcattttgaaattggttctaaattattatccatttccaatgtctgaaattctcttacttcctgctaaaactctctttctgccaaagttgtttcgtaatctgtctcaatgactataatgtaaaattaaagaagtaaccatgcttctcaagggggaattaaaagtgtttattgaattttactcaggctaattgtttggtcagaaattcctaaggccacagctttggggggttcgtgtagatgtacatggtgggtgggttataaatattgggacttaaggcagcttgttctatgtatttatctttgctcttgggtgacttagggaatgattttatttgatttaaccttctttctgtttgccccgagaatactcgccagtggcgcttgcagttgtagcatttaccccaagataactttgcctacgaaatatttcgcttttattattttcacatcattctagtatatggactttggaaacaaaagacattgttctatttatagcattcttttttttttttagtagcggtatttccatttacaaaatatagtaactcttgattactgaaaatgtcaaatcctagaaaacgtagcatgcctatacatgatgttaacatcattctcgaacagttgttggccgaagattcatttgatgaatccaatttttttgaaatagacaattctgatgttctctttagaaataactcagtttttatcttttttcacattgaaaatcagttagatttgcttaagcctcaaagagaatgtttatgtaaattagcgctggcaatttttttttttctaaacaggaaaagggttaaatgaaggttgataaaatggatgttcaattgtctttctgaaagtgagtggcttgaagggatgaataaatattttcttaatatattcaaaaaagtgcattgctttctgtgatggaagttaagacctaaatgtctggaagttgtaaccctcaacacagcttttcctgatttgctgcaaaggcacatagctgattatagaagtgaagacggcaaggacggggactccaacaaaggaaaccctgttgcaggatttgggaactttcatgcttcagatgaaattcaggcatgtgagcatcactgcagaatgtggtgcatcattgccatcatgagtaatcacttgctgctcctacttctgagaccaagactcttttgtcatattctttagcaataggacgggtaaagactggatttaattgctgttcagagtataaaaactcaattgattccaacatatctgaatgtgcagtaaagtcttaaaagtcaaccgttaatcattaagtcttttgcctctaaagtcttttgcctctgaagaggtttattacatgagttgattttcatattttcattttggtggggttttcctgttgttgggcaaggtggggtcacaggacatgggactagtaagcattttactgtttactatatttgtctttttataaacagtatctcccaaaatgtgattagaaggctaccaagcctgtatttggacatttaattgtgtgctttatataatgtaactactaacagtatttggactgcctgttcattcctggagacaaaaatgaaaatctgtcagttcaagttcttgggtaacatcaagtcattagaatttatctaaagcttatcatgatttgataagacatccattgcatgcagctgttttagctcagtgcaaaacactgaaattgtgattcttagactgtttctgagacatttggatggaaataaatgtataaatgttaattcatgtatataaattagaaacacttttctagattctgtaggcttttgttaaaaatagagaatttcttggggtttacttaggccacagaatggccaaataataataatgacaatgatattactaataataatagctaacctttatttggcacttactgtgtgccaggcactattctatttttttaagaatttttaaaataacagctttattgaaatacactttaccataaacttcacctttttattttttatttttatgagacagggactcacccaggctggagtgcagtggagcagtcatggcacactgtagcctcgacctccctgggctcaagcaatcctcccacttcagtgtcccgagtagttgggactacaggcatgcgtcactacacctaattggctaatttttgtagtttttgtagagatagggtttcgccatgttgcctaggctggtcttgaattcctgggctcaagcgatccacctgctttggcctcccaaaacagtgggattgcaggcgtgagccaccatgcctggctgaaattcaccttttaagatgtacaattcagtggtttttagtatattcacacacaaaattgcacaactatcactaacatctaattttagatcattttgtaacttcaccaagaaaccccaggtctgtcagcagtcagttccattcccccttcatcccagcctctggcaaccactaatctgctttctgtcactattgatttggccagacactattcttctgtgcttctcatgcatctcctgtaataccagtgctacaattctcattttatgtggaaaattgaggcactgagaggttaagtaaattgcccacggtcacacagtaatttgatttacaacagtaataacacattagatgagaacacagtaggacacaattttgaattccatttttatgtacctgaaatgaatacacccctcccccaaggtattttccctattgttagcctttgtaccctaggtacaaatataggtattttccctattgtgttatgtacctgaaatgaatacacccttcccccaaggtattttccctattgttagcctttgtaccctagaactgactggatgtagataacatttgttttcagagtaatggaacactgtatcagcagcatctgagaacataagaacagttggacattggaaagaggtttgttgccctcatccctccttgaacctcttttctctcccgcttccaccaccaccacacatatatacccctttttctcagtcttaagcatcaaacaatttctgcctctttctttttaattctcccagagggatggttaatgcatcacaatttaacttgtctattcaggtattaatagtcaagggatgcatctgtttgcttatagtaccagttatattcctaggaccttagagagcagtagtgtgagaatagaatgcctttctatttgggttaaactatgtgggaggaaaaagtaacagagtaaaggctttgccttaatgaagtcaagtgttctgcctggtgggaagtggccacacgctgcactgcgctgctcttgtttactctgttctttcagagcctttgtactttgccatcactgctagtaatttcttggtccttttcaatactccattttaatcttgatttttttctataaataataaatctgtgaaaaatctgtaaaaagatttgtgactattaaatgtgcaactaaaaacactggaaaaagaaaaaataaaaaaaaaaaaaaaaaaaaaaaaaaaaaaaaaaaaaaaaaaaaaaacaaaaaaaaaaaaagaaaaaanaaanaacaaaaaaanaaaagaaagagagagggggcgcggcgcggaaaccaagaagaatccccgctctgaccgggcgagcgagcagcgcaccgacacgcccccctcggcttattttgactaaaggggggccccccagagggagagcggcagataaagaagcgaggggggggcggggggacgttaacacaaggatgtcggaggggagaacaacacgacgtgggcgggagaagaatgtgagagggcgagcgccacaactcgaggggggaggagagaacaaaaggcggcaagcgaacaacg

SEQ ID NO: 488467 - DNA, 309 bp, Homo sapiens
acgatcctaagctcgcactcttcccagccttgcctttttagaggagattgctgctctatgcttggggcaggtgagatgcagtgctattttccgtctgtgttgctgagtatctgtggctatgtgacccagagtgactcatgccctcctcacagcaggaggggaggtggacaagtaaacaggcagttagatagagtgtcacgtgtgaagatttcagagggcaggaaaccagaggtgtgtgctcaaccagcagaggtctgggtgggggtctcagataggaatgatgtcccaggcgaagaaccagcgacagaa

SEQ ID NO: 488468 - DNA, 7009 bp, Homo sapiens
  misc_feature (263)..(263): n is a, c, g, or t
  misc_feature (301)..(301): n is a, c, g, or t
  misc_feature (6791)..(6791): n is a, c, g, or t
  misc_feature (6795)..(6795): n is a, c, g, or t
  misc_feature (6806)..(6806): n is a, c, g, or t
tttatcttttaagttattgtcacaatagttactctcttttagaccctgaacattttcagtacttgctccaaatggtttagcaacttttgaagtgggattaacaagtttggccaatgaagcttcttccctgcccaccgccagaggtgctggagaaaagtaatcctggagggtcggcgtggaggcagtagagaggtttataaaagtcaaggaagtgggaagaggcttgcgagcagcaggagaggcgcagagtcagaggggcaggngcggcggcggagggagcaggaggttggggcttgagccngtcattccggcgcacgaaaacttgaagtcgctcggtagccggggaagggaaggaagagaggcaggctctttcctagaggtgccgtgatcgagggtctggcactccaagccaactcctgagaacgggaaatgggcgggagtcggtggggtggagagggcagccgtggtcgcgagagcgaaggagcggtctgagaatccggcttgagtgttaaaggctaagcgtgtctagctggacccgtggccccgaagaagcgagacaaggcgacgcggagctgtccctgacaccccgaggaccgagggacagcgaagggccggggccgccggccattgccaggcgccattaggtgacgcggccgtcacgcgatgacgcgctgaccggcagtggcctccacgtcgcaggttccgcaaagacctgtgggagcgacccgggagaaggagggccaagatggcggaagcggaggagtctccaggagacccggggacagcatcgcccaggcccctgtttgcaggcctttcagatatatccatctcacaagacatccccgtagaaggagaaatcaccattcctatgagatctcgcatccgggagtttgacagctccacattaaatgaatctgttcgcaataccatcatgcgtgatctaaaagctgttgggaaaaaattcatgcatgttttgtacccaaggaaaagtaatactcttttgagagattgggatttgtggggccctttgatcctttgtgtgacactcgcattaatgctgcaaagagactctgcagatagtgaaaaagatggagggccccaatttgcagaggtgtttgtcattgtctggtttggtgcagttaccatcaccctcaactcaaaacttcttggagggaacatatctttttttcagagcctctgtgtgctgggttactgtatacttcccttgacagtagcaatgctgatttgccggctggtacttttggctgatccaggacctgtaaacttcatggttcggctttttgtggtgattgtgatgtttgcctggtctatagttgcctccacagctttccttgctgatagccagcctccaaaccgcagagccctagctgtttatcctgttttcctgttttactttgtcatcagttggatgattctcacctttactcctcagtaaatcaggaatgggaaattaaaaccagtgaattgaaagcacatctgaaagatgcaattcaccatggagctttgtctctggcccttattttgtctaattttggaggtatttgataactgagtaggtgaggagattaaaagggagccatatagcactgtcaccccttatttgaggaactgatgtttgaaaggctgttcttttctctcttaatgtcatttctttaaaaatacatgtgcatactacacacagtatataatgcctccttaaggcatgatggagtcaccgtggtccatttgggtgacaaccagtgacttgggaagcacatagatacatcttacaagttgaatagagttgataactattttcagttttgagaataccagttcaggtgcagctcttaaacacattgccttatgactattagaatatgcctctcttttcataaataaaaatacatggtctatatccattttcttttatttctctctcttaagcttaaaaaggcaatgagagaggttaggagtgggttcatacacggagaatgagaaaacatgcattaaccaatattcagattttgatcaggggaaattctacacttgttgcaaaaaaaaaaaaaaaaaaagcaaagggcctctaaagaatcagcctctttggtccctttgtgctgtcacctttttgccatgtttaacagcatcttggttggcactctagtcttaatcttgctccttaactttgaatatgcagtctaaaatgtcagtagtcaacatgtaattttcctttgaaattctgaatattccagtgctggaacttatccaaaaagaagacctcagaaacttagattggtagatctctagtgcatattatcatgtgggcaccttctcttagggtggaatgaggcagtctggatgcagcatagttaaaaggagctgtttaatattctctgtagtctggcctcttaactagaaagtaaagctaaatcagaagcctgtatttaaccatgtgaacagggagggatttagtgttctgatggctgattaatagaacagctagatacttagagcatgacgtgggatgggatgagtttacagctgctgccttttcatggtgagcttagcagttttctcattagatgtgtttttttgggttggggaatagcaatttattttattgattttagactttatcaagctaattagctcccctttagataagtacatgttgcacatgtgcacctacttgtaatctcagatatttatgcacacaagtgtgaaggtttttcagggagcagagcatctgggacaggctgattctgagctaaacagggctcctttaaggcaatatgaactgttgccttctataaattgcacattgaggaactctaatagacaaagattaggtgtcaggcagaaaacactcattgtaaatatactattagttgataaacataggactttcttattccccagtttttctttatcatataatttaaatatttattcattttgtatttaaagactacctacacatagatatatgattccaaagtcatactttctccatccccacattagccaagtgaatacagggccaaatgggttcttggaatgataataacaaagcattacaaagtgggtccccttggttccagccttgtccagagtttttggttatatatttctatttattacaatttaccttttaaattgtaaaataaacctttgtgtggacagagccaatgtttcaatcttgaatgagtaaagaaaatactttggaactgatcctcattttgaaattggttctaaattattatccatttccaatgtctgaaattctcttacttcctgctaaaactctctttctgccaaagttgtttcgtaatctgtctcaatgactataatgtaaaattaaagaagtaaccatgcttctcaagggggaattaaaagtgtttattgaattttactcaggctaattgtttggtcagaaattcctaaggccacagctttggggggttcgtgtagatgtacatggtgggtgggttataaatattgggacttaaggcagcttgttctatgtatttatctttgctcttgggtgacttagggaatgattttatttgatttaaccttctttctgtttgccccgagaatactcgccagtggcgcttgcagttgtagcatttaccccaagataactttgcctacgaaatatttcgcttttattattttcacatcattctagtatatggactttggaaacaaaagacattgttctatttatagcattcttttttttttttagtagcggtatttccatttacaaaatatagtaactcttgattactgaaaatgtcaaatcctagaaaacgtagcatgcctatacatgatgttaacatcattctcgaacagttgttggccgaagattcatttgatgaatccaatttttttgaaatagacaattctgatgttctctttagaaataactcagtttttatcttttttcacattgaaaatcagttagatttgcttaagcctcaaagagaatgtttatgtaaattagcgctggcaatttttttttttctaaacaggaaaagggttaaatgaaggttgataaaatggatgttcaattgtctttctgaaagtgagtggcttgaagggatgaataaatattttcttaatatattcaaaaaagtgcattgctttctgtgatggaagttaagacctaaatgtctggaagttgtaaccctcaacacagcttttcctgatttgctgcaaaggcacatagctgattatagaagtgaagacggcaaggacggggactccaacaaaggaaaccctgttgcaggatttgggaactttcatgcttcagatgaaattcaggcatgtgagcatcactgcagaatgtggtgcatcattgccatcatgagtaatcacttgctgctcctacttctgagaccaagactcttttgtcatattctttagcaataggacgggtaaagactggatttaattgctgttcagagtataaaaactcaattgattccaacatatctgaatgtgcagtaaagtcttaaaagtcaaccgttaatcattaagtcttttgcctctaaagtcttttgcctctgaagaggtttattacatgagttgattttcatattttcattttggtggggttttcctgttgttgggcaaggtggggtcacaggacatgggactagtaagcattttactgtttactatatttgtctttttataaacagtatctcccaaaatgtgattagaaggctaccaagcctgtatttggacatttaattgtgtgctttatataatgtaactactaacagtatttggactgcctgttcattcctggagacaaaaatgaaaatctgtcagttcaagttcttgggtaacatcaagtcattagaatttatctaaagcttatcatgatttgataagacatccattgcatgcagctgttttagctcagtgcaaaacactgaaattgtgattcttagactgtttctgagacatttggatggaaataaatgtataaatgttaattcatgtatataaattagaaacacttttctagattctgtaggcttttgttaaaaatagagaatttcttggggtttacttaggccacagaatggccaaataataataatgacaatgatattactaataataatagctaacctttatttggcacttactgtgtgccaggcactattctatttttttaagaatttttaaaataacagctttattgaaatacactttaccataaacttcacctttttattttttatttttatgagacagggactcacccaggctggagtgcagtggagcagtcatggcacactgtagcctcgacctccctgggctcaagcaatcctcccacttcagtgtcccgagtagttgggactacaggcatgcgtcactacacctaattggctaatttttgtagtttttgtagagatagggtttcgccatgttgcctaggctggtcttgaattcctgggctcaagcgatccacctgctttggcctcccaaaacagtgggattgcaggcgtgagccaccatgcctggctgaaattcaccttttaagatgtacaattcagtggtttttagtatattcacacacaaaattgcacaactatcactaacatctaattttagatcattttgtaacttcaccaagaaaccccaggtctgtcagcagtcagttccattcccccttcatcccagcctctggcaaccactaatctgctttctgtcactattgatttggccagacactattcttctgtgcttctcatgcatctcctgtaataccagtgctacaattctcattttatgtggaaaattgaggcactgagaggttaagtaaattgcccacggtcacacagtaatttgatttacaacagtaataacacattagatgagaacacagtaggacacaattttgaattccatttttatgtacctgaaatgaatacacccctcccccaaggtattttccctattgttagcctttgtaccctaggtacaaatataggtattttccctattgtgttatgtacctgaaatgaatacacccttcccccaaggtattttccctattgttagcctttgtaccctagaactgactggatgtagataacatttgttttcagagtaatggaacactgtatcagcagcatctgagaacataagaacagttggacattggaaagaggtttgttgccctcatccctccttgaacctcttttctctcccgcttccaccaccaccacacatatatacccctttttctcagtcttaagcatcaaacaatttctgcctctttctttttaattctcccagagggatggttaatgcatcacaatttaacttgtctattcaggtattaatagtcaagggatgcatctgtttgcttatagtaccagttatattcctaggaccttagagagcagtagtgtgagaatagaatgcctttctatttgggttaaactatgtgggaggaaaaagtaacagagtaaaggctttgccttaatgaagtcaagtgttctgcctggtgggaagtggccacacgctgcactgcgctgctcttgtttactctgttctttcagagcctttgtactttgccatcactgctagtaatttcttggtccttttcaatactccattttaatcttgatttttttctataaataataaatctgtgaaaaatctgtaaaaataaaaaaaaaaaaaaaaaaaaaaaaaaaaaaaaaaaaaaaaaaaaaaaaaaaaaaaaaaaaaaaaaaaaaaacaaaaaaaaaaaaagaaaaaanaaanaacaaaaaaanaaaaaataaaaaaaagaagaacaaaaaaaaaaaaaaaaaacaaaaaaataaaaaaaaggggcgggggggggccttctcattgaatcgtcttcttcatgggagggcggcgcacgatgtcgcgctcctagtcagttttgttcgggaggcgtacccctttgtgtcttagattaatttataaacgagacgtgttttgtgatgatact

SEQ ID NO: 488469 - DNA, 6637 bp, Homo sapiens
  misc_feature (263)..(263): n is a, c, g, or t
  misc_feature (301)..(301): n is a, c, g, or t
tttatcttttaagttattgtcacaatagttactctcttttagaccctgaacattttcagtacttgctccaaatggtttagcaacttttgaagtgggattaacaagtttggccaatgaagcttcttccctgcccaccgccagaggtgctggagaaaagtaatcctggagggtcggcgtggaggcagtagagaggtttataaaagtcaaggaagtgggaagaggcttgcgagcagcaggagaggcgcagagtcagaggggcaggngcggcggcggagggagcaggaggttggggcttgagccngtcattccggcgcacgaaaacttgaagtcgctcggtagccggggaagggaaggaagagaggcaggctctttcctagaggtgccgtgatcgagggtctggcactccaagccaactcctgagaacgggaaatgggcgggagtcggtggggtggagagggcagccgtggtcgcgagagcgaaggagcggtctgagaatccggcttgagtgttaaaggctaagcgtgtctagctggacccgtggccccgaagaagcgagacaaggcgacgcggagctgtccctgacaccccgaggaccgagggacagcgaagggccggggccgccggccattgccaggcgccattaggtgacgcggccgtcacgcgatgacgcgctgaccggcagtggcctccacgtcgcaggttccgcaaagacctgtgggagcgacccgggagaaggagggccaagatggcggaagcggaggagtctccaggagacccggggacagcatcgcccaggcccctgtttgcaggcctttcagatatatccatctcacaagacatccccgtagaaggagaaatcaccattcctatgagatctcgcatccgggagtttgacagctccacattaaatgaatctgttcgcaataccatcatgcgtgatctaaaagctgttgggaaaaaattcatgcatgttttgtacccaaggaaaagtaatactcttttgagagattgggatttgtggggccctttgatcctttgtgtgacactcgcattaatgctgcaaagagactctgcagatagtgaaaaagatggagggccccaatttgcagaggtgtttgtcattgtctggtttggtgcagttaccatcaccctcaactcaaaacttcttggagggaacatatctttttttcagagcctctgtgtgctgggttactgtatacttcccttgacagtagcaatgctgatttgccggctggtacttttggctgatccaggacctgtaaacttcatggttcggctttttgtggtgattgtgatgtttgcctggtctatagttgcctccacagctttccttgctgatagccagcctccaaaccgcagagccctagctgtttatcctgttttcctgttttactttgtcatcagttggatgattctcacctttactcctcagtaaatcaggaatgggaaattaaaaccagtgaattgaaagcacatctgaaagatgcaattcaccatggagctttgtctctggcccttattttgtctaattttggaggtatttgataactgagtaggtgaggagattaaaagggagccatatagcactgtcaccccttatttgaggaactgatgtttgaaaggctgttcttttctctcttaatgtcatttctttaaaaatacatgtgcatactacacacagtatataatgcctccttaaggcatgatggagtcaccgtggtccatttgggtgacaaccagtgacgagaataccagttcaggtgcagctcttaaacacattgccttatgactattagaatatgcctctcttttcataaataaaaatacatggtctatatccattttcttttatttctctctcttaagcttaaaaaggcaatgagagaggttaggagtgggttcatacacggagaatgagaaaacatgcattaaccaatattcagattttgatcaggggaaattctacacttgttgcaaaaaaaaaaaaaaaaaaagcaaagggcctctaaagaatcagcctctttggtccctttgtgctgtcacctttttgccatgtttaacagcatcttggttggcactctagtcttaatcttgctccttaactttgaatatgcagtctaaaatgtcagtagtcaacatgtaattttcctttgaaattctgaatattccagtgctggaacttatccaaaaagaagacctcagaaacttagattggtagatctctagtgcatattatcatgtgggcaccttctcttagggtggaatgaggcagtctggatgcagcatagttaaaaggagctgtttaatattctctgtagtctggcctcttaactagaaagtaaagctaaatcagaagcctgtatttaaccatgtgaacagggagggatttagtgttctgatggctgattaatagaacagctagatacttagagcatgacgtgggatgggatgagtttacagctgctgccttttcatggtgagcttagcagttttctcattagatgtgtttttttgggttggggaatagcaatttattttattgattttagactttatcaagctaattagctcccctttagataagtacatgttgcacatgtgcacctacttgtaatctcagatatttatgcacacaagtgtgaaggtttttcagggagcagagcatctgggacaggctgattctgagctaaacagggctcctttaaggcaatatgaactgttgccttctataaattgcacattgaggaactctaatagacaaagattaggtgtcaggcagaaaacactcattgtaaatatactattagttgataaacataggactttcttattccccagtttttctttatcatataatttaaatatttattcattttgtatttaaagactacctacacatagatatatgattccaaagtcatactttctccatccccacattagccaagtgaatacagggccaaatgggttcttggaatgataataacaaagcattacaaagtgggtccccttggttccagccttgtccagagtttttggttatatatttctatttattacaatttaccttttaaattgtaaaataaacctttgtgtggacagagccaatgtttcaatcttgaatgagtaaagaaaatactttggaactgatcctcattttgaaattggttctaaattattatccatttccaatgtctgaaattctcttacttcctgctaaaactctctttctgccaaagttgtttcgtaatctgtctcaatgactataatgtaaaattaaagaagtaaccatgcttctcaagggggaattaaaagtgtttattgaattttactcaggctaattgtttggtcagaaattcctaaggccacagctttggggggttcgtgtagatgtacatggtgggtgggttataaatattgggacttaaggcagcttgttctatgtatttatctttgctcttgggtgacttagggaatgattttatttgatttaaccttctttctgtttgccccgagaatactcgccagtggcgcttgcagttgtagcatttaccccaagataactttgcctacgaaatatttcgcttttattattttcacatcattctagtatatggactttggaaacaaaagacattgttctatttatagcattcttttttttttttagtagcggtatttccatttacaaaatatagtaactcttgattactgaaaatgtcaaatcctagaaaacgtagcatgcctatacatgatgttaacatcattctcgaacagttgttggccgaagattcatttgatgaatccaatttttttgaaatagacaattctgatgttctctttagaaataactcagtttttatcttttttcacattgaaaatcagttagatttgcttaagcctcaaagagaatgtttatgtaaattagcgctggcaatttttttttttctaaacaggaaaagggttaaatgaaggttgataaaatggatgttcaattgtctttctgaaagtgagtggcttgaagggatgaataaatattttcttaatatattcaaaaaagtgcattgctttctgtgatggaagttaagacctaaatgtctggaagttgtaaccctcaacacagcttttcctgatttgctgcaaaggcacatagctgattatagaagtgaagacggcaaggacggggactccaacaaaggaaaccctgttgcaggatttgggaactttcatgcttcagatgaaattcaggcatgtgagcatcactgcagaatgtggtgcatcattgccatcatgagtaatcacttgctgctcctacttctgagaccaagactcttttgtcatattctttagcaataggacgggtaaagactggatttaattgctgttcagagtataaaaactcaattgattccaacatatctgaatgtgcagtaaagtcttaaaagtcaaccgttaatcattaagtcttttgcctctaaagtcttttgcctctgaagaggtttattacatgagttgattttcatattttcattttggtggggttttcctgttgttgggcaaggtggggtcacaggacatgggactagtaagcattttactgtttactatatttgtctttttataaacagtatctcccaaaatgtgattagaaggctaccaagcctgtatttggacatttaattgtgtgctttatataatgtaactactaacagtatttggactgcctgttcattcctggagacaaaaatgaaaatctgtcagttcaagttcttgggtaacatcaagtcattagaatttatctaaagcttatcatgatttgataagacatccattgcatgcagctgttttagctcagtgcaaaacactgaaattgtgattcttagactgtttctgagacatttggatggaaataaatgtataaatgttaattcatgtatataaattagaaacacttttctagattctgtaggcttttgttaaaaatagagaatttcttggggtttacttaggccacagaatggccaaataataataatgacaatgatattactaataataatagctaacctttatttggcacttactgtgtgccaggcactattctatttttttaagaatttttaaaataacagctttattgaaatacactttaccataaacttcacctttttattttttatttttatgagacagggactcacccaggctggagtgcagtggagcagtcatggcacactgtagcctcgacctccctgggctcaagcaatcctcccacttcagtgtcccgagtagttgggactacaggcatgcgtcactacacctaattggctaatttttgtagtttttgtagagatagggtttcgccatgttgcctaggctggtcttgaattcctgggctcaagcgatccacctgctttggcctcccaaaacagtgggattgcaggcgtgagccaccatgcctggctgaaattcaccttttaagatgtacaattcagtggtttttagtatattcacacacaaaattgcacaactatcactaacatctaattttagatcattttgtaacttcaccaagaaaccccaggtctgtcagcagtcagttccattcccccttcatcccagcctctggcaaccactaatctgctttctgtcactattgatttggccagacactattcttctgtgcttctcatgcatctcctgtaataccagtgctacaattctcattttatgtggaaaattgaggcactgagaggttaagtaaattgcccacggtcacacagtaatttgatttacaacagtaataacacattagatgagaacacagtaggacacaattttgaattccatttttatgtacctgaaatgaatacacccctcccccaaggtattttccctattgttagcctttgtaccctaggtacaaatataggtattttccctattgtgttatgtacctgaaatgaatacacccttcccccaaggtattttccctattgttagcctttgtaccctagaactgactggatgtagataacatttgttttcagagtaatggaacactgtatcagcagcatctgagaacataagaacagttggacattggaaagaggtttgttgccctcatccctccttgaacctcttttctctcccgcttccaccaccaccacacatatatacccctttttctcagtcttaagcatcaaacaatttctgcctctttctttttaattctcccagagggatggttaatgcatcacaatttaacttgtctattcaggtattaatagtcaagggatgcatctgtttgcttatagtaccagttatattcctaggaccttagagagcagtagtgtgagaatagaatgcctttctatttgggttaaactatgtgggaggaaaaagtaacagagtaaaggctttgccttaatgaagtcaagtgttctgcctggtgggaagtggccacacgctgcactgcgctgctcttgtttactctgttctttcagagcctttgtactttgccatcactgctagtaatttcttggtccttttcaatactccattttaatcttgatttttttctataaataataaatctgtgaaaaatctgtaaaaa

SEQ ID NO: 488470 - DNA, 6731 bp, Homo sapiens
  misc_feature (263)..(263): n is a, c, g, or t
  misc_feature (301)..(301): n is a, c, g, or t
tttatcttttaagttattgtcacaatagttactctcttttagaccctgaacattttcagtacttgctccaaatggtttagcaacttttgaagtgggattaacaagtttggccaatgaagcttcttccctgcccaccgccagaggtgctggagaaaagtaatcctggagggtcggcgtggaggcagtagagaggtttataaaagtcaaggaagtgggaagaggcttgcgagcagcaggagaggcgcagagtcagaggggcaggngcggcggcggagggagcaggaggttggggcttgagccngtcattccggcgcacgaaaacttgaagtcgctcggtagccggggaagggaaggaagagaggcaggctctttcctagaggtgccgtgatcgagggtctggcactccaagccaactcctgagaacgggaaatgggcgggagtcggtggggtggagagggcagccgtggtcgcgagagcgaaggagcggtctgagaatccggcttgagtgttaaaggctaagcgtgtctagctggacccgtggccccgaagaagcgagacaaggcgacgcggagctgtccctgacaccccgaggaccgagggacagcgaagggccggggccgccggccattgccaggcgccattaggtgacgcggccgtcacgcgatgacgcgctgaccggcagtggcctccacgtcgcaggttccgcaaagacctgtgggagcgacccgggagaaggagggccaagatggcggaagcggaggagtctccaggagacccggggacagcatcgcccaggcccctggtgagcttgggatctgcgacaaaagggaccgaggtttgcaggcctttcagatatatccatctcacaagacatccccgtagaaggagaaatcaccattcctatgagatctcgcatccgggagtttgacagctccacattaaatgaatctgttcgcaataccatcatgcgtgatctaaaagctgttgggaaaaaattcatgcatgttttgtacccaaggaaaagtaatactcttttgagagattgggatttgtggggccctttgatcctttgtgtgacactcgcattaatgctgcaaagagactctgcagatagtgaaaaagatggagggccccaatttgcagaggtgtttgtcattgtctggtttggtgcagttaccatcaccctcaactcaaaacttcttggagggaacatatctttttttcagagcctctgtgtgctgggttactgtatacttcccttgacagtagcaatgctgatttgccggctggtacttttggctgatccaggacctgtaaacttcatggttcggctttttgtggtgattgtgatgtttgcctggtctatagttgcctccacagctttccttgctgatagccagcctccaaaccgcagagccctagctgtttatcctgttttcctgttttactttgtcatcagttggatgattctcacctttactcctcagtaaatcaggaatgggaaattaaaaccagtgaattgaaagcacatctgaaagatgcaattcaccatggagctttgtctctggcccttattttgtctaattttggaggtatttgataactgagtaggtgaggagattaaaagggagccatatagcactgtcaccccttatttgaggaactgatgtttgaaaggctgttcttttctctcttaatgtcatttctttaaaaatacatgtgcatactacacacagtatataatgcctccttaaggcatgatggagtcaccgtggtccatttgggtgacaaccagtgacttgggaagcacatagatacatcttacaagttgaatagagttgataactattttcagttttgagaataccagttcaggtgcagctcttaaacacattgccttatgactattagaatatgcctctcttttcataaataaaaatacatggtctatatccattttcttttatttctctctcttaagcttaaaaaggcaatgagagaggttaggagtgggttcatacacggagaatgagaaaacatgcattaaccaatattcagattttgatcaggggaaattctacacttgttgcaaaaaaaaaaaaaaaaaaagcaaagggcctctaaagaatcagcctctttggtccctttgtgctgtcacctttttgccatgtttaacagcatcttggttggcactctagtcttaatcttgctccttaactttgaatatgcagtctaaaatgtcagtagtcaacatgtaattttcctttgaaattctgaatattccagtgctggaacttatccaaaaagaagacctcagaaacttagattggtagatctctagtgcatattatcatgtgggcaccttctcttagggtggaatgaggcagtctggatgcagcatagttaaaaggagctgtttaatattctctgtagtctggcctcttaactagaaagtaaagctaaatcagaagcctgtatttaaccatgtgaacagggagggatttagtgttctgatggctgattaatagaacagctagatacttagagcatgacgtgggatgggatgagtttacagctgctgccttttcatggtgagcttagcagttttctcattagatgtgtttttttgggttggggaatagcaatttattttattgattttagactttatcaagctaattagctcccctttagataagtacatgttgcacatgtgcacctacttgtaatctcagatatttatgcacacaagtgtgaaggtttttcagggagcagagcatctgggacaggctgattctgagctaaacagggctcctttaaggcaatatgaactgttgccttctataaattgcacattgaggaactctaatagacaaagattaggtgtcaggcagaaaacactcattgtaaatatactattagttgataaacataggactttcttattccccagtttttctttatcatataatttaaatatttattcattttgtatttaaagactacctacacatagatatatgattccaaagtcatactttctccatccccacattagccaagtgaatacagggccaaatgggttcttggaatgataataacaaagcattacaaagtgggtccccttggttccagccttgtccagagtttttggttatatatttctatttattacaatttaccttttaaattgtaaaataaacctttgtgtggacagagccaatgtttcaatcttgaatgagtaaagaaaatactttggaactgatcctcattttgaaattggttctaaattattatccatttccaatgtctgaaattctcttacttcctgctaaaactctctttctgccaaagttgtttcgtaatctgtctcaatgactataatgtaaaattaaagaagtaaccatgcttctcaagggggaattaaaagtgtttattgaattttactcaggctaattgtttggtcagaaattcctaaggccacagctttggggggttcgtgtagatgtacatggtgggtgggttataaatattgggacttaaggcagcttgttctatgtatttatctttgctcttgggtgacttagggaatgattttatttgatttaaccttctttctgtttgccccgagaatactcgccagtggcgcttgcagttgtagcatttaccccaagataactttgcctacgaaatatttcgcttttattattttcacatcattctagtatatggactttggaaacaaaagacattgttctatttatagcattcttttttttttttagtagcggtatttccatttacaaaatatagtaactcttgattactgaaaatgtcaaatcctagaaaacgtagcatgcctatacatgatgttaacatcattctcgaacagttgttggccgaagattcatttgatgaatccaatttttttgaaatagacaattctgatgttctctttagaaataactcagtttttatcttttttcacattgaaaatcagttagatttgcttaagcctcaaagagaatgtttatgtaaattagcgctggcaatttttttttttctaaacaggaaaagggttaaatgaaggttgataaaatggatgttcaattgtctttctgaaagtgagtggcttgaagggatgaataaatattttcttaatatattcaaaaaagtgcattgctttctgtgatggaagttaagacctaaatgtctggaagttgtaaccctcaacacagcttttcctgatttgctgcaaaggcacatagctgattatagaagtgaagacggcaaggacggggactccaacaaaggaaaccctgttgcaggatttgggaactttcatgcttcagatgaaattcaggcatgtgagcatcactgcagaatgtggtgcatcattgccatcatgagtaatcacttgctgctcctacttctgagaccaagactcttttgtcatattctttagcaataggacgggtaaagactggatttaattgctgttcagagtataaaaactcaattgattccaacatatctgaatgtgcagtaaagtcttaaaagtcaaccgttaatcattaagtcttttgcctctaaagtcttttgcctctgaagaggtttattacatgagttgattttcatattttcattttggtggggttttcctgttgttgggcaaggtggggtcacaggacatgggactagtaagcattttactgtttactatatttgtctttttataaacagtatctcccaaaatgtgattagaaggctaccaagcctgtatttggacatttaattgtgtgctttatataatgtaactactaacagtatttggactgcctgttcattcctggagacaaaaatgaaaatctgtcagttcaagttcttgggtaacatcaagtcattagaatttatctaaagcttatcatgatttgataagacatccattgcatgcagctgttttagctcagtgcaaaacactgaaattgtgattcttagactgtttctgagacatttggatggaaataaatgtataaatgttaattcatgtatataaattagaaacacttttctagattctgtaggcttttgttaaaaatagagaatttcttggggtttacttaggccacagaatggccaaataataataatgacaatgatattactaataataatagctaacctttatttggcacttactgtgtgccaggcactattctatttttttaagaatttttaaaataacagctttattgaaatacactttaccataaacttcacctttttattttttatttttatgagacagggactcacccaggctggagtgcagtggagcagtcatggcacactgtagcctcgacctccctgggctcaagcaatcctcccacttcagtgtcccgagtagttgggactacaggcatgcgtcactacacctaattggctaatttttgtagtttttgtagagatagggtttcgccatgttgcctaggctggtcttgaattcctgggctcaagcgatccacctgctttggcctcccaaaacagtgggattgcaggcgtgagccaccatgcctggctgaaattcaccttttaagatgtacaattcagtggtttttagtatattcacacacaaaattgcacaactatcactaacatctaattttagatcattttgtaacttcaccaagaaaccccaggtctgtcagcagtcagttccattcccccttcatcccagcctctggcaaccactaatctgctttctgtcactattgatttggccagacactattcttctgtgcttctcatgcatctcctgtaataccagtgctacaattctcattttatgtggaaaattgaggcactgagaggttaagtaaattgcccacggtcacacagtaatttgatttacaacagtaataacacattagatgagaacacagtaggacacaattttgaattccatttttatgtacctgaaatgaatacacccctcccccaaggtattttccctattgttagcctttgtaccctaggtacaaatataggtattttccctattgtgttatgtacctgaaatgaatacacccttcccccaaggtattttccctattgttagcctttgtaccctagaactgactggatgtagataacatttgttttcagagtaatggaacactgtatcagcagcatctgagaacataagaacagttggacattggaaagaggtttgttgccctcatccctccttgaacctcttttctctcccgcttccaccaccaccacacatatatacccctttttctcagtcttaagcatcaaacaatttctgcctctttctttttaattctcccagagggatggttaatgcatcacaatttaacttgtctattcaggtattaatagtcaagggatgcatctgtttgcttatagtaccagttatattcctaggaccttagagagcagtagtgtgagaatagaatgcctttctatttgggttaaactatgtgggaggaaaaagtaacagagtaaaggctttgccttaatgaagtcaagtgttctgcctggtgggaagtggccacacgctgcactgcgctgctcttgtttactctgttctttcagagcctttgtactttgccatcactgctagtaatttcttggtccttttcaatactccattttaatcttgatttttttctataaataataaatctgtgaaaaatctgtaaaaa

SEQ ID NO: 488471 - DNA, 589 bp, Homo sapiens
  misc_feature (21)..(21): n is a, c, g, or t
agtgggaggaccagatagctnctgtatggggcagacaaggtaaagaccattgctgttctgttgacttcgttggctggctcagagacagacaagaactctgagataccactgatccattttctgagtccggctttatgctgtagaacttgtttaaaagatgcagctctcaaggtaggaaggtaggtagctagttgtgactacatgtgcttcctacaaaccttaccacctaacaatctaccactggctttgttgatgcagagtcaagttgtcgtcgatattgttttactcagctttagcttaccaaacccctaatacaaggccccctttttctgttggggcatcctgcccgagacacaacactgccctgtgaaatcctgtttcataggttccgtctagtcaaggcggggttagctagtagctttggctcagagatatcggtagtgtaaacatcaagaattctacagataactctagcttgcattcgccatactgcctccttgccccacctctgcagcacacaaaaacaatatctactctatatctattaaaaatgtaaagagccacacagttaaaaacataaatagtacct

SEQ ID NO: 488472 - DNA, 6828 bp, Homo sapiens
  misc_feature (263)..(263): n is a, c, g, or t
  misc_feature (301)..(301): n is a, c, g, or t
tttatcttttaagttattgtcacaatagttactctcttttagaccctgaacattttcagtacttgctccaaatggtttagcaacttttgaagtgggattaacaagtttggccaatgaagcttcttccctgcccaccgccagaggtgctggagaaaagtaatcctggagggtcggcgtggaggcagtagagaggtttataaaagtcaaggaagtgggaagaggcttgcgagcagcaggagaggcgcagagtcagaggggcaggngcggcggcggagggagcaggaggttggggcttgagccngtcattccggcgcacgaaaacttgaagtcgctcggtagccggggaagggaaggaagagaggcaggctctttcctagaggtgccgtgatcgagggtctggcactccaagccaactcctgagaacgggaaatgggcgggagtcggtggggtggagagggcagccgtggtcgcgagagcgaaggagcggtctgagaatccggcttgagtgttaaaggctaagcgtgtctagctggacccgtggccccgaagaagcgagacaaggcgacgcggagctgtccctgacaccccgaggaccgagggacagcgaagggccggggccgccggccattgccaggcgccattaggtgacgcggccgtcacgcgatgacgcgctgaccggcagtggcctccacgtcgcaggttccgcaaagacctgtgggagcgacccgggagaaggagggccaagatggcggaagcggaggagtctccaggagacccggggacagcatcgcccaggcccctggtgagcttgggatctgcgacaaaagggaccgagggctggagtgcaatggcgtgatctcggtcaccgcaaccttcacctcccgggttcaagcgattctcctgcctcagcctcccgagtagctgggattacagtttgcaggcctttcagatatatccatctcacaagacatccccgtagaaggagaaatcaccattcctatgagatctcgcatccgggagtttgacagctccacattaaatgaatctgttcgcaataccatcatgcgtgatctaaaagctgttgggaaaaaattcatgcatgttttgtacccaaggaaaagtaatactcttttgagagattgggatttgtggggccctttgatcctttgtgtgacactcgcattaatgctgcaaagagactctgcagatagtgaaaaagatggagggccccaatttgcagaggtgtttgtcattgtctggtttggtgcagttaccatcaccctcaactcaaaacttcttggagggaacatatctttttttcagagcctctgtgtgctgggttactgtatacttcccttgacagtagcaatgctgatttgccggctggtacttttggctgatccaggacctgtaaacttcatggttcggctttttgtggtgattgtgatgtttgcctggtctatagttgcctccacagctttccttgctgatagccagcctccaaaccgcagagccctagctgtttatcctgttttcctgttttactttgtcatcagttggatgattctcacctttactcctcagtaaatcaggaatgggaaattaaaaccagtgaattgaaagcacatctgaaagatgcaattcaccatggagctttgtctctggcccttattttgtctaattttggaggtatttgataactgagtaggtgaggagattaaaagggagccatatagcactgtcaccccttatttgaggaactgatgtttgaaaggctgttcttttctctcttaatgtcatttctttaaaaatacatgtgcatactacacacagtatataatgcctccttaaggcatgatggagtcaccgtggtccatttgggtgacaaccagtgacttgggaagcacatagatacatcttacaagttgaatagagttgataactattttcagttttgagaataccagttcaggtgcagctcttaaacacattgccttatgactattagaatatgcctctcttttcataaataaaaatacatggtctatatccattttcttttatttctctctcttaagcttaaaaaggcaatgagagaggttaggagtgggttcatacacggagaatgagaaaacatgcattaaccaatattcagattttgatcaggggaaattctacacttgttgcaaaaaaaaaaaaaaaaaaagcaaagggcctctaaagaatcagcctctttggtccctttgtgctgtcacctttttgccatgtttaacagcatcttggttggcactctagtcttaatcttgctccttaactttgaatatgcagtctaaaatgtcagtagtcaacatgtaattttcctttgaaattctgaatattccagtgctggaacttatccaaaaagaagacctcagaaacttagattggtagatctctagtgcatattatcatgtgggcaccttctcttagggtggaatgaggcagtctggatgcagcatagttaaaaggagctgtttaatattctctgtagtctggcctcttaactagaaagtaaagctaaatcagaagcctgtatttaaccatgtgaacagggagggatttagtgttctgatggctgattaatagaacagctagatacttagagcatgacgtgggatgggatgagtttacagctgctgccttttcatggtgagcttagcagttttctcattagatgtgtttttttgggttggggaatagcaatttattttattgattttagactttatcaagctaattagctcccctttagataagtacatgttgcacatgtgcacctacttgtaatctcagatatttatgcacacaagtgtgaaggtttttcagggagcagagcatctgggacaggctgattctgagctaaacagggctcctttaaggcaatatgaactgttgccttctataaattgcacattgaggaactctaatagacaaagattaggtgtcaggcagaaaacactcattgtaaatatactattagttgataaacataggactttcttattccccagtttttctttatcatataatttaaatatttattcattttgtatttaaagactacctacacatagatatatgattccaaagtcatactttctccatccccacattagccaagtgaatacagggccaaatgggttcttggaatgataataacaaagcattacaaagtgggtccccttggttccagccttgtccagagtttttggttatatatttctatttattacaatttaccttttaaattgtaaaataaacctttgtgtggacagagccaatgtttcaatcttgaatgagtaaagaaaatactttggaactgatcctcattttgaaattggttctaaattattatccatttccaatgtctgaaattctcttacttcctgctaaaactctctttctgccaaagttgtttcgtaatctgtctcaatgactataatgtaaaattaaagaagtaaccatgcttctcaagggggaattaaaagtgtttattgaattttactcaggctaattgtttggtcagaaattcctaaggccacagctttggggggttcgtgtagatgtacatggtgggtgggttataaatattgggacttaaggcagcttgttctatgtatttatctttgctcttgggtgacttagggaatgattttatttgatttaaccttctttctgtttgccccgagaatactcgccagtggcgcttgcagttgtagcatttaccccaagataactttgcctacgaaatatttcgcttttattattttcacatcattctagtatatggactttggaaacaaaagacattgttctatttatagcattcttttttttttttagtagcggtatttccatttacaaaatatagtaactcttgattactgaaaatgtcaaatcctagaaaacgtagcatgcctatacatgatgttaacatcattctcgaacagttgttggccgaagattcatttgatgaatccaatttttttgaaatagacaattctgatgttctctttagaaataactcagtttttatcttttttcacattgaaaatcagttagatttgcttaagcctcaaagagaatgtttatgtaaattagcgctggcaatttttttttttctaaacaggaaaagggttaaatgaaggttgataaaatggatgttcaattgtctttctgaaagtgagtggcttgaagggatgaataaatattttcttaatatattcaaaaaagtgcattgctttctgtgatggaagttaagacctaaatgtctggaagttgtaaccctcaacacagcttttcctgatttgctgcaaaggcacatagctgattatagaagtgaagacggcaaggacggggactccaacaaaggaaaccctgttgcaggatttgggaactttcatgcttcagatgaaattcaggcatgtgagcatcactgcagaatgtggtgcatcattgccatcatgagtaatcacttgctgctcctacttctgagaccaagactcttttgtcatattctttagcaataggacgggtaaagactggatttaattgctgttcagagtataaaaactcaattgattccaacatatctgaatgtgcagtaaagtcttaaaagtcaaccgttaatcattaagtcttttgcctctaaagtcttttgcctctgaagaggtttattacatgagttgattttcatattttcattttggtggggttttcctgttgttgggcaaggtggggtcacaggacatgggactagtaagcattttactgtttactatatttgtctttttataaacagtatctcccaaaatgtgattagaaggctaccaagcctgtatttggacatttaattgtgtgctttatataatgtaactactaacagtatttggactgcctgttcattcctggagacaaaaatgaaaatctgtcagttcaagttcttgggtaacatcaagtcattagaatttatctaaagcttatcatgatttgataagacatccattgcatgcagctgttttagctcagtgcaaaacactgaaattgtgattcttagactgtttctgagacatttggatggaaataaatgtataaatgttaattcatgtatataaattagaaacacttttctagattctgtaggcttttgttaaaaatagagaatttcttggggtttacttaggccacagaatggccaaataataataatgacaatgatattactaataataatagctaacctttatttggcacttactgtgtgccaggcactattctatttttttaagaatttttaaaataacagctttattgaaatacactttaccataaacttcacctttttattttttatttttatgagacagggactcacccaggctggagtgcagtggagcagtcatggcacactgtagcctcgacctccctgggctcaagcaatcctcccacttcagtgtcccgagtagttgggactacaggcatgcgtcactacacctaattggctaatttttgtagtttttgtagagatagggtttcgccatgttgcctaggctggtcttgaattcctgggctcaagcgatccacctgctttggcctcccaaaacagtgggattgcaggcgtgagccaccatgcctggctgaaattcaccttttaagatgtacaattcagtggtttttagtatattcacacacaaaattgcacaactatcactaacatctaattttagatcattttgtaacttcaccaagaaaccccaggtctgtcagcagtcagttccattcccccttcatcccagcctctggcaaccactaatctgctttctgtcactattgatttggccagacactattcttctgtgcttctcatgcatctcctgtaataccagtgctacaattctcattttatgtggaaaattgaggcactgagaggttaagtaaattgcccacggtcacacagtaatttgatttacaacagtaataacacattagatgagaacacagtaggacacaattttgaattccatttttatgtacctgaaatgaatacacccctcccccaaggtattttccctattgttagcctttgtaccctaggtacaaatataggtattttccctattgtgttatgtacctgaaatgaatacacccttcccccaaggtattttccctattgttagcctttgtaccctagaactgactggatgtagataacatttgttttcagagtaatggaacactgtatcagcagcatctgagaacataagaacagttggacattggaaagaggtttgttgccctcatccctccttgaacctcttttctctcccgcttccaccaccaccacacatatatacccctttttctcagtcttaagcatcaaacaatttctgcctctttctttttaattctcccagagggatggttaatgcatcacaatttaacttgtctattcaggtattaatagtcaagggatgcatctgtttgcttatagtaccagttatattcctaggaccttagagagcagtagtgtgagaatagaatgcctttctatttgggttaaactatgtgggaggaaaaagtaacagagtaaaggctttgccttaatgaagtcaagtgttctgcctggtgggaagtggccacacgctgcactgcgctgctcttgtttactctgttctttcagagcctttgtactttgccatcactgctagtaatttcttggtccttttcaatactccattttaatcttgatttttttctataaataataaatctgtgaaaaatctgtaaaaa

SEQ ID NO: 488473 - DNA, 6568 bp, Homo sapiens
  misc_feature (263)..(263): n is a, c, g, or t
  misc_feature (301)..(301): n is a, c, g, or t
tttatcttttaagttattgtcacaatagttactctcttttagaccctgaacattttcagtacttgctccaaatggtttagcaacttttgaagtgggattaacaagtttggccaatgaagcttcttccctgcccaccgccagaggtgctggagaaaagtaatcctggagggtcggcgtggaggcagtagagaggtttataaaagtcaaggaagtgggaagaggcttgcgagcagcaggagaggcgcagagtcagaggggcaggngcggcggcggagggagcaggaggttggggcttgagccngtcattccggcgcacgaaaacttgaagtcgctcggtagccggggaagggaaggaagagaggcaggctctttcctagaggtgccgtgatcgagggtctggcactccaagccaactcctgagaacgggaaatgggcgggagtcggtggggtggagagggcagccgtggtcgcgagagcgaaggagcggtctgagaatccggcttgagtgttaaaggctaagcgtgtctagctggacccgtggccccgaagaagcgagacaaggcgacgcggagctgtccctgacaccccgaggaccgagggacagcgaagggccggggccgccggccattgccaggcgccattaggtgacgcggccgtcacgcgatgacgcgctgaccggcagtggcctccacgtcgcaggttccgcaaagacctgtgggagcgacccgggagaaggagggccaagatggcggaagcggaggagtctccaggagacccggggacagcatcgcccaggcccctgatgcgtgatctaaaagctgttgggaaaaaattcatgcatgttttgtacccaaggaaaagtaatactcttttgagagattgggatttgtggggccctttgatcctttgtgtgacactcgcattaatgctgcaaagagactctgcagatagtgaaaaagatggagggccccaatttgcagaggtgtttgtcattgtctggtttggtgcagttaccatcaccctcaactcaaaacttcttggagggaacatatctttttttcagagcctctgtgtgctgggttactgtatacttcccttgacagtagcaatgctgatttgccggctggtacttttggctgatccaggacctgtaaacttcatggttcggctttttgtggtgattgtgatgtttgcctggtctatagttgcctccacagctttccttgctgatagccagcctccaaaccgcagagccctagctgtttatcctgttttcctgttttactttgtcatcagttggatgattctcacctttactcctcagtaaatcaggaatgggaaattaaaaccagtgaattgaaagcacatctgaaagatgcaattcaccatggagctttgtctctggcccttattttgtctaattttggaggtatttgataactgagtaggtgaggagattaaaagggagccatatagcactgtcaccccttatttgaggaactgatgtttgaaaggctgttcttttctctcttaatgtcatttctttaaaaatacatgtgcatactacacacagtatataatgcctccttaaggcatgatggagtcaccgtggtccatttgggtgacaaccagtgacttgggaagcacatagatacatcttacaagttgaatagagttgataactattttcagttttgagaataccagttcaggtgcagctcttaaacacattgccttatgactattagaatatgcctctcttttcataaataaaaatacatggtctatatccattttcttttatttctctctcttaagcttaaaaaggcaatgagagaggttaggagtgggttcatacacggagaatgagaaaacatgcattaaccaatattcagattttgatcaggggaaattctacacttgttgcaaaaaaaaaaaaaaaaaaagcaaagggcctctaaagaatcagcctctttggtccctttgtgctgtcacctttttgccatgtttaacagcatcttggttggcactctagtcttaatcttgctccttaactttgaatatgcagtctaaaatgtcagtagtcaacatgtaattttcctttgaaattctgaatattccagtgctggaacttatccaaaaagaagacctcagaaacttagattggtagatctctagtgcatattatcatgtgggcaccttctcttagggtggaatgaggcagtctggatgcagcatagttaaaaggagctgtttaatattctctgtagtctggcctcttaactagaaagtaaagctaaatcagaagcctgtatttaaccatgtgaacagggagggatttagtgttctgatggctgattaatagaacagctagatacttagagcatgacgtgggatgggatgagtttacagctgctgccttttcatggtgagcttagcagttttctcattagatgtgtttttttgggttggggaatagcaatttattttattgattttagactttatcaagctaattagctcccctttagataagtacatgttgcacatgtgcacctacttgtaatctcagatatttatgcacacaagtgtgaaggtttttcagggagcagagcatctgggacaggctgattctgagctaaacagggctcctttaaggcaatatgaactgttgccttctataaattgcacattgaggaactctaatagacaaagattaggtgtcaggcagaaaacactcattgtaaatatactattagttgataaacataggactttcttattccccagtttttctttatcatataatttaaatatttattcattttgtatttaaagactacctacacatagatatatgattccaaagtcatactttctccatccccacattagccaagtgaatacagggccaaatgggttcttggaatgataataacaaagcattacaaagtgggtccccttggttccagccttgtccagagtttttggttatatatttctatttattacaatttaccttttaaattgtaaaataaacctttgtgtggacagagccaatgtttcaatcttgaatgagtaaagaaaatactttggaactgatcctcattttgaaattggttctaaattattatccatttccaatgtctgaaattctcttacttcctgctaaaactctctttctgccaaagttgtttcgtaatctgtctcaatgactataatgtaaaattaaagaagtaaccatgcttctcaagggggaattaaaagtgtttattgaattttactcaggctaattgtttggtcagaaattcctaaggccacagctttggggggttcgtgtagatgtacatggtgggtgggttataaatattgggacttaaggcagcttgttctatgtatttatctttgctcttgggtgacttagggaatgattttatttgatttaaccttctttctgtttgccccgagaatactcgccagtggcgcttgcagttgtagcatttaccccaagataactttgcctacgaaatatttcgcttttattattttcacatcattctagtatatggactttggaaacaaaagacattgttctatttatagcattcttttttttttttagtagcggtatttccatttacaaaatatagtaactcttgattactgaaaatgtcaaatcctagaaaacgtagcatgcctatacatgatgttaacatcattctcgaacagttgttggccgaagattcatttgatgaatccaatttttttgaaatagacaattctgatgttctctttagaaataactcagtttttatcttttttcacattgaaaatcagttagatttgcttaagcctcaaagagaatgtttatgtaaattagcgctggcaatttttttttttctaaacaggaaaagggttaaatgaaggttgataaaatggatgttcaattgtctttctgaaagtgagtggcttgaagggatgaataaatattttcttaatatattcaaaaaagtgcattgctttctgtgatggaagttaagacctaaatgtctggaagttgtaaccctcaacacagcttttcctgatttgctgcaaaggcacatagctgattatagaagtgaagacggcaaggacggggactccaacaaaggaaaccctgttgcaggatttgggaactttcatgcttcagatgaaattcaggcatgtgagcatcactgcagaatgtggtgcatcattgccatcatgagtaatcacttgctgctcctacttctgagaccaagactcttttgtcatattctttagcaataggacgggtaaagactggatttaattgctgttcagagtataaaaactcaattgattccaacatatctgaatgtgcagtaaagtcttaaaagtcaaccgttaatcattaagtcttttgcctctaaagtcttttgcctctgaagaggtttattacatgagttgattttcatattttcattttggtggggttttcctgttgttgggcaaggtggggtcacaggacatgggactagtaagcattttactgtttactatatttgtctttttataaacagtatctcccaaaatgtgattagaaggctaccaagcctgtatttggacatttaattgtgtgctttatataatgtaactactaacagtatttggactgcctgttcattcctggagacaaaaatgaaaatctgtcagttcaagttcttgggtaacatcaagtcattagaatttatctaaagcttatcatgatttgataagacatccattgcatgcagctgttttagctcagtgcaaaacactgaaattgtgattcttagactgtttctgagacatttggatggaaataaatgtataaatgttaattcatgtatataaattagaaacacttttctagattctgtaggcttttgttaaaaatagagaatttcttggggtttacttaggccacagaatggccaaataataataatgacaatgatattactaataataatagctaacctttatttggcacttactgtgtgccaggcactattctatttttttaagaatttttaaaataacagctttattgaaatacactttaccataaacttcacctttttattttttatttttatgagacagggactcacccaggctggagtgcagtggagcagtcatggcacactgtagcctcgacctccctgggctcaagcaatcctcccacttcagtgtcccgagtagttgggactacaggcatgcgtcactacacctaattggctaatttttgtagtttttgtagagatagggtttcgccatgttgcctaggctggtcttgaattcctgggctcaagcgatccacctgctttggcctcccaaaacagtgggattgcaggcgtgagccaccatgcctggctgaaattcaccttttaagatgtacaattcagtggtttttagtatattcacacacaaaattgcacaactatcactaacatctaattttagatcattttgtaacttcaccaagaaaccccaggtctgtcagcagtcagttccattcccccttcatcccagcctctggcaaccactaatctgctttctgtcactattgatttggccagacactattcttctgtgcttctcatgcatctcctgtaataccagtgctacaattctcattttatgtggaaaattgaggcactgagaggttaagtaaattgcccacggtcacacagtaatttgatttacaacagtaataacacattagatgagaacacagtaggacacaattttgaattccatttttatgtacctgaaatgaatacacccctcccccaaggtattttccctattgttagcctttgtaccctaggtacaaatataggtattttccctattgtgttatgtacctgaaatgaatacacccttcccccaaggtattttccctattgttagcctttgtaccctagaactgactggatgtagataacatttgttttcagagtaatggaacactgtatcagcagcatctgagaacataagaacagttggacattggaaagaggtttgttgccctcatccctccttgaacctcttttctctcccgcttccaccaccaccacacatatatacccctttttctcagtcttaagcatcaaacaatttctgcctctttctttttaattctcccagagggatggttaatgcatcacaatttaacttgtctattcaggtattaatagtcaagggatgcatctgtttgcttatagtaccagttatattcctaggaccttagagagcagtagtgtgagaatagaatgcctttctatttgggttaaactatgtgggaggaaaaagtaacagagtaaaggctttgccttaatgaagtcaagtgttctgcctggtgggaagtggccacacgctgcactgcgctgctcttgtttactctgttctttcagagcctttgtactttgccatcactgctagtaatttcttggtccttttcaatactccattttaatcttgatttttttctataaataataaatctgtgaaaaatctgtaaaaa

SEQ ID NO: 488474 - DNA, 581 bp, Homo sapiens
tttgagttatattccaaaattcgcgccacaggaaataaaagaccggaacttttcaatattgtttggatgggtttcaccacatgtttatgttttaaaaaaacccgcccaaaaattaattgtacactgtttggaatggtagtcatttatatactcgttggatttcacactatttcacaaaaaaggttagtctgcgaatcctagtcaattttaaacaaaaacatttttagagtaaattcctttacaattggcacacagtgtttttgattttatttacataaggccaaaattgtttaacgcccccccctcttgtttaacgacaaccttatgcgttttcttgaaaccgccccagagattaattctcttcgaaattcactttttcttcttaataggtcatcgcccctagatctggtctacccccctatccagtctttaagatcacatcttcctctaattcactggggagcatagtctatctttgattcttcaagatatttctaacaacagtgttccgatgattatacgcctaaatacaattaaaccctgtggtaatttaacttaaaaactaagcgtctagttctctc

SEQ ID NO: 488475 - DNA, 6428 bp, Homo sapiens
  misc_feature (263)..(263): n is a, c, g, or t
  misc_feature (301)..(301): n is a, c, g, or t
  misc_feature (6248)..(6249): n is a, c, g, or t
  misc_feature (6351)..(6351): n is a, c, g, or t
  misc_feature (6369)..(6369): n is a, c, g, or t
  misc_feature (6412)..(6412): n is a, c, g, or t
tttatcttttaagttattgtcacaatagttactctcttttagaccctgaacattttcagtacttgctccaaatggtttagcaacttttgaagtgggattaacaagtttggccaatgaagcttcttccctgcccaccgccagaggtgctggagaaaagtaatcctggagggtcggcgtggaggcagtagagaggtttataaaagtcaaggaagtgggaagaggcttgcgagcagcaggagaggcgcagagtcagaggggcaggngcggcggcggagggagcaggaggttggggcttgagccngtcattccggcgcacgaaaacttgaagtcgctcggtagccggggaagggaaggaagagaggcaggctctttcctagaggtgccgtgatcgagggtctggcactccaagccaactcctgagaacgggaaatgggcgggagtcggtggggtggagagggcagccgtggtcgcgagagcgaaggagcggtctgagaatccggcttgagtgttaaaggctaagcgtgtctagctggacccgtggccccgaagaagcgagacaaggcgacgcggagctgtccctgacaccccgaggaccgagggacagcgaagggccggggccgccggccattgccaggcgccattaggtgacgcggccgtcacgcgatgacgcgctgaccggcagtggcctccacgtcgcaggttccgcaaagacctgtgggagcgacccgggagaaggagggccaagatggcggaagcggaggagtctccaggagacccggggacagcatcgcccaggcccctgtttgcaggcctttcagatatatccatctcacaagacatccccgtagaaggagaaatcaccattcctatgagatctcgcatccgggagtttgacagctccacattaaatgaatctgttcgcaataccatcatgcgtgatctaaaagctgttgggaaaaaattcatgcatgttttgtacccaaggaaaagtaatactcttttgagagattgggatttgtggggccctttgatcctttgtgtgacactcgcattaatgctgcaaagagactctgcagatagtgaaaaagatggagggccccaatttgcagaggtgtttgtcattgtctggtttggtgcagttaccatcaccctcaactcaaaacttcttggagggaacatatctttttttcagagcctctgtgtgctgggttactgtatacttcccttgacagtagcaatgctgatttgccggctggtacttttggctgatccaggacctgtaaacttcatggttcggctttttgtggtgattgtgatgtttgcctggtctatagttgcctccacagctttccttgctgatagccagcctccaaaccgcagagccctagctgtttatcctgttttcctgttttactttgtcatcagttggatgattctcacctttactcctcagtaaatcaggaatgggaaattaaaaccagtgaattgaaagcacatctgaaagatgcaattcaccatggagctttgtctctggcccttattttgtctaattttggaggtatttgataactgagtaggtgaggagattaaaagggagccatatagcactgtcaccccttatttgaggaactgatgtttgaaaggctgttcttttctctcttaatgtcatttctttaaaaatacatgtgcatactacacacagtatataatgcctccttaaggcatgatggagtcaccgtggtccatttgggtgacaaccagtgacttgggaagcacatagatacatcttacaagttgaatagagttgataactattttcagttttgagaataccagttcaggtgcagctcttaaacacattgccttatgactattagaatatgcctctcttttcataaataaaaatacatggtctatatccattttcttttatttctctctcttaagcttaaaaaggcaatgagagaggttaggagtgggttcatacacggagaatgagaaaacatgcattaaccaatattcagattttgatcaggggaaattctacacttgttgcaaaaaaaaaaaaaaaaaaagcaaagggcctctaaagaatcagcctctttggtccctttgtgctgtcacctttttgccatgtttaacagcatcttggttggcactctagtcttaatcttgctccttaactttgaatatgcagtctaaaatgtcagtagtcaacatgtaattttcctttgaaattctgaatattccagtgctggaacttatccaaaaagaagacctcagaaacttagattggtagatctctagtgcatattatcatgtgggcaccttctcttagggtggaatgaggcagtctggatgcagcatagttaaaaggagctgtttaatattctctgtagtctggcctcttaactagaaagtaaagctaaatcagaagcctgtatttaaccatgtgaacagggagggatttagtgttctgatggctgattaatagaacagctagatacttagagcatgacgtgggatgggatgagtttacagctgctgccttttcatggtgagcttagcagttttctcattagatgtgtttttttgggttggggaatagcaatttattttattgattttagactttatcaagctaattagctcccctttagataagtacatgttgcacatgtgcacctacttgtaatctcagatatttatgcacacaagtgtgaaggtttttcagggagcagagcatctgggacaggctgattctgagctaaacagggctcctttaaggcaatatgaactgttgccttctataaattgcacattgaggaactctaatagacaaagattaggtgtcaggcagaaaacactcattgtaaatatactattagttgataaacataggactttcttattccccagtttttctttatcatataatttaaatatttattcattttgtatttaaagactacctacacatagatatatgattccaaagtcatactttctccatccccacattagccaagtgaatacagggccaaatgggttcttggaatgataataacaaagcattacaaagtgggtccccttggttccagccttgtccagagtttttggttatatatttctatttattacaatttaccttttaaattgtaaaataaacctttgtgtggacagagccaatgtttcaatcttgaatgagtaaagaaaatactttggaactgatcctcattttgaaattggttctaaattattatccatttccaatgtctgaaattctcttacttcctgctaaaactctctttctgccaaagttgtttcgtaatctgtctcaatgactataatgtaaaattaaagaagtaaccatgcttctcaagggggaattaaaagtgtttattgaattttactcaggctaattgtttggtcagaaattcctaaggccacagctttggggggttcgtgtagatgtacatggtgggtgggttataaatattgggacttaaggcagcttgttctatgtatttatctttgctcttgggtgacttagggaatgattttatttgatttaaccttctttctgtttgccccgagaatactcgccagtggcgcttgcagttgtagcatttaccccaagataactttgcctacgaaatatttcgcttttattattttcacatcattctagtatatggactttggaaacaaaagacattgttctatttatagcattcttttttttttttagtagcggtatttccatttacaaaatatagtaactcttgattactgaaaatgtcaaatcctagaaaacgtagcatgcctatacatgatgttaacatcattctcgaacagttgttggccgaagattcatttgatgaatccaatttttttgaaatagacaattctgatgttctctttagaaataactcagtttttatcttttttcacattgaaaatcagttagatttgcttaagcctcaaagagaatgtttatgtaaattagcgctggcaatttttttttttctaaacaggaaaagggttaaatgaaggttgataaaatggatgttcaattgtctttctgaaagtgagtggcttgaagggatgaataaatattttcttaatatattcaaaaaagtgcattgctttctgtgatggaagttaagacctaaatgtctggaagttgtaaccctcaacacagcttttcctgatttgctgcaaaggcacatagctgattatagaagtgaagacggcaaggacggggactccaacaaaggaaaccctgttgcaggatttgggaactttcatgcttcagatgaaattcaggcatgtgagcatcactgcagaatgtggtgcatcattgccatcatgagtaatcacttgctgctcctacttctgagaccaagactcttttgtcatattctttagcaataggacgggtaaagactggatttaattgctgttcagagtataaaaactcaattgattccaacatatctgaatgtgcagtaaagtcttaaaagtcaaccgttaatcattaagtcttttgcctctaaagtcttttgcctctgaagaggtttattacatgagttgattttcatattttcattttggtggggttttcctgttgttgggcaaggtggggtcacaggacatgggactagtaagcattttactgtttactatatttgtctttttataaacagtatctcccaaaatgtgattagaaggctaccaagcctgtatttggacatttaattgtgtgctttatataatgtaactactaacagtatttggactgcctgttcattcctggagacaaaaatgaaaatctgtcagttcaagttcttgggtaacatcaagtcattagaatttatctaaagcttatcatgatttgataagacatccattgcatgcagctgttttagctcagtgcaaaacactgaaattgtgattcttagactgtttctgagacatttggatggaaataaatgtataaatgttaattcatgtatataaattagaaacacttttctagattctgtaggcttttgttaaaaatagagaatttcttggggtttacttaggccacagaatggccaaataataataatgacaatgatattactaataataatagctaacctttatttggcacttactgtgtgccaggcactattctatttttttaagaatttttaaaataacagctttattgaaatacactttaccataaacttcacctttttattttttatttttatgagacagggactcacccaggctggagtgcagtggagcagtcatggcacactgtagcctcgacctccctgggctcaagcaatcctcccacttcagtgtcccgagtagttgggactacaggcatgcgtcactacacctaattggctaatttttgtagtttttgtagagatagggtttcgccatgttgcctaggctggtcttgaattcctgggctcaagcgatccacctgctttggcctcccaaaacagtgggattgcaggcgtgagccaccatgcctggctgaaattcaccttttaagatgtacaattcagtggtttttagtatattcacacacaaaattgcacaactatcactaacatctaattttagatcattttgtaacttcaccaagaaaccccaggtctgtcagcagtcagttccattcccccttcatcccagcctctggcaaccactaatctgctttctgtcactattgatttggccagacactattcttctgtgcttctcatgcatctcctgtaataccagtgctacaattctcattttatgtggaaaattgaggcactgagaggttaagtaaattgcccacggtcacacagtaatttgatttacaacagtaataacacattagatgagaacacagtaggacacaattttgaattccatttttatgtacctgaaatgaatacacccctcccccaaggtattttccctattgttagcctttgtaccctaggtacaaatataggtattttccctattgtgttatgtacctgaaatgaatacacccttcccccaaggtattttccctattgttagcctttgtaccctagaactgactggatgtagataacatttgttttcagagtaatggaacactgtatcagcagcatctgagaacataagaacagttggacattggaaagaggtttgttgccctcatccctccttgaacctcttttctctcccgcttgcagcacaanntcggctcactgcaacctttgcctcttgggttcaagccattcctcccacctcagcctcccaaggaactaggatttcaacaaagacaacttttggatcttttcntcagagagatcattattnccaaggaacagggtttgacccttcttttaaagggggttgttcnggggctgatgagagtt

SEQ ID NO: 488476 - DNA, 390 bp, Homo sapiens
  misc_feature (172)..(172): n is a, c, g, or t
  misc_feature (295)..(295): n is a, c, g, or t
  misc_feature (365)..(365): n is a, c, g, or t
gacttttttcatggccaacctcgactggattcccacaggaaagggaaatctgggaaacatgttcccacgtagctaagtcaacacaatagaaaaccactgcagttggcttaggaaacccgagctggaagtggcaggatggaacgtgggcacgttggggcaggagactggggtngtatgatagggtgttagcctatgtacagtggtaaagcagcaatgatgaccttgaggagttttatcctctgtatatcaatggattaaaatggcggagtaacttgataaaatagattttctttanaaaaattaataaatttaaaataatcaaattttttaaaaaatttaaaaaatgttaaatgtcagagtagttnctcaaactttttggtatccgtaccc

SEQ ID NO: 488477 - DNA, 325 bp, Homo sapiens
ggagggtcaaggctgtaatgagccgtgattatgtcactgcatgccagcctgggcgacagaggcagacgctgtctcaaaaaacaaaccaaaaacaaaaacaaaaaaaaaattatggagtgattgcttgctttaaaataagttccttgggccgggtgcggtggctcacgtctgtaatcccagcactctgggaggctgaggcaggaagtcaaagctgcagtgagctgagatcacactactgcactccaatctttgtgacaaagcgagatcctgtctcaaaaaggatgtgtttgtttccaggagtgagtttgtttttaacctgtcagtt

SEQ ID NO: 488478 - DNA, 873 bp, Homo sapiens
  misc_feature (33)..(33): n is a, c, g, or t
  misc_feature (180)..(180): n is a, c, g, or t
  misc_feature (204)..(204): n is a, c, g, or t
  misc_feature (210)..(210): n is a, c, g, or t
  misc_feature (213)..(213): n is a, c, g, or t
  misc_feature (215)..(215): n is a, c, g, or t
  misc_feature (220)..(220): n is a, c, g, or t
  misc_feature (223)..(223): n is a, c, g, or t
  misc_feature (228)..(229): n is a, c, g, or t
  misc_feature (245)..(246): n is a, c, g, or t
  misc_feature (252)..(252): n is a, c, g, or t
  misc_feature (259)..(259): n is a, c, g, or t
  misc_feature (276)..(276): n is a, c, g, or t
  misc_feature (278)..(279): n is a, c, g, or t
  misc_feature (286)..(286): n is a, c, g, or t
  misc_feature (295)..(295): n is a, c, g, or t
  misc_feature (299)..(299): n is a, c, g, or t
  misc_feature (304)..(305): n is a, c, g, or t
  misc_feature (313)..(313): n is a, c, g, or t
  misc_feature (315)..(315): n is a, c, g, or t
  misc_feature (340)..(343): n is a, c, g, or t
  misc_feature (346)..(347): n is a, c, g, or t
  misc_feature (372)..(372): n is a, c, g, or t
  misc_feature (376)..(377): n is a, c, g, or t
  misc_feature (402)..(402): n is a, c, g, or t
  misc_feature (435)..(436): n is a, c, g, or t
  misc_feature (442)..(442): n is a, c, g, or t
  misc_feature (449)..(449): n is a, c, g, or t
  misc_feature (467)..(467): n is a, c, g, or t
  misc_feature (475)..(475): n is a, c, g, or t
  misc_feature (483)..(483): n is a, c, g, or t
  misc_feature (491)..(491): n is a, c, g, or t
  misc_feature (580)..(580): n is a, c, g, or t
  misc_feature (604)..(604): n is a, c, g, or t
  misc_feature (787)..(787): n is a, c, g, or t
  misc_feature (865)..(865): n is a, c, g, or t
catgggggggggggtgccccttgataggatgcncttaagcatggtcaattcccccttcccccaaaggaaatggagaaaaggggccaagaagtcaatgaatccctggaatattgtcccagaatccttccagggatggtatacgactggccaccagtccacaaatgtgactggtaaggggtntagtaacagggggtggggttgggnggggtnttntnctggntgntttgnncccagctctagttttnncctttntttgggntggggggagctggcgtngnnttcgggnagggtacangggnggggnntttggttngngcattttctcataacaggggtgggnnnnttnngcaccattattgttaaataactgtnactnnccaaaacacatacaggcttctttantggagttaataaaactatggcacattgggaatnngggggnggggttntgttcccagatggaaaantgggttanagggagcnatgctganagggccttattcacagtctaggttgttagaaaggtgccctagctagaaatgacagcaaatagccataatcattatgtggggctgaaccngaggaggccaggctgagccaagangctggaagtatcttgaacggctctccaaatccaaagattatccatactctttatccctccagcgatgtgtaaaaccagaaagtatgaaacactggaggtggacatctggtttttatttctgggatatcttgatacatctcattacatttcacaatctgcatgggaaggaaaaggatggtaganaacatggacatcctgtctcccactgcaagggcgtggaacatggtaaggatacccagctgtgacaggacgtggcaaggnacaagatg

SEQ ID NO: 488479 - DNA, 194 bp, Homo sapiens
  misc_feature (177)..(177): n is a, c, g, or t
cctggatcattatgattagctgaagaagacatgccccatctaaaggaagtagctaccactcaactgttgctcacttaggctatgagggaatatgggctaaggctaccagatcctcagttttttcgagagaagccttgaatacagatttgctaaaatagaaattttaatgtagaattnacttatcattgatggtg

SEQ ID NO: 488480 - DNA, 741 bp, Homo sapiens
  misc_feature (45)..(45): n is a, c, g, or t
  misc_feature (107)..(107): n is a, c, g, or t
  misc_feature (119)..(119): n is a, c, g, or t
  misc_feature (147)..(147): n is a, c, g, or t
  misc_feature (197)..(197): n is a, c, g, or t
  misc_feature (215)..(215): n is a, c, g, or t
  misc_feature (263)..(263): n is a, c, g, or t
  misc_feature (323)..(323): n is a, c, g, or t
  misc_feature (331)..(332): n is a, c, g, or t
  misc_feature (336)..(337): n is a, c, g, or t
  misc_feature (362)..(362): n is a, c, g, or t
  misc_feature (366)..(366): n is a, c, g, or t
  misc_feature (415)..(415): n is a, c, g, or t
  misc_feature (417)..(417): n is a, c, g, or t
  misc_feature (427)..(427): n is a, c, g, or t
  misc_feature (438)..(438): n is a, c, g, or t
  misc_feature (447)..(447): n is a, c, g, or t
  misc_feature (466)..(466): n is a, c, g, or t
  misc_feature (557)..(557): n is a, c, g, or t
  misc_feature (645)..(645): n is a, c, g, or t
  misc_feature (649)..(649): n is a, c, g, or t
  misc_feature (673)..(673): n is a, c, g, or t
  misc_feature (711)..(711): n is a, c, g, or t
tgaagggagaaattcgggagcgctcccgggtcagactccccctangctgggtgtgggttatattcagagggccaaacccacactggggtaggttaggtatggtttanttagccacaggnccccgggggcaggagacagagtgggggnccgaagctccctgtcctggaagagttaaaagttttggggtagccctggcnccgtgggggcagttaganatgagggaggttactccttagcccaggagtggttagagaaagtggggntggtagagatgcttgtttaagccttggcctctaggaggtgttagagatttgttggggttnggggccanngttnntgggacccagttttggggagggagntgtnagagattgggggatgttctgagctccccagacaagaactgctggttaananggggccatgnccggtttgggntcagctgtncctgaggagcttggcatcncgcctgggagatgcagctgttactggggtttctctctctttgttgtcttggtttgtccttggcaggtggtggggacttattgggggaagcngaagtgctggggttggggaccccgcccccgactgggcatctatgctggcgtgctccctccggacaaggtcctccagctccttcttccntccnaggagctcagcaagggccacgcanccctggtcgcattcacccagccaggccacgtccctgtnggccttcttggagtcaaagtccatggctcc

SEQ ID NO: 488481 - DNA, 100 bp, Homo sapiens
gacagatccgaggttacctcactatattggtacgaggctagagtgacagtgagtcactattcacagagtacgaacatagtaaccttgattagaactccaa

SEQ ID NO: 488482 - DNA, 470 bp, Homo sapiens
  misc_feature (340)..(340): n is a, c, g, or t
  misc_feature (362)..(362): n is a, c, g, or t
  misc_feature (367)..(367): n is a, c, g, or t
  misc_feature (383)..(383): n is a, c, g, or t
  misc_feature (406)..(406): n is a, c, g, or t
  misc_feature (437)..(437): n is a, c, g, or t
  misc_feature (442)..(442): n is a, c, g, or t
  misc_feature (470)..(470): n is a, c, g, or t
gaactgttctcaagggcaatctctagaaatgatgcatacctcggagatacacgttcaagcgaaaaaaggaaaaaaaaaggctacacccaacaaccacactgtatttataatcacgttcctaaacactataaatattataactaatgtgatatatgttttgtgattaaatggattaaaacattgaatttaaaaagccacaaagaaaaagagattatcttctattatgccacttacaagttttgttccattggcacaaatacaaatttgacaactgtatcattactgaacgcagtgactaaaatgccagggatattagctttgtaattttcacctggaaatncattgtatgatgcatactggcntgctnaaccttctttttattnaaatggatttttttttcttggcnctgcactgtaattaaggtaatttaatggccnttttncccactttccatttttattttgggtatn

SEQ ID NO: 488483 - DNA, 583 bp, Homo sapiens
  misc_feature (181)..(181): n is a, c, g, or t
  misc_feature (279)..(279): n is a, c, g, or t
ggtctggggccttttgtaagaggcttctgcctccttcacgccccaacggaggccgggtgggcggcccccacagtctacttctctcgacttttttttttcttgctttctcgaggccacgcgcggccgccctcgtttttttttttccccaacccccagggcaaaggggtgtccccttttttcnccatgggggggggggggggcctgcccccccttttttttttcaccccaggggggggttctcccccgggggtgggggggggggccgggggtttttttctnacacgggtttttaggggttttccccccccccccccctggtccgcccccttacttttttgggtttttaattttttgggccgggggccccccctttcccccaaaaaccccccggtttttttttggcccccccttttaaaaaagatttttttgggggggggggggggtggggcccccccgggggtggggttccgccccctggggcccccccctttttcccggggggggggggccccgggcttcgctttttttcccgggggttttgcgggttttttttttgggccaataaacgcccccccccgtttta

SEQ ID NO: 488484 - DNA, 790 bp, Homo sapiens
  misc_feature (663)..(663): n is a, c, g, or t
agcggggtggagcgagctagagctgggagaaggcagtgagcgagcaggcggcagcacggtccgtgcggagcacggcgatgcgacgcgggaagacgcagccaccttcctcaccagccagcccacagcggtttgttccccattctcgggagtgcgccaagtgcctgggtccgacccaaagccctgtcctcaaagtggcgagaacgagcaatcgacatcatccaggataactaacgggtaccatcattcctttccggaagcagcacatgtgcgcggggagcgttcctacagttggcggaatggcggtcaatgtgtattctacctcgataacccaagagactatgagcagacatgacatcagttgcatgggttaatgacatagtatctttaaactacacaagaagtggaacagctttgttcaggagcggcctattgccaattcactggacatgctcttccctggctgcattagtttgaagaagagtacgaatgttcaagcaccagctggacacatgaatatattcacaattttaaacttctgcaagcatcatgtaaagcgaactgaacgttgatagaggtaacttccagtggagaagctagtgaattggacggttccaaggacaaacctggatgccattcaagtggtttaagacattctatgatgcntactacgatgggaagagagtatgatcctgtacgaggcacgacaagggctagatgcaaattcctccttctgaccctggtgaacagatcttcacctgccagaaaagtctcaccatgcaaactcccccaa

SEQ ID NO: 488485 - DNA, 258 bp, Homo sapiens
ccccgactagcagacaggtggatgcagctggagctggtggggctggcgcgggaggataaagagaacgagagcacctgtgtcgcagatccatgtcggtgccatataacccagatgagcgtcttcatgccaaacaaaattgtctttcaaggactgacctctgaccctaccccttgccttcctcttgcgttgggacccatgtccttctctctttaccctccctttcccagacttttgcccgggttctagctggccaaggtc

SEQ ID NO: 488486 - DNA, 1681 bp, Homo sapiens
ggggtacgggagctgggaggcgggggaagccccagcatgggaccctagcagctttggaccacctgcccagccctgcctctcacgctctgtcccccagacatggtggcccaggcgctggagctctctcggaaaccacacgtggtcatcgccacgccggggcgcctggcagatcacctgcgcagctccaacacttttagtataaagaagatccgcttcctggtgagttcgccccgcccctgcagacctcaggagctgggctcggagcctccaggcccaatgtcagagcctggggcgccatctcatccatttaggaaacgtatgtccgttagactgtccagtaaaacgctaggaacagtgacagggaccgttcaaggaccaacaagagggggcccagtcctagcaatgttattcgggggtagggccttgctgagacttgggtgaggggcaggcctcccttggaaggagggtactccagggcctagggtccatgtccatgcctctcaaagaggcctgcttcaggggtggccaagacccggggccatggacggcaccctcacccctgcccccattggcacggcaggtgatggatgaggcagaccggctgctggaacagggctgcactgacttcaccgtggacctggaggccatcttggcggctgtgccggcccgcaggcagacactgctgttcagcgccacgctgaccgacacactccgggagctgcagggtctggccaccaaccagcccttcttctgggaagcacaggccccggtgagcaccgtggagcagctggaccagcgctacctgctggtgcctgagaaggtcaaggacgcctacctggtccacctgatccagcgcttccaggatgagcacgaggactggtccattatcatcttcaccaacacgtgcaagacctgccagattctgtgcatgatgctgcgcaaattcagcttccccaccgtggctctgcactccatgatgaagcagaaagaacgctttgccgccctagccaagttcaagtccagcatctaccggatcctgatcgcaacagacgtggcctcccggtgagcagcccccagtctcctgccaagggcactccctcttttactacaaggccccacagatgagaaggctggcctcaggcatgtcaggcagccctagcatccctgctgagtgaccctgggtgagtccttgcctcggtttccccacatggacagtggagctgaccagccacctctgcctccaggggcctggacatccctacggtacaggtggtcatcaaccacaacacccccgggctccccaagatctacatccaccgagtcggccggacggcccgtgcaggtgagcagtggagggggaggccgagccttgggcctctgtccctccagcctgcccagcaaattcaggtggtaggacgtgggtagggtgcagcccacagatgagagctactcagggccatgtttgcaagttggggagttgtcctttctaaagcaaaggtgaatcccagctactcgggaggctgaggcaagaagatcacttgaacccgggaggttgcggcaagaagatcacttgaacccgggaggttgcggcaagctgagaatgcaccattgcaccccagcctgggcaaaaagagcaaaactccgtctcaaaaaaaataaaataaaataggccagaaaaaaa

SEQ ID NO: 488487 - DNA, 487 bp, Homo sapiens
gtgtgtaattgatgatagacatctgtccgtgccgcacagcctgaggatgctgggccttctggggccccccaggccatcaggtttcttggtcctggaacctacaaacgctctgtgactcgtggggttctgcacatgtcccatggtctatgagcgtgatgtctcatgcatggttgctaccccagtcctggattagccctcttgatggatgaacgacacctggtaggacctcagagaggctgagtcacttacctgaggacacccagccaggcagagctgggattgaaggacccctatgagagaagggcttggcccccatggggaagacacggatggaaggtggagcaaaggaaaatacatgaaattgagagtggcagctgcctgccaaaatctgttccgctgtaacagaactgaatttggaccccagcatcagtggctcaacgcctgtaatcccagcactttggcaggccaatgcctggaaggatcactt

SEQ ID NO: 488488 - DNA, 1498 bp, Homo sapiens
ggggtacgggagctgggaggcgggggaagccccagcatgggaccctagcagctttggaccacctgcccagccctgcctctcacgctctgtcccccagacatggtggcccaggcgctggagctctctcggaaaccacacgtggtcatcgccacgccggggcgcctggcagatcacctgcgcagctccaacacttttagtataaagaagatccgcttcctggtgagttcgccccgcccctgcagacctcaggagctgggctcggagcctccaggcccaatgtcagagcctggggcgccatctcatccatttaggaaacgtatgtccgttagactgtccagtaaaacgctaggaacagtgacagggaccgttcaaggaccaacaagagggggcccagtcctagcaatgttattcgggggtagggccttgctgagacttgggtgaggggcaggcctcccttggaaggagggtactccagggcctagggtccatgtccatgcctctcaaagaggcctgcttcaggggtggccaagacccggggccatggacggcaccctcacccctgcccccattggcacggcaggtgatggatgaggcagaccggctgctggaacagggctgcactgacttcaccgtggacctggaggccatcttggcggctgtgccggcccgcaggcagacactgctgttcagcgccacgctgaccgacacactccgggagctgcagggtctggccaccaaccagcccttcttctgggaagcacaggccccggtgagcaccgtggagcagctggaccagcgctacctgctggtgcctgagaaggtcaaggacgcctacctggtccacctgatccagcgcttccaggatgagcacgaggactggtccattatcatcttcaccaacacgtgcaagacctgccagattctgtgcatgatgctgcgcaaattcagcttccccaccgtggctctgcactccatgatgaagcagaaagaacgctttgccgccctagccaagttcaagtccagcatctaccggatcctgatcgcaacagacgtggcctccggggcctggacatccctacggtacaggtggtcatcaaccacaacacccccgggctccccaagatctacatccaccgagtcggccggacggcccgtgcaggtgagcagtggagggggaggccgagccttgggcctctgtccctccagcctgcccagcaaattcaggtggtaggacgtgggtagggtgcagcccacagatgagagctactcagggccatgtttgcaagttggggagttgtcctttctaaagcaaaggtgaatcccagctactcgggaggctgaggcaagaagatcacttgaacccgggaggttgcggcaagaagatcacttgaacccgggaggttgcggcaagctgagaatgcaccattgcaccccagcctgggcaaaaagagcaaaactccgtctcaaaaaaaataaaataaaataggccagaaaaaaa

SEQ ID NO: 488489 - DNA, 1348 bp, Homo sapiens
ggggtacgggagctgggaggcgggggaagccccagcatgggaccctagcagctttggaccacctgcccagccctgcctctcacgctctgtcccccagacatggtggcccaggcgctggagctctctcggaaaccacacgtggtcatcgccacgccggggcgcctggcagatcacctgcgcagctccaacacttttagtataaagaagatccgcttcctggtgagttcgccccgcccctgcagacctcaggagctgggctcggagcctccaggcccaatgtcagagcctggggcgccatctcatccatttaggaaacgtatgtccgttagactgtccagtaaaacgctaggaacagtgacagggaccgttcaaggaccaacaagagggggcccagtcctagcaatgttattcgggggtagggccttgctgagacttgggtgaggggcaggcctcccttggaaggagggtactccagggcctagggtccatgtccatgcctctcaaagaggcctgcttcaggggtggccaagacccggggccatggacggcaccctcacccctgcccccattggcacggcaggtgatggatgaggcagaccggctgctggaacagggctgcactgacttcaccgtggacctggaggccatcttggcggctgtgccggcccgcaggcagacactgctgttcagcgccacgctgaccgacacactccgggagctgcagggtctggccaccaaccagcccttcttctgggaagcacaggccccggtgagcaccgtggagcagctggaccagcgctacctgctggtgcctgagaaggtcaaggacgcctacctggtccacctgatccagcgcttccaggatgagcacgaggactggtccattatcatcttcaccaacacgtgcaagacctgccagattctgtgcatgatgctgcgcaaattcagcttccccaccgtggctctgcactccatgatgaagcagaaagaacgctttgccgccctagccaagttcaagtccagcatctaccggatcctgatcgcaacagacgtggcctccggggcctggacatccctacggtacaggtggtcatcaaccacaacacccccgggctccccaagatctacatccaccgagtcggccggacggcccgtgcagcaaaggtgaatcccagctactcgggaggctgaggcaagaagatcacttgaacccgggaggttgcggcaagaagatcacttgaacccgggaggttgcggcaagctgagaatgcaccattgcaccccagcctgggcaaaaagagcaaaactccgtctcaaaaaaaataaaataaaataggccagaaaaaaa

SEQ ID NO: 488490 - DNA, 737 bp, Homo sapiens
aacacaggcaaggacgagccgggtagatcggacgaggcggcacagtcacctatgcggagatactcagctaccccaggagcaagacctactgagcccgccaatgcgcggacgcacggccctacggcacgcgatggcactagaaggactacgcgctagagaaggaaaaggtataagaagtactatacagagagtactaccaggatagatagaactacgggaagaagcagttcaagtatagggaaccagtaggtaacggctaggctacatacgtggaacatggtaggctactagtatagtaggacctaggcacgacgtaagcccgaggatagaccccgagctatggtggactacaatctacgtagagaatagccatggcgctaacgcggaagctactaatgctagatagccggtaacaagaagctagctagcctacagtaacacaggacgagggacagtaggtaaaataaaagatagtaacctagggacgtaataaccatattgagcatacggctaaatagcataggcagcatgcgtgagtaccgggaaaccctgcgtgataggtaccgcaagtccgccccagaaacccgatgtaaccccatagcttgcactctaccattagccgctagaatatggacagctggcaataataacaaacggccccctaaagccagctaacacaaaagacctacggagtaggatacccggggaaaagtagccgggggctagactactagtag

SEQ ID NO: 488491 - DNA, 3493 bp, Homo sapiens
ggttaatgttgctatcttaagcactggcatttgggcaaaacgtgactgtgttctgtgggagaatccaaaggcattattcactctagttgagatagaattgggtggctaaacagggtgtgtggtacccaaaagattaaatgttacatgtccttttagtccttgaccaggtctagccttggcagaagcaagggagccactaagccaaactccctgtgcagacagaccatgtttcaaggctggaagtagtgccctggcaacacacaaaaggaacggtgaaatggtaggcaaagtgaacttggctctgctggcctctttggggtcacagaaattgctccttgtggtaatcttatatttctgtcaggcacagggccaagaagctgtgtaacagacattactttgcttgcatctctttttcataccttttccctctgaggcagcttttgcttagaaaacagtcccttcactctgcctttcctcctaacttcctgtgcctcttcatgttctgctcaagctttttaaagcaacgaagctgttggagaacttaaatccttgcaactgagagataagctacttaaaggcggtagagatcttttttttttttttttttgagatggggtcttgctgtgttgcccaggctggagtgcagtggtgtgatctcagctcactgcaacctctgctttctgggttcaagtgattctcctgcctcagcctcccaagtagctgggattacggctagctactcctggctaatttttgtatttttagtagagatggggtttcaccatgttggccaggctggtctcaaactcctgacctcaaacgatctgcctgccttggtctcccaaagtgctgggattataggtgtgagccactgcgcctggccatgtagatgacttttgaccaaaatgtttcaccttctcattcagatattcttagtaaccaaaacagtgactcatgcagttgagagagcctttgggctgtcagtttacagtacatcaggcttgctgaggctaagcaaatcagaaaggtgccatgtttataacagaggtcaaagctccttacttctgaaacattagctgtggttaaaaacaaaaactcttccttcttgtattgcttgtctatcaaagccaggaaagtgggggatcactgtagttaaattttttttttttttaattagagacagagtcttgccctgtcgcccaagctggagtgcactggcgcaatcgtggtacactgcagccttgaactcctggactcaagcagtcctcctgcctcagcttcccaagtagttgggagtaggtgcacaccaccatgcccagcgaattttttgtagagacagaggtcttgctatgttgcctaggctggtatcaaaattactggcctcaagcgattctcctgcctcggcctcccagatgttgggattactggtgtgagccaccacgcccagctcaaaaacaatttttttaggggcacttctacaaatcatgaaagggggataaaagcactgactttaaaaagccatgtttaagatgctataaatgttctccccttttcattgattggagagttgtagaggaccttagagatcattttgtctaactccctcatcccaaagataaactgaggcctagagatcgttcagggtgttgtaactgggaacatctgaatgctgaggcctagagatcgttcagggtgttgtaactgggaacatctgaatgctgaggcctagagatcgttcagggtgttgtaactgggaacatctgaatgctgaggcctagagatcgttcagggtgttgtaactgggaacatctgaatgctgaggcctagagatcgttcagggtgttgttgtaactgggaacatctgaatgctgaggcctagagatcgttcagggtgttgtaactgggaacatctgaatgctgaggcctagagatcgttcagggtgttgtaactgggaacatctgaatgctgaggcctagagatcgttcagggtgttgtaactgggaacatctgaatgctgaggcctagagatcgttcagggtgttgtaactgggaacatctgaatgctgaggcctagagatcgttcagggtgttgtaactgggaacatctgaatgctgaggcctagagatcgttcagggtgttgtaactgggaacatctgaatgctgaggcctagagatcgttcagggtgttgttgtaactgggaacatctgaatgctgaggcctagagatcgttcagggtgttgtaactgggaacatctgaatgctgaggcctagagatcgttcagggtgttgtaactgggaacatctgaatgctgaggcctagagatcgttcagggtgttgtaactgggaacatctgaatgctgaggcctagagatcgttcagggtgttgtaactgggaacatctgaatgctgaggcctagagatcgttcagggtgttgtaactgggaacatctgaatgctgaggcctagagatcgttcagggtgttgtaactgggaacatctgaatgctgaggcctagagatcgttcagggtgttgtaactgggaacatctgaatgctgaggcctagagatcgttcagggtgttgtaactgggaacatctgaatgctgaggcctagagatcgttcagggtgttgttgtaactgggaacatctgaatgctgaggcctagagatcgttcagggtgttgtaactgggaacatctgaatgctgaggcctagagatcgttcagggtgttgtaactgggaacatctgaatgctgaggcctagagatcgttcagggtgttgtaactgggaacatctgaatgctgaggcctagagatcgttcagggtgttgtaactgggaacatctgaatgctgaggcctagagatcgttcagggtgttgtaactgggaacatctgaatgctgaggcctagagatcgttcagggtgttgtaactgggaacatctgaatgctgaggcttagtccagtgttctctctcccttaccactcctcttccccttccctctataatggcagtacccagggcccggtccatagactactatcgagtgctcctatgtgcatcttagtacgtatcattttcccttgcctttttccttctatcctttcagtggtagcaactgcccttgctaatcaccgtaacctcggctgagaaagaagaggaagcgaaatccaagatgcagctcagttcatcaaagcctagcaggtcccctcagctgccttttcatgcctgccacagactacagtaggacaaaacctgacctggtctttgaagttaagagctaagaaagcttcctatagtagtatctcccatggcacttaccacattctatctggtattacaattatttgtatgcaattaatcactcttagattgtatgttcctggagggcagaatatgcccattcatatttgtatcttcttccttctgctcttggcacctaacacagtgccttgcacacaaacaataaatgattgttgagtgaataagt

SEQ ID NO: 488492 - DNA, 97 bp, Homo sapiens
actgaagacagtgccacttactactgtgccttttcaagggtcgtcatgcgatggggggcctctacggtggtgggtcctggacaccgataaactcact

SEQ ID NO: 488493 - DNA, 137 bp, Homo sapiens
aggtttttcccctcaaagctacattcatccagtcttcacatttagctgattatcttgcctgtctacatcgtggatatctcgaaagagaatccttcagggattaagcctacctacctatccagtctgcgtatcactat

SEQ ID NO: 488494 - DNA, 353 bp, Homo sapiens
ttcagcacgagattgctcgaaactgggccagtcaaagatcagctctgggaagtgcgctagatccacttgctgattactcaccagtatctatatatgtcagctagacctatgcatatcttattccagttgcacttacttacatgatcatttcgagagatgtaacgatgatagctgatgtgaattatgccagataccgtactatgccaacaccacgaacacttgccaagtatatcaatccttgctatgccactgctaggttaacttcattggcagctccagttgtctatgctgacagcatatatcttcagatcctaaggagatatacagctttgcataggatgccatagcttatg

SEQ ID NO: 488495 - DNA, 710 bp, Homo sapiens
  misc_feature (1)..(1): n is a, c, g, or t
  misc_feature (327)..(327): n is a, c, g, or t
  misc_feature (340)..(340): n is a, c, g, or t
  misc_feature (347)..(347): n is a, c, g, or t
  misc_feature (438)..(438): n is a, c, g, or t
  misc_feature (442)..(442): n is a, c, g, or t
  misc_feature (464)..(464): n is a, c, g, or t
  misc_feature (468)..(468): n is a, c, g, or t
  misc_feature (470)..(470): n is a, c, g, or t
  misc_feature (525)..(525): n is a, c, g, or t
  misc_feature (533)..(533): n is a, c, g, or t
  misc_feature (537)..(537): n is a, c, g, or t
  misc_feature (561)..(561): n is a, c, g, or t
  misc_feature (581)..(581): n is a, c, g, or t
  misc_feature (595)..(595): n is a, c, g, or t
  misc_feature (605)..(605): n is a, c, g, or t
  misc_feature (687)..(687): n is a, c, g, or t
ntgatggatttctttccccttctcacaataagatatatctgtttattctcctaaaaatgatgcatttatttatgctacttttataagaacaatccctttgcgatcccaaaacctgggcagagaatgaaaagagataaacagaaccttcttcaaaatggtagttctcacaacagaggtgtagtgcaagatatatataaaatggcagctcttgagaggagtgtgttcacacccagcggggtaggcagctcctagctgcggagtgtggtcagccgggacttcatgggctccagagcctcttcctcctcctcctcatcctctgaggcagcnatcgctcctggangttcttnctctggaagggcattagttactttactgggtgctttgcccaaggtcccttctgttatttcaaagagaattctgttaatttccatttctgcntctncctccatttcttcctgatcgtncatncnttcaaaagttttctctaacatcttctctattatcccagcctttatcatttctttngacaactncctnatggtggcctgaatctctggaatnttcacaagaattttcatggnctttatcacttctnttctcttctncagggaaccagccacttgcaagaacgcgagctggttcttcatccccatgagccctgagttcatgttttctttggatgcatanagcttgctcacagcctttcttga

SEQ ID NO: 488496 - DNA, 103 bp, Homo sapiens
tctggaaaagtttgggtagattgcaggagctttcttttatgtaaatgggataaatacacacaccatacactatccacagatatagccaagagcgactgagagg

SEQ ID NO: 488497 - DNA, 311 bp, Homo sapiens
gcgctgcgacctggggccatgtactccactgtccgcacaaagacaggccttcttctcgggcaatggcctctttgctcagccaaagcagtgaattgatgtgccctcctcatccagaaggatgcctcaggcttgaggctctgtaacgatacccaggctgtcaggtgatccagcccagagccagctcggcaggtaaaacttacatcctcctccggaacatcacctttttgagaccggtgaagaggccccccacgcaggaagccagatgagatgagcttccctcggctggaaggcatatgagcttaccacgatgg

SEQ ID NO: 488498 - DNA, 657 bp, Homo sapiens
cgggctcggtggctcatgcctataatactttgggaggccgaggcaggtggatcaattggggtcaggtgttcgagaccagccaggccagcttggtgaaaccccgtctctactaaaaatacaaaaaaaaaaaagaaaaagattagccggatgtggtggtgcacatttgtagtcccagctactcgggaggctgaggcaggataatcgcttgggcctgggaggcaaggttgcggtgggccgggatcgcaccgctgcactccagcctgggtgtcgggtgaggctcaattctcaaaaaaaaaaaaaaagggggggggggagagctatttccaaaaattttttaagtaggcggggcacgggggcctaaatgcccttgtggtcctacccctttggggaggccgacatgtgggcagatcacgagggccgggaattttgagaaccattcctggccagatggggtgaaaacccccgttctctgctaaaggtccaaacaaatttttctggaaccttgctggcgtgcccctgtggtcccggctgctggggaaggcctaaaggcaggaagagtcgctggacccggggaaggcggaggttgccgtgacctgatgttgtgctagtgcacccagccggggcgacggctgaaaccggtctcaaaaaacaaaagag

SEQ ID NO: 488499 - DNA, 122 bp, Homo sapiens
  misc_feature (59)..(59): n is a, c, g, or t
  misc_feature (73)..(73): n is a, c, g, or t
  misc_feature (79)..(79): n is a, c, g, or t
  misc_feature (84)..(84): n is a, c, g, or t
  misc_feature (91)..(91): n is a, c, g, or t
aagatgatctcctcgcaagaggtgggcaccctgatcaccgcgctgggctgcggcatcgnccgcgaagagtacnacatcnacaantgcgttntcacaacatcatcatcatgaccgatgctgac

SEQ ID NO: 488500 - DNA, 165 bp, Homo sapiens
gtcttattgaaggagcgctcaccgcaacagattgggcatggacaccatttacgagctgctgacccggatggccagcctgggtctcaccctgctcatcttttactactacctatcgccatcgctgggtcatggagttcttcttgctggatcgtcttccccaactgg

SEQ ID NO: 488501 - DNA, 488 bp, Homo sapiens
cacgaggggtcggccagcgtgcgcggcgtgccgtgctgttcaaggtaggcacggctggcgcagttgaactgttcgaagcgcccgagcggcaccgcgatcaggctgtggtcgccgaccgcgcccacgcgcagcacgcagtcgaagccctcgcgcaccagatcgacccgccggtcggtgctgctcacctcgatttccagctgcgggtgacgcgccaggaattccggcaggcgtggaatgaccagatcccgcgcgaacgcgagcggcagatcgacgcgcagccggccccgcagatccgcctgtccgccggcggcaaacagcgcattcagttcgtcgaagtcggcaatcaggtcgcgacagcgctcgtaataggcctggccgtcctgggtgagctgcaccttgcgcgtggtgcgatgaaacagtctcgtaccgagcgcgctctccagctgctgcaccgcattcgacaccgtcgatttgagcagtcccaggtt

SEQ ID NO: 488502 - DNA, 447 bp, Homo sapiens
tcagatatccaaattatatcccagacccaggctatattcgccaaccctaggagggttgacatccacatagatatctcaaaggcaatctcaaacatcaacaagcccaacaatgagctcacgtacttccttccaaacccggtcctgtgccagtcaatgcttacattgtccagccagaacatgaggcattgtccttgggccctctctcttcctcaccccctgaccagtcatcagcatgaactgtgaacttgaactcctaaatctctctcatgtatagtctaagccttcccatctcaggcactgccactaccttagtctcaacaacacaatactttaacctagacaactacagtgtaatcttaattgactatactatgcatcccactcttattctcaaaccaaccttggagccctaagtctacacatagctcttaaattatcttttaaaaa

SEQ ID NO: 488503 - DNA, 964 bp, Homo sapiens
gcagagagtcttcagtgggtctctacaacggaggtgaatccgtgcatcacactagtgagtgtgtacaccgtgacccacccggtgcccacaccccggcctggagcgtgcatcaccaacagtgcccgggaaaggaatatcaactcatccctgacagactcccgagacgccgcgtgactgagagcttcctcaaggtaagccacttcctgatggacagggcgagagtcctgaagcgcaggcatgacctgcatgctgcaagacccacaaggcatcttctaccagcgcgttggctgtacaaccgcgtcccctggaccatgcaaccacacctacgatgtcctcttcctgggcactggctgacaggactcgtggctccaactaaggtcagtagagccgtgaggcccccgtgtgtgcaacatcattgaggagtctgcagtatcttctcgatcgtggacagcctcggtgacatgaatctgctcctgagacacccatcatgggggctgctgtagtgcgtgctctacatctcgggcgtagtccagggtgtcccatggtgcaactgctaggctgtacaggagctgtggggactgcctcctcgcccgggacccctactgtgcttggagcggtccagctgcaagcacgtcagcctctaccagtctcagctggccaccaggtcgtggatccaggaccatcgagggagccagcgccataaggacctttgcagcgcgtctctcggttgtgtccccgctcttttgtaccgacaggggagaaaggcatgtgagcaagttccggttcccagcccaacaccgtggacaactttgggctgcccggtcctctccaacctgggaccgactctggcttcgcaaggggccccggtaatgcctcggctcctggcacgtgcttccacttggggactgttcttggggggcccacagctggggagtccacgctgtctacaggggggtccccctgt

SEQ ID NO: 488504 - DNA, 141 bp, Homo sapiens
tccaggtattaaagctcatcggatcacgacaggcaggtgcgaggtggattatcaggaaggtctggaaggctcgcgtatcgtgatcaagaacctaatgccaccacgacattgtggtatgcgggtcttcgttctcgatctgat

SEQ ID NO: 488505 - DNA, 283 bp, Homo sapiens
  misc_feature (1)..(1): n is a, c, g, or t
  misc_feature (215)..(215): n is a, c, g, or t
ntgtacttgtggtacgggggctcctggtgccgcacggttccctggacgcgacggttctcctggcgcaagggtgccgtggtgcgaccggccgtgaccccctggtgctcctggtgctcctggtgcccctggccccgttggccctgctggccagcgtggtgctcgtggtgacactgacgggcccgggggaccctgacggcccacaccgcactggtacnccttactgcctctgtcgccctgttcgcctgtctcccccttgtaccaccgggggccttggggtccggcg

SEQ ID NO: 488506 - DNA, 266 bp, Homo sapiens
cgttatgcttacaaacgtagaagctaactgcaatcacagacgccctataggaagatggtcaatgcacttatcttctcaggtgaactagacctccataactaccctctcctcatgcacatttttttaacggtttcgcaataggtttatcaacatttctatgtaaaaagtctcccttaacccatttctgtagttcgtctatataaagacagaaagaagacatactggctataacttatgcacatctagaggcccctttccttaaggcc

SEQ ID NO: 488507 - DNA, 185 bp, Homo sapiens
taactgtgacccaactggtcatttactatgttcagcatcgcaatgatcttggtgaaggacacctgtgcacaggtgatgcaacttcacacattaggacatccagctgaagtgaacttaaaaaacaaaacaaaacccctaaatattgcacaattttaaacagcacaaatttggaaattgaaacctta

SEQ ID NO: 488508 - DNA, 410 bp, Homo sapiens
  misc_feature (112)..(112): n is a, c, g, or t
  misc_feature (143)..(143): n is a, c, g, or t
  misc_feature (156)..(156): n is a, c, g, or t
  misc_feature (161)..(161): n is a, c, g, or t
  misc_feature (166)..(166): n is a, c, g, or t
  misc_feature (215)..(215): n is a, c, g, or t
  misc_feature (329)..(329): n is a, c, g, or t
tccaacctccaaaaggggtgctgatgtatgggcccccaggacggggaaagacctcctggcccgggcctgtgcgcacagactaaggcaccttcctaaagctggctggccccantggtgcagatgttcattggagatggtgcaanctagtccgggatnctttncctgncaaggagaaagcgcctctatcatcttcattgatgagttggatgcatcgnccaagcgctttgacagtgagaaggctggggaccgggaagtgcagaggacaatgctggagcttctgaaccagctggatggcttccagccaacacccaagttaaggtaattgcaancacaaacagggtggacatcctggaccccggcctcctccgctcgggccggcttgaccgcaagatagagttcccgatgccaat

SEQ ID NO: 488509 - DNA, 113 bp, Homo sapiens
  misc_feature (89)..(89): n is a, c, g, or t
  misc_feature (111)..(111): n is a, c, g, or t
gcggccgcctactactactactgctcgaattcaagcttctaacgatgtacggggacatgattctccagtatatttgtaaaaaataaaanaaaaacttaaacccatcaaaanaa

SEQ ID NO: 488510 - DNA, 350 bp, Homo sapiens
gccttcactggaggaacagtgatagtgtactactagaatactatagagcatagttagcatcacaaatctagatgacataatgtaataatggatagatcttataaacagtattgagttaataatgttcaaaaattatgtcaattaataacacgggtttgattacacacaaaaaaagttaaacccaagcagacacttgcacacccacgttcatagcagcattattcatgatagacaaaaggtggaaacaacctgaagtgtccactgacagattaatgaacaaaatgtggcatatacatgcaatgaaacatcatttagacctaaaaaggaaagaaattctgacacatggctac

SEQ ID NO: 488511 - DNA, 628 bp, Homo sapiens
tgcagacacagggccctcagacagcttggctggccgccgccggacccgcccctcccgccccggggagaactggagggccgactcataccccgcgcaccacttgggacaacctccctggggcccacccggggccaaaaagggggttttcccgagccacgcgataatgcgctacacatccggcacaggaccactgtggtcccccagcgaggttccttttcgcaacaccccccccgcgattgtcgctgcccccctctggcccccatgtcatgtttccgcgacttgtatcgctccccacatttcttctagtggtttcctcccccaggaaggacctctggggacccccccgcccccgggagacggtgagcattttcgcccccgaccatacaagaatcaattcgggactttccgggggcgccgcccaatctgtcccgcaaacccggtgagtcgccccaatgttgccccgaagaatcaccacaggtttcctccatcgcccccgggcgatccacccgctacattggctttcttggtttcgcgctgctgggattatctcccccccccaacggtggtctacccaacacgttcttacagacgcacccgatattagagaacgcggccccacatagcagac

SEQ ID NO: 488512 - DNA, 156 bp, Homo sapiens
taaaaaaaaataaaaaattagagaacccaggtgtagtggtgcatgcctgtggtcccagctacttggaaggctgagacaggaggattacataagcctgggaggtcaaagttgcaattagacgtgattatgcctgggtgacccagtgaaaccccttca

SEQ ID NO: 488513 - DNA, 139 bp, Homo sapiens
ctcgcctgctgaagggtcctttcttgacagtcaactgatgactaatctggaagaaactgtctattctcttaggagaataaaatattccccacctaatagtcgcagctaccattaacaaaaaagaaagaattagcaaagg

SEQ ID NO: 488514 - DNA, 327 bp, Homo sapiens
cctactactactaaagtcgcggccgcgtcgaccactctgtcgcccaggctggagtgaacctctgcctgccgggctcaagcgatcctcccacctcagcctcccgcatagctgggactacaggtgcacaccaccactcccagctaattttttattttttttgtcaagacagggtttcaccatgttgcccaggctggtctcaaactcctggtctcagacagtccacctgccttggcctcccaaagtgctgggattatagatgtgagccatcacacccagccaggtacaagtttttaatacaagttttctctctagctttgttactggatt

SEQ ID NO: 488515 - DNA, 81 bp, Homo sapiens
ggtgaggacactgccgtgtattactgtgcgagagagactcagtggtaccagctgctaccccttgcttactggggccagggc

SEQ ID NO: 488516 - DNA, 548 bp, Homo sapiens
taaaggcgccgggcacatgatccataggcttaatgggtcacgagggtaaatagcacttcgcttacataggcatgtgatttcagagtatagcgtacgtgagaacattgagatatcagttggaagacaccctgaaatcttatgagtagcataccccaaccaccctctaatagctagcttgtctgtataggtagaatgattcatctctccattttagatggctagatgttttgtggaagatcttagaattgcctgcctcatttgctgggaaaaatcagataggaagtggcctttaggggatacttttacttggaaagttacaacactagtacaagtcttaacacatttaacatttgcttgttgaaaagcaatgcgaaagtcaaataaaattaaacatgttttacttttttcctcacaagaacataaaaattatggaggggaacttaacagggaatttaaaaaaagtaacacaatttttccttttagtagtccttgggtagttatgatagaatagtttccactttttgtttctttgagctgggatttttgtc

SEQ ID NO: 488517 - DNA, 229 bp, Homo sapiens
gggggggctgtcctggttttgctgtcccccaaaagggtgctttgagggtgaggacttttttggaaaggcctggagacctagctccatgttcctcctcctttttccccacttgaaccatgaagtttccaaaaattttttttttttttttcccttcttttttcggttggtttttagataaaaattttgagaaaaaaaatgaaaaaattttaataaaagaagaaaaatggaa

SEQ ID NO: 488518 - DNA, 236 bp, Homo sapiens
accgttccccggaggttaacagccggagaaggggcttaaggagcattccccggattgccagaccaggctcatgtcgcgcctgccgggcggccagtgcagggccggcccaggttgccttccccggctcccccctcgcgggtagcttcacccggcccgcccgcttccccgggcccagaagcccacccctccccagctgtcctgagggcgcccgctgtactggagctttagtcgttgac

SEQ ID NO: 488519 - DNA, 305 bp, Homo sapiens
ccgctctcttactgctagtttgtcacagtttgtcatgaatagatgtgatttgtcaaatcttttttgtatctgtgatcgattttttttttctttagtctcttgacatgatagattacatcaactgattttcaaatgttgaacttgccttgcatacctagaagaatcccacggggtcatacggtataatggttttatgtatggtgggattcaattggctaatattttattgagacatatttttcatctgtgttcatgaggcatagtggtctatggttttcctttctggtaatgtcttggtctggttt

SEQ ID NO: 488520 - DNA, 782 bp, Homo sapiens
agatctctggatccatgaccatccttttccttcagctcagcaaacttgcatgcaatgtgagccgtgtgggatccaggacaggggatagcggcgcataggctggatggcggattccgagatgaacggagatgtgggccagcgtagtacagcatcggagacgcacttcgacgggatgaagctacacgcagtgacggctatgagatgaaagctctacctagagaacaaagtgagggggaaatgacaaaaaatgtggacaaacaaggagagacaagacgaggacaataaagaaggagaaataaaaagaaccacaacaataaaacgacgcagaacaaaagaaaacagacaaaagaggcacacaaaaaagtgcaacatacgcgcagaaaggaaaaacgctaaaagggtacgacaaaagacggaaatagacgtacacacgaacggcgcacgacacggcagccgcctgacaccgacatcaccccagctgacaaaccaagtaccaggaaaacgaagaacacgcagcaaccagcctaggagacaatgagccagcaaatcaacgcacaagacaggaaaaaaaccccacgaacgaagaaacataagaaaacaggcacccaagggatactaggacaccgcacacatggccgagacccacacacggaacacaacacagaaggacccaaatacgaacgaaacaaaacaagcaaagaaaaagagaagacaagcaaagaatggcagaaacaagaaacgacgaaaaaccaacaacgaaacgaaaaaagacggaaaaacaa

SEQ ID NO: 488521 - DNA, 223 bp, Homo sapiens
ttaccgaattacaaagcataagtgcataaggtaggaaactggccacacagcgaggtggctcacaccttaagtcccagtacttagagaggccaaggcaggaggatgcttgagcccaggagttgagaccagcctgggaaacatagggaggacttgtctctaccaagaaaaaaaaaattagttgggcatggtggtgcacaccactgtggtcccagctactatggag

SEQ ID NO: 488522 - DNA, 263 bp, Homo sapiens
aaccacttcctagatgttagtctgccaacccatgtttcttcccaggatacatctctcgtaagtacctgagaaacaaaccggaaacagcaattaaagggagagcaaggaaatggcactacatatacaaagggtatacaattccctgtgcacatgccctctattctttaaggcctaagtacaacaacttataacgaacatgatttcacatgaactatgacacctctctctagtagccattccacaatctcccatttcccccaact

SEQ ID NO: 488523 - DNA, 978 bp, Homo sapiens
  misc_feature (257)..(257): n is a, c, g, or t
  misc_feature (375)..(375): n is a, c, g, or t
tcttattacagcgggggttcaaaacaagtgagtacacttttccggaaaaagttattggaaaatggtttcccaaggtgatagggctttttaagaaagaagatgtttggacaccaatttgatttctagggtatggggtattaaagatgggttatacacagggcaatggctaaagataaaatactggtaaacagcaaaaataatgtgagaagtggcaaaagggaaattggagttatagtagaatccaagagaaaagaggnatataagaggtggggagggtctctgggtgtggccgaggcttgaagaggggagaaatactcatacttgagaagaaaaaagagcaatttccctaactggggcataaaggccataaaaaangcaaaccgctgggtttttcttaattgtctcacatttaattaaatgtgtggagaagacaatctggggtggggacttgtgtgaaagatattaaggggggaatataaaaccacccatgtggtgccaaaaagaagtgtctataatttatgggtgttgaacccttatcttaaaagcgcgggacctcttttctaatatattctgagagagcggccacagaacaagagggggtgggtaaaaacagttttcacatcggggtttggggcccctaaaaattaaaaagctcgggttggttaagaaaaccttttatatgcgggaaagaaggcccctataaaaggcggctcgggaggtgtggtgggcggggggcggcctccaaaacaacatctgtgttgaatatcacccgcgaagggaggcccttatggggggaaagggggtctaaaaaagggggcacagaggaaggaaactccccgtcttgtagaagaaagggcccccacaggaaatttgctcgccagaagaaacaccacacgccccaacgaagagagaaacacacccacaatgttgtgcctcgacaagatggggtcagagtctcataacaaaaccctacgaaag

SEQ ID NO: 488524 - DNA, 172 bp, Homo sapiens
  misc_feature (167)..(167): n is a, c, g, or t
cgtagaggtagacctgtggtctagccagagccagagagatgtccaagtctagcaaaccgagttctccaaggcttatcaagaactgggattagcttgcaagatgaatgagggaggaggtcccatggacttctaagaagatcaacccagagtcttccaactactcactngctaa

SEQ ID NO: 488525 - DNA, 378 bp, Homo sapiens
  misc_feature (35)..(37): n is a, c, g, or t
  misc_feature (85)..(85): n is a, c, g, or t
  misc_feature (107)..(107): n is a, c, g, or t
ctggctttgagcccctcacacccatggattccttnnnacctactagtgccattactgctgtgatgaacaaccccaccagacagcnctttgggccctaaactgttgcnatcacatggctgctgcttgcaggattcttggctgcacggactggttcctgccaggttccagtgcggtatcactgaccccgtgtgagccgctggcaactttagagtacacacagtcatgaccctagaacagcaggacatggtctgctatcacagctcagactctcgtccgaactccttcgtccaacacttgcgttggtgccctcttacggacagatcctttggccaggagggtgatgccagctatcttgcttctgaaatatctactgggatg

SEQ ID NO: 488526 - DNA, 621 bp, Homo sapiens
tagacacttacggatagagtgataggacaactctctaccgagagttaacccatatgttctgccctgtcagaatctaccaagaactgccctagggctcaatcccaagacaatagtgcttcacacagcaagagcgactcctacaaagaccctcagctctgtcatcctgaagggtaacctctcatgcatgaagactgcctgcttctctggctccttctgatttgcaaaagctaaaaggttggttcgattttcattctgcccccttcaccctcccatctgttgtacagaaggctgctttccgtcagctggtggcagaccatgccttgctcattcccgggccctcacaggaaatcctggtgggcacgcagcaaggatttcaagggagaaggcagtaaccgaagtcgaactgtttctaagagtatgcaagtgcccggtgattgacgtgcacaacatcagcatcctgcaattgacatttcaacatcacaggatgatgcgtcaaaagaagaaaagtgagggcctgtgccctcgatttcttctgaaattgtgctgtttgtgaaattcactcgtccacgaagagtctgctaatcactaatgtgaggaactatggttgttggcctatgggca

SEQ ID NO: 488527 - DNA, 374 bp, Homo sapiens
aacacggcttgtaacaaaaataaataggcttttaaacaaaacacggcttgtaacaaaaataaataggcttttaaaggaacacggcttgtaacaaaaataaataggctttaacgaaacacggcttgtaacaaaaatattttaaaaaatagcagtaaacagcctaccaagaaagtcattggtcactatcttcctcctcctgtgcactgaaaccactgaagtcatctccttcggtgtcggagttgaatagcgtcagaattgcatcctcctgcagatctgcccctaagtcactccagctcatttgtcaaagtggttattatacaatactgtattatgtgtctggtcgacgcggccgcgaatttagtagtagtaggcgg

SEQ ID NO: 488528 - DNA, 913 bp, Homo sapiens
ggaggggccaggctctgagctccacaggtctgagctgggagcagtcatgccccaccaagcctgcgtcagggaacttgagtgaggggcgtgtgcaatttgtgacaaggtggccagctggatgcctgggtccagtatttttagcccaaacgagaagtgaaaagtgcccagcggggtgaatcatcatcctggtgaagaacccaagcgcctgaccccagctccgggaagcaggcactggcggagggggcttcaacggagggagtgcgccctcagactcccatgtcttcccttgaagcgttcaggaagcgtcagctcagccttcaggcctgagcaagtgcagggcggagctacagccaggctcagatgttggggtgtgaaagcctcaagtgactcagcctggttggagaactggcccaccagtatcttctgtgccatggttcccacattcgactccatggcctctgtcctggaaccaacgtcttgcaaggaaaagcataggaccatggatacctctgtgattcacgctgagcgcaagtccccacacttgtaaaactgagaagtggccagctgtgtttccctgggaaattctccccttatcttccttgaagtgccgagcatgttgtcaagaaggaaagctgaagcgctgtcctagaggattctcttcaggagccgcagttgcccatactatgattaggtttaacaatccccgatcgtggaagctccttatctagtcatgatatgagttcatccttcgaaatcctggacagactaatttatatgatgtcgcagtgctaaaacatgccggcggccctgaccattgaccaggaggacataagtacactaccgaccctaacaaacgttgacgtccttcggaatagatggatccggtacacagagatctttatttttcttaggc

SEQ ID NO: 488529 - DNA, 330 bp, Homo sapiens
taccactgtgctcctgcctgttttgacagagagagaccctgtctcaaaaacgaatagaaaagaaaagaaaaaaatggtagcggtaagggcagtgagcagagcgtgtgactggctataggggctgcggcaggcggtgaggaggtcgggggcagcagccagcacagtgcctcaccttgatcctgtcaagccgtcgctctatggctcgactgtttctatctagctcctctaacatcttatagggcttgaagcaaagcggtttctcgcggaccacaaagttttcccagcagtcagcaaactctgagagtgtagagggaaaccagctcaggcccc

SEQ ID NO: 488530 - DNA, 574 bp, Homo sapiens
cgagatttatagaacaaatacaactacaccttagcaaagaaatagacagccatgttatactagtggaggacttcaagcatcccactgacagcactagacagatcactgaggcagaaacctaacaaggaaactttggacttcaattggactcttgaacaaatgaacctaatagatgtctatagaatactctatccaacaaccacagaatatacattgtcctcatctgtgcacagaacattctctaagattgaccacatactcagtcataaagcaagtctcaataaattttttaaaaaatgaaattatatcaagtatcttctcagacaacagtagaataaaagcagaaatcaatgccaagaggaactctcaaaaccacacaaatacatggaaactaaacaacagaatcatttttgggtaaacaataaaattaaggcagaaataaaaaaaaattgaaacaaatgaaagtagagacacaatgttgcaaaaactctggaatatagaaaagcagtgttaagaggaaagttatagcactctatacctaccttgaaaagatagaaagatctcaaatttacaa

SEQ ID NO: 488531 - DNA, 953 bp, Homo sapiens
gatatttatgtattgaagtgcattgttctacttcttattataattgttctattgacacagtttattatcctatgtctgcttaacgttggcttttctaaagactgaaggagcattaggttatgcgtattgggtctgcacaacattgcaagataaaagcaacagagaaacagagctgtaccagtacaacatcctccagatgaatgctattccagcagcacaagttatttggaataaatatgtagacagcaattcagaattatgccccagccttgcacaatgtcgggttacttaaaccgaacatctacaacctgacaccaggaagcagccaaatgcataccaaagggcaactccccgtcgtcacagactgcacgaagaccaagaatacttacaactgttgcaataagaaattacggcagatcgtcatgtaaccacctggtgacactatgcactcacagctatccaggcttctaagtccaacacccctttgacgttgtccagcaacgacctcactacggctctcgccctcgggcccccatctcatgcacgggggctccactcaacagcagagcagcaaagcctatgccgagaacccttgttcttatcgtctgaatcggcagccacgacgaaagccccataatctttgccgagcttctgggcaataaactggacttattaaacgacgtgacaacacgggattgttggccaaagaacattggccactctagccacgtgctctcatcttaaaggggaaccaaccccagcacaaggccctgcaaggcccccgcaggtggcaccaaaggagttgggaaaaggcagagatccctaccactggtcaaaacgcagcaatcaaaggacgtaacccacccacacacccaaacagcaagaacggaatcatctccgaaggtggcccatgccctcgaaggaacacagacaccacagcccggcctcgtggt

SEQ ID NO: 488532 - DNA, 115 bp, Homo sapiens
gacagtgggctaccattggtaaaacatatcaatatatcatgtaaaacaatagctcactaaagtcacgccaatctatgctacagcgggctacttttctcggcctttagcattctcc

SEQ ID NO: 488533 - DNA, 283 bp, Homo sapiens
  misc_feature (33)..(33): n is a, c, g, or t
  misc_feature (53)..(53): n is a, c, g, or t
tgaaacttctaaaactactagttttagaagttncaatagctgcttctgctatngaaacttctaaaactcctagttttagaagtttcaatagcagtagagatggggttgctcctgaaggccaggcatggccaccacgtgacgctgttcttagttcactaatgttagccttatttaggacaatagcattatgtatataaaaacagcataatcactaatacttaattgctattgaaacttctaaaactaggtattgaaacttctaaaactagggggtaccgagctc

SEQ ID NO: 488534 - DNA, 970 bp, Homo sapiens
ggactatgagaactcgaacccagtccctgagaatccaaaattcttccgttgccactcgtatcacacccgcattcctaaagataaggtcgagctatagatatagctgatcgggcccataccccgaaaatgttggttgatacccttcccgtactaattaatcaccctgaggcaccgagacgccgctcgatcgtacattctactcgagtactcttgtccaagggcagcgaactcactcagccagacgcctcaagtcatccgacaacttgaattcttcttgaccctggaaggtaggccctagaaaatagaagcagtggctaggcgtgtgtgagtttcccaagatgtcagtaaagcccgaaagagagagagttaaagccccctccgatttcccagcgagaacgtcttgccccaagtcaaaggtatgttcgctacaacgccagaggccaaaccctgcaaagttccaagttagattcgcgttgtcgttaagttaggccttagttcccttcctttccaaaccaaattagtcaccatccttccccgggcaacacaagtggaaaacgcaattaaagcaccaaaagttatgcgttacgccaaagttcgaggacgttatcttccagttcccactttacagttagtagttcactttaagaattggggcgttacattaaaggccgcaagagtttaaaagagaagcgtttaaggaggaaacaattaagagtgccaccgccgcccgttcgtcacccaaccgcttttgtccattggactaggattcctccccaaatggaaacggggatataaaagcccccgaataaagggggcgaaggaacggccgctgtttccctaggaaacgcaagttacacccctgggcgggacacccgttgggacacttgtgccgttttgcgtttacgaagcaatagcagtcggtagcagaattcacgtacaacgacccctgtgaaagggtgccccgcccggc

SEQ ID NO: 488535 - DNA, 287 bp, Homo sapiens
ataattattacattttgactaccacaactcaacggctacatagataaatctaccccttacgagtgcggtttcgaccctatatcccctgtctcgcgtccctttcttcataatattcttcttagtagctattaccttcttattatttgatctagaaattgccctccttttatcccttctatgagccctacaaacaactaatctgccattaatagttatgtcatccttcttattaatcattcatcctaacctctaattcttccctatgagtgactacaaaaaggattaga

SEQ ID NO: 488536 - DNA, 143 bp, Homo sapiens
gttgaatgaactcaattgccaaagtttaagactggggtaaatcaagcttgacttaagtgtgattgttacggttatatccagcctatacgtgctagcagcgtgctcatacgtgcagtcaacttacgtggaaggcgtgatatatt

SEQ ID NO: 488537 - DNA, 500 bp, Homo sapiens
  misc_feature (9)..(9): n is a, c, g, or t
  misc_feature (169)..(169): n is a, c, g, or t
cctgggggngccaacttaaggtttttttccttttccacttttgggtggttccagacccctgggagcaaatggagactgtccaaaaaggccattggtggccccacacttggccacagggaagtgggacagggcatggccaggtggccactcaaaacccctggtttttcantggtgggggccttaaaaccttttttacattaacagtttgcttggaaagccccttgtttttttctttgggtcttgttttttttttccccttagaaattgcatttcctgacagaaggactcaggttgtctgaagtccttgcccagtgcatctcagcccccaaagtgatggttcccctgttcactttacttagcatgtccccaccgagttttttttcccctggatggagaaaaaccaaaccgtggttttccgttaagccctccctgcccctccctttaaccattccccatgggaaatgtcaacaagtatgaataaaaaccccttttgagtggca

SEQ ID NO: 488538 - DNA, 517 bp, Homo sapiens
cacaggaaattccaagggatttaggagttgtatgccaggaaacagggacaaaaaccacatatgtatttcaccatatcacagtacctcatataagtggaattgttcagtttttatccttttgaaaagcagattatcttatttcatttaacataatgtcttcaaggttgaaccatgtgtcagaatgcattctgtcttaatggctgcgtgacattccatattgcatgggtgtgccatagtataattagcaaatttgctattaacggagttttagggtatctcctatcatttgcagttatcagtagtgccacagtagacttttgtctatatgtacagttgtttgtcagatcaattcctaaaagtgaaattgataaaacagggaatatatattcattttaaatatagttattgccagatttccctctaaagaggctgtactaatattattcttccactgacaaaacactgtcaaagcattaaaacaaccttccagcacttacctttagaatatgattttaag

SEQ ID NO: 488539 - DNA, 257 bp, Homo sapiens
gatctgcgtgattagaggatccccgccgcatcttcatggccggcagcaggagatgtctgctggtggagggggtgctggaccgcggcaatcatgcgatgatctttggcggccgcgggacaggcaagacgtcgctggcgcgcgtcttcgccaatgttgccgataatcgcggctatctggtcttctacatggcatgcgagcctgggcaggattttaccagcctgatcgcaccgttcctcgatgccgcccgcgggaacctg

SEQ ID NO: 488540 - DNA, 371 bp, Homo sapiens
tttggtccgtacaaggttgctgcaccctcataccagctggctccctcctgccctcctctgactgttttatccactgactgttaaaatgccgcccatacatatttgggatgcaaaactgaagtcttttaaaagaaataataataataatataagcaacacaaacacatatgacagcaaccttcaagatccttggcacttgggttctcagctttctacggctttggttttactgaaatgttgaatctacttgtctgagggtaaagggaccgctttgtcacaaatgctatagcttccagttggacagttggggcatttcgaggtctagcctttagaaatttcatttttgttttactttttttttccaatttaga

SEQ ID NO: 488541 - DNA, 396 bp, Homo sapiens
attcttgatggtatccctgtaaccactcgagacacgccactatattcggtactgactcatctcattttttgaactagggagtggtctacattcctctagaacgaaccacaatcagtatgtacgtgtagaagctgggattccagcccggtccatccaaaggttcagccatatgtctcttctctggacctctctggaaatgcttctcaactttgatgatggctccagtgacaggcagcagccaccaggactgtgatctccctgggatttaaagtgggaggttaaaccaggctccacgccactgcggaattgtgcaattgtaagtcaagtctcaattgtgagccaagcttctcccagggtcagaggtggagttagaaaggccccatgtgaccctgagca

SEQ ID NO: 488542 - DNA, 708 bp, Homo sapiens
agcgggggcggcggcggtggctgcgcgggcagagcaaggacacggtggatcccactcgcacagcagcgcactcgtgtgcaccgtgcagggtcgcgatgctgcccggtttggcactgctcctgtctggccgcctggacggctcgtgcgctggagtgtacccactgatggtaatgctggcctgctggctgaaccccagattgccatgttctgtggctgcactgaagcatgcacatgactgtccagaatgggaagtgggattcagatccatcagggaccagaaacctgcattgataccagaggaaggcatcctgcagtattgccaaggaagtctaccctgaactgcgtcatcagcaactgtggtagaatgccaagcaaccatggtgaccatccacgaactggtgcaatccggtggccgcaaggcagtgcaagagccatctcccactttgttgattccctacctgctgcttacgtaggtgagatagtaagtgatgcccttctcgattcctgacaaagtgcaacacttcttacacccaggactaggatggcatgttgtgcgaatagtcatcttcatctggcacaccgtcgccaaagagacatgcagtgagaagagtaccaacttgcttgactacgggcatgtgctgacctgcaggaattgacaagttccgaggggtacgagtaatgtgtggtgcccaactgggttgacgacac

SEQ ID NO: 488543 - DNA, 133 bp, Homo sapiens
caagagcagtgtgtggcgacaagccggaaccctggcagcgggactgtcactaccattaagatgagcattgcccagtgcacatcctcccacccaaatcatccgccagatccgccagcaactgagacaagccagg

SEQ ID NO: 488544 - DNA, 184 bp, Homo sapiens
attggatagagacagcagcaaacagaaaactagcacaggcagctacgtgctaattctcatcttacctgaggtgggagtacaatacccctgcgttagttgggaagctgaaacaattctctaaatgctaatactgaaattgtcaggtcggggtaactgtgacagtccggaagcaatggaggcttca

SEQ ID NO: 488545 - DNA, 153 bp, Homo sapiens
gacatttccacgagtcaccacggaagtacctttagaggaggatctgatggatatggcagtgcctcgtggaaaatgtccacgtggacatttccacaagtcacgggttccacatttatgaactctgtatgccatgactcgatggggtaccggagc

SEQ ID NO: 488546 - DNA, 327 bp, Homo sapiens
  misc_feature (105)..(105): n is a, c, g, or t
  misc_feature (121)..(121): n is a, c, g, or t
  misc_feature (239)..(239): n is a, c, g, or t
gataagtaattctggaatcaaagactattggatacatttggcattgggctgagtgtggtggctcatgctgtaatcccagcactttgggaggctgagacaggcggntcatctgaagtcaggngttaaagaccagcctggccaacatggcaaaaccccatctctaccaaaaatacaaaaattaaccatgcgtggtggtacagtctgtcatcccagcagctcttaaggctgaggcacaaganttgcttgaacccgggaggcagaggctgtagtgagccaagatagcaccactgcactccagcctgggagacagagtgagactccgtcttc

SEQ ID NO: 488547 - DNA, 525 bp, Homo sapiens
cccaaacaccgccaggggccagtgaactgctttcagaccctagcaaagggttgaggtgctggcccagtataaaaggagaaggctgggttctcatggatcgaagtgaccttcaagaaccccctggtatgggttcacgcatcccctgaacacgtggtggtgactcggaacccaaaaagctctgcgtacaagtggaaggaaacgctattctcagttatgcccgggccagttttaccaggaggtgctttggggatctccaacagcatcaaattacggcaaacgcccccttagggttcagggcaattaccccttttcccccagaaagcgcaggctggatttccaggaggggcccccgggagtggaaatttccttctggtttgtggaactgtagtttttatggaaggaactgtgccccccctgtacacttggcttccccctgcaactgcagggccgcttttggggcctggacccccatggggaggaaaagtcccccccctttcaaataaaaaaaggtggtgtgagcctgga

SEQ ID NO: 488548 - DNA, 368 bp, Homo sapiens
gaccatcgcgagccagctcgttcccatagggatagattcagcctttcttctgcgcgaacagcgcatcgagcttctgctcgaagctgtggtaatcgatgcgctcgtacagttccatgcgggtctgcatggtgtcgatcacgttttgctgggtgccgtcgcgacggatcgcggtgtagacgttttctgcggccttgttcatggcacggaaggccgacagcgggtacagcaccagggaaacatccacggatttcaactgttcggtggtgtacagcggggtggcgccgaactcagtgatgttggccaggatcggagctttcacccgatcggcgaagatcttgtacatttcgagctcggtgatggcttccggg

SEQ ID NO: 488549 - DNA, 585 bp, Homo sapiens
  misc_feature (246)..(246): n is a, c, g, or t
tgggtccgaatttttgaaaaggttgggggggtttgggggtttattctccgagtttcgaaaggccgcccaagggacgaacaaaaaaaaaaaggacccgtggaaaagttcggccaaaaaagaacaaagacccgaggtgacacaaatctcgcggggaccagaggcacaaaaaaaaaagaggtggctccaagaggcaaagttcgcgggacagaccctcaaataacttatactcttgtggtgtggtgccanaaagagcctccacccttattgtatattaacactctcgtgtgtagaggaaagttctccccaacttatataacacttatatatatcaccccagagcgtgtgtgtgcgctctctctgtagaagagacacgtgaaagaaactctaagagggctctcctgcgggcccgcgggggggacgcctctctctcgggagagctctcctttgtgtagagggcattttctccaaagcgggtttctcaaaagccacaagaagcttccagttatttttcccaccaaagaaatcccaagggggtgggaaaatcctctccagaggtgtggcggggataaaaaaggcatgtgaaaa

SEQ ID NO: 488550 - DNA, 203 bp, Homo sapiens
aggcgttgtcagtgtggaggaatgggtggtttgtattcaactgtcattttatttttacgttgttagaaaatggggaggaagtgtgattgaggtggagtagataaggcgtaggtagaagtagaggtcaaggagggtgatggtggctatgatggtgtggatgatgaggctattgttttttttgtgacttcactgacaacggctgt

SEQ ID NO: 488551 - DNA, 929 bp, Homo sapiens
agggcagccattgatgcaatcacctgaataaaggcatcgcgaatgataaacatacgtccgcaggaatgggaatggaaggcatatggattcggaataaagtaaatatgggaggaatggaggggccctttggtggtggtatggaaaacatgggtcgatttggatctgagatgaacatgggcaggataaatgaaatcctaagtaatgcactgatgagaggagagatcattgcgaagctcggggtggcggtggcggtggagtgaagcgtccctgggatcgagaggatgtggtcctggcgattgactcgcctcggtggtgccggcgatggtgctgcctggtcgctgggcctgggccatggctggatcgcgtgagctccgagatctagcgcgtggtcctggtcttggaccgcatggtctccgtggagcgcatgggctccggggattgtgcgcatgggccctgctggggctcgaccacatggctccagtcattgaagcgcctcgggcagcagcatggagcgcgattggctctgagcgtggagcgcatgggtgtcgcgtttggggttcagcttgagcggcatggccgtgtcccatcgaccgtggtgggtcaaacattgagcgcgatggtcgtctggcgttgaatgcgcatgtggcccgtgtgcaccgagcgcgattgcgccctgagcatgtgggcgcatgtgtgcccgcggggtttttgtagcctgccctggagcgctgtgggcgccgcgactggttctggctggcccccggacctggaagcggatttggcccccgaaccccttggcggggagtgtgctttagcgacattgcgccaataggagttaactgctcgctttagactggtgcaccttcttaggtgtcccgcatggggcggtcggggtttcgcagcatgccactcgttggtcacatacaccc

SEQ ID NO: 488552 - DNA, 525 bp, Homo sapiens
  misc_feature (457)..(457): n is a, c, g, or t
  misc_feature (497)..(497): n is a, c, g, or t
cgaccctaccttctcagacatggtcagaccagatcctcatactcatcccagatcctacctctgcagacatggacagacccagatcctcatactcatgccagatcctacctcctcagacatggggagacacagatcctcataccagggccagatcttacctcttcacacatgacagacccagatcttcatgcctataacagatttctaccatctcagacatggagagacccagatactcatacctgtactagattcctaccttctcagatattgacagactctgatcctcataccagggccagatcctaccttctcagatattgaaagatccagatccttatatctgtgccagatcctacctcctcagacatggacagacccagatcctcatactcatgccagatcctacctcctcagatatggacaggcccagatcctcacacttgtaccagatccnacctgctcagaatagagagatccagatcttcacacttgtnccacatcctacacctgaggcatacaaga

SEQ ID NO: 488553 - DNA, 515 bp, Homo sapiens
  misc_feature (18)..(18): n is a, c, g, or t
  misc_feature (79)..(79): n is a, c, g, or t
  misc_feature (84)..(84): n is a, c, g, or t
  misc_feature (108)..(108): n is a, c, g, or t
  misc_feature (117)..(117): n is a, c, g, or t
  misc_feature (153)..(153): n is a, c, g, or t
  misc_feature (164)..(164): n is a, c, g, or t
  misc_feature (166)..(166): n is a, c, g, or t
  misc_feature (417)..(417): n is a, c, g, or t
aagatgcctgcccgccgntttccctttatcccaccccagagacatcggctgcaacccagcacaccagctgcccggtggnaaacnctgctgcccgagcctgggtggganctgggcctnctgccagttgccccatgctgtgtgctgcgaggatcncagcactgctnancggctggctacacctgcaacgtgaaggctcgatcctgcgagaaggaagtggtctctgcccagcctgccaccttcctggcccctagccctcacgtgggtgtgaaggacgtggagtgtggggaaggacacttctgccatgataaccagacctgctgccgagacaaccgacaggcttgggcctgctgtccctaccgccaggcgtctgttgtgctgatcggcgccactgctgtcctgctggcttccgctgcgcancaaggggtaccaagtgtttgcgcagggaggccccgcgcctgggaacgcccctttgaaggaacccagccttgagaaaagctgctgttaagggaaagtag

SEQ ID NO: 488554 - DNA, 98 bp, Homo sapiens
ggatttgctggtgcagtacaactaggcttaatagggacatgtccctattagctcgaattcgagctcgaattcgagctcgaattcgagccaagcttcta

SEQ ID NO: 488555 - DNA, 1527 bp, Homo sapiens
tctgccatcaaccacagcatttgcaggacagatggcggcatttgtgttccctggagatgacattccatcggctagcttctggtcgctacacaccgtcagcatgatacctgggactggccagtcgaggcaccttgcttgatgccctgatgcggctggagggccggttggcgctgtgccagaaccgcgtggtgtcaccaaggtcgtccagtcgctggcgcctttccttgggcgcatgtttaccctgtgaacgccgtggggtcctccgcttgccttgcttggccctttccttgtcggtcggaccctcctcttgattacttgcgttcgggagctccgcttccgcattgcacggctttgcttggttccaggccttggggcttactgtccttcttagcgccttctgtgccattgaccagcttgcttgacctggcagcgcggggcaaacgcttgctagcacaagccccttgcaaggcgttggtcagagcttgccctttccagtaagacaagcgcctgggatggggattttgcacaagcgactatgcgctccagagcccttttggcgcccctttgatgaagtgacccttggtgcaatggccccccattccccatgggcacaggcgaatagcatagccgggtggtccaatttcccgattccggggggccatactcgatgcgcgcacgcccggcggcggggtttccccatttgccaagggcccggcaaagaacaggtggccagctcgtggggcacggggaaaaaacgcggccagatgcaccaacagagtaacacacggcggaacacggaggcaatcgcgttcgcgggggccccaccccaaggtcttacaacacgggcacgactacaggcctttgggccccaaaggggcgtctttcacaaagcccaatgggccttaaaccggcccacccctgtgggttggcaccgacggcccgcccaatgacatggctgtccaacgtccgggcgccagcgggccccttttataaccccgtgttcccccatttcccgtgccccaagagggggcagcctttctacgcgggggccccattgagggcgccgaacggcgcgtcccctctcgggcgggcgggccccctttgtgttgttgtcgcccaacctgtgcggcgccccaatcatttttgggggccgtttacactactcgtttggctatgttgtcaagccgcaaaacggccgattttggaggggaactagccgcacaggaccccttggtggccccaaaagagaagggggcacaacaaccgttgtggtgggcgccccatagggggagccgctttgctacgcccacagcagtttgggcgcttgtgggagccccattaatgagcacccggtcatctgtggcgcccacctcatcaatcagttgggcgagcagctctgtacgtctgatggagggcacggatctctcccagtacttcatcattacacactctgagcttggatatacgtcaggaacaaccacatcagtcgggcccacaaccaacgctgccgcggctttcacaaaagcg

SEQ ID NO: 488556 - DNA, 146 bp, Homo sapiens
cgacacagtagaagactacatacttccgggggttgagatgatatctatctcattttacgtatggttgcatttctctgatggtcaatgatgttgagcaccttttcaccttttcatatgtgtgtttgacattcgtatatcttctttgg

SEQ ID NO: 488557 - DNA, 256 bp, Homo sapiens
gaggcgggcgggtgactcttcccccttgctctgctgtctcttctccttcctctccttcttgctcctagggttgttctccttgaagggtgcggtttgctatctatttcctgagcagtctcctggattgggtgaggatggctctttattttgtcttgcttttctacacctttctctgtattgtaatagcttagtgaagtgcagttacatacgtcaggcttccttctcttgagatgtcctcattacattgccaggggta

SEQ ID NO: 488558 - DNA, 687 bp, Homo sapiens
gttctgtctgcgctgttacgtattacctacacttctgggtttttttgttcttgtcctcagcctctctttaagagttcttgggccttccttttccctctttctattttaacagttttaattttagaaccatttacattccagtaggtaattcactatgcgctttatatgccttagggcatccaaataaaaaacaatagggtaaacatccccaaaacccacctttaaaaaaaaaaaaaaacccatacagatttccttttgtattaaaaccccgttgttctgggaatagatattttaattaagggttgtatttcccaaacgggtgacattaactccggtgagggataagaatgtgtctgcttatagtaataaccattcagaaacctcttggtgaaaatggcggcctttaattgtacattttcattgaacggggtgcataagtattggtacaggggtctggtaaacgtcttcaaaattggctatgaactctaatggccattggaagctacggatgggcagggctctactctaaaactgctttttagcaatggtttattttccctgattatattctaatgtacttggatgtaatgcggaggagtttaatgtacttgggggatgttccagcttatgtactcttctgacgtcgaaaagtcccctggttgttgcgcctattggtatcagctacgg

SEQ ID NO: 488559 - DNA, 322 bp, Homo sapiens
  misc_feature (115)..(116): n is a, c, g, or t
  misc_feature (135)..(135): n is a, c, g, or t
  misc_feature (137)..(137): n is a, c, g, or t
ctctgcttctgtcacctctgtgtgtccctcagcctcttctaccctgctgggtccttgtgctcctgttgcctccatttcactcacactcacaccttcttcttccatcttaaactcnngttttttcaactttatcgngnaagggctctacttcatctttttttatacaccactgctggtgctcaggaagcccagagcaaaggcatcgacctcctctgcctctcctgccagaaactgggctgaattcccagggcctgagtgaaggggagagaatacaggccggagacgcagcaggccaaggctgcatagctcacagaagggtaaa

SEQ ID NO: 488560 - DNA, 449 bp, Homo sapiens
gataaattacacgatccttcatgttataaaactctcaataaactaagtattgatggaacatagctcaaaatagtaagagccatttatgacaaaaccacagctaatatcatactaaatgggcaaaaaactggaagcattccctcttgtaaaactgtcataagacaaggatgccctctctcaccacccctattcaacagagtattggaacttctagccagggcaatcaggcaagagaaagaaataaagagtattcaagacaaagagatgacgtcaaactgtctctgcagatgacatgttcctgtatctagaaaaccccatcgacccatcctgaaagcttcttgagctgataagcaacttcagcaaagtctcaggatacaaaatcaatgtgcaaaaatcacaggcattcctatacactaatagtagccaaatcatgaatgaactcccattca

SEQ ID NO: 488561 - DNA, 185 bp, Homo sapiens
atgaagtctcactgttaccccggtaattgcattgggtctttacagcacgatcataggaaacgccgcttcaacctactggctcaggggatcttcgctgtctcagcctctcgagtatcctgtatgttgctgatctcccctactgacaaccttggatttgtgcccatcacataagttagaacagtcct

SEQ ID NO: 488562 - DNA, 610 bp, Homo sapiens
  misc_feature (531)..(531): n is a, c, g, or t
gaatatgttcgactttcactggttttataaccattggactccaaactgcaaaataagccatacgaggcagggtttcctggttgtgagacatgtccttggtctatgccaatataaaagccatctccctagctttgtttgtattcaggtaaatgaagtttatcttggaaaaatccaaaaaggcaaaaataaatggattttttttcttgctgctgaacagaagtagggtgaatgggttgggaaagggtacttaaagttggtcgcagagtgatgagagggtgtgtctctctatgtgtgttctcttatcctagtgtgctatccttattatgtgtgtgagaaaacctcaaagatggatatggctactcccttttaaaaaaaaaagctaataatttaagctttctaataaaaaaaaggcttgaaaacctgatttccagaatttttaatctggaaatggttttcgagtttctggtagaactaaaccatttttatcatggacattaaggtttgaacccaaatctatggtatctcttcagncaccattagggaaacaaatttattttacaagtaggctattagaaaaagacctgtattcgtgcatagagtcctcagaaat

SEQ ID NO: 488563 - DNA, 241 bp, Homo sapiens
gggagtgagtgcgagttcagtgccagtgctctatcatagctttatggcatggcccatgatggctgtgtgcatggcctgtgaaggatatgcgtctgagtgcctggcactgaaggtaggatggcgccccgatcagggtctataatgaggcatgatggtatgagatgggcatcagagttgttgctccaaggaaaactgacctttatagagcgctctcctctccttatctgatttcatcctcaga

SEQ ID NO: 488564 - DNA, 285 bp, Homo sapiens
ttaccagatgcactcctgctcccctaataagagacacacacacacacacacacacacacacacacacacacacacacacggcaacataatatttgtgggggatgtggcttccaacttcctcttgcagcaggaaagagtgcttgctcacccttctgtcttgcagagtgtgattgtgggagggagtgggagccttcttctcccccacctgtgcagcttctttctggtcaggggtgagacccccaggaatattatgtgggcgtgtgtgtgtgtgtgtgtgtgtgtgtg

SEQ ID NO: 488565 - DNA, 311 bp, Homo sapiens
  misc_feature (279)..(279): n is a, c, g, or t
ttttggcctctgaataaaaacgtcttcaaaacctgttgccccaaaaactaagaacagagagagtttcccatcccatgtgctcacaggggcgtatctgcttgcgttgactcgctgggctggccggactcctagagttggtgcgtgtgcttctgtgcaaaaagtgcagtcctcttgcccatcactgtgatatctgcaccagcaagggaaagcctcttttcttttctttctttttttttttttgagacgggaacgcaactgttgtctgcctgggcttgagtncagtggcgcgatctcaactcactgcaacctcc

SEQ ID NO: 488566 - DNA, 488 bp, Homo sapiens
  misc_feature (483)..(483): n is a, c, g, or t
ccttccttctactctgttgttagatcctcatgatggcccaaaaaaaggcattctttaacctaaagcatccccatggctcaatctctacccccttcatcaccaaggaaaagccagctcttagtggattaagagttttatactgcagggcttgtcttcactgagagctaaataagggtaaagtaagataaacttaaaaatgagggattgaggcccggcacagtgctcatgcctataatcccagcactttgggaggccgaggcaggcagatcacgaggtcaagagatcgagaccatcctggccaatgtggtgaaaccccgtcactactaaaaatacaaaaattagctgggtttggtggtgcgtgcctgtagtcccagctactcaggaggctgaggcaggagaatggcttgaacccgagtggtagaggttgcagtgagccgagatcgcgccactgcactccagcctgggtgacagagcaagactccnattta

SEQ ID NO: 488567 - DNA, 170 bp, Homo sapiens
  misc_feature (100)..(100): n is a, c, g, or t
atgtatcattgcctaagtcaaagctcattatttgctgtttgttttttttttaagaagaaaaaaactgccctgaattaaatggctgttaacagtaggctcnagcattataccacatagtcatttttcatgtccttgtctaacaggcactgaggttctggttaaaattaaat

SEQ ID NO: 488568 - DNA, 240 bp, Homo sapiens
aaaatttgggcccggggggatggggaaaaggtgttttcttttgggtaaaaaaaaatttggggggaaaaaaaagggggggttttagggaccccccatttgaagggccgggaaaaaaaaaggtttaaatgggggaaacccaggttttaacttttgggtacagggaaaaaaaaaacaggtccccctccgcccccccccccccgggtttgtgtcctttccaaaaaaaagttttttcctggggga

SEQ ID NO: 488569 - DNA, 330 bp, Homo sapiens
ataacacatccaggatgtgaagtaaggtatactgtatctggtcattatctcaggcaagaattgtcagggtgtgacagtgctctgtgtaagggatgcgcctagaggtgctccaccctttctgattaaaatgaggtcgttgggttaaccaggacagctgttttctgaaattgttgccacaaacaactcacgtcaactaagagtagaggatgggagccagatttcgtggagcatgaagcacgatgtgggaaattactctagtgcctgatataggcaacagcaaagatctgggcctgtcactggtgtggtgtgtatgcatgtgagaaggcctcc

SEQ ID NO: 488570 - DNA, 140 bp, Homo sapiens
tctggtggtgggggggggctgtgacggaaacagcaataattacctgaccaaggaggagtgctcaagaaatttgccactgtcacagagaatgccacgggttgaccgtgtgccaccagcaggaatgcagcggattcctccgt

SEQ ID NO: 488571 - DNA, 143 bp, Homo sapiens
attaatgatattattatagatgtgcacgaggcctgtataagtaagatgagtacctgttagggcagataggtgacttctcacagtaccctgtgaggtaccttatcatctcctctccattatgtagggagaacaccaaagcccaa

SEQ ID NO: 488572 - DNA, 735 bp, Homo sapiens
cctgatcagacattagaggatgagcgtgacatggaatgaactgggggaggaatgagtcgcaggaagatcagcggggcacggatcgcactgcgacggtcagcgtacggacaatccagagatcagatgcgaacgatccggagaatcacgagacggtgaacacgatgaacgaaaggtcgtgcaaacgaagagatacaggggcgatccctgaggcagtgaggactggtacatcgaacgcaccacggagcgacctaacgagagtgaccgtaggaacccaagaaacggaagcgcaacgcggagattctgtacttagtggtaatgtacagtgcatggagaagataacactggagtacagagactaagacgctctagaccaagttaaatatttagtgtaaggaattggacaacagtgcatcatttaggcggaaaacagtgggtcactcagagtgtgaaaagaaaatacgggtgaagcccgaagaaaagattcttgtcactaagtgatgtggggcagaagaatgtgagtacgacgaggatacatggacatgtatgaaggaactacatggatagaaggtaaggagtgggagataagaacgcagagtgatattgaccacaaaagttgtatgagatcagattgagtacgtggcgtatgaaaagatgcgtgagaaaggaattgtgcggagaattggacttgataagaggaaagggaaatgtcaattttgattgggactgagaatagaa

SEQ ID NO: 488573 - DNA, 611 bp, Homo sapiens
aagcttgcaccatggcggtaggcgcacgggacagtggtcagtctgcaagctaccacggtgtcggcgtgagccaagggctaagcccagctgaccgggacggccgctgcgtgtccaccttacgggccctaagatactcgaggatccgggccctaagaggaacgcccggtaagactcctctggctggctgcctaaggcccttgctggcctatagactcgtactctcctcgagccggccttaccagtatcgcgtaaagccgccggacgcagcggaaccggggccgctttgcaccagcaagcgcccgtgggcaccagccagccactcgcgtccccgtacagtagagcttgatcctggactgctgcgcggacacgcctggcctaagacttggccttcggtgactgaagggcagagttgcgcttgtaaagttcaagactgtgttaaagcgattacgtacaccttgaatcaaggatcttcgaccttgacctgggaagctggttacctgggatcctgtgcaaggatccaagggtcccaaggaattccaagggaattccccttcaggggaatccctggtccaaggttcccaaaaggttccaaattccgttaaaaaaaaaaa

SEQ ID NO: 488574 - DNA, 895 bp, Homo sapiens
cattccttaagtcctaattgggaaaaaaaaaaaaacaaaaatggaacaatagtcggaaaacctctgggggtgtaaccaattggattggtaaccctacacactattcaataagtagtacgaagggagcttcacacagattccaggtctaatctggcccttcttggggggccataattataaccttaacatggtggtgtacggataacacaggttcatttcctttcaagagaagaattacggttagctgtgcccattgggtgttagaagccagtttctaaatgggttgagaacttgggtgttgcgaatgtgtaatactcctaatttatggagaaagggtgatttaaatatttcctctacattctctaaatccttgagaacatatccaggggtttcgggggccgggataatcgggaatctatggggcggaatcccatcggcaaattgttgtcccccaccagttatttttctaaaaggtggggccccaaattttattgggggcacactttccaacgagcaagagggccatataaacggaagtgggctttcacccagtgggaacacttttagaggtctctatacccaggggagggaacgcattacacctggggctcacaataaccacccttctgggccgtgaaatttcaaacacgcatatttacccagtgtctagggaaagggaaacttttagaatcccctttttgggagctaagcaccgggttcccaaaatctattcttgggagaccccccaagttatctcgctacaagaatccctcattatcataagggggttcagcggtggaattgggaattcgaattaccgtttgcacaattgggtcccgccaaattcacgtagaattcttgggcgcaagttaactcttaagcccttttattccag

SEQ ID NO: 488575 - DNA, 564 bp, Homo sapiens
  misc_feature (19)..(19): n is a, c, g, or t
  misc_feature (218)..(218): n is a, c, g, or t
  misc_feature (245)..(245): n is a, c, g, or t
  misc_feature (262)..(262): n is a, c, g, or t
  misc_feature (311)..(311): n is a, c, g, or t
  misc_feature (355)..(355): n is a, c, g, or t
  misc_feature (382)..(382): n is a, c, g, or t
  misc_feature (409)..(409): n is a, c, g, or t
  misc_feature (415)..(415): n is a, c, g, or t
  misc_feature (431)..(435): n is a, c, g, or t
  misc_feature (438)..(439): n is a, c, g, or t
  misc_feature (442)..(442): n is a, c, g, or t
  misc_feature (446)..(447): n is a, c, g, or t
cagtgcaatctgggcgatngcttcctggtcctcgcctcctccgctgtctccctggagttcttgcaagtcggccaggatgtctcaggctgagtttgagaaagctgcagaggaggttaggcaccttaagaccaagccatcggatgaggagatgctgttcatctatggccactacaaacaagcaactgtgggcgacataaatacagaacggcccgggatgntggacttcacgggcaaggccaagtggnatgcctggaatgagctnaaagggacttccaaggaaaatcccatgaaagcttacattaacaaagtanaagagctaaagaaaaaatacgggatatgagagactggatttggntactgtgccatgtgtttatccctaaantgagacaatgccttgtttttttctaanacccgnggatggtgggaattcnnnnnaannccngttnnaccagctactcaaggttgctcaccatacggctttaacaaattaggggctaaaacgattactgccttcccttgagtagtttttatctgaaatcaattaaaagtgtatttgttcctttt

SEQ ID NO: 488576 - DNA, 296 bp, Homo sapiens
ccgagattgcgccaccgcactccagcctgggcgacagagtaagactccgtctcaaaaaaaaaaaaaaaaaaaaagggggtccctccctccaaaggagcgggaacggaaaatggcccccaccatgtaaagcaaattttggggtttggaaaaaaaagggcccaattttttggttttttggcggaggtgggtttggacctctgggtctcaagaaatcttctggcccaagcttccggaggggggggaattatgggagggacccacttttttggactggagaaaattttggggtaggggga

SEQ ID NO: 488577 - DNA, 247 bp, Homo sapiens
cgttgccctggctgtagtgctcggcacgatctcggctcactgtaacctctgctctcccaggtacaagatagtctcctgccctcgtcctcccgcgtatcgtcggattaccggcatgtgccagcacacctggctaatttagtctttttagtccagacggggtttctccctgttggtcaggctggtcttgaattcctgacctcaggtgatccgactgtcttggactccagcgtgctgggggtccgcgctc

SEQ ID NO: 488578 - DNA, 130 bp, Homo sapiens
ctcggtgctctacggctcccctgtagtcgctcttggttgtgcggttgtgtacacttgctgtaggtctgttgaggatctgcccagtccggcggctgccgtcttccagcctcctgcatcagggtggggatgc

SEQ ID NO: 488579 - DNA, 103 bp, Homo sapiens
actaagctcgggagatcctagtggtggtggttatggctctggtggtggaattggtggatctggtagcagaaggttctacaaacagtcagaagagggctacagt

SEQ ID NO: 488580 - DNA, 689 bp, Homo sapiens
aacaatgtatgtattcttgaaaatggtggctgggtgtggtggctcacgcttgtaatcccagctgttgggaggcggaggtaggtggatcacctaagaccaggtgtgtcacgacctcctgacctcaggtgatctaccctcctcggctcccaaagtgccgggattgcaggcgtgggtcaccgctcccggcctacatatttcaaaacatcatgttgtacatggaaatatctataattttgtgaattaagaataattaattggaggccgggtgcggtgcctcacgcctgtggtcccggcacttgtgggaggccgaggtgggtggatcatgaggtcgggagatttgagaccatcctggatagcacggtgaagccctgtctctattaaagataccaaaaaattagccgggcatggtggcgggggcctgtagtcccagctactcgggaggctgaggcaggagaatggggtgaacctggaggcggagtttgagtggacccaagatgtgcaacatgatctcaagcctgggggaaagagtgagactctatctcaaaaaaggaaaaagtaccctggaactaaaattataataatgaattaggaatcattagatgggacatagttgaagagaagattagtataactggaattaagtcagtagaaaatattcagctgagcacagggagagaagagatagaagc

SEQ ID NO: 488581 - DNA, 325 bp, Homo sapiens
acactcctatgatcagtatcagtaagcatcgatagtacaagcaacgaaatgtgtctacctgtaaatttctgcctgtaaaccaaaaggaatcggacatagtttttttgttgttgtagtatttgtttgtttttgagacggagtttcgctcgttgcccaggctggagtgcaatgctgtgatctcggctcaccatatcctccacctccccggttcaagcgattcttctgcctcagcctggatgtagtatttaaagaaaaaacaaaaaactctttactgagaaatactttaaaagacaaaaatcaccaaaactgatctataggagtggtg

SEQ ID NO: 488582 - DNA, 194 bp, Homo sapiens
ttacgtacacggtattggcaccggaatgaccgctgatgcgtcccagattggcggccgataggtaaatttccggggaagtcggtgtggtcgtggtgcgggcgtccgggtcgagcacaccaaccacggtgagggtaatgggcttcgcaccgtttcgggaggggtcgttgacgatgatcttcgatccgatcccggcg

SEQ ID NO: 488583 - DNA, 625 bp, Homo sapiens
gtcgacacggctgcgagaagattacagaagggcagttctcaaaagaagacatgcaaatggccaaaaagtatatggaaatatgttcaacatcactaatgattaggaaaatgcaaattgaaaccacaatgagatactctacttagaattgttcttactaaaaaagataaaaaacaacaaatgctgatgaggatgtggagaaaagaaaactttcactgttggtgaaagtataaattagaacaactactgtggaaaacagtatgtagatttctcaaaaacctaaaaatagaaccaccacatgatccagcaaaccaagtataaccacaggaaaagaaatcagtatatcaaagagatacttgcacttgcatatttatcacagcactattcatgataacaaagatatggaattaacctaagcatccatcagtggacacagggataaagaaaatgtttatgtacacagtggaatactatttggccataaaaaagagtaaaatgttattgctaacaacatggatggaacttgaggtcattatggtaagtgaaataagcaggcacagaaagacaaataccacatgttctcacttatatgtgggaggtgaggtgaaatgaagataaattggtgaat

SEQ ID NO: 488584 - DNA, 295 bp, Homo sapiens
cccctgggcatgacccaggaccaggccaaacgtctggcgcaaaacagcctggatgcacggttggtcaagccttaatcaccgaccggtctggcgagccgggcaatttccagttgcccggcttcactgacctgcagcgaccgggactcattgatcacactgacccagttcgactgcaaacacagctgcaacagcgcgacccccaacgtaccgcccaggtgcttagcttgttcgctccaatcaaaacaatcgcacacgatcggctgaggcagtgcctgggtaaaaatccccagcgctg

SEQ ID NO: 488585 - DNA, 672 bp, Homo sapiens
ccaaagtgctgggattaaacggtgtgagccactgcacccagcctcttcttagaatttaatatttaaataatgatgaatgtacaacattccattattccagctataagcctctgtctgtctgacaatgaggttaacgacaggttctttagggtgaaaataagattctgtacgtagtcatctactatagctgtacagaaatagcagcagaggaccctgtaaaagaaaagaaaagatataagggacagaacatcatgtttaatgagtgaagaacagagctaataaattattataacaccgtgtaggagcatattatttgaagtcaaataacgaagatggaaggctagtcattaaaaaattatataggttttatacaaggtgtgactgacagggtgtctgcagtataaggtcctagtaaggagataaccattcacctcataggcttccttgtcgccttataagtgtactgataacatgaatgattgattagatgtgatggcattattgacatataggaccttaccagcaaagtagtcgatggttatcacttggatgttagacatacttagaggagtgaattacctgggtgaacaaaatcgtactgggacagtactcctaagacccctgtgtgtgtcccgatgagatcatgactgggattcacagccaagcaagata

SEQ ID NO: 488586 - DNA, 318 bp, Homo sapiens
  misc_feature (7)..(7): n is a, c, g, or t
gaggacncttagcctcaggttgtctgcatgctcaggatccatagaattgtccatgctggcagagagaagtccaacccacagacatgtggccatacggctttgtgtcagagtgagtctgactgtctcctccaggctcctggctcatctttccctgccttcccctgagtctcctctggcttgtcgccatccctgcgtgtctcctcaggctggcgcccatcgccctcagctgggtcttttgatccttgcctagaggaaaaggttcttgatcctcatcccactatgctacgcaagcgtgagacttaacccttactcccgaga

SEQ ID NO: 488587 - DNA, 225 bp, Homo sapiens
  misc_feature (221)..(221): n is a, c, g, or t
tggtttgcagctgctgagattcctcgaacctgctgagctttcgcacacccactcaggagttggggcccagctcccagtttacttgtgtttccgcttgttgcacgcctgtggggctctgccctcgtgcacctacaggctcgtgggttcggactctggctgcagcacactgtgctgttcatacgacgtcttatcaccgagcgttgaaccggttccagtgaatngata

SEQ ID NO: 488588 - DNA, 114 bp, Homo sapiens
atatgatggccagattactctgataccaaatccagaaaaacgatactacaatgaaaactacatggccagtatctctgatgaatactagcaatacacacatactactcacatgca

SEQ ID NO: 488589 - DNA, 306 bp, Homo sapiens
ctctagaggatcttcaaacacgcaatctccctaagcttttggatgccttcctctacattaaaccaagagatatcaggcatttccagctccctcacagtgggccatcttttaatgcatatttcagctaaccaagcaaataaactattagaaccttattttaactccccgagctgcaacattaaatgcagagtccctacttagtgggcccaaatcaataaattcagcctgatccaactctatgttccttcaccattatcccatacccttaatacccattcccatgcctgggcctccacatatgcgggg

SEQ ID NO: 488590 - DNA, 1207 bp, Homo sapiens
cctgcgtcctgccccgcgagcacagagcctcgcctttgcctgatccgccgcccgtccacacccgccgccagctcaccatggatgatgatatctgcctgcgctctgtctgtcgacaactgtgctcctgtgcatgtgcaatggcctgtgcttctgctggtgctgactgatgcccccctgtggcccgtcttccccttccatcgtggtgtgctgcccccagtgccaccacgtggcctgtgactggctgtggcactggagctcacaaggacttcctactgtgtggctgacgaggcccaccagcaacgagacggcactcctcaccctgcaccgtaccccactcgatgcacggcatcgtcaccaactggcgacgacactggccgcaaacatcttgcgcaccacaccttctcacacatgacgctgctgtcgtggcctcccgacgcgagcaccccgctgctgcctgacccgacggccccccctgaccaccccacaggtgcccaccccgccgcactcccacgcactgaccccagcattccactcgtcctccgacgcacccttcaccacatccccacgccctctgtctactgttcgccctactcccaggctgctgcctactcccctgtcaccgccctctgccgccgctccccacttggcctccgccgactggaccttccggtgcccccgccctcaccccacacctggtgcccctcctaccgcacgcggtattgcccctcccccctcgccatccctgccgctcctcgcaccctgcgcttgcgcccgccgccctgccttgcctcacctcctcgccgctcctcccccggcccgccgctcccgcctcccccgcccctcccgcccggcccctcgcgcgtgcctcaccgcccctcgtgccgtcccccgcgcctcccccccacctgccccgctcgccccccccccctgccccccccccccgccgccgccgccccccccgccccccgctcgcaccccaacacccccacccccacccgaccggagcacccccccaaacccctcaacccagagcgccacccacccacacccccatcgcccccccccacgccgccaccgccctccccgcccccgcccgcccaggcaccgccaccccccccccccccccccccccccaccgtctccgctcccccccccccccccccccgccccccgccccccccccccgcccaccacccccccccccccc

SEQ ID NO: 488591 - DNA, 385 bp, Homo sapiens
gcgtcgaccatgtcttgacaatataagctgttaggttttaaaaagtagtgggggccgggctcggtggctcacacctgtaatcccagcactttgggaggctgaggcaggaggatcacttgaagtcaggaatttgagaccagcctggccaacatggtgaaaacccgtctctactaaaaatacaaaattggccaggcatggtggcatgtgcctgtaatcccggctactcaggaggctgaagaagaagaattgcttgaacctgggaggtggaggttgtggtgagccgagatcgcaccgtggcactccagcctcggcaacagagcaagaccccatctctaaaaaaataaatagataaaaagtagtggggaggaaattttacttttttttt

SEQ ID NO: 488592 - DNA, 190 bp, Homo sapiens
cggcacgagggtcaggcttaaaatttgttggaggggagtaaccattatgctcctctcgctctcctcctcgtatgcgccgcgtttcagaggttgcctatcagccttgtgatttatttttatatctgcttcttataaagagagaaatatatatatatatatatatatatatatatatatttctctctttata

SEQ ID NO: 488593 - DNA, 1153 bp, Homo sapiens
agcccatcgcgtacgcgctgaccatgcctgtgaccaactgcagtgaaaccatggtctctactaacaaatacaaaaatcagccaggatgtggtggctgggcacctgtactcccagctactcgggaggctcaggcaggagaatcgcttgaacctgggaggtggaggttgcagagagccaagatcgagccacgttcactccagcctgggcgacagagtgagactccatctcaaaaaaaaaaaaaaaaaaaatagggcggtgggggccatggcaccgagcagaccaagccaactggggaaaacaaagggtggaaggagccccccaagccccaggagtctccaaggggtgcgcagggaccccgcggcactcgccccatgtgcattcccacgccgtgggccacaaacgcgtgaaacccatatctccaacacggaaccaaaaaacacgaagcccctgctccactattcaacagcacaccatccaaaatccgtgaccacccccagcccatcgtaggcacatacgcgctaccccttatccgtggtcatctgcaaatacatccgtgcatccataaacaactttcttctatagacaacacactgggaatacacacacacctgatcgttgggccacataagagagagctccatgggacgcatcgtcccccacgctcaaactgttgcggcagatcccctcgaacgagcaggcccaatcaccagcgcccatgtaagaaccccaggggaagccaaagaaacagcccgccaggcggccacagaaaacacaagagggcctacgaacacagcaggcacccccaaaaccgcgaaggatggaaatcgagcgcacaatacaaggcacgagcaaaaaacacaacgcggaaaagagacgacaacagacgaaacgataaacaaacagcaccagagagcaacccccccgggggacaaaaacacgaggggacgacaaacggcccacgcggcgggagacacccagcacgccacgcatagcacggccgccagaacaacacaaggagagtgtagacagggacggggcccacacgggcaacaagaacaggacagaaacgcatagagcggatagccccagaacgggcgacgtccccaaggaaaacccccgccgacgaacaaggcgtaacgtgagagcaggagat

SEQ ID NO: 488594 - DNA, 622 bp, Homo sapiens
gagagagagagagagagagagagagagagagagagtgagtgtgattatcaacgatccattatggttgaaagtcatcactgagcttactattgcttatcaaatcctaaaccttaaactatgtacctgacaaactctctataatggacctatattatcatagtataaactacattgattctgacacaatctattgttcttcaactgtctatctgatgcacttcacaattataccaagctgatccaaattctcccatctcggatcgatcagtatggatacacgatcacagattctgatactgtacatccagttacggaaagttcacctataaccgtacttgacattgccatccatgcatatcggactactatctgcagcattcatgccgtgcacaactctgaagaggaactgcccattgatgtgccacgctgactgcatacccatgtctgtgagttacatcgaacattatctacacatcatcgtattggtccgaatgtttccggttttgcacagatactggctgtatgggtcatgccatgcttcattatcgcttaatgcccattgacatgatgcacctacctgctactgattatcacgtcttgcacttcacattacctccctgat

SEQ ID NO: 488595 - DNA, 1398 bp, Homo sapiens
tgctcttgaaattgctaatgctcatcggaagccattggtcataatcgccgaagacgttgacggagaagctctaagcacgctggttttgaacaggctaaaagttggtcttcaggttgtggcagtcaaagctccaggatttggggacaataggaagaaccagcttaaagatatggctattgctactggtggtgcagtgtttggagaagaggggttgaatctaaatcttgaagatgttcaagctcatgacttaggaaaagttggggaggtcattgtcaccaaagatgatgccatgcttttgaaaggaaaaggtgacaaagctcacattgaaaaacgtattcaagaaatcactgagcagctagacatcacaactagtgaatatgaaaaagaaaagctgaacgagcgacttgctaaactttcagatggagtagctgtgttgaaggttggaggaacaagtgatgttgaagtgaatgagaaaaaagacagagttactgatgctctcaatgctacaagagcagctgttgaagaaggcattgttctaggagggggctgcgctctgcttcggtgcatcccagccttggattcattaaagcctgctaatgaagaccagaaaataggtatagaaattattaaaagagcacttaaaattcctgcaatgacgattgctaagaatgcaggtgttgaaggatctttgatagttgagaaaattctgcagagttcctcagaagttggttatgacgccatgctggagattttgtgaacatggtggaaaaagggatcattgatccaacaaaggttgtgagaactgccttactggatgctgctggggtggcctccttgctaactacagccgaagctgtagtgacagaaattcctaaagaagagaaggaccctggaatgggtgcaatgggtggcatgggagggggtatgggaggcggcatgttctaactcctagagtagtgctttgcccttatcaatgaactgtgacaggaagctcaaggcaggttcctcaccaataacttcagagaagtcacctggagaaaatgactgaagagaaggctggctgaccactgtaatcatcagttactggtttcctttgacgatatataatggtttactgctgtcattgtccatgcctacagataatttattttgtatttttgaataaagacatttgtacattcctgatgctgggtgcaagagccatataccagtgtcctgctttcaacttaaatcactgaggcatctctactgttctgtgagcatcaggactgtagcgctgtgtcaccacatgagagttcagaagcagcctttctgtggagggtgggaatgattgtgtacaaagtagagaagtatccaattatgtgacaacctttgtgtaataaaattttgtttaaagtt

SEQ ID NO: 488596 - DNA, 202 bp, Homo sapiens
cttcagtagactcagttctgaccaagataagataggaggaagaggaaggccagaggttttatgctgggggctcagagagaagtggacagcagtattgtcggccctcccaggaagaaaagtcccaacgagctggtggatcatctctctaaaggtgccaaagagcatggcagctgtagctttggagcgagtgaccaatcttgca

SEQ ID NO: 488597 - DNA, 1921 bp, Homo sapiens
tgctcttgaaattgctaatgctcatcggaagccattggtcataatcgccgaagacgttgacggagaagctctaagcacgctggttttgaacaggctaaaagttggtcttcaggttgtggcagtcaaagctccaggatttggggacaataggaagaaccagcttaaagatatggctattgctactggtggtgcagtgtttggagaagaggggttgaatctaaatcttgaagatgttcaagctcatgacttaggaaaagttggggaggtcattgtcaccaaagatgatgccatgcttttgaaaggaaaaggtgacaaagctcacattgaaaaacgtattcaagaaatcactgagcagctagacatcacaactagtgaatatgaaaaagaaaagctgaacgagcgacttgctaaactttcagatggagtagctgtgttgaaggttggaggaacaagtgatgttgaagtgaatgagaaaaaagacagagttactgatgctctcaatgctacaagagcagctgttgaagaaggcattgttctaggagggggctgcgctctgcttcggtgcatcccagccttggattcattaaagcctgctaatgaagaccagaaaataggtatagaaattattaaaagagcacttaaaattcctgcaatgacgattgctaagaatgcaggtgttgaaggatctttgatagttgagaaaattctgcagagttcctcagaagttggttatgacgccatgctggagattttgtgaacatggtggaaaaagggatcattgatccaacaaaggttgtgagaactgccttactggatgctgctggggtggcctccttgctaactacagccgaagctgtagtgacagaaattcctaaagaagagaaggaccctggaatgggtgcaatgggtggcatgggagggggtatgggaggcggcatgttctaactcctagagtagtgctttgcccttatcaatgaactgtgacaggaagctcaaggcaggttcctcaccaataacttcagagaagtcacctggagaaaatgactgaagagaaggctggctgaccactgtaatcatcagttactggtttcctttgacgatatataatggtttactgctgtcattgtccatgcctacagataatttattttgtatttttgaataaagacatttgtacattcctgatgctgggtgcaagagccatataccagtgtcctgctttcaacttaaatcactgaggcatctctactgttctgtgagcatcaggactgtagcgctgtgtcaccacatgagagttcagaagcagcctttctgtggagggtgggaatgattgtgtacaaagtagagaagtatccaattatgtgacaacctttgtgtaataaaattttgtttaaagttaaaaaaaaaaaaaaaaaaaaaaaaaaaaaagacaaagaaaaaagagcaaaaaaacacaagaaaaaaaaaaaagaaaaaaagacaagtagaaaggcacagaaaaaccctgtacccatgtagatacatccataaactgataaaaactcaatgtgcatgacagcaaaaaccgatgatacggaaaaacttagggtaacccagccatatacccatagatcgacatagccaatcataaaactggagcattagcaaagaagataacgaccgatgccaccttcttaaactctaagagaagaccttggtaaaggaagaattgtgtgagcagatgcaccgtaaaaacatccataagtatccgatacctaaggtactgtatggtcaaaggggcccaccattaaaaaccgtttcccctagcaaaaactccggaaaagcatagaattgccccgtggttaacaagagtgccgaattacaaaccgtacataaagctgaaagacgattgtggcagaggccctttttgccacaaagggaa

SEQ ID NO: 488598 - DNA, 919 bp, Homo sapiens
cgaacgaccccttctgtgccgtccaatgtcctgcaagcggcggcctgtaatgcacggattttgtgcctaaggaaatgcccttggtaaatccagggtttcccttgcaaaggcacagccaagcgcgcgctttcaatggaaacttttgatttggacccaatggaaatgccttggtcaagtcgcgtcccacggggccttcttggggaacgcagcattctagggacgtcaatgctccggcgcaagggtaaccacgcgaagtcctgtgaaacaacaacgcatcccagtactgctgtccttgtccttcccctgtcccactaggctctgcggctacggcggcttacgatgacactgcttggtccccaggaaggtcaccttgccttcgccctggatgtcccctcgttcaagtggccacgcaggaccttggccagggccacacagcatcgccaaggttatgtagcgcggtctccagccatctcctgcctgcgtccttggctctgctgacctttcagcaggcctgagcagcagactcatgctagggccatcccggcgatgctgcaccttctggctggctccctaccagcgcctgttccctgtacctggcagcttctctcttggccccacagtcacagcactgccacttggtcacaaagacttcagagaaacaattgaggcgtcctgagccttcagcgacctccacacggcctgggatatccagggttcagagggtgtgtgctagatgacagacaagacgggtgggctccaccctactgaggctggtcgatcactgaccgctggattggctaagcttggctcaataccgggtactggcctgacagtgttcagtcacaccaggagcgcatggcagactgcagcgtccagctgatgccttctcattgccgggtaggggttgggagttccccta

SEQ ID NO: 488599 - DNA, 106 bp, Homo sapiens
ccgttctgtcccccggtggggtctgtgccctgcactcgggcccctctgtatttatcgctgctgaactgcaacagtatttatatccacggacaaatccacgtctggg

SEQ ID NO: 488600 - DNA, 423 bp, Homo sapiens
ttagcacattacattaagctaatatgtatgtgtgaattgatccgtcatatgatgtggctgttatttgcccgttagtgatgcagattttcctagcatctaggtcttacaattggcatgttttgcagtggtggtactggttttcctttccatatttagtgcttccttcaggagctcttgtagcgcaggcctggtggtgacaaaatctctcagcatttgcttgtctgtaaaggattttatttctccttcacttatgaagcttagtttggctggatatgaaattctgggttgaaaattcttctctttaagaatgtggaatattggcccccactctcttctggcttgtagagtttctgcagagagatccactgttagtctgatgggcttccctttgtgggtaacctgacctttctctctggctgtcct

SEQ ID NO: 488601 - DNA, 104 bp, Homo sapiens
aattcaagcttctaacgatgtacggggacatgtttctaggggtattcatttgctttctccgttgaaacctgttgttaataaagtttttcactctggcaaaaaaa

SEQ ID NO: 488602 - DNA, 131 bp, Homo sapiens
gtttggtgtctttgtcccctccgccaactatcttctctctgagggggtcccgttctctctgcgtctcttatgctctgtctccctctgtctccgtgtccctctctctctagggtctctgtccccctctctct

SEQ ID NO: 488603 - DNA, 150 bp, Homo sapiens
acatgaaagctaagacagtagaaccagaaaatcagaggcggggagtcttttgcaccattattcttcataaccttgtcacctttgaaacttacctcttgcattgccacctaccggaccaaacttttcattgttcttgttttggaccctacc

SEQ ID NO: 488604 - DNA, 204 bp, Homo sapiens
cgctaaccgtgactacgtgtcgagtagtacatgtgtagtgatgagattagctaatacacgcgccagtcaggccacctcacggtgaaacagaacgatgagctcctagggtctcagagcactgtagcagatcatttcatatggcttccgtggagtgtggcgagtcagctaaatactttgacgccggtggggatagcgataattatg

SEQ ID NO: 488605 - DNA, 810 bp, Homo sapiens
agcggcgtaggaccctccgagctaggtgtgggatataatctgctggtgtgtcgtttgttaagcccattggaagagcacagtatcggggtgggagtgacccgatttcccaggtgccatctgtcacccctttctttgactaggaaagggaattccctgaccccttgcacttccctggtgaggcgatgcctcaccctgcttcggctcatgcacggtgcactgcacccactctcctgcaaccactgtccggcactccccagtgagatgaacctggtaactcagttggaaatgcagaaatcacccatcttctgcgtcactcacactggtagctgtagactggagctgttcctattcggccatcttggctctaccccaaaagcaggattttttaatggctgaatggtattccatttgtgtgtgtgtgtgcgcatatatatcatatatgtgtatatgtgtgtgtgcatatatatcatatatatatgatttagaactatatactctgataatatatacatatcacatatagtgcagtatctgcagataaagaataataatcacagtatcatagagtagagaaacgagaaaacatgaagaacggaggaggagggagaggggcacagggctcaaggacgagagaggagaggaggagaggagcaggcgtgctaggaacgcgaggaggaggacgaagaagagaacgaggcaggaaagaagacgaaacgacacagccacgcaaaaaaccaagagaagagacgacggaggaggcatgagagaagagcgcagacacgagaacgagacgagggaggccggagcagc

SEQ ID NO: 488606 - DNA, 1549 bp, Homo sapiens
  misc_feature (1)..(1): n is a, c, g, or t
ncttcggtatgttgtgtgtccaatcgcgttgtgtgtgctcgtcttccgtagtctcgtgtgttgtctagccgcccgtgcgtcggtgcctttatctgctgttcgcctggtgattgttggcaccccccctgtgcttcatcgacaaaatcttcggttttgtatggcccgcctggtgtttttctgtcttggcggcgcggcgctatgtcctcctcgtgtcccttctgtagagttcttttctgccctgtcccctgggaaggagtgtggctcccccccccccagtttgatcacccccccacccggtgtgggggggagagaaattttgcgtccaaggaaattcctctggcccccaattgtgagaagtttcgtcgtgatatggggagagccctttaagaatatcatttcgggtaaccttcagaactcccggctattgcccggaatgctcccaaagtgcgccgatatttcagttgtctgtcccgcttgttttccccgctgttgggggaaaggccggtgtcttttgcccaaggaaaaagggttttttttggggacaataaatccgcgccacaaggctttctttattggtgaaggaccccctttatatcgctccccctgttaaagacaccgtttcttgtcccccgggggggaaaatttgggttctttgggaaacaccccacggcagcccccttgtggtgggaggaaccccccctgtggaaggccctccctaagaaccccctggaagtcgcccttgtgtgtgcgcgcgtgcctaaggacccacatttgtatctcgggaagcacaagaggccccacccgcgagaaaggaagttcacaccggggggcccgcggccacaagccccaccaggggaaggagggacttaccccacaaaagggtggccgcgggagtttgaaaattgagagtgatcgccgagttgtatacgcccccaccagagcgccacataccacacagaggggcgccccacacacagagaaagagagagccccctcttttgagagagagcccaccctggcgaaggagaaagccaccaccccctcgtgtgcctatattgtggagacgctctggccacctgtggagacggtcacacttctggagaatatatatgagacccgcctgtgatcgcaccacacaaaacttttgtaaacgcaagggccgagactcgggcccccccgctcccccccacgcccacattcggctctctatctgtaatgagacccacagaatgtgtgggtgaatgaccacgaaatcacgcttttgtgtaaagtataatggtatatataatagggctcacatggcacatggtggtccacatgttcaataacccgtcttcaaaacgccttttgcacacttctggggaaaaaaggagtaacacattgaaagggagaattggcacacctatatgggctgggaggccttgccacggaaacccacgctggccccgggagagcgctggcacacttaccctttgtcccctgtcttcaatttttggtgagatgatataaactgggccccgcttttataatataaaatataaatggacca

SEQ ID NO: 488607 - DNA, 603 bp, Homo sapiens
atgccataatttattccatagtataaaaaagtcattcttatgtcacaaaatgccctcttagaagacgatctttttatcttaggtcataactaatcggcactcattcaaccgttggcacctaaaagacagccccacactggacttggccatcagtgctgaaaactatcctgctgacaagatattgacagcatggttcagtactcagaaacacaaattgaggcttttggttcttttaggagtacacaatgacatttgtgtaggcagacgcctccacaaaaatcgataaggtttattcttatatgaatatgcgaccatgggaagtgtactggaagtgttgtgaagcacgaggagattctactacagacaggggctagcaaaccagaaaccgtgtcacacactgtgtcctttcttttatgccccatcatgccagacgggcttggtgtacccactatatattggacccgaatgagctgtgttcagcaacagtcttgacgctaagtgatccccatacctgcttagcaccccagaggaactccgttgaagtttaataaataaggaccagccctctcgtgcccctacgagagctattggcttagtactctc

SEQ ID NO: 488608 - DNA, 312 bp, Homo sapiens
  misc_feature (277)..(277): n is a, c, g, or t
gagaccgtgtctcactccgtcgccccaggccggacaggcgatctcaactcactacaacctccacctccctgggctccagcaattctcctgcctcagcctccagggtagtggggactataggcacgcaccaccatgcccagctaattttgtatttttagtagagatgggttttcaccatgttggccaggctgggctcgaactcctgacctcaggtgatccgcccgcctcggcctcccaaaatgctgggattacaggtataagccaccacgcccagccnaaataaattcatttttaacaatcaaaatgttcttt

SEQ ID NO: 488609 - DNA, 382 bp, Homo sapiens
  misc_feature (306)..(306): n is a, c, g, or t
  misc_feature (357)..(357): n is a, c, g, or t
  misc_feature (367)..(367): n is a, c, g, or t
tggagacagagtctcagctctgtcacccaggctggagtgcagtggcgcaatcttggctcactgcaacctccgcctccagggttcaagcgattctcctgtctcagcctcctgagtagctgggattacaggcacacactaccatgcccagctaatttttgtatttttagtagagacagggtttcaccatgttggccaggctggtctcgaactcctgacctcaggtgatccacccggattggcctcccaaagtgctggggattacaggcatgagccacagcgcccgccctgttctattattttattggnttttttccacaagtatttttgatctgcagttgttgaatgcacagaaggtgnaacctgaaantatgggaggggccaa

SEQ ID NO: 488610 - DNA, 467 bp, Homo sapiens
  misc_feature (262)..(262): n is a, c, g, or t
agtgcccccagaacagtacctgggtgttccccatcctgtgggcatcatgcatcagaacaaacaggccactgagaatgcaaaggaggaagtgaggcgaattctggggctgctggatgcttacttgaagtacgaggacttttctggtgggcgaacgagtgacattggctgacggtcacaggttgtcgtgcagcccatgtagtggctctataagcaggttctagagccattctgttccgccaggcctttccgagatagccaatcngcggttcctcgaccgtgtcattaaccagacgccagttccgggctgtcgttgggggaggtgaaactgtgtgagacgatgggcccagtatgatgctaagacagtttgcatgagaccgcaactagaagggacacaccatggcagacgaagggtgcacgggaagagaagcagaagcccaggctgagcggaagggcggtgaaccaaggcg

SEQ ID NO: 488611 - DNA, 206 bp, Homo sapiens
ctgggtaatgatggagagtatactttttcatgagctgtatagaaggatgacgaatgttatgctgaggtctggacctacatgatgatgttcagtcatcgagcgagtcagccccaaccgaagagccagtgcaagaaaaaccctgtgcctgtaggaaagtgactggaaagtggactccagtagcggacaggatgtggtgagcacagtcc

SEQ ID NO: 488612 - DNA, 772 bp, Homo sapiens
agaagagctaaatcgcgaggctggtcgcgcttatgaagtgccatgagcggcaatttacttctgaattgttctgcaaaatggatcttacaggttacaggtgatctacctggatggattatatatgctttaggacgtgtagaagttaccgcgaaaaaaatggtatacactcacgtaactattacgggtcatattcgccctctggacatgctgaaatgacaaggtctctgtgatgagcagagcatccctgtgaattttccaaaggaatgggtgggctgcaattggaactcactccttagaatttggcacagtgtgggacaactttcttgatggaagccacacgctatatacttaacagggcatctatagaatactctggattgttgttcccttctttgtggggtgacggttcagagcgtgaacttcttgtgttcattggagtacagatatatgaggctttgggagacgtaaaaataatgaagagtagaaggggagagaaatttatttttaattataggcggtggtggaagatattattagaattaatgccaaggggaaaactggtgacatctttaacattacctgggtgtgttccctaacattcaaactgtgcattggcatacccttaggaagtggtaagagtagtacagacctcagaaggcttgctggtaacactgaggtagcgtctcttcatcttatttgcgagcggtcctgtagattggccagtaactgattcatcaatgggaggatttatgccatgctgaccgtgtgtccg

SEQ ID NO: 488613 - DNA, 667 bp, Homo sapiens
gtttcagaagcacatgagggtgtgaaaccagtcggtacctttctgtatggtcatagctgtccaagaagtcggaggataagatatatatactcatcagcactcagagtagacagggaagagagtagatcacacttgggcacaccaggatcacataaagatggtatactgctctgtggatgctcaggccttgtgtacaatgaggctttacaaccttcctgttcgtctgggcgtcgggagttacttcctggctgtaataggataatggaagccagtaaccattgtaatagttatgtaaaggccgaggaaatcacgtgtgctacaaaaagtcatgtagtttcatgtagtgtagcatccttggcatcgtttgccaaaattgttccttctcccttttttttctttcggtgtggcatgagtgtgtatctgtgtaaatatgatgtatatgtgttactccgatatgtaatccatttcactggctgagttggccctagccatgtgttaatataaagtaggcagtggcattcccaatggaaatctctgagaatgacagtggagttgtgcaagcattttacattgccacataatagacttgccattttatggtgacaaacggcacattaggcaagttgaatatgacgttaccttgcagactaaaaggttgacggccgaa

SEQ ID NO: 488614 - DNA, 308 bp, Homo sapiens
ccccaatgtggtattgaaagcaaattaaaaattttaaattagggccaggcacagtggctcatgcctgtaatcccaagtgctttgggaggcagaggtgggaggattgcttgaggccaggagtttgagaccagcctgagatatatagtgagactcctccatctacaaaaataaaaaatggaaaaaattagttgggcatggtggcacatatcgttagtcctaggtactcaggaggctaaggtgggaggattgtttgagcccaggagtttgaggttgcagtacagctatgattatgccactgcatttcagcc

SEQ ID NO: 488615 - DNA, 106 bp, Homo sapiens
aacgcgtttctggacgctcctccagacatttcctacaggacgttccacgtgccctctacacgtgagactacgtcggtgtgtacgtaacgactcgacgacccactag

SEQ ID NO: 488616 - DNA, 150 bp, Homo sapiens
tcataagcagcgaccttgtggcatcgtcagaaggagggatttggtttggcaagaacttgtttacaacattttgcaaatctaaagttgctccaatacaatgactagatcacatggggggtttgggcgggcgccatcttacaatggccgacg

SEQ ID NO: 488617 - DNA, 831 bp, Homo sapiens
ggtggagcggaagatcactccctgaggcagtggcgacagcgggggagggcagaggatggaacatatgaagttctgagcagcttggaagatgatgatagaaacgtggggagacacatcgatctaggaatgaagaaataggatggacagagcaaagattgcgtgagacaggaaaaaacgggaacgagataggaatcaggatctaggtagcaagagaaaggctgttggtccacttggacctggtagagcaatccgccatgtgagttaaaaatctaccagctgtatattggtgtaagcttcctaggagaaggacacgcagctcggtccggtacgccattggagacttccaaacagatggacttactagtaatcaaggcaacttatacgaaaccatgaatattggtcagcacttatgactctctagttggtgaacgcaaggttccttggtagcgtgtataattaagtcgaaccattggttaaccgtcccctgggaaggcaaacccgctgaaaccgagggggtccaaacaaggtctcgtaacatataccgagttcctaccttttcaaaagaggaaaagggtaaatgtgaacaaacccctcaatagctaaggggaatgtgaattgacttgccaaacattggagacatactagtctggttgtgtaaagggtagggattaattgcagggtctggcggggaaatggagggatttggtgtccttcgctcaggtattggccttgggtgaagaaagacttgctaatgattgggggtacatttgactttgaggaggaaaacaggttttgacttgggattggggagacggagaagaataatgaggg

SEQ ID NO: 488618 - DNA, 205 bp, Homo sapiens
  misc_feature (43)..(43): n is a, c, g, or t
  misc_feature (111)..(111): n is a, c, g, or t
  misc_feature (144)..(144): n is a, c, g, or t
  misc_feature (174)..(174): n is a, c, g, or t
  misc_feature (193)..(193): n is a, c, g, or t
aggacgtgcccgactggaaggtgggggagtcttgttccacacnaaccgctggtgcccccttgatcggggagctgtacgggtgcgcaccacagaggaggctctccatgccancacggcttcatgtggtacacgtaggcccctttnctccggccacctggatccctgccccgtccnactgggacggaataacatntctgcagacctg

SEQ ID NO: 488619 - DNA, 335 bp, Homo sapiens
  misc_feature (8)..(8): n is a, c, g, or t
  misc_feature (44)..(44): n is a, c, g, or t
  misc_feature (76)..(76): n is a, c, g, or t
  misc_feature (93)..(93): n is a, c, g, or t
  misc_feature (137)..(137): n is a, c, g, or t
  misc_feature (319)..(319): n is a, c, g, or t
  misc_feature (321)..(321): n is a, c, g, or t
  misc_feature (325)..(326): n is a, c, g, or t
atccgccnctggcctccccaaagtgcctggcattagagccggtncccacctgtgcccggccgtcagtccggtattnggaaaagaatttaagancttttaataaatcagcaaaaatatcatgcatttaaaatgtttcnggaagaaatggacaaattcttttgatgaggtgtcaagaaaatagtagattccattaaataaacactttgattagaactgtgaaaacaggtttgtgtgtaaggcatttcaaaagtgaaaactagtcatcatatgacaactaggatcatggaattgtgggctatttttaaaagtgttactgttnanaagnnctataatta

SEQ ID NO: 488620 - DNA, 100 bp, Homo sapiens
atcatatctacctgaaggggtgaaggctgtggaccacaagactggacgggagatccacttacacatttgaggaccgaatcaactattgccgtgtatccca

SEQ ID NO: 488621 - DNA, 113 bp, Homo sapiens
tgtgctgtcgatactgcatcaaagtcccagcatttagatggtccacatagagctgcttctgcgtaaatcctgcttagtttaagcgctaaaaagccattaatttgatgggcata

SEQ ID NO: 488622 - DNA, 760 bp, Homo sapiens
gactagttctagatcgcgagcggccgcccttttcattatttgttatatctgctagcctattaaagacaaataactgggacgctcgtggacaaaccgtgagtattatttctttatgaccgagttatatctgtgaagtgtgcgaggctctaagcgtttatatgtggagacactagacaatacatgggctatctgggcaacattgtggacccggacgtgccttcaacaacaattcaactgtgtactaccagggacccttatagaagaaccgtgtcacacagtggtatatattggtggcgttgaggacagcaattctcccacaggtacctattacgaaatggtgcatcaacgccatgcctggaccacacatggttgaaacccacatctggactacaacatacaccacagcaatatagcgcgtggaccaataggcggcggagctaagcggccacgtgaaaaaattcccccagagagaacacttgcgagaacggctagaacgagccaagggcagcacactcggcaataagaaaacccccgggcaagcgcgaacgagatcagcagcgcaggaaagccaaacagaaaatacacggaccccaacgcgaataccctcacccgcacccgtgggccaccaacacaccgccgcaggaaactcccccacaacttacaaaaacaacacacagagggcaaacgggtgaaataagaaaggcacacactgcaaactcaatcgccagagcggcacacacagcaacaaactcagcagaaa

SEQ ID NO: 488623 - DNA, 1578 bp, Homo sapiens
tgggggcccggggggcctcatcctctctctcttttaaaaaaaaccccgacgccccccaaaaaagtggtgtccccccacaaaaatattttctctctccacaaagagggtctctttgtgtccacacaaaaaaatatgtggaaaatatatatttctttctcccacaaaaataaaaagaggggagggtgggggagtgtgttcacacaccgcgctggaaagagtgtgtgtcccagagatgtgtgttgtgtgtctctctctctgcgctgtgtgttattatatatatatatatgagaggagagagatatatatttttctctctctctctctctcacccgcgcgcgcccgagagagagagagacacacatgtgtgtgtgtgtgtgtgtgtgagaaatgagagaggagaccagagatatatatatatgatgtatcacaagagatgatgtgtgtgatatatgtgtgctctcgagagaagatgaggcgcgctgctgtgcgccactctctcgcgcgcgcgcgcgcgtgtgttatagatgtgtgtgtgctgtgtgtgtgtcgcgcggtgtgtgtatatgtgtgatgatgatgatgtgtatatatatatagcgcgcgcgctgtgtctcccgcgcgcgcgcgcgtgtgcggtgggtggtgtgtgtgagggtatatatctctccacgagaagcatcgcgcgtgtgatgtgtgtgtgtgtgtctataaaacatgttttgtgtgtgtagtgtgtgtgtctccctcccacgtgtgtggaagacaaaatgaggggtaggtgagtgtctgtgatgtgataagtgtctctctctatatatacgagatgtgtgtgggtcaacaaaggtgtgttgcacacccctctgtgtgtctcagtgatggtgtgtagagtatatctctaagaaagagatggtgtcggagccccacataaataataaatgaggttggtcgcgccgcgctgtctcctggtaagtgcgggggtaacataaatcgccgccctcttttgtgagagggagaacaaacgaggcagaaaaaatattattgcgcgtgtgaatgattgttctgtctttgtgttttttctcacacaagaaacccataggttcatgcctgcggagtgattctagcgcacacatgatgggtggtatgtcatccatccgcgcctatgagttagtaactctccgccccgagacctatgttgtgtggtgggacacacccgcactatgggaggtgcgggggcggtcagaaaatctatttagtcggcgggcgggcgcccgcacagacagatcaacagacacgagaaaacagaccccgcgtccgtgtagggcgagccacaaacaggggaagagaagacacccccccgccgttgtatctcttattccaaacaaagaacagcacacacagaagacgcacatgcggtggcggctgaggagtggtgtggtggagcccaccaccgccggggggtgtggtccgcgccgccggtgtgcatgctgcggacgacgggatttagttgaggagaggcacgaaaaacactaactgatgagccccgggggaaggggtgagatgagggagagtcaagcagca

SEQ ID NO: 488624 - DNA, 103 bp, Homo sapiens
tgatatctttacttccaacagtaccgccagttgacaggaaacttgccatggctgttcttggttgtggctgttgtctaacagctggtgcagtatctggtgatgt

SEQ ID NO: 488625 - DNA, 385 bp, Homo sapiens
tagctgttctcatctatggccctttgctcgtgggggggagacaatacttgcaagccaggatgtcaggatggtcagcgaaagggcagtggggtaggccagagcattgctccggaaaccgtgtgtacttatcctggatgatgccagcagtgccctggatgcaaacagccagttacaggtgaggcagtcatcttcttaatggctcatatcccacccaatcttgcttcttttatacatcttctgttagttttcactaacatcatcaattatacaaaccagtccttgggggaggccatcacccagaaaatcctgtgcatgtggcagggtaggagtttctatatttccctgtttttcttctggggtaagacatcatgctcatcacgcggat

SEQ ID NO: 488626 - DNA, 175 bp, Homo sapiens
aaatagcgtcctcccaaaggatgatccctgtagccctcatctaataactgctcaaaaatcatcctccatctgatattaccaagggaactgtctactatggatgacatcttcatctaagtcctgagctgagctgaaggccagcagggccactgacagcagaatcagaagcatcttg

SEQ ID NO: 488627 - DNA, 110 bp, Homo sapiens
tagaggatcccggcatagcatcatgcctggcttgactacaaatatattaataaacattaacctaaatcctgtcagaaattgtcctcttccattccctgatggcatcccta

SEQ ID NO: 488628 - DNA, 331 bp, Homo sapiens
  misc_feature (302)..(302): n is a, c, g, or t
atataggaaaaaaagcccagatttaggtaatgagtggatgagtaaatggtggaggatgggagtccaaatccgaattatagaagaagtatttcccgtaactatagaaagaattatggatatatacatgccgaaatatatatgggtggggggatctgtggatggaaatatggatatctcttcccaaataaatccatagtgggcttattcagaacataaatatggattcagcttgtcttcaaaaacggcccagcagaaaatgttttatattttataaatcatcttttggctctggatttaaattntatgatactgaaaataaaggccttttgga

SEQ ID NO: 488629 - DNA, 672 bp, Homo sapiens
  misc_feature (299)..(299): n is a, c, g, or t
  misc_feature (304)..(304): n is a, c, g, or t
  misc_feature (445)..(446): n is a, c, g, or t
  misc_feature (540)..(540): n is a, c, g, or t
caggccaactacagatgctggccagatatctggagatgaattgtgcggttcggcgtgattaatagaccccacagcatgctgctcttgcctatggctctatacaagagtcagaagtacaagagtcagtggtctgtagtatgaatattgaggtggatggtaacgtgtttgcatatttcttatcactgggagaattctggaagaggcagtattgtgagcgtgagacatccgacaaagtggcggatatctttctataggtgggagaagactttgtaacaggccgtgctacgaggacattgtgnaaggnaggttcaaggagagcaggacaggggctagatggtgactagaagatgaacatgggcacttcagcagggtacgggagaggcgtgcctgaatagaggtctaaatcgtgaacgtctctctcatcatgtgtcgagactgaggatcnnaattatgtccctatcatggacagagtgcgattccgttctggtacgccagagcgattatggaatatgaatagttggacccgatggctcgaatttngaagggcattgtacagctggatctaatgcagagaggaacgtatcgtgtgccatgggcaaaagaggctatgcaagagtgcgagaaggtcagggaagagtggacatcagggagaagtgattgctagtggggtgt

SEQ ID NO: 488630 - DNA, 325 bp, Homo sapiens
aaaaatatccgcaggggtcggattagacccggggttgcttgttccgtttttccagccccgaaaaatgaatttatccctgaagggaatggccttgggcttgttttcaattcaacgggttttgtttcgccagccccccccgtttaaaaccagggtttccgggaatttttgggtgggttttttgttttttaaaaagggactgtttcgccgggttatgaattagattttaaggtttcctgggttccgaaaaaaaatgcccgatgcccctttagacccccttgtggttttttaatgatgccattaaagacctttttttttgggccctcca

SEQ ID NO: 488631 - DNA, 130 bp, Homo sapiens
gctcgtgccgaatccttcactacctattctgacaaccagcctggtgtgcttgattgcacggttttatgacggcgagcgtgccattggcaacggataacaacctgcttgcgaagtttgacctcacacgcat

SEQ ID NO: 488632 - DNA, 129 bp, Homo sapiens
gacaaaaaatgatggaagtagtctaaaagccacaataatgtatgctttggtgtaaactatttattcttacactaaatagtttacaccaaagcatacattattgtgcttttagactacttcatcattttt

SEQ ID NO: 488633 - DNA, 535 bp, Homo sapiens
  misc_feature (21)..(21): n is a, c, g, or t
  misc_feature (42)..(42): n is a, c, g, or t
  misc_feature (132)..(132): n is a, c, g, or t
  misc_feature (279)..(279): n is a, c, g, or t
ccgaaggtgaccctttcaccnaacctgattaattggcaagantttaaatttttccccggggaggaatcctcccgggtgaattcccaaaatgtgaggaaaacttaagcaaagactcagcaaaacctaactacnggacctaaaatatagattggcgcgtagtatataggcccatattcccatatgaataagtttagccttcataaaaatggaaggtgcaggctgacattacattctgtacttactgagtgccgacagccctcacaaacagggaatgtactntggtctcccaatggtcagacggtgttttgaatgtaatcatgttatgttattcatgtgttcaatccattgatgaagagcctttatatccagtagatctacggcaataatgttcatactgatcagaagtacatttgcatagagcagagttttaaaatgaatgtaaatagcgccaaacgatttctttctgccccctgaacagacagatttcttcctgtcaactaacataaacgaacaaatgatagtgccaaaaaaaaaa

SEQ ID NO: 488634 - DNA, 663 bp, Homo sapiens
agccaagatcgcatcactgcactccagcctgggcgagagagaaagactctgtcaaaaaaaagaaaaaaaattaaatttgtaacttatccaaatgtttcctataacatcctatttaggaaagtatagataataactgaaaaagtaagaagatatagttgaggaggcagagcctgaagcaatttgtcgtggcaaaaagtactagaatcgacgtgtagtgaatgggaacagtggacatatttcctgcaagtggcacgggatttacagatgctgacaatacttgggaaccctgaagaacaatttagattgtccagaaattgactttgaagcgtttcttaactctcagaaaagctggcaaagaaacaacgcatggtacacaacccgaaaatctttatctgacagtgaatctgatgacagcaaatcaaagacagaaaagagatgctatgaggaaacgagattgactacaaatcgggttttcgacatatacatcaccattgctcaaacacgaagcagttttggccatggcacggtggctcgcacctataatcccagcaccttgggaaagccaaagcgtggaacatcgcttgagcccaggagttcggatggccatgtttgggcaacataggtgagacccgatctctacaagtgacacacgagaagagattc

SEQ ID NO: 488635 - DNA, 229 bp, Homo sapiens
ggacctggggaaccgaacaccgggaacctgccttccccttccagcccgggagcatcacagaggtgtgcatcacctttgaccaggctgacctgaccatcaagctgccagacggacatgaattcaagttccccaaccgcctcaacatggaggccatcaactacatggcggcggatggagacttcaagattaaagtgcgtggcctttgagtgaagccagccagcctgtagcc

SEQ ID NO: 488636 - DNA, 217 bp, Homo sapiens
  misc_feature (181)..(181): n is a, c, g, or t
ctctagaggatcctccagtgctacctccacaaacagttacaaatagtagaattaataaaacacaatgtggccggggcgtggtggctcacacctgtaatcccagcactttgggagtccgaggtgggcggatcacgaggtcaggagatcgagaccatcctggctaacacaggtgaaaccgcgntctctagctaaaaatacaaagaaaaaaagaaaaaaa

SEQ ID NO: 488637 - DNA, 193 bp, Homo sapiens
gcacgtaccaacgcagatccaggaaaactttgaagccttcatgaaggcaatcggtctgccgagatgagctcatccagatagggtgaaggatatcaagggggtgtcggaaatcgtgcagaatgggatgcacttcaagtacaccactcaccgctgggtccaaagtgatccaaaacgaactcactgtgggggaggg

SEQ ID NO: 488638 - DNA, 474 bp, Homo sapiens
aacttgggaggcggaggttacgatgagccaagattgcaccattgcactccagcctgggcgacaagactgaaactctatctctaaataaataaatgaataaataaataaaatgtggggtataaacccaatggaatactactcaggcattacgaaaagaaatcatgtcttttgtagcaacatggatggaactggaggctgttatcttaagtgagacaagtcagacacagacagataccacatactcccatttataggtggaagctaaacagtgtgtacacatggacatagagtgtggaatgataaacactggagactctaaaggacgcgggagggagggacatggatgataagaggttacttaatgggtacgatgtatattatttgagtaacagatatcttaaaagcgcagacttcacaaaattacacctgtaatttatgcgaattttcaattttttaaaattacattttcccttt

SEQ ID NO: 488639 - DNA, 85 bp, Homo sapiens
cccccctcctattcccttccccccaccccaacagcccccacctcgggtgtaagcgacaggaagaaataataataatttaagattc

SEQ ID NO: 488640 - DNA, 262 bp, Homo sapiens
ctcggagggcacagagatgctactgaaatcagcgtttggaatttttggaaagcgcatgagcggagtccggagagagaatctgaactttcagctgtaaccgggttaaaaccaaaatgctcagcccaggacgtttccatctcagactggctggccaggaattgcctacacactagtacctctgaccttagcagcggagaaagcggagatccccaggcagagaacccaaggacacgagaaatagccacgaccgacacacctttgg

SEQ ID NO: 488641 - DNA, 765 bp, Homo sapiens
  misc_feature (636)..(636): n is a, c, g, or t
taaaagcttttaaataaaataaacaaataaattttctaaacggtataggctacggggacaaggggtagaagctaaagggccagtcttcccggctcaggccctcaagtcccctttagaagagacccgtgctcggggacgtggtatgggggcataggacgtgcttgactggggagaggcggggaagttgaacccggaagtggggtgactcgtgggctctgtgacagccataccctcttggatgggtgataggggaggagagaagaggctcaaagaaagcaagaccctgcaagaggcatcccagtgacccccaaaagtgactggcggtaaggggagcgctatcctaaaaggagggggtggacacggagggggcagtgaacgcagggcggtgagcatggccaggtggggggctacgagccgaggtatcatacctgtggccatctcactctcggacgtagaacccggtgtgcacacaacggttatccgacgtatatggtcaggatcagtcccccttcgtgtcgtcagttctctggtcccgaggtctgtggggccccttcttcccttccaggaagctttcttgttccacaggacgctttgtgattgtctcacttctcccctttttcaccggggttgttacgnggggccccatcaccagtgttggtccctaattctccccacttggatttactctctgtgggcgcccgggtgagaggttcggttacaagtgtcccccctggggattcccctggggtgagctgcacgagtgcc

SEQ ID NO: 488642 - DNA, 123 bp, Homo sapiens
cgtcgtcgttatagaggatccccactacttggtctagggggagccgagattgcgcattgactccagccgggcacaagagcaaactcagtcttaagaaacacaatatagtgccaggcatggtgg

SEQ ID NO: 488643 - DNA, 138 bp, Homo sapiens
ctaatggtaacaggcaccatgtcagacttccagtgtatgtaatgaacgatgtcaatgccaccaaagtatcaccacgactgccactcttggtcatctggcgctgatggtagacagacgaagaggtcctgagaaaccagg

SEQ ID NO: 488644 - DNA, 649 bp, Homo sapiens
ttccgcagcctcctttgccctgtgacctgcaggtactggactggtccctagcagaggataccgtggacgctcctgaagccgctgagatggatgggtcttccatgatactgaagggagagccactatgttgatgcccaggaccagctgcctccttggtctgaacaggcctgatcgaggccaggattggctatgagagctgggaaatgggaccatctttgaagccatgggagagggtgatgagcctagcatcactcatgttcttgaatgggtaacttgcctggacgaccctgtacacgagagaaggatgccttgagagcgaggacacgtgaggaaggctgagccatcccgggaactatgggctaggatgaggccaagccatggagtactgacacccaccagcatagaagtcaccattcaggcattttggacttttctgtggagatcctggtccccgagatcgaaacccttactcgctagtgggtgtatcccagcaggtacgatggtgcttggcagatccaccagctggttcatggtaccactgaatacccattgtcaccaccatcacttctcactgaacctgggtggcagcacaactggaccacgtctcagaagctgcgcagcatggcatggctgaaggcgggtaagcatc

SEQ ID NO: 488645 - DNA, 241 bp, Homo sapiens
  misc_feature (54)..(54): n is a, c, g, or t
  misc_feature (189)..(189): n is a, c, g, or t
  misc_feature (209)..(209): n is a, c, g, or t
  misc_feature (226)..(226): n is a, c, g, or t
caagagaaatatagaccaaaaactataccacaaaccacttcatcatcaaagatncctattttctcattgaaaacctttatcagtgaatagaaccagtatctatcatttactcctttttgactgtcatttacctctgagcaatgaatttccccataaataaatttttaagcacaggcttaaaacctgagnagcactgtaaaaagtaaccnatatgtctgtgataatntttaataagcagatg

SEQ ID NO: 488646 - DNA, 1547 bp, Homo sapiens
tgctggctgctcgccgtcccgagctcccgacgctcagacgcgcctctgagcacggggagaggggacccgggaggaggtcggggagggagtcgtggaagaggtgctctttgagctgaacctggaagaccccggcacaggggatccctgggcagactcccggaggctgcactggcaggaccccctgaaggcctcagctctggcttgccctggagctcagggcctacggacgacgagggacgaggagcccgtgtctctcggatggagtgcgggggggctggcaccagcacccttcttgctgtgcccctggggtggagagcttggggcttccttggtcgcacccaccacctgcctgcccactggtcagccttcagggaccctgagcaccgcctggtctctttcctgtggccagcccctgggaggctgtggcgtgctgggtgtcggcatctggctggccgccacacaggggagcttcgccacgctgtcctcttccttcccgtccctgtcggctgccaacctgctcatcatcaccggcgcctttgtcatggccatcggcttcgtgggctgcctgggtgccatcaaggagaacaagtgcctcctgctcactttcttcctgctgctgctgctggtgttcctgctggaggccaccatcgccatcctcttcttcgcctacacggacaagattgacaggtatgcccagcaagacctgaagaaaggcttgcacctgtacggcacgcagggcaacgtgggcctcaccaacgcctggagcatcatccagaccgacttccgctgctgtggcgtctccaactacactgactggttcgaggtgtacaacgccacgcgggtacctgactcctgctgcttggagttcagtgagagctgtgggctgcacgcccccggcacctggtggaaggcgccgtgctacgagacggtgaaggtgtggcttcaggagaacctgctggctgtgggcatctttgggctgtgcacggcgctggtgcagatcctgggcctgaccttcgccatgaccatgtactgccaagtggtcaaggcagacacctactgcgcgtaggccgcccaccgcccgcttctctgccaaaaggacgcccacggggagatggccgcacccacagctgcctttcccaccaccagcctcggtgctctgccccatgctgggaggagggagggagggacaggtgcctggagcccccggaaccctgtttctggaaggccctggctcaggtggcttcagggcctccggaccccccctgggaggggtggccacgtgctggctgcggaacccagggcaggggtgggaggggcctccagcactttttatatttacgtattctccaaagcagtgttcacacgggagccagcctgtggcccccagcctcctggaaaacaggttggcgctggaggagccgggtcttggcatcctggaggtggccccactggtcctggtgctccaggcggggccgtggacccctcacctacattccatagtgggcccgtggggctcctggtgcatcttaataaagtgtgagcagcaa

SEQ ID NO: 488647 - DNA, 188 bp, Homo sapiens
gagcgagcctgatctatgcgaataggctgcgtctgatggaacgtctcatgtcattgcaatatcactaggcgagacttgataagactcattatgactagtactccgcagactccttcctgtcgttattccggtggcgaattctgacagatagctgtgtcagtcccgttacattttataatagaaaagct

SEQ ID NO: 488648 - DNA, 430 bp, Homo sapiens
ccgcttgacgtttgccgtgacgcagtcgaactaatccggcgtgcgcgcgaaagcgtagcgcaggtagcgggcgagcttcaggctttcgggggtgcgatgcgcctcgaccagttcggcgaaggccgcgcgaatccgcttaccttcggcataggaaaagccgtccaggaagttgccgaaggcgctgctctcggaccagcctagcagctcgtcggcgctgccatgcgtcaccaccagggtccgcagctcgctgcgataatcgacgaatcccgtctgatcgaacaatgcacgcagctcgtcgtcggtcgcggcgtgaacgccatgagcggtcagtcgcccagcgtcgagcccggactcggccaccgcgcgccgcagcaggagtcgggattggtgcggcgccgtcgggtcatgaatggtgagcccgatgcggccg

SEQ ID NO: 488649 - DNA, 1249 bp, Homo sapiens
tttttgagacggagtctcactctgtcgcccaggctggagtgcagtggcacgatgtctgctcactgcaagctccgcctcctgggttcacgccattctcctgttgctgtgccccaactgggaggctgtggcgtgctgggtgtcggcatctggctggccgccacacaggggagcttcgccacgctgtcctcttccttcccgtccctgtcggctgccaacctgctcatcatcaccggcgcctttgtcatggccatcggcttcgtgggctgcctgggtgccatcaaggagaacaagtgcctcctgctcactttcttcctgctgctgctgctggtgttcctgctggaggccaccatcgccatcctcttcttcgcctacacggacaagattgacaggtatgcccagcaagacctgaagaaaggcttgcacctgtacggcacgcagggcaacgtgggcctcaccaacgcctggagcatcatccagaccgacttccgctgctgtggcgtctccaactacactgactggttcgaggtgtacaacgccacgcgggtacctgactcctgctgcttggagttcagtgagagctgtgggctgcacgcccccggcacctggtggaaggcgccgtgctacgagacggtgaaggtgtggcttcaggagaacctgctggctgtgggcatctttgggctgtgcacggcgctggtgcagatcctgggcctgaccttcgccatgaccatgtactgccaagtggtcaaggcagacacctactgcgcgtaggccgcccaccgcccgcttctctgccaaaaggacgcccacggggagatggccgcacccacagctgcctttcccaccaccagcctcggtgctctgccccatgctgggaggagggagggagggacaggtgcctggagcccccggaaccctgtttctggaaggccctggctcaggtggcttcagggcctccggaccccccctgggaggggtggccacgtgctggctgcggaacccagggcaggggtgggaggggcctccagcactttttatatttacgtattctccaaagcagtgttcacacgggagccagcctgtggcccccagcctcctggaaaacaggttggcgctggaggagccgggtcttggcatcctggaggtggccccactggtcctggtgctccaggcggggccgtggacccctcacctacattccatagtgggcccgtggggctcctggtgcatcttaataaagtgtgagcagcaa

SEQ ID NO: 488650 - DNA, 218 bp, Homo sapiens
ttgccgccatggggggaggctggctgcggattcgtccacctggctctcgcagtgtgtgcctgtgtagccatggagcacaggcacattgagaagctggtgatgccatccacgcagcgacccatggtggcatgggtcaggggagcagtcgtccacgtttgcgatcacacaggtgtgccctcaaagccctcggcacaggggcactcgtagccatcgggctg

SEQ ID NO: 488651 - DNA, 1226 bp, Homo sapiens
  misc_feature (38)..(38): n is a, c, g, or t
gagcaggccgtaaagctgcggcggcggttcgcgtttcncgtgtccgcttgactgacagctgcgcggcgggagcgggcggcgcgagcgggaggcggcggcgcagagcttggggcttccttggtcgcacccaccacctgcctgcccactggtcagccttcagggaccctgagcaccgcctggtctctttcctgtggccagcccagaactgaagcgctgcggcatggcgcgcgcctgcctccaggccgtcaagtacctcatgttcgccttcaacctgctcttctggttcttcctgctgctgctgctggtgttcctgctggaggccaccatcgccatcctcttcttcgcctacacggacaagattgacaggtatgcccagcaagacctgaagaaaggcttgcacctgtacggcacgcagggcaacgtgggcctcaccaacgcctggagcatcatccagaccgacttccgctgctgtggcgtctccaactacactgactggttcgaggtgtacaacgccacgcgggtacctgactcctgctgcttggagttcagtgagagctgtgggctgcacgcccccggcacctggtggaaggcgccgtgctacgagacggtgaaggtgtggcttcaggagaacctgctggctgtgggcatctttgggctgtgcacggcgctggtgcagatcctgggcctgaccttcgccatgaccatgtactgccaagtggtcaaggcagacacctactgcgcgtaggccgcccaccgcccgcttctctgccaaaaggacgcccacggggagatggccgcacccacagctgcctttcccaccaccagcctcggtgctctgccccatgctgggaggagggagggagggacaggtgcctggagcccccggaaccctgtttctggaaggccctggctcaggtggcttcagggcctccggaccccccctgggaggggtggccacgtgctggctgcggaacccagggcaggggtgggaggggcctccagcactttttatatttacgtattctccaaagcagtgttcacacgggagccagcctgtggcccccagcctcctggaaaacaggttggcgctggaggagccgggtcttggcatcctggaggtggccccactggtcctggtgctccaggcggggccgtggacccctcacctacattccatagtgggcccgtggggctcctggtgcatcttaataaagtgtgagcagcaa

SEQ ID NO: 488652 - DNA, 146 bp, Homo sapiens
catgatgtggacgacgggactcgttttctcttcttcttcccaaaaaacttcttaaaagttttgaatttagattttttctttcctgtgctgatccatccccaaggccattctgcagccctccccgaaggcttacatgtccactcaac

SEQ ID NO: 488653 - DNA, 1512 bp, Homo sapiens
  misc_feature (18)..(18): n is a, c, g, or t
  misc_feature (20)..(20): n is a, c, g, or t
  misc_feature (22)..(22): n is a, c, g, or t
ggtacggtcggaatttangnanatcctgctctgggcagaagggcaggacagggccctgagtaacggtggcctggggtcagagccaggttcagctgcgaggctgctggtggctgtggagagcttggggcttccttggtcgcacccaccacctgcctgcccactggtcagccttcagggaccctgagcaccgcctggtctctttcctgtggccagcccagaactgaagcgctgcggcatggcgcgcgcctgcctccaggccgtcaagtacctcatgttcgccttcaacctgctcttctggctgggaggctgtggcgtgctgggtgtcggcatctggctggccgccacacaggggagcttcgccacgctgtcctcttccttcccgtccctgtcggctgccaacctgctcatcatcaccggcgcctttgtcatggccatcggcttcgtgggctgcctgggtgccatcaaggagaacaagtgcctcctgctcactttcttcctgctgctgctgctggtgttcctgctggaggccaccatcgccatcctcttcttcgcctacacggacaagattgacaggtatgcccagcaagacctgaagaaaggcttgcacctgtacggcacgcagggcaacgtgggcctcaccaacgcctggagcatcatccagaccgacgtgaggcgtgggcaggtgggcggggtcggcgggtgccccctcccctcctgcctcagcccgacctgagcttgacccccagttccgctgctgtggcgtctccaactacactgactggttcgaggtgtacaacgccacgcgggtacctgactcctgctgcttggagttcagtgagagctgtgggctgcacgcccccggcacctggtggaaggcgccgtgctacgagacggtgaaggtgtggcttcaggagaacctgctggctgtgggcatctttgggctgtgcacggcgctggtgcagatcctgggcctgaccttcgccatgaccatgtactgccaagtggtcaaggcagacacctactgcgcgtaggccgcccaccgcccgcttctctgccaaaaggacgcccacggggagatggccgcacccacagctgcctttcccaccaccagcctcggtgctctgccccatgctgggaggagggagggagggacaggtgcctggagcccccggaaccctgtttctggaaggccctggctcaggtggcttcagggcctccggaccccccctgggaggggtggccacgtgctggctgcggaacccagggcaggggtgggaggggcctccagcactttttatatttacgtattctccaaagcagtgttcacacgggagccagcctgtggcccccagcctcctggaaaacaggttggcgctggaggagccgggtcttggcatcctggaggtggccccactggtcctggtgctccaggcggggccgtggacccctcacctacattccatagtgggcccgtggggctcctggtgcatcttaataaagtgtgagcagcaa

SEQ ID NO: 488654 - DNA, 1199 bp, Homo sapiens
taaccatctttatccaaatttatcatatggatgggtaggactaacaggcttttaaaaaagcgtggcttaaacttggagtctcaagctacaagtgctgtggggcagccgggtcttcccagcgtgagggttataacttggtttattggcctccagttattccaaaagtgcttattaaagtgaaagtcccaggaacagtgttatatttaagttcaccttggcttttaaacaatttggtttggtaatcaaggagtaattcaggatgaatcattttggactaagggatagccgaaggccaggctttaaatctcataaataggataaggtcctctctttgggtcttatggacaacaagtgagaatactcgtggtgcatttcaaattgcactccgattagtgcgtggggttctaattcacataagcacaataaggggttcaatttataacttcataaacaaacttataatataataatttaccttagcagactatgcaaaagcttaatactggggtgacttactttcttaaagctaataatataaaactaaatatgtatcttaaaaatctataataaaacattagaacttcaagatatgggctaaaataagggcagatgagtccattggctattgtaagatgtgtaaaagaagcaaggctacagaaggactgcttgcggcacaccttacgccagtgcacaacagacaagaacgcaagaaataagaaggacaggagaaagacgaagaggcacaaaataacgaaacaccacacaatagcggcaaccacagggacacaggcacacacagcccggacaacccacccgggcaataacacatcacgagtaacgataatacctataggagaaaacacaccaagaagaacaaaaagcagcacaggaagaggacacgaaacagaagaggcgggagccaagacatacatcacagacagagaacacaagagtacacacgcaaacggatggtgacaaaagagcgaccaacggcgcaacaacatacaggacggcagaccaaaaagaagacgcaagtgcgagaaagcaaacgtaatcgagagaacaagcatgctggggcaagacacgaacaagattaacaggtgaaagaaaaaagatatacgaaaaagcaaagaggcatcgtacaacgaccaggtagcgatcttgatagtcgctcgacatgtactgtatgtatgattaat

SEQ ID NO: 488655 - DNA, 2717 bp, Homo sapiens
  misc_feature (3)..(3): n is a, c, g, or t
  misc_feature (6)..(7): n is a, c, g, or t
  misc_feature (11)..(11): n is a, c, g, or t
  misc_feature (266)..(267): n is a, c, g, or t
  misc_feature (289)..(289): n is a, c, g, or t
  misc_feature (301)..(301): n is a, c, g, or t
  misc_feature (304)..(304): n is a, c, g, or t
  misc_feature (316)..(316): n is a, c, g, or t
  misc_feature (342)..(342): n is a, c, g, or t
  misc_feature (363)..(363): n is a, c, g, or t
  misc_feature (366)..(366): n is a, c, g, or t
  misc_feature (378)..(378): n is a, c, g, or t
  misc_feature (390)..(390): n is a, c, g, or t
  misc_feature (407)..(407): n is a, c, g, or t
  misc_feature (435)..(435): n is a, c, g, or t
  misc_feature (441)..(441): n is a, c, g, or t
  misc_feature (487)..(487): n is a, c, g, or t
  misc_feature (526)..(526): n is a, c, g, or t
  misc_feature (554)..(554): n is a, c, g, or t
  misc_feature (576)..(576): n is a, c, g, or t
  misc_feature (612)..(612): n is a, c, g, or t
aanacnnatcngtgcgcaggcgcccatcttagttggtcttctagtccggtaaacagagggcctgcccccgacagcttctgcttccgggtcacgccttgacagcggctttcaacccccacctcagcccagcaattcggcagtttggagcatgtgaacaccttgagccttgatgagttccagtatgtggtatattatgcagagcattcagagcaaatactctctctccgagcgcttaatccgaacaattgctgccatccgttccttcnnacattataatttagattacctnatcatatttttnttntattttaatttnacttattttacacttaatccctttcncttttcttttttttttttatnttnttattttttttntttacttttttnaaaatgattttattttntttctctttatttttatatacctaatanctcttnattatttttcatataaatattattcttttttttatttcctattttntttttttgcaaacctccatattctttttattgcaatatntataccccactttacttttcatcctttnataacaatgtcttatttttttntttctctcctatagattttttcctcttttatattcnctttattacaacaatgatacaccgctcagctgggctgccatgaagggaaatcttgagagtgtcagcatccttctggattatggcgcagaggtcagagtcatcaacctaataggccagacacccatctcccgcctggtggctctgctagtcaggggacttggaacagagaaagaggactcttgctttgagctcctccacagagctgttggacactttgaattgaggaaaaatggcaccatgccacgagaggtggccagagacccgcagctatgtgaaaaactgactgttctgtgctcagctccaggaactctaaaaacactcgctcgctatgccgtgcgccgtagcctgggactccagtatctccccgatgcagtgaagggccttccactgccagcttctttgaaggaatacctgttacttttagaatagccggagaagatgtttgcaccatcgtgcaggcagctctgggtgaggttgtccctgcagtactccttgtcacagaaaacagaaaaacagttgttcctgttgtgtggtttatagatttcgaagcaacatgtcacaacaataacctccatagcacctccccttcccaaaccaaacaacccaacaaaaaaaatccctcacttttgttttctgtttattgcttacctggctttttatattgcattttgcaaaagaagaggtctccctcaatcctcccctttagggaaggagtcaacagtgtaactaaatttctctaggaagatggaaagtacttaaataatgtgtgtgtggttttcctttggggacgtggttaacggtccagaagaatcccttctagaaagcattttaggccagccatggtggctcacgtctgtaatcccaggactttgggaggctgaggcaggtggatcacctgaggtcaggagttcgagcccagcctgaccaatatgatgaaaccccgtctctactaaaaatacaaaaattagctgggcatggtggcatgcgcctgtaatcccagctactcaggaggctgagacagaagaatcgcttgaacctgtgaggcagaggttgcagtgagccaagatcgcgccattgcactccagcctggacaacaagagcaaaactgtctcaaaaaaaaaaaaaaaaataaataaaaccctttttattggcgtctgggaacaaactttagggaaattcccaattttcggttaacagccaattgtggtgtctcccaaagattgaagacattcctatataaccctcaaatgtggttgcaggatctcccagaaaactgtgggcactggattgacaactcccttacgtgtgcccagtgtcttccgtgggggccattttggccaagggaccgggaacctcttttccccctttcatccgaagggggacaccacaggcaaggttctatggccctcctattatctgtgtttggggttttgttcgccccacaagggggtctcaccaaggttaggcctcctggagacattaccccgaaaggagcgctcctgggtaaactacaccgcggtgccatacagataccgtctccttgagatcttacaacagggtccctgaaagagactctccctctttagaaaagtactccctgtggaagacaaaccctcttttctcgctgtggtgacaatgatggccaacgctgattttgattacaccatcagttctcgctgtggtgaagaaacactaccagagtggtggtgtgttccacattacaatggggggagagattaccacccccaagggcgccagaagtgttcgccctatatagacaccatttaaagcgggccttggttggtgtgtactacccccaagcactaggtgggtaagaagagaaacgactcattatagtggagggacctgatgcgaggcttgacccgcatttatctgcccccccaaggtgtgggagatctcattgctacaaatatccccccaggggttgtcacataggatggtttaccacaccttgtgtgagtttaatgatgtaggggaaagatttaatgatttttcttcctgtttcaccaattgaggttccgtggcgaccacccatgttggggcatgttctatattgggagcattttatatacaccaagtcaaca

SEQ ID NO: 488656 - DNA, 1242 bp, Homo sapiens
  misc_feature (38)..(38): n is a, c, g, or t
gagcaggccgtaaagctgcggcggcggttcgcgtttcncgtgtccgcttgactgacagctgcgcggcgggagcgggcggcgcgagcgggaggcggcggcgcagagcttggggcttccttggtcgcacccaccacctgcctgcccactggtcagccttcagggaccctgagcaccgcctggtctctttcctgtggccagcccctgggaggctgtggcgtgctgggtgtcggcatctggctggccgccacacaggggagcttcgccacgctgtcctcttccttcccgtccctgtcggctgccaacctgctcatcatcaccggcgcctttgtcatggccatcggcttcgtgggctgcctgggtgccatcaaggagaacaagtgcctcctgctcactttcttcctgctgctgctgctggtgttcctgctggaggccaccatcgccatcctcttcttcgcctacacggacaagattgacagttccgctgctgtggcgtctccaactacactgactggttcgaggtgtacaacgccacgcgggtacctgactcctgctgcttggagttcagtgagagctgtgggctgcacgcccccggcacctggtggaaggcgccgtgctacgagacggtgaaggtgtggcttcaggagaacctgctggctgtgggcatctttgggctgtgcacggcgctggtgcagatcctgggcctgaccttcgccatgaccatgtactgccaagtggtcaaggcagacacctactgcgcgtaggccgcccaccgcccgcttctctgccaaaaggacgcccacggggagatggccgcacccacagctgcctttcccaccaccagcctcggtgctctgccccatgctgggaggagggagggagggacaggtgcctggagcccccggaaccctgtttctggaaggccctggctcaggtggcttcagggcctccggaccccccctgggaggggtggccacgtgctggctgcggaacccagggcaggggtgggaggggcctccagcactttttatatttacgtattctccaaagcagtgttcacacgggagccagcctgtggcccccagcctcctggaaaacaggttggcgctggaggagccgggtcttggcatcctggaggtggccccactggtcctggtgctccaggcggggccgtggacccctcacctacattccatagtgggcccgtggggctcctggtgcatcttaataaagtgtgagcagcaa

SEQ ID NO: 488657 - DNA, 208 bp, Homo sapiens
  misc_feature (49)..(49): n is a, c, g, or t
  misc_feature (54)..(54): n is a, c, g, or t
  misc_feature (101)..(101): n is a, c, g, or t
  misc_feature (177)..(177): n is a, c, g, or t
gaatcccactttgacatatcgacgatgagaataattaatattcaaatancctgncctatgtcaggcactgtgtcccacaaactagcttacaatggggctanactgttgtgccaccgggttttacatgtgaagaaaccatggtttgcagtgagccaagattgcgccattgcactccancctgggcaacagagcaaaaacttcattttat

SEQ ID NO: 488658 - DNA, 148 bp, Homo sapiens
ccggggatacaaccgccgccgcctcccttacctgccgggcccgacccgggggcaggggcggagaccgggaccgccccagtgggaccagggcccgcgcctgagccgagcggacggcaggaggaggcggcggcggcgaccgcggcggccg

SEQ ID NO: 488659 - DNA, 614 bp, Homo sapiens
  misc_feature (115)..(115): n is a, c, g, or t
  misc_feature (233)..(233): n is a, c, g, or t
ttaacagatgtcattgtaagagccatcaaaaagtcctgacaatctcctaaaggggccgagtgcaccagttctcttggagcagtcatccatctctcagtggcgagtctcgtcaagnaagcttcgtatgtggcgccagatgggtccagaagtaggcccgctccttcagaagtcaggcaggcaaggcagaggtaacagacagtctaagctctcaccctcctcccgtagagcttgancgctcgcctggacttatcccctgccagtctctccttgaactcttacagcgtgactctcactccagtgtcgctctggatctgcagggtcagctctatccctctgtgaatacagtgggctactctttgagagtcttgttccaacagtccacggtacgtcagtgctggggtcaccagctgcagtccactgggctgcagagcgcttctgtcacctgactaggtgttcatgttgcagtcaatagaacaggcttctagcaccttgtcagcccttccaccatctgtgcctttgtagcccagctctgtcagggcctcagacagagccctgcagttggccaccgcctggtgttgatcaactttaaattccagagtcacagcttgcttcag

SEQ ID NO: 488660 - DNA, 919 bp, Homo sapiens
cagcggctgccggtgctttaatactttttagaggccctaaaaatcacaaacatatgctcaactcactgtctacagttcttataactgccaaaatctattttcttcctcatacctgacgcatatagccgggtcttggcatcctggaggtggccgcaatggtcctggtgctccaggcgggcccgtggacccctaacgtacattccatagtgggcccgtggggctcctggtgcatcttaataaagtgagagctgtgggctgcacgcccccggcacctggtggaaggcgccgtgctacgagacggtgaaggtgtggcttcaggagaacctgctggctgtgggcatctttgggctgtgcacggcgctggtgcagatcctgggcctgaccttcgccatgaccatgtactgccaagtggtcaaggcagacacctactgcgcgtaggccgcccaccgcccgcttctctgccaaaaggacgcccacggggagatggccgcacccacagctgcctttcccaccaccagcctcggtgctctgccccatgctgggaggagggagggagggacaggtgcctggagcccccggaaccctgtttctggaaggccctggctcaggtggcttcagggcctccggaccccccctgggaggggtggccacgtgctggctgcggaacccagggcaggggtgggaggggcctccagcactttttatatttacgtattctccaaagcagtgttcacacgggagccagcctgtggcccccagcctcctggaaaacaggttggcgctggaggagccgggtcttggcatcctggaggtggccccactggtcctggtgctccaggcggggccgtggacccctcacctacattccatagtgggcccgtggggctcctggtgcatcttaataaagtgtgagcagcaa

SEQ ID NO: 488661 - DNA, 87 bp, Homo sapiens
  misc_feature (42)..(42): n is a, c, g, or t
gcccttgtgcattatggttgataaaagcattgatttactgcnttaaaatcactttactttatccaatttttactgaaaatattatgt

SEQ ID NO: 488662 - DNA, 633 bp, Homo sapiens
gcactagaatggagcgtggatcggaagtagaagggtgatacttcagggactaaaaagaagtcactgaatcttcaaaaggtggtacatagtaagatgatacaaaaggatcaaaggtataagaattcccggtccgacggagagaggtctatgtcatgagagtagtcagatcaggcgaaagagatcgttgcaagaagtgaagagagaccgaaaatcagacaggaaagacaaaagggttatgggagaagcaggcttgcttagccattctttgagtagaagatgtcttgataagatgaaggtatgagctttccttgtaaggaggatgctggcttaagaatggatgtgtggaagatctgtttggaacatacgagtactgttgtttaccagacattcttggtactttgtgcataacttgtgtacagagtgatctatcagaatgatgtgaggttccaaacatctgtactgaatgatactagattaagatcaagattagcatcccttgtcatctgttttaaaatatgctatactcttcaataagaagctggtattaataggcaaatcttaagtctggtccccttctaatctgttaatacattgcgtggcaaacaaatgggggtctgtcgttaaacaaccggg

SEQ ID NO: 488663 - DNA, 303 bp, Homo sapiens
ccgcgcaacgcgatcgagtttcctgactaccgatacatttctaaaatcaaccccgttcaatgtgcagacaggtcagtgtgggagctggctgctggaatgccggacctcggtctttcagtcaggtcgcggtgatgctatcgcaggcaagccagctcccacatttgatcgagcacattcatacatttgaggccattttaagactgatgaacctgcccttctttgcccggcgcctgctgcgccccttgctcgacccctaccgccgctttcgccatgccaagctgatccacgccgcgcgcgtatcgg

SEQ ID NO: 488664 - DNA, 91 bp, Homo sapiens
agcgcctcggctccagcgcatggccttccaggagttcttcgttggggaactggaggatgaacgggcggagggatgtctgggtagctatgga

SEQ ID NO: 488665 - DNA, 244 bp, Homo sapiens
tatctagaggaccccagcgccgagcaatatagacatagcgaaggttggaaatcttctctccctcagtgatgactcgagcttctcctttcttatagacgtccgggaggggcttgaccgggccgggtcagctgggtggccggtttcagttcttcagcagaactgtctcccttctggggggccgagggctcccgggggaagaggatgagttgggagcgatactccgcggggtcccggagctcgaatt

SEQ ID NO: 488666 - DNA, 192 bp, Homo sapiens
  misc_feature (33)..(33): n is a, c, g, or t
atccaatggaatggaatggaatggaatggaatngaatagaatagaatagagtggaattgaatggaatggaatgctttcaaaccgaatggaatggaaaggaatggaatcaacacgagtggaatggaatggaatggaaaggaatggaatggaatggaatgggtacggaatagaatggaatggaacgaaatggaa

SEQ ID NO: 488667 - DNA, 451 bp, Homo sapiens
  misc_feature (33)..(33): n is a, c, g, or t
  misc_feature (68)..(68): n is a, c, g, or t
  misc_feature (230)..(230): n is a, c, g, or t
  misc_feature (294)..(294): n is a, c, g, or t
  misc_feature (302)..(302): n is a, c, g, or t
agaaaattagctgggtgtggcaccacgcatctntagtctcagttgtacaggaggctgaggccagaggntcacttgagcccaggagattgaggctgcagtgagccatgattgcagtaagatgtgatcacatccagttacatttgattttcagataacagaagtttagtggaggctgggggcagtggctcacagctgtggtcccagcactttgggaagctgaggcaggtggntcacctgaggtcgggagttcgagaccatcctggccaacacggtgaaccccatctctactaaaantacaaaantgagccgggcgtggtggcgggcacctgtggtcccagttactcgggaggctgagacaggagactggcatgaacccaggaggtggagcttgcagtgagccaagttcacgccactgcagtccagcctgggcgacagagcgagactctgtctc

SEQ ID NO: 488668 - DNA, 100 bp, Homo sapiens
gcgctggatgccactgcttcagcatcatggttactccggtacccagcaccccaagccgccagcgtgccatgtcatgcacctttcgtcccagcggctagat

SEQ ID NO: 488669 - DNA, 508 bp, Homo sapiens
ggatcccctgttctcgcccaacactctgggaggctgaggtggaaggattgtttgagcttttgagtttgagaccagcgtgggcaacatagtgagacctctctacaaaaatagaaaattagctgagtgtcgtggcacatgcctgtcatcttagctactctggaggctgaggcaggagcattgcttgagcccaggaggtcaaggctacagtgattgcaccactgcactccaactatgatcatggcactgcacttcagcctgggtgacagaatgagaccctgtcagaaaaaataaataaaaatttaaaaaataggggtgggcatagtgcctcacacctataatcccagcactttgggaggccaaggagggtggatcacctgaggtcaggagttcaagaccagcctgggcaacatggcaaaaccccatctctactacaaatacaaaaaattagctgggcatggtggtgcacgcctgtagtcccagctactcaggaggctgaggcgggagaatg

SEQ ID NO: 488670 - DNA, 451 bp, Homo sapiens
  misc_feature (8)..(8): n is a, c, g, or t
ttatcacncatcgatcacatacgacgaattctggccattgatacacgtatcaatgctctcatcctgttcatcccgtggtagcccccctcaggcatgcaggaggtgtacctcgggacatggcctcttctgctgttgttccaggcgctggggaagcattctcccgctgaggctcacgggaagctctttctgctcccttaacttccattggctcctcagtgaagtggctgggggggatcacgcatccctgcgatcgtgtctaagaatggcatcggtggcctacaggcatgtgctctcatgtagcacctagtacgcctcagtccaattatacgtggtcatgcagctcaccaaggagggattcacccaaaaagacatacaactaattcggccatagataacagcagctaagtccatctgctgtactgcctagcagtgcacgttaagggccaggcaa

SEQ ID NO: 488671 - DNA, 195 bp, Homo sapiens
  misc_feature (104)..(104): n is a, c, g, or t
  misc_feature (120)..(120): n is a, c, g, or t
ctcgtaccgcaaggccttccgccgctcgtcgagtacgacatcgatgccatgccgacggcccgtcgcgctgacgtcgtcaaatggtggatcgaggacagcattcnccgcaattcgtctcgngcctacatcgaaacatgccttcgttcggcaggaatcgactttttcgaacagacgcgcatctggcctgccccgatc

SEQ ID NO: 488672 - DNA, 350 bp, Homo sapiens
  misc_feature (67)..(67): n is a, c, g, or t
  misc_feature (98)..(98): n is a, c, g, or t
  misc_feature (194)..(194): n is a, c, g, or t
gtaatttgatacaatattttaaataattttgtgcatgaaacaaagtttcgactgcattttgactgtnatttctggcatgagatcagttatggaatttnccacttctagcgtcatgttggcattcagaaattttgaaattttggagcattttggattttcagattagggatgctcaacctgtatatatatttttnaatcgacgtgaaattcacgtaacatagaattaaccattttgaagtgaacaatttggttgcattcactgatgttgagcaaccaccacctttaactatttccaaaacattttcatcactccaaaataaatgcctgtacacactagcagtcactcccta

SEQ ID NO: 488673 - DNA, 106 bp, Homo sapiens
agcggatatgatccgctcggattcctgggtctggactgctgccagacccgccgggtgttctgcccgtgtcgtcagccggtggccacacaatggagcgcagttggat

SEQ ID NO: 488674 - DNA, 1380 bp, Homo sapiens
  misc_feature (1)..(1): n is a, c, g, or t
ngggggacgctccatattggggcgccagatgtctttgtggcgcattagtttgctgtcactcctccgcaccactatagagggtttccaaagtggatgtctcttatgagcgcgtctgaacgcgctctccccccaagtgttgccgcctgtggggggcacttatctcatatggggtgtggtgccccaccccaactatattcttctccgctggggtgaaagactgctttctgcggcggggtctcttctttgtagtgtagatggaagacattggggggggttttcctgcccccctggtggttgggtgcgccccctaagcccttggtgtgctctcttggaaaacctgtcctccttgtagtgccccgtttcacacgggggttggatgtccccgcgccccccggccctttcggggggcttccgcccccagaatggttgtgctcgggggggagtttacccacggtagtccgctgttgtgggggcttacgccccagacaataccctccgtcccctcgtggagttggagttttgtcttctaaaaggggcgccccctttgctttatgggaccccctacgaagttttctctgggggaaaaatcttttctctaaggcgcttgtatattctgtgcgcccccccgttctattaatgcgccccctttgtgcgcgctagatctgcgtaatcctttgaatgtccccaccaatatgcgcatggatgacccagttctgtggcgacacaaccgcacacacacttggcttcgtaggagttgacacctcgggtgtccctataggggacaccgcctctgtgacacacgagagagagacttggcctctatacgctaagcagcgagacctcggagtttttttttcttccctcagagttctcggctcggctttcccacaaagtgtgtggtgagacacctctgtggctaagattcacactctaacacgctctgtgtctggattggtccactttccgcgctctttgtaaatataagatgtgggttctgtggtgtaaccacagaataactgttataatacaaaacaccgctggcgcttgcccattccaagaagaatggagatcttgaccgcattctcacactttcttgtgtgcccacgagagagaagaagaagaatccatgggttattagaacccagcgccccatgtgaaagagcctgcctttggtccaagagctggagagcacgctttgctcaaggagaattaattcaccgaaggtgagcccctgtctttttgagcctggcaccacagaaggagaaatgtttggctgtgaaatgtgagcccaatataagaagaagcccctattttttcacgtcaagtccttgaaccccggtaagtaatttaccgagaattaaaatgtgtttgtttaatgga

SEQ ID NO: 488675 - DNA, 1081 bp, Homo sapiens
tacgagaggggggcgggcgagttatctcgcgctcgtcttttgagtgacccgaactgcgtctttcgcaataaccgattttggagtttcccttttggcccacgtgcccaagattggcctgacagttaatcatgccttctgtgccccgtttcgcggtttccccacatgccaccagtcaaaccatctgcgaagactcactattcgtcagggtatattgctataacaggcgcatcattgtgaacacccagcgtcaatacagccgcaccgtacagggcatatggctagataccagtacgtacgcggctgcgtagttcatatctgctcctgggatcttattgaagtttcaaagctttggaagtatactcgtgtgctttgctattgtttacgcttcctggtattggggactcatgagagagcgtcgaggtctagagcttcgtgcaagtgagaagacactacacggttgcagctgccacagtgaagaacccaagctcctgtcaaagttgtgaatgcgactttggatgagattaagaaggcccagtgcacgcgttggtcttgaagatgtggcagtgtgtggatttgaggacctctgcagaccatcagatcaaaggagggagagctcttttggctgttttgctttcttccttgtttacttacaagcattttgctttttcttggaatgtaattttcctatggcatgcttaactggccgcacatcgtgtaacctgtctggtgagcaaccatacaattgggatgagttctaggtacatgtgtgttgctgactttagggggtaaacaactttgcttataatacagtctctgccatcagatgcatgtcgacctcttgcaggggcccagagtggtctgtaggaaggcaaagcgttcaagctggccatgggggtcccaaacagtcattccaggcttagatgatgacatagccctaggtcatcagagcccagactccacagaagattgaaatcagagcttccgtcttcgttatggataaatttcatttgcgtgggaaaagaatgctgaagccagtggatgagaattctaaatcgtcgccaacgggttggagtacgctata

SEQ ID NO: 488676 - DNA, 232 bp, Homo sapiens
tcagaaaggtgacaggcatggattagcagggcctgtgggcaccaggaggatttgtcctgcaggaggtgggagccactggggggtccagggcacaggaggaatgggtcttgacgtccaactgtctttaaaacctaagtcaggccaggcgcatcagctcaggtttgtaatcccagcactttgcggggctgaggcaggaggattgcctgagtccaggaggtcaagaccagcctgg

SEQ ID NO: 488677 - DNA, 356 bp, Homo sapiens
attagaggatccgcccaggtagatttgtgaagagtgctctgcccggcgcgacccgtctgggaactgaggagtgtctctgcccgccgccacccgtctgggaggtgaggagcgtctctgaccggctgcccgtctgagaagtgaggagcccctccgcccggcagccaccccgtctgggaagtgaggagcccctctgcccagccgggtgtggtggcgagtgcctgtaatcccagctacttgggaggctgaggcaggagaatcgcttgaacctgggaggtggaggttgtggtgagccgagatcctgccactgcactccagcctaggtgacagtgtgagactcttgtctaaaaaaaaaggaa

SEQ ID NO: 488678 - DNA, 887 bp, Homo sapiens
gtccccgggaggcggaggttgcagtgagccgagaccgcaccattgcactccagtctgggcaacagagtgagattccgtctcaaaaaaaaaaaggaaaaggaaaaaaaaatagcataatacctcttccttgtttcaaccgccatgaaatttctgaacactccaaatccagtggaataatccaaaacaaaatttctacagtctcaaatacattttactccttatagtactagtatacttaaaaagcctcagggttatatatcttctaacacagctacaattcagtgcagctacattacccacctatgttctctagttgagaacaataggcctatttcactgctgtgtagcctcagtgcctacacatgggtgccaaataactattcgtagaattcccctgatttggtaaaaacccattcgtttttgtttccaatggccaaaaatctcaaaaggctctgcattcatgtaatcctttgaaaactacattatccattgggattccacagtaatgactggctgggtgtgcttagtcacataccgtacccagtattataaaacgctcaatatggacttgatctacacaagcattccttccctttctacagttaattgttacccacttcatgggggtaatgtcccaaaaaggtatatataatagtttgagaagaatgtttcgaatcttgtgctaatcgaacatctggttatattgcccgcaaccttatattgtaagactagtctgcatgaaatatgtaggaggaactaagtggaattaatgtgaggtgcgaggatattgtgtccatgtgatgacatttgttgtgggtaggggtcacataagacaaggatttaaacggaggaggatagtaaaagtagggagagggaagaatgagagg

SEQ ID NO: 488679 - DNA, 173 bp, Homo sapiens
taaattaatattagtttcttgggtgaggaacctttatcagtaaggtaatttagccaccaaacgatccctgggactcgggtttctccatcgttggttccaacgtaatcaccaaaattacggccacatgccgattcttaaatcagatagttgctttgtctctcggttatataccc

SEQ ID NO: 488680 - DNA, 257 bp, Homo sapiens
cttgggtttttttgggcacctttttgggaaaacccagggtgaggttcaccctgtaagggctgggatgggttttgtgggcccaaggccaaacctttttttgggactgtgtggcccaaggagtttccatttagtgacaagtgccccccagctattgctttttgccttcccctggggcccctttccagggtggattttttttttttccctgcagtttcccaactgcaggtccagggcaggcaataaatatttgatggcca

SEQ ID NO: 488681 - DNA, 210 bp, Homo sapiens
ccggctaccgtgagtagtcaattaaaactagagggttaggagacaatacatgaaagcagaccaacaggacccgcgacacagttcgcgcaccaagtgtgaagagtaaaagaagacaggcttatcttagtggatgcgagggaatcatctgtggcagaaaattaattcataaagagcctgagcaaggatattcacgaccaaggaatgagatgt

SEQ ID NO: 488682 - DNA, 128 bp, Homo sapiens
gtattcggtattccccgcctcccgtgtttacccaggaagacactttggccaaaggccccttaaggcccggacccctaaagtccccttttcatggtttttcataggtttctcctctttcccccccccct

SEQ ID NO: 488683 - DNA, 183 bp, Homo sapiens
agatgcagtgagctgagaacacaccactgcactccagcctgggtgacagagcgagatccccccatctcaaaaagaaataataaaaaaaagaaaagaaactgatgaacggtcctctaaatgtgctgtaccagttttgcatccccattatcgatgaatgaaagtcccgtggacgccgtcggggcc

SEQ ID NO: 488684 - DNA, 263 bp, Homo sapiens
  misc_feature (101)..(101): n is a, c, g, or t
agcagtgtggaggttggctaatctgggaatattgtaagagagaggcaaagggaataggcaagaccaaatggccccagaggagagattgtgatgttctgaantagtcccccgctgtatagttggtattcatagctgggagaaggaggcagtgacggagccaaagagcatgatctttaagtgccgggaagattcaatgtccatagacataggataggatcaggcagtgcgttagtgcatccatgccatcatatgagtgatttgta

SEQ ID NO: 488685 - DNA, 1225 bp, Homo sapiens
acatgagaatcgcttgaacccaggaggtggagattgcactgagctgagatcctgccactgggctccagcctgggtgacagaatgagactctgtctttaaaaaaaaaaaaaaaaaaaaaattcacaataagtcctagggtaaagatgggggtacagaaaacaatttaattagaacaaaaacaactgtttcctttgccgtggtgatttcaagaagggcttagatctttctactcagcatccttttactaatgtgccctccatggggctctcaccccaaaattttcctttttatatagcttatttgggtaagtgcctccttaattattcctttaatagaaagccaccgggtgataagctacctacacatcactaccggaagcatttaatattattgccccagagtgtacgtggtttcagggccaaaagggcaaaataattttccaccaaaggtggtgctggtgttccactgtcagaatgcttgccacttaccacacggaatcgctgtgcatccgacagaggctgatggggcccattggggcacagcggattgtcagctcaaacaccgtcacgacagcgttgcccttggaaaggggatttcccagaacagtaaccgtgttctgtccttgatttaccagagtagctacattcctaggaaatccagggaccattaaaagctccccatgtgtaccccaggctgggtctcaagatcccaggcttcagaagcagatccaactggccttggggactcacaagagtgctggagcagtcatacgtggttgagcccacacaggcttggacttaaatgacagtactcattgaccgaattgaccgacctggggaaacattaagcaaggagccccagttttcttaccaagatgtggtatccaattaacaatagcccggggcgttgttggcaaatctcgcggtgaacctagaactactgggaaggcgatagcagaaggacctacttgtgcccaagaggattaagggccaaaaaagcgtagtacgagtcaaggacccacctttgggggtgacaagatagccgtctctcaaaatgatctgccccggaaaaagcgatggctgcttagaaccagcctcactattaaggggagggtgtcactaggagaaagggatggaaacaagccacgaggagcagacatcctacactgcggtagtagagagacaagtatatctaatctcttctgctgtctagagagctaaagagg

SEQ ID NO: 488686 - DNA, 766 bp, Homo sapiens
agcggatcccgtaccgggcctctcgaacgagtgtgcgcgcgaggcatagatgaggacctctggcgcgctctttccaagacctgggtgccaggactctcaggggggcctccaacaatgtactatggctgagagtttcgggcgggaaagatgtccctgaaggggaccaccgatgactcctggataagcggcaaagggctggtgtacattcatgcagacggacgactcgcttattcacttctgcgtggaaggacaggacgtccgggaacgtggaagacgacttgatcatcttccctgatcgactgtgagttcaatgcgggtgccgcatgtgccccagctgggagggtctagcgtgctgaagtatcagggcagggtccaagcaggcttttcttctggcatgcaggaatcccaaagacagaccaggatgaggacgcattgccgggagacgtcaacgagtatctgaacaacaccgccgatgcctggatgcacatggagggccagcggaagacagcggccacgaactctactgacggctagggcggtgagggtggccgtgcatgaggcctgatgggaaatgatgagccacagacatgctcatgcagaacatcggaccatgccggcctcgagaggactggagtagaggctggagggccctagacttggaccttggcctggacaacattaactggaggaagcagatggagcctccaagggaagcatgttcctcctccaagttacgctggatgccacagtcggcaagagagtaacc

SEQ ID NO: 488687 - DNA, 544 bp, Homo sapiens
aattaagggtatctcctagatagcagaacagaaactgagatggagaaggggagagtcaagatgagaacatcgggggagcggcctgggatatcccctctgtagcgaggacggtgtggaaaagatgcacattaccagaatcagagtaagggcgagagtccctggcatggtgaaggaggggggcctgttgaaggcacgtctccatgtactctcagaacctgagatgcagagaagagtagcatctgcaaaacctaaaaagaataggggctaggtacagtggctcacgcctgtaatcccagcactattgggtggcccaagaagggcagatcaccaggtcaggagatcgagaccatcctggctaacacggtgaaaccccgtctctactaaaaatacaaacaattagccaggcgtggtggcgggcgcctgtagtcccagctactcggaaggctgaggcaggataatggcgtgaaacctgggaggcggagtttgcagtgagccgagatagaaccccccctccagcctgggcaacagagcaaaacaatgtctc

SEQ ID NO: 488688 - DNA, 227 bp, Homo sapiens
gtctgatagtctgctcacgattacgttttgacgatgcaagttctcgaagaggaaaacacacagttaactaagatctggggtgaaaagaaggctgttcttgctggagatttaacttctttctgcagcatctatagctctggcacgaatttggaaatacaactgtttatattcttttttaacccaagtttattgaagactttgagtgcgtgggtgaactttcgttcagt

SEQ ID NO: 488689 - DNA, 150 bp, Homo sapiens
cgcggcacctgtactccggggtggcgctggggttggctccatgatcaagatctatgggggacgtcagagaaacggcttcatgcccagccacttcagccgaggctccaagagtgtggccgccgggtcctccaagccctggaggggctgaaa

SEQ ID NO: 488690 - DNA, 389 bp, Homo sapiens
gcccaattaactgataaggtactggaacaaacaatgtatgaagttcccaggatttttctcaaagagataacaacataaagccttgagttcatgcccagcatagcatcatatctaactataatgaaggatttagagccctgcacctggtaacgttgctttttgtaaccatttgtcttttaaattgtttatctctctgtaaccatttgcttcttttgattcttgcatgtttttacttctgtagaattattgtatttgagttcccctccccttcctaaaccaagatataaaagttaatcaacgcccttcctcggggccgagagaattttgagcgttagccatctcttcggcagccggcttaaataaaggactcttaatttgtctcaaaaaaa

SEQ ID NO: 488691 - DNA, 433 bp, Homo sapiens
  misc_feature (369)..(369): n is a, c, g, or t
tgaaactgagtctcgctctgtcacccaggctatagtgcagtagtgcgatctcggctcactgcaaccctgcctgctgggttcaagtgattctcctgcctcagcctcccgagtcattgggactataggcacccaccaccatgcctggctaattgttttgtattttttattagagatggggtttcaccatgttggccaggctagtcttgaattcctgacctcaagtgatccgccggccttggctcccaaagtactgggattataggcatgagccactgcacccagcctgggaattacattttagggcactgcaacgtaggcacagttactctttttcacagaagtttttctctcactttcaaacagataggntaatggattttcagtttatttaaggttaggggttaaaacttgccccatagggtgtgttcatgag

SEQ ID NO: 488692 - DNA, 125 bp, Homo sapiens
tcctcctgcacctccatcctgtggctgctattacctgcatgtgcactactgggcagggcaggagcaccgcaacatcgctaagaagtcacccgagtgaccttcagtgaatgcccagtcctcaggat

SEQ ID NO: 488693 - DNA, 362 bp, Homo sapiens
  misc_feature (304)..(304): n is a, c, g, or t
tgctctctctgtctccctgtgaggccgggcctcgggggtgcggggtctgggatgctccagtaccttgtgcgcgtgcgtttccggtggctgttggttccaggggtgtgctgtgtgacgcgcagggctaggtgcctccagcagggccttgctccggctgtttctaaactgccccacaggatgccaactgtgtggtgagcacgcacacacacccacgctcactcgccgcctcctcgcagaggaagggtccctcccaggttgggctttcctgagaagctggcaggaatcgcgaatatgcttgaaaatnataaaacctatcttctggaaattactgctacccactcagcctccctggcggctctcct

SEQ ID NO: 488694 - DNA, 204 bp, Homo sapiens
gaaagtctttcatcgtggaccacaacagtcgagctaccacttatcattgacccccgaatccctcttcagaacggtcgtcttcccaactcatctacactcacctgacagcacctccatgaggctccgacagttacagctgctgagagaggcctcagcaagtttctagcaaacagcaggagcctcatttacatggccatggccagg

SEQ ID NO: 488695 - DNA, 430 bp, Homo sapiens
  misc_feature (102)..(103): n is a, c, g, or t
gacagaggtgtggtttgggggccacgagacaaagccgagagccagaaagcgcaccacgcatggatgttcttggtccattcttctcgcaggtgctagtgaagnngttggtagagagtgcgatggccaggttcgtgatttccgctggccaccctgtgcgtgtttgtgagcagtaaagtgaaggagccttcatgtactgtgaggagaatgcttgcggccacaacaatattctcttcgatgtacgcgaagtattttgcttttgctataaatagaagatgatttatatgtatgtcaagtgtcaatagttcatagaaggtgtgttgacagtactagtctatattagatgtacaagtagttacccccctcgtgtactttcgtgagatagaagtgtgacaaatataatggataattaaaaaaaaagaagaaaagaaaa

SEQ ID NO: 488696 - DNA, 389 bp, Homo sapiens
gtcaaatacacttagtgagagtacttcagctccagtcgccacagattaaatccctaactctcaccaactgtctcacagatatgtgtgctgggttattggaggccaggtgagagtgtgtgaatgggtcagcacaaagctttaccgccaccaaggacaaaaacaaaacagatgtcctgttgacatccctgtagtttgtgtgaatgcttatgaaggagagagcacgctgctgccatgtgaactaattcacaaaacaaatacagcaagccaaatttctctaatttttgaagagaatctgatatcatttcacccataatgtaacacatgttgtggtgtaatttacaaaaataatgcaaattttaagaagcatattaaaaaaatctgcaaaatga

SEQ ID NO: 488697 - DNA, 635 bp, Homo sapiens
gctccagcattattctttttcatgaggacatccaattttcccaatactatttgttgaaaagactatcctttcccatgaatggtctggtgccctgtcaaaaatcatttgaccatatatgtgagaggtttcctacgtatagtaaacgtattgtttctttctgggcggtcatttgacattttacaggttcaagttcagagtttcatcatttctcagtgatattgcacacttcctaactattgtccctaattcaagtatcatttcaagatacattttctactctggcattctgatctatgtcacctaggtttcgcctgctcttctatttaccctctctcgattatgagtccctggacgggcacgggacttctagtctctcggagaccctacgtggccttaatgcgtcattggtactgaactactgtgtccagtctggatgaaattaacctttaccagcctacaacaccccacgcaaaagcacactcagccacgcagcacattccaagtctcagggctccctccacgcaagctacctctcactcccacattacattcattccacaacctaacttcacctcactgggcctctactgaagccacttcttcaacggggacaactctctgctcctcatcctccc

SEQ ID NO: 488698 - DNA, 1517 bp, Homo sapiens
ggtaccgcgaacggtgcgttacttacctcgactcttagcttgtcggggacggtaaccgggacccggtgtctgctcctgtcgccttcgcctcctaatccctagccactatgcgtgagtgcatctccatccacgttggccaggctggtgtccagattggcaatgcctgctgggagctctactgcctggaacacggcatccagcccgatggccagatgccaagtgacaagaccattgggggaggagatgactccttcaacaccttcttcagtgagacgggcgctggcaagcacgtgccccggggctgtgtttgtagacttggaacccacagtcattgatgaagttcgcactggcacctaccgccagctcttccaccctgagcagctcatcacaggcaaggaagatgctgccaataactatgcccgagggcactacaccattggcaaggagatcattgaccttgtgttggaccgaattcgcaagctggctgaccagtgcaccggtcttcagggcttcttggttttccacagctttggtgggggaactggttctgggttcacctcccctgctcatggaacgtctctcagttgattatggcaagaagtccaagctggagttctccatttacccagcaccccaggtttccacagctgtagttgagccctacaactccatcctcaccacccacaccaccctggagcactctgattgtgccttcatggtagacaatgaggccatctatgacatctgtcgtagaaacctcgatatcgagcgcccaacctacactaaccttaaccgccttattagccagattgtgtcctccatcactgcttccctgagatttgatggagccctgaatgttgacctgacagaattccagaccaacctggtgccctactccccgcatccacttccctctggccacatatgcccctgtcatctctgctgagaaagcctaccatgaacagctttctgtagcagagatcaccaatgcttgctttgagccagccaaccagatggtgaaatgtgaccctcgccatggtaaatacatggcttgctgcctgttgtaccgtggtgacgtggttcccaaagatgtcaatgctgccattgccaccatcaaaaccaagcgcagcatccagtttgtggattggtgccccactggcttcaaggttggcatcaactaccagcctcccactgtggtgcctggtggagacctggccaaggtacagagagctgtgtgcatgctgagcaacaccacagccattgctgaggcctgggctcgcctggaccacaagtttgacctgatgtatgccaagcgtgcctttgttcactggtacgtgggtgaggggatggaggaaggcgagttttcagaggcccgtgaagatggacatggctgcccttgagaaggacttatgaggaggttggagcagatagtcgctggacggagaggatgagggtgtagagtatgaacctgtgtgcctgtacttttacacatcctttgtgcttttacgtgtcgattt

SEQ ID NO: 488699 - DNA, 1728 bp, Homo sapiens
ggtaccgcgaacggtgcgttacttacctcgactcttagcttgtcggggacggtaaccgggacccggtgtctgctcctgtcgccttcgcctcctaatccctagccactatgcgtgagtgcatctccatccacgttggccaggctggtgtccagattggcaatgcctgctgggagctctactgcctggaacacggcatccagcccgatggccagatgccaagtgacaagaccattgggggaggagatgactccttcaacaccttcttcagtgagacgggcgctggcaagcacgtgccccggggctgtgtttgtagacttggaacccacagtcattgatgaagttcgcactggcacctaccgccagctcttccaccctgagcagctcatcacaggcaaggaagatgctgccaataactatgcccgagggcactacaccattggcaaggagatcattgaccttgtgttggaccgaattcgcaagctggctgaccagtgcaccggtcttcagggcttcttggttttccacagctttggtgggggaactggttctgggttcacctcccctgctcatggaacgtctctcagttgattatggcaagaagtccaagctggagttctccatttacccagcaccccaggtttccacagctgtagttgagccctacaactccatcctcaccacccacaccaccctggagcactctgattgtgccttcatggtagacaatgaggccatctatgacatctgtcgtagaaacctcgatatcgagcgcccaacctacactaaccttaaccgccttattagccagattgtgtcctccatcactgcttccctgagatttgatggagccctgaatgttgacctgacagaattccagaccaacctggtgccctactccccgcatccacttccctctggccacatatgcccctgtcatctctgctgagaaagcctaccatgaacagctttctgtagcagagatcaccaatgcttgctttgagccagccaaccagatggcgagggtcacatttcaccatctggttggctggctcaaagcaagcattggtgaaatgtgaccctcgccatggtaaatacatggcttgctgcctgttgtaccgtggtgacgtggttcccaaagatgtcaatgctgccattgccaccatcaaaaccaagcgcagcatccagtttgtggattggtgccccactggcttcaaggttggcatcaactaccagcctcccactgtggtgcctggtggagacctggccaaggtacagagagctgtgtgcatgctgagcaacaccacagccattgctgaggcctgggctcgcctggaccacaagtttgacctgatgtatgccaaacgtgcctttgttcactggtacgttggggaggggatggaggaaggtgagttttcagaggcccgtgaggacatggctgcccttgagaaggattatgaggaggttggtgtggattctgttgaaggagagggtgaggaagaaggagaggaatactaaagttaaaacgtcacaaaggtgctgcttttacagggaagcttattctgttttaaacattgaaaagttgtggtctgatcagttaatttgtatgtagcagtgtatgctctcatatacaattactgacctatgctctaaaacatgaatgctttgttacagacccaagctgtccatttctgtgatgggttttgaataaagtattccctgttttaaatg

SEQ ID NO: 488700 - DNA, 1452 bp, Homo sapiens
ggtaccgcgaacggtgcgttacttacctcgactcttagcttgtcggggacggtaaccgggacccggtgtctgctcctgtcgccttcgcctcctaatccctagccactatgcgtgagtgcatctccatccacgttggccaggctggtgtccagattggcaatgcctgctgggagctctactgcctggaacacggcatccagcccgatggccagatgccaagtgacaagaccattgggggaggagatgactccttcaacaccttcttcagtgagacgggcgctggcaagcacgtgccccggggctgtgtttgtagacttggaacccacagtcattgatgaagttcgcactggcacctaccgccagctcttccaccctgagcagctcatcacaggcaaggaagatgctgccaataactatgcccgagggcactacaccattggcaaggagatcattgaccttgtgttggaccgaattcgcaagctggctgaccagtgcaccggtcttcagggcttcttggttttccacagctttggtgggggaactggttctgggttcacctcccctgctcatggaacgtctctcagttgattatggcaagaagtccaagctggagttctccatttacccagcaccccaggtttccacagctgtagttgagccctacaactccatcctcaccacccacaccaccctggagcactctgattgtgccttcatggtagacaatgaggccatctatgacatctgtcgtagaaacctcgatatcgagcgcccaacctacactaaccttaaccgccttattagccagattgtgtcctccatcactgcttccctgagatttgatggagccctgaatgttgacctgacagaattccagaccaacctggtgccctactccccgcatccacttccctctggccacatatgcccctgtcatctctgctgagaaagcctaccatgaacagctttctgtagcagagatcaccaatgcttgctttgagccagccaaccagatggtgaaatgtgaccctcgccatggtaaatacatggcttgctgcctgttgtaccgtggtgacgtggttcccaaagatgtcaatgctgccattgccaccatcaaaaccaagcgcagcatccagtttgtggattggtgccccactggcttcaaggttggcatcaactaccagcctcccactgtggtgcctggtggagacctggccaaggtacagagagctgtgtgcatgctgagcaacaccacagccattgctgaggcctgggctcgcctggaccacaagtttgacctgatgtatgccaaacgtgcctttgttcactggtacgttggggaggggatggaggaaggtgagttttcagaggcccgtgaggacatgcctcgccctagatgaatggattatcaggcctccgtgccctggactctgtgttggctggcgcgtgaca

SEQ ID NO: 488701 - DNA, 212 bp, Homo sapiens
ctcaccttctatgtgacagcgtctggtgtctcctgattgtagctcctcagtctaagcgaacacaatggcgctcggaagcccgggggtcccaccagaaacttgcactcttcgcggggtttcgcgggttccccaggaaaatctctctccacccaaccgcgggaatattaggcactactggcagggaccctctctatttcgttctgcagcagagg

SEQ ID NO: 488702 - DNA, 2525 bp, Homo sapiens
  misc_feature (1709)..(1710): n is a, c, g, or t
ggtaccgcgaacggtgcgttacttacctcgactcttagcttgtcggggacggtaaccgggacccggtgtctgctcctgtcgccttcgcctcctaatccctagccactatgcgtgagtgcatctccatccacgttggccaggctggtgtccagattggcaatgcctgctgggagctctactgcctggaacacggcatccagcccgatggccagatgccaagtgacaagaccattgggggaggagatgactccttcaacaccttcttcagtgagacgggcgctggcaagcacgtgccccggggctgtgtttgtagacttggaacccacagtcattgatgaagttcgcactggcacctaccgccagctcttccaccctgagcagctcatcacaggcaaggaagatgctgccaataactatgcccgagggcactacaccattggcaaggagatcattgaccttgtgttggaccgaattcgcaagctggctgaccagtgcaccggtcttcagggcttcttggttttccacagctttggtgggggaactggttctgggttcacctcccctgctcatggaacgtctctcagttgattatggcaagaagtccaagctggagttctccatttacccagcaccccaggtttccacagctgtagttgagccctacaactccatcctcaccacccacaccaccctggagcactctgattgtgccttcatggtagacaatgaggccatctatgacatctgtcgtagaaacctcgatatcgagcgcccaacctacactaaccttaaccgccttattagccagtagtatgtgtgtccttaccatctacgtgcgttccgctgaggatttgagtggagcccatgaatgtttgacccttgacaagatattacacagactcaatagcgctcggatggcctcatactcaccactgacaatctcaacattctcacttcttgagctcgactaatatagctcaccttggtcatctctgctgagaaagcctaccatgaacagctttctgtagcagagatcaccaatgcttgctttgagccagccaaccagatggtgaaatgtgaccctcgccatggtaaatacatggcttgctgcctgttgtaccgtggtgacgtggttcccaaagatgtcaatgctgccattgccaccatcaaaaccaagcgcagcatccagtttgtggattggtgccccactggcttcaaggttggcatcaactaccagcctcccactgtggtgcctggtggagacctggccaaggtacagagagctgtgtgcatgctgagcaacaccacagccattgctgaggcctgggctcgcctggaccacaagtttgacctgatgtatgccaagcgtgcctttgttcactggtacgtgggtgaggggatggaggaaggcgagttttcagaggcccgtgaagatatggctgcccttgagaaggattatgaggaggttggtgtggattctgttgaaggagagggtgaggaagaaggagaggaatactaattatccattccttttggccctgcagcatgtcatgctcccagaatttcagcttcagcttaactgacagacgttaaagctttctggttagattgttttcacttggtgatcatgtcttttccatgtgtacctgtaatatttttccatcatatctcaaagtaaagtcattaacatccaaaaaaaaaaaaataannaaaaaaaaaaaaaaaaaaaaacaaacaaaaaaaaaaaaaaaaagaaacaaaaaaaaaaaacaaaaaaacaaaaaaaaaaacaaaaaaaaagaaaagcaaaaaacaacagaacaaaaaaaggagaagagaggggggggcggggcccgctaaaacattcctccgcgccgggggcgggcgcaccaacaccgcccccgcacgccggctctgatggacaggagaggcgccgcccccatacgaatgatgagagacataatatcaaacacgaccaggcgggcgcggcgcatgccacaaaccacaaacaccgctggagaggaacaaaaccaaacaaggaggagtgacactctcagctggaacgacgaccaccacccactttgtgtggcgggacgccaaacacggcgacacaccacccccacaacaaaatacccagcggcgcggagaaacaacaaaccgcacggcgagctagaggatgcaacaacaccaacacgttatctgtgcggagcgacagaaaatagcgacaagaggagacgagagaaaaaaaataatcgacgggcggcttgatgaaataaaccacgcgcagcgacagccagagcaacgacacgagaacgcccacgaccacagcccacgcccacccaccccaacgccacggaacaccgaaacgagaagaagcagacagacaccgcagcaccaccagaaccgaacaccgccgacacgacagcagcagagtacacccgccacacgaacaagcacgccaacgcagaacgaccgacagacaccaccgagcacggaacgaccggcaccacaagcaggagacaacc

SEQ ID NO: 488703 - DNA, 154 bp, Homo sapiens
atgcacccggctgagcctcccaaagtgctggcattacaggcatgagccactgtgcctggcgtagaaagtggggcttataatggaaaacaacacccagtctaactggtataacacctaaaaaatttcagatctgattttagatagacgcacagga

SEQ ID NO: 488704 - DNA, 435 bp, Homo sapiens
agaaagtgatgtctagctgacaactgacaatatggcacatatagatagtagtattttagatatctaaaataacaaaaagtctcacctgagaaatgtccaggcagcctgatatccctaagataacagcaaacactactgagcgctttctagataccggggacacttcgcgggactttttccacctctctatggcagagacagtttttcctattatcatcatgacccacatttcagaggagttggaggcatggaaagaggaaacaacttgcccgttccctctccgtgctataatttgtatacatcatcttttaaaacggacttttcggccaggcgcggtggctcacgcctgtaatcccagcactctgggaggccgaggcgggcagatcacgaggtcagatcaagaccatcctggtaacacgccaaaccccgtctcta

SEQ ID NO: 488705 - DNA, 1230 bp, Homo sapiens
gccgggcttccgcccggtctgccggcaacgctgcggccccgcccacgtcatggcgcccgaggagaacgcggggaccgaactcttgctgcagagtttcgagcgccgcttcctggcggccgctcactgcgctccttcccctggcagagcttagaagcaaagttaagagactcatcagattctgagctgctgcgggatattttgcagaagactgtgaagcatcctgtgtgtgtgaagcacccgccgtcagtcaagtatgcccggtgctttctctcagaactcatcaaaaagccctcgggaggctcggtcacactctccaagagcacagccatcatctcccacggtaccacaggcctggtcacatgggacgccgccctctaccttgcagaatgggccatcgagaacccggcagccttcactaacaggactgtcctagagcttggcagtggtgccggcctcacaggcctggccatctgcaagatgtgccgcccccgggcatacatcttcagcgactgtcacagccgggtcctcgagcagctccgagggaatgtccttctcaatggcctctcattagaggcagacatcactgccaacttagacagccccagggtgacagtggcccagctggactgggacgtcgcgacggtccatcagctctctgccttccagccagatgttgtcattgcagcagacgtgctgtattgcccagaagccatcgtgtcgctggtcggggtcctgcggaggctggctgcctgccgggagcaccagcgggctcctgaggtctacgtggcctttaccgtccgcaacccagagacgtgccagctgttcaccaccgagctaggccgggctgggatcagatgggaagtggaagctcgtcatgaccagaaactgtttccctacgaagagcacttggagatggcaatgctgaacctcacactgtaggactcacacacgactccaacgggattgtgagaatcaagtcactctcatgggaagaatttttatatgggaaagcggataaaactttcattggactggaatgtttggagaatgttaatttccaaatcaggaaccacaaactgccctctaataagacatcggctatctaagcgtgtgggtgccccctttctgccagcagttctggttcttaagaaaatcaccataaatcagacatgaaaattctggctccaaaaatagcattttctttgtgcaaataaaaacgtgtgtatcaag

SEQ ID NO: 488706 - DNA, 1152 bp, Homo sapiens
  misc_feature (1050)..(1050): n is a, c, g, or t
ggtaccgcgaacggtgcgttacttacctcgactcttagcttgtcggggacggtaaccgggacccggtgtctgctcctgtcgccttcgcctcctaatccctagccactatgcgtgagtgcatctccatccacgttggccaggctggtgtccagattggcaatgcctgctgggagctctactgcctggaacacggcatccagcccgatggccagatgccaagtgacaagaccattgggggaggagatgactccttcaacaccttcttcagtgagacgggcgctggcaagcacgtgccccggggctgtgtttgtagacttggaacccacagtcattgatgaagttcgcactggcacctaccgccagctcttccaccctgagcagctcatcacaggcaaggaagatgctgccaataactatgcccgagggcactacaccattggcaaggagatcattgaccttgtgttggaccgaattcgcaagctggctgaccagtgcaccggtcttcagggcttcttggttttccacagctttggtgggggaactggttctgggttcacctcccctgctcatggaacgtctctcagttgattatggcaagaagtccaagctggagttctccatttacccagcaccccaggtttccacagctgtagttgagccctacaactccatcctcaccacccacaccaccctggagcactctgattgtgccttcatggtagacaatgaggccatctatgacatctgtcgtagaaacctcgatatcgagcgcccaacctacactaaccttaaccgccttattagccagattgtgtcctccatcactgcttccctgagatttgatggagccctgaatgttgaccgttcacctaggaatttccatggaccagagcctggatgtcgccgtaacccccgcattccatctatcgccctctggcccacaatagtgcgcccttgttcactcgtcatagctgatgaatatgccttacccactgagatcaaagccttgacctgttaggcgatgaggatcgacgaaaaatggcgtatgcnttgtggacgtcagctcgaacaccagcatcggttgacacattgtggacgccctccgcccaatgggtaaaatcaccattggcgtttgcctagccctgtctgtac

SEQ ID NO: 488707 - DNA, 2507 bp, Homo sapiens
  misc_feature (864)..(864): n is a, c, g, or t
ggcacgaggagtaatcgttctggtcactgggacacagctgcgctcgcccattctaaaaagtcagcgccctcaggcccgcgggtaaccacctcctcctgagcgcggtgaccagagcttagaagcaaagttaagagactcatcagattctgagctgctgcgggatattttgcagaagactgtgaagcatcctgtgtgtgtgaagcacccgccgtcagtcaagtatgcccggtgctttctctcagaactcatcaaaaagccctcgggaggctcggtcacactctccaagagcacagccatcatctcccacggtaccacaggcctggtcacatgggacgccgccctctaccttgcagaatgggccatcgagaacccggcagccttcactaacaggactgtcctagagcttggcagtggtgccggcctcacaggcctggccatctgcaagatgtgccgcccccgggcatacatcttcagcgactgtcacagccgggtcctcgagcagctccgagggaatgtccttctcaatggcctctcattagaggcagacatcactgccaacttagacagccccagggtgacagtggcccagctggactgggacgtcgcgacggtccatcagctctctgccttccagccagatgttgtcattgcagcagacgtgctgtattgcccagaagccatcgtgtcgctggtcggggtcctgcggaggctggctgcctgccgggagcaccagcgggctcctgaggtctacgtggcctttaccgtccgcaacccagagacgtgccagctgttcaccaccgagctacgcctgtcctagcagccccacacaatacgctcatgtcctgtccccaaacaccgccatcntcaaacacatgtgctctgtttccaggccgggctgggatcagatgggaagtggaagctcgtcatgaccagaaactgtttccctacgaagagcacttggagatggcaatgctgaacctcacactgtaggactcacacacgactccaacgggattgtgagaatcaagtcactctcatgggaagaatttttatatgggaaagcggataaaactttcattggactggaatgtttggagaatgttaatttccaaatcaggaaccacaaactgccctctaataagacatcggctatctaagcgtgtgggtgccccctttctgccagcagttctggttcttaagaaaatcaccataaatcagacatgaaaattctggctccaaaaatagcattttctttgtgcaaataaaaacgtgtgtatcaagtatgatgttcccccaacgtggacacactcgttcctcacaaagccaagcccgctgcagctgccacatccctgggcttatggtgcagcaggtgcttttttcaagacaggaatcaaagtgttaggaacacggcagaaaggtgacacctggagaccaaatgcaggatgaggagtactgcagaggtcacagggaagtcacagaacagtaatacgctagcaggggcatggggcatgaagaacagaagacaggaagcgtttcagagactccaaagaagaaatcagggccaaccacagcttcccgggtcacagaacaattcattcaccaggtggcaccactgccgtcatttcagcttctggccactgggaggcgctgctcgaaagggtttgccctgagactccaagaagaagctgcgggaaggacagcaggggccctggggttttagcctctggcccaggagttatgtgtccataaccaaagggagcacagtctgcacccagctctcatcccatcagagctgctgcgactcccgcaggttcttccggaactggtttagcttgcctgcaggatcaggaaagtttgagaaaagcatctgcaaaatactaaagagcagagcttacctcattgcctgtccccaccccatcccaggtcaccacctggctgaccccaggtccccgacccaacaacaacccctcccaagtccctaactccctcacttggactcgagacccttcacaccccagcagcactccgcctccaacttgacatcacagtttctggaaacttccccgcatgtcccactttcccacacttggtgccctggagcacctcccggcctctacgtgctgcccattcccctgtgagcaccctcctctcggcctctggccaacacagtcccacccatctgtgggtaacaagggggtgtcggtgttcttttcagccttgctaaactgtctgaatcaaggatcacaaactacagcctgcaggccaaatccagcccacagcctgtgtttgtaaataaagctttattggaacaaagccacaccccttaatctacagatgatctgtggctactttcacaccacaacagagtaccatggttctgacagagactgggggaccctgtctaaatgacttctgacctggacctttactgaaaatcctcccaatcattctgttgacaagaatgatgtattactttttgcaataagaaacaagtaacctttgcaaaa

SEQ ID NO: 488708 - DNA, 2467 bp, Homo sapiens
  misc_feature (1651)..(1652): n is a, c, g, or t
ggcaggttcgcttacatcgaccgcctaagagtcgcgctgtaagaagcaacaacctctcctcttcgtctccgccatcagctcggcagtcgcgaagcagcaaccatgcgtgagtgcatctccatccacgttggccaggctggtgtccagattggcaatgcctgctgggagctctactgcctggaacacggcatccagcccgatggccagatgccaagtgacaagaccattgggggaggagatgactccttcaacaccttcttcagtgagacgggcgctggcaagcacgtgccccggggctgtgtttgtagacttggaacccacagtcattgatgaagttcgcactggcacctaccgccagctcttccaccctgagcagctcatcacaggcaaggaagatgctgccaataactatgcccgagggcactacaccattggcaaggagatcattgaccttgtgttggaccgaattcgcaagctggctgaccagtgcaccggtcttcagggcttcttggttttccacagctttggtgggggaactggttctgggttcacctcccctgctcatggaacgtctctcagttgattatggcaagaagtccaagctggagttctccatttacccagcaccccaggtttccacagctgtagttgagccctacaactccatcctcaccacccacaccaccctggagcactctgattgtgccttcatggtagacaatgaggccatctatgacatctgtcgtagaaacctcgatatcgagcgcccaacctacactaaccttaaccgccttattagccagattgtgtcctccatcactgcttccctgagatttgatggagccctgaatgttgacctgacagaattccagaccaacctggtgccctactccccgcatccacttccctctggccacatatgcccctgtcatctctgctgagaaagcctaccatgaacagctttctgtagcagagatcaccaatgcttgctttgagccagccaaccagatggtgaaatgtgaccctcgccatggtaaatacatggcttgctgcctgttgtaccgtggtgacgtggttcccaaagatgtcaatgctgccattgccaccatcaaaaccaagcgcagcatccagtttgtggattggtgccccactggcttcaaggttggcatcaactaccagcctcccactgtggtgcctggtggagacctggccaaggtacagagagctgtgtgcatgctgagcaacaccacagccattgctgaggcctgggctcgcctggaccacaagtttgacctgatgtatgccaagcgtgcctttgttcactggtacgtgggtgaggggatggaggaaggcgagttttcagaggcccgtgaagatatggctgcccttgagaaggattatgaggaggttggtgtggattctgttgaaggagagggtgaggaagaaggagaggaatactaattatccattccttttggccctgcagcatgtcatgctcccagaatttcagcttcagcttaactgacagacgttaaagctttctggttagattgttttcacttggtgatcatgtcttttccatgtgtacctgtaatatttttccatcatatctcaaagtaaagtcattaacatccaaaaaaaaaaaaataannaaaaaaaaaaaaaaaaaaaaacaaacaaaaaaaaaaaaaaaaagaaacaaaaaaaaaaaacaaaaaaacaaaaaaaaaaacaaaaaaaaagaaaagcaaaaaacaacagaacaaaaaaaggagaagagaggggggggcggggcccgctaaaacattcctccgcgccgggggcgggcgcaccaacaccgcccccgcacgccggctctgatggacaggagaggcgccgcccccatacgaatgatgagagacataatatcaaacacgaccaggcgggcgcggcgcatgccacaaaccacaaacaccgctggagaggaacaaaaccaaacaaggaggagtgacactctcagctggaacgacgaccaccacccactttgtgtggcgggacgccaaacacggcgacacaccacccccacaacaaaatacccagcggcgcggagaaacaacaaaccgcacggcgagctagaggatgcaacaacaccaacacgttatctgtgcggagcgacagaaaatagcgacaagaggagacgagagaaaaaaaataatcgacgggcggcttgatgaaataaaccacgcgcagcgacagccagagcaacgacacgagaacgcccacgaccacagcccacgcccacccaccccaacgccacggaacaccgaaacgagaagaagcagacagacaccgcagcaccaccagaaccgaacaccgccgacacgacagcagcagagtacacccgccacacgaacaagcacgccaacgcagaacgaccgacagacaccaccgagcacggaacgaccggcaccacaagcaggagacaacc

SEQ ID NO: 488709 - DNA, 2187 bp, Homo sapiens
gccgggcttccgcccggtctgccggcaacgctgcggccccgcccacgtcatggcgcccgaggagaacgcggggaccgaactcttgctgcagagtttcgagcgccgcttcctggcggccgctcactgcgctccttcccctggcagagcttagaagcaaagttaagagactcatcagattctgagctgctgcgggatattttgcagaagactgtgaagcatcctgtgtgtgtgaagcacccgccgtcagtcaagtatgcccggtgctttctctcagaactcatcaaaaaggaaaaagattagaacgaaagcaaacaagctctcactcagcctgcccccagcacgaggctgtccacacagagcctttggacgagctgtacgaggtgctggcggagactttgatggccaaggagtccacccagggccactggagctatttgctgccctcgggaggctcggtcacactctccaagagcacagccatcatctcccacggtaccacaggcctggtcacatgggacgccgccctctaccttgcagaatgggccatcgagaacccggcagccttcaaggccgggctgggatcagatgggaagtggaagctcgtcatgaccagaaactgtttccctacgaagagcacttggagatggcaatgctgaacctcacactgtaggactcacacacgactccaacgggattgtgagaatcaagtcactctcatgggaagaatttttatatgggaaagcggataaaactttcattggactggaatgtttggagaatgttaatttccaaatcaggaaccacaaactgccctctaataagacatcggctatctaagcgtgtgggtgccccctttctgccagcagttctggttcttaagaaaatcaccataaatcagacatgaaaattctggctccaaaaatagcattttctttgtgcaaataaaaacgtgtgtatcaagtatgatgttcccccaacgtggacacactcgttcctcacaaagccaagcccgctgcagctgccacatccctgggcttatggtgcagcaggtgcttttttcaagacaggaatcaaagtgttaggaacacggcagaaaggtgacacctggagaccaaatgcaggatgaggagtactgcagaggtcacagggaagtcacagaacagtaatacgctagcaggggcatggggcatgaagaacagaagacaggaagcgtttcagagactccaaagaagaaatcagggccaaccacagcttcccgggtcacagaacaattcattcaccaggtggcaccactgccgtcatttcagcttctggccactgggaggcgctgctcgaaagggtttgccctgagactccaagaagaagctgcgggaaggacagcaggggccctggggttttagcctctggcccaggagttatgtgtccataaccaaagggagcacagtctgcacccagctctcatcccatcagagctgctgcgactcccgcaggttcttccggaactggtttagcttgcctgcaggatcaggaaagtttgagaaaagcatctgcaaaatactaaagagcagagcttacctcattgcctgtccccaccccatcccaggtcaccacctggctgaccccaggtccccgacccaacaacaacccctcccaagtccctaactccctcacttggactcgagacccttcacaccccagcagcactccgcctccaacttgacatcacagtttctggaaacttccccgcatgtcccactttcccacacttggtgccctggagcacctcccggcctctacgtgctgcccattcccctgtgagcaccctcctctcggcctctggccaacacagtcccacccatctgtgggtaacaagggggtgtcggtgttcttttcagccttgctaaactgtctgaatcaaggatcacaaactacagcctgcaggccaaatccagcccacagcctgtgtttgtaaataaagctttattggaacaaagccacaccccttaatctacagatgatctgtggctactttcacaccacaacagagtaccatggttctgacagagactgggggaccctgtctaaatgacttctgacctggacctttactgaaaatcctcccaatcattctgttgacaagaatgatgtattactttttgcaataagaaacaagtaacctttgcaaaa

SEQ ID NO: 488710 - DNA, 2466 bp, Homo sapiens
  misc_feature (1650)..(1651): n is a, c, g, or t
ggcaggttcgcttacatcgaccgcctaagagtcgcgctgtaagaagcaacaacctctcctcttcgtctccgccatcagctcggcagtcgcgaagcagcaaccatgcgtgagtgcatctccatccacgttggccaggctggtgtccagattggcaatgcctgctgggagctctactgcctggaacacggcatccagcccgatggccagatgccaagtgacaagaccattgggggaggagatgattccttcaacaccttcttcagtgagacgggggctggcaagcatgtgccccgggcagtgtttgtagacttggaacccacagtcattgatgaagttcgcactggcacctaccgccagctcttccaccctgagcagctcatcacaggcaaggaagatgctgccaataactatgcccgagggcactacaccattggcaaggagatcattgaccttgtgttggaccgaattcgcaagctggctgaccagtgcaccggtcttcagggcttcttggttttccacagctttggtgggggaactggttctgggttcacctcccctgctcatggaacgtctctcagttgattatggcaagaagtccaagctggagttctccatttacccagcaccccaggtttccacagctgtagttgagccctacaactccatcctcaccacccacaccaccctggagcactctgattgtgccttcatggtagacaatgaggccatctatgacatctgtcgtagaaacctcgatatcgagcgcccaacctacactaaccttaaccgccttattagccagattgtgtcctccatcactgcttccctgagatttgatggagccctgaatgttgacctgacagaattccagaccaacctggtgccctactccccgcatccacttccctctggccacatatgcccctgtcatctctgctgagaaagcctaccatgaacagctttctgtagcagagatcaccaatgcttgctttgagccagccaaccagatggtgaaatgtgaccctcgccatggtaaatacatggcttgctgcctgttgtaccgtggtgacgtggttcccaaagatgtcaatgctgccattgccaccatcaaaaccaagcgcagcatccagtttgtggattggtgccccactggcttcaaggttggcatcaactaccagcctcccactgtggtgcctggtggagacctggccaaggtacagagagctgtgtgcatgctgagcaacaccacagccattgctgaggcctgggctcgcctggaccacaagtttgacctgatgtatgccaagcgtgcctttgttcactggtacgtgggtgaggggatggaggaaggcgagttttcagaggcccgtgaagatatggctgcccttgagaaggattatgaggaggttggtgtggattctgttgaaggagagggtgaggaagaaggagaggaatactaattatccattccttttggccctgcagcatgtcatgctcccagaatttcagcttcagcttaactgacagacgttaaagctttctggttagattgttttcacttggtgatcatgtcttttccatgtgtacctgtaatatttttccatcatatctcaaagtaaagtcattaacatccaaaaaaaaaaaaataannaaaaaaaaaaaaaaaaaaaaacaaacaaaaaaaaaaaaaaaaagaaacaaaaaaaaaaaacaaaaaaacaaaaaaaaaaacaaaaaaaaagaaaagcaaaaaacaacagaacaaaaaaaggagaagagaggggggggcggggcccgctaaaacattcctccgcgccgggggcgggcgcaccaacaccgcccccgcacgccggctctgatggacaggagaggcgccgcccccatacgaatgatgagagacataatatcaaacacgaccaggcgggcgcggcgcatgccacaaaccacaaacaccgctggagaggaacaaaaccaaacaaggaggagtgacactctcagctggaacgacgaccaccacccactttgtgtggcgggacgccaaacacggcgacacaccacccccacaacaaaatacccagcggcgcggagaaacaacaaaccgcacggcgagctagaggatgcaacaacaccaacacgttatctgtgcggagcgacagaaaatagcgacaagaggagacgagagaaaaaaaataatcgacgggcggcttgatgaaataaaccacgcgcagcgacagccagagcaacgacacgagaacgcccacgaccacagcccacgcccacccaccccaacgccacggaacaccgaaacgagaagaagcagacagacaccgcagcaccaccagaaccgaacaccgccgacacgacagcagcagagtacacccgccacacgaacaagcacgccaacgcagaacgaccgacagacaccaccgagcacggaacgaccggcaccacaagcaggagacaacc

SEQ ID NO: 488711 - DNA, 318 bp, Homo sapiens
  misc_feature (164)..(164): n is a, c, g, or t
  misc_feature (202)..(202): n is a, c, g, or t
aattttccctaaaggcagggatttttaacctggataaaagcccggggtaaccctgaacttgatggaaaaaaatgttccctctttattttcaccaaagaaactgaaatttagcccttctccccagttataaatggtggccccaaatccccgtagtaaaaacaggncctggggttttcccccccaaaccaacccgttccagccnctgtaatgtaacataaaaagggcctcttgaaggattgttcaaatttgtccccccttggaaagaaaaccgatcccgtaagttgatgttttaattaaaaagcccctatttttctgcca

SEQ ID NO: 488712 - DNA, 1794 bp, Homo sapiens
  misc_feature (151)..(151): n is a, c, g, or t
accatgactcagaagaggcattctaggtacctgggtgggactgggaaactgtgaaacaagtagactgacttggacactcccccaccacaccacgcctgtcctagcagccccacacaatacgctcatgtcctgtccccaaacaccgccatcntcaaacacatgtgctctgtttccaggccgggctgggatcagatgggaagtggaagctcgtcatgaccagaaactgtttccctacgaagagcacttggagatggcaatgctgaacctcacactgtaggactcacacacgactccaacgggattgtgagaatcaagtcactctcatgggaagaatttttatatgggaaagcggataaaactttcattggactggaatgtttggagaatgttaatttccaaatcaggaaccacaaactgccctctaataagacatcggctatctaagcgtgtgggtgccccctttctgccagcagttctggttcttaagaaaatcaccataaatcagacatgaaaattctggctccaaaaatagcattttctttgtgcaaataaaaacgtgtgtatcaagtatgatgttcccccaacgtggacacactcgttcctcacaaagccaagcccgctgcagctgccacatccctgggcttatggtgcagcaggtgcttttttcaagacaggaatcaaagtgttaggaacacggcagaaaggtgacacctggagaccaaatgcaggatgaggagtactgcagaggtcacagggaagtcacagaacagtaatacgctagcaggggcatggggcatgaagaacagaagacaggaagcgtttcagagactccaaagaagaaatcagggccaaccacagcttcccgggtcacagaacaattcattcaccaggtggcaccactgccgtcatttcagcttctggccactgggaggcgctgctcgaaagggtttgccctgagactccaagaagaagctgcgggaaggacagcaggggccctggggttttagcctctggcccaggagttatgtgtccataaccaaagggagcacagtctgcacccagctctcatcccatcagagctgctgcgactcccgcaggttcttccggaactggtttagcttgcctgcaggatcaggaaagtttgagaaaagcatctgcaaaatactaaagagcagagcttacctcattgcctgtccccaccccatcccaggtcaccacctggctgaccccaggtccccgacccaacaacaacccctcccaagtccctaactccctcacttggactcgagacccttcacaccccagcagcactccgcctccaacttgacatcacagtttctggaaacttccccgcatgtcccactttcccacacttggtgccctggagcacctcccggcctctacgtgctgcccattcccctgtgagcaccctcctctcggcctctggccaacacagtcccacccatctgtgggtaacaagggggtgtcggtgttcttttcagccttgctaaactgtctgaatcaaggatcacaaactacagcctgcaggccaaatccagcccacagcctgtgtttgtaaataaagctttattggaacaaagccacaccccttaatctacagatgatctgtggctactttcacaccacaacagagtaccatggttctgacagagactgggggaccctgtctaaatgacttctgacctggacctttactgaaaatcctcccaatcattctgttgacaagaatgatgtattactttttgcaataagaaacaagtaacctttgcaaaa

SEQ ID NO: 488713 - DNA, 2460 bp, Homo sapiens
  misc_feature (1644)..(1645): n is a, c, g, or t
ggtaccgcgaacggtgcgttacttacctcgactcttagcttgtcggggacggtaaccgggacccggtgtctgctcctgtcgccttcgcctcctaatccctagccactatgcgtgagtgcatctccatccacgttggccaggctggtgtccagattggcaatgcctgctgggagctctactgcctggaacacggcatccagcccgatggccagatgccaagtgacaagaccattgggggaggagatgaccttcttcagtgagacgggcgctggcaagcacgtgccccgggctgtgtttgtagacttggaacccacagtcattgatgaagttcgcactggcacctaccgccagctcttccaccctgagcagctcatcacaggcaaggaagatgctgccaataactatgcccgagggcactacaccattggcaaggagatcattgaccttgtgttggaccgaattcgcaagctggctgaccagtgcaccggtcttcagggcttcttggttttccacagctttggtgggggaactggttctgggttcacctcccctgctcatggaacgtctctcagttgattatggcaagaagtccaagctggagttctccatttacccagcaccccaggtttccacagctgtagttgagccctacaactccatcctcaccacccacaccaccctggagcactctgattgtgccttcatggtagacaatgaggccatctatgacatctgtcgtagaaacctcgatatcgagcgcccaacctacactaaccttaaccgccttattagccagattgtgtcctccatcactgcttccctgagatttgatggagccctgaatgttgacctgacagaattccagaccaacctggtgccctactccccgcatccacttccctctggccacatatgcccctgtcatctctgctgagaaagcctaccatgaacagctttctgtagcagagatcaccaatgcttgctttgagccagccaaccagatggtgaaatgtgaccctcgccatggtaaatacatggcttgctgcctgttgtaccgtggtgacgtggttcccaaagatgtcaatgctgccattgccaccatcaaaaccaagcgcagcatccagtttgtggattggtgccccactggcttcaaggttggcatcaactaccagcctcccactgtggtgcctggtggagacctggccaaggtacagagagctgtgtgcatgctgagcaacaccacagccattgctgaggcctgggctcgcctggaccacaagtttgacctgatgtatgccaagcgtgcctttgttcactggtacgtgggtgaggggatggaggaaggcgagttttcagaggcccgtgaagatatggctgcccttgagaaggattatgaggaggttggtgtggattctgttgaaggagagggtgaggaagaaggagaggaatactaattatccattccttttggccctgcagcatgtcatgctcccagaatttcagcttcagcttaactgacagacgttaaagctttctggttagattgttttcacttggtgatcatgtcttttccatgtgtacctgtaatatttttccatcatatctcaaagtaaagtcattaacatccaaaaaaaaaaaaataannaaaaaaaaaaaaaaaaaaaaacaaacaaaaaaaaaaaaaaaaagaaacaaaaaaaaaaaacaaaaaaacaaaaaaaaaaacaaaaaaaaagaaaagcaaaaaacaacagaacaaaaaaaggagaagagaggggggggcggggcccgctaaaacattcctccgcgccgggggcgggcgcaccaacaccgcccccgcacgccggctctgatggacaggagaggcgccgcccccatacgaatgatgagagacataatatcaaacacgaccaggcgggcgcggcgcatgccacaaaccacaaacaccgctggagaggaacaaaaccaaacaaggaggagtgacactctcagctggaacgacgaccaccacccactttgtgtggcgggacgccaaacacggcgacacaccacccccacaacaaaatacccagcggcgcggagaaacaacaaaccgcacggcgagctagaggatgcaacaacaccaacacgttatctgtgcggagcgacagaaaatagcgacaagaggagacgagagaaaaaaaataatcgacgggcggcttgatgaaataaaccacgcgcagcgacagccagagcaacgacacgagaacgcccacgaccacagcccacgcccacccaccccaacgccacggaacaccgaaacgagaagaagcagacagacaccgcagcaccaccagaaccgaacaccgccgacacgacagcagcagagtacacccgccacacgaacaagcacgccaacgcagaacgaccgacagacaccaccgagcacggaacgaccggcaccacaagcaggagacaacc

SEQ ID NO: 488714 - DNA, 421 bp, Homo sapiens
  misc_feature (21)..(21): n is a, c, g, or t
  misc_feature (83)..(83): n is a, c, g, or t
tttttccccaaagatttgttngggagtaggaggaatggcaaaatcttaagactttaaaattagatttttttctgagacgaagntcgctctatcacacagggctggagtgcaatggcatgatctcagctcactgcaacctctacctcctggattcaagtgcttctcccacctcagcctccccagtagctaggacaacaggcgcacgcacccacgcttggctaagtttttgtatttagtagagacggggtttcaccattttggccaggctggtctctaactcctgacctcaagtgatccactgcacccggcctaaaattagattttattaaaattattttctaggctgggcgcagtggctcacacctgtaatcccagcactttgggaggccaaggcaggcggatcacctgaggtcggggagtt

SEQ ID NO: 488715 - DNA, 1651 bp, Homo sapiens
  misc_feature (12)..(12): n is a, c, g, or t
  misc_feature (37)..(37): n is a, c, g, or t
  misc_feature (66)..(66): n is a, c, g, or t
gggattgggccngaagtagcatgttcccggccgccangggcggccggggggattggattaagcctngtcatgaccagaaactgtttccctacgaagagcacttggagatggcaatgctgaacctcacactgtaggactcacacacgactccaacgggattgtgagaatcaagtcactctcatgggaagaatttttatatgggaaagcggataaaactttcattggactggaatgtttggagaatgttaatttccaaatcaggaaccacaaactgccctctaataagacatcggctatctaagcgtgtgggtgccccctttctgccagcagttctggttcttaagaaaatcaccataaatcagacatgaaaattctggctccaaaaatagcattttctttgtgcaaataaaaacgtgtgtatcaagtatgatgttcccccaacgtggacacactcgttcctcacaaagccaagcccgctgcagctgccacatccctgggcttatggtgcagcaggtgcttttttcaagacaggaatcaaagtgttaggaacacggcagaaaggtgacacctggagaccaaatgcaggatgaggagtactgcagaggtcacagggaagtcacagaacagtaatacgctagcaggggcatggggcatgaagaacagaagacaggaagcgtttcagagactccaaagaagaaatcagggccaaccacagcttcccgggtcacagaacaattcattcaccaggtggcaccactgccgtcatttcagcttctggccactgggaggcgctgctcgaaagggtttgccctgagactccaagaagaagctgcgggaaggacagcaggggccctggggttttagcctctggcccaggagttatgtgtccataaccaaagggagcacagtctgcacccagctctcatcccatcagagctgctgcgactcccgcaggttcttccggaactggtttagcttgcctgcaggatcaggaaagtttgagaaaagcatctgcaaaatactaaagagcagagcttacctcattgcctgtccccaccccatcccaggtcaccacctggctgaccccaggtccccgacccaacaacaacccctcccaagtccctaactccctcacttggactcgagacccttcacaccccagcagcactccgcctccaacttgacatcacagtttctggaaacttccccgcatgtcccactttcccacacttggtgccctggagcacctcccggcctctacgtgctgcccattcccctgtgagcaccctcctctcggcctctggccaacacagtcccacccatctgtgggtaacaagggggtgtcggtgttcttttcagccttgctaaactgtctgaatcaaggatcacaaactacagcctgcaggccaaatccagcccacagcctgtgtttgtaaataaagctttattggaacaaagccacaccccttaatctacagatgatctgtggctactttcacaccacaacagagtaccatggttctgacagagactgggggaccctgtctaaatgacttctgacctggacctttactgaaaatcctcccaatcattctgttgacaagaatgatgtattactttttgcaataagaaacaagtaacctttgcaaaa

SEQ ID NO: 488716 - DNA, 1901 bp, Homo sapiens
  misc_feature (329)..(329): n is a, c, g, or t
  misc_feature (431)..(431): n is a, c, g, or t
  misc_feature (495)..(495): n is a, c, g, or t
  misc_feature (501)..(501): n is a, c, g, or t
  misc_feature (505)..(505): n is a, c, g, or t
  misc_feature (518)..(518): n is a, c, g, or t
  misc_feature (528)..(528): n is a, c, g, or t
  misc_feature (535)..(536): n is a, c, g, or t
  misc_feature (553)..(553): n is a, c, g, or t
  misc_feature (580)..(580): n is a, c, g, or t
  misc_feature (587)..(588): n is a, c, g, or t
gggagggaaacatttccccagaaccattatgccatgttccaaatcaggctgggaccgatgcaaagcctcttccttaaaatgccagcttcctccctggacacatggtttcttcaaaagcaagcccattcaagttgcaaatcctggacacattggttcctcaaaagccaagccgttcaagttgcacatcgttgacacatcgggtcctcaaaaagcaagccgttgcagttgcacatcggtgacacatcgatcctcacaagccaagccattgcagttccacatccctgacacatcggttcttcacaaagcaagcccgctgcagctgcacatcntggacacatcggttcttcacaaagccaagcccgctgcagctgccacatccctggacacactcggttcctcacaaagccaagcccgctgcagctgccacatcnctggacacactcggttcctcacaaagccaagcccgctgcagctgccacatcggtggacacactnggttcntcanaaagccaagcccnctgcagctgncacatcnntggacacactcggttcntcacaaagccaagcccgctgcagctgncacatcnntggacacactcggttcctcagaaagccaagcccgctgcagctgccacatccctggacacactcggttcctcacaaagccaagcccgctgcagctgccacatccctggacacactcggttcctcacaaagccaagcccgctgcagctgccacatccctgggcttatggtgcagcaggtgcttttttcaagacaggaatcaaagtgttaggaacacggcagaaaggtgacacctggagaccaaatgcaggatgaggagtactgcagaggtcacagggaagtcacagaacagtaatacgctagcaggggcatggggcatgaagaacagaagacaggaagcgtttcagagactccaaagaagaaatcagggccaaccacagcttcccgggtcacagaacaattcattcaccaggtggcaccactgccgtcatttcagcttctggccactgggaggcgctgctcgaaagggtttgccctgagactccaagaagaagctgcgggaaggacagcaggggccctggggttttagcctctggcccaggagttatgtgtccataaccaaagggagcacagtctgcacccagctctcatcccatcagagctgctgcgactcccgcaggttcttccggaactggtttagcttgcctgcaggatcaggaaagtttgagaaaagcatctgcaaaatactaaagagcagagcttacctcattgcctgtccccaccccatcccaggtcaccacctggctgaccccaggtccccgacccaacaacaacccctcccaagtccctaactccctcacttggactcgagacccttcacaccccagcagcactccgcctccaacttgacatcacagtttctggaaacttccccgcatgtcccactttcccacacttggtgccctggagcacctcccggcctctacgtgctgcccattcccctgtgagcaccctcctctcggcctctggccaacacagtcccacccatctgtgggtaacaagggggtgtcggtgttcttttcagccttgctaaactgtctgaatcaaggatcacaaactacagcctgcaggccaaatccagcccacagcctgtgtttgtaaataaagctttattggaacaaagccacaccccttaatctacagatgatctgtggctactttcacaccacaacagagtaccatggttctgacagagactgggggaccctgtctaaatgacttctgacctggacctttactgaaaatcctcccaatcattctgttgacaagaatgatgtattactttttgcaataagaaacaagtaacctttgcaaaa

SEQ ID NO: 488717 - DNA, 1682 bp, Homo sapiens
  misc_feature (1019)..(1019): n is a, c, g, or t
  misc_feature (1026)..(1026): n is a, c, g, or t
  misc_feature (1028)..(1028): n is a, c, g, or t
  misc_feature (1033)..(1034): n is a, c, g, or t
  misc_feature (1038)..(1038): n is a, c, g, or t
  misc_feature (1049)..(1050): n is a, c, g, or t
  misc_feature (1054)..(1054): n is a, c, g, or t
  misc_feature (1057)..(1059): n is a, c, g, or t
  misc_feature (1067)..(1068): n is a, c, g, or t
  misc_feature (1071)..(1071): n is a, c, g, or t
  misc_feature (1074)..(1074): n is a, c, g, or t
  misc_feature (1076)..(1076): n is a, c, g, or t
  misc_feature (1079)..(1079): n is a, c, g, or t
  misc_feature (1084)..(1084): n is a, c, g, or t
  misc_feature (1089)..(1089): n is a, c, g, or t
  misc_feature (1092)..(1092): n is a, c, g, or t
  misc_feature (1094)..(1094): n is a, c, g, or t
  misc_feature (1099)..(1099): n is a, c, g, or t
  misc_feature (1101)..(1102): n is a, c, g, or t
  misc_feature (1108)..(1108): n is a, c, g, or t
  misc_feature (1111)..(1111): n is a, c, g, or t
  misc_feature (1125)..(1125): n is a, c, g, or t
  misc_feature (1129)..(1130): n is a, c, g, or t
  misc_feature (1133)..(1134): n is a, c, g, or t
  misc_feature (1136)..(1136): n is a, c, g, or t
  misc_feature (1140)..(1143): n is a, c, g, or t
  misc_feature (1146)..(1148): n is a, c, g, or t
  misc_feature (1150)..(1153): n is a, c, g, or t
  misc_feature (1157)..(1159): n is a, c, g, or t
  misc_feature (1163)..(1163): n is a, c, g, or t
  misc_feature (1166)..(1167): n is a, c, g, or t
  misc_feature (1169)..(1171): n is a, c, g, or t
  misc_feature (1174)..(1174): n is a, c, g, or t
  misc_feature (1182)..(1182): n is a, c, g, or t
  misc_feature (1185)..(1186): n is a, c, g, or t
  misc_feature (1188)..(1189): n is a, c, g, or t
  misc_feature (1194)..(1194): n is a, c, g, or t
  misc_feature (1196)..(1207): n is a, c, g, or t
  misc_feature (1209)..(1209): n is a, c, g, or t
  misc_feature (1211)..(1212): n is a, c, g, or t
  misc_feature (1214)..(1214): n is a, c, g, or t
  misc_feature (1216)..(1217): n is a, c, g, or t
  misc_feature (1220)..(1222): n is a, c, g, or t
  misc_feature (1224)..(1224): n is a, c, g, or t
  misc_feature (1226)..(1226): n is a, c, g, or t
  misc_feature (1228)..(1228): n is a, c, g, or t
  misc_feature (1230)..(1231): n is a, c, g, or t
  misc_feature (1233)..(1233): n is a, c, g, or t
  misc_feature (1235)..(1236): n is a, c, g, or t
  misc_feature (1240)..(1241): n is a, c, g, or t
  misc_feature (1243)..(1244): n is a, c, g, or t
  misc_feature (1252)..(1252): n is a, c, g, or t
  misc_feature (1259)..(1259): n is a, c, g, or t
  misc_feature (1262)..(1264): n is a, c, g, or t
  misc_feature (1268)..(1268): n is a, c, g, or t
  misc_feature (1273)..(1274): n is a, c, g, or t
  misc_feature (1279)..(1279): n is a, c, g, or t
  misc_feature (1283)..(1283): n is a, c, g, or t
  misc_feature (1286)..(1286): n is a, c, g, or t
  misc_feature (1292)..(1292): n is a, c, g, or t
  misc_feature (1295)..(1295): n is a, c, g, or t
  misc_feature (1298)..(1300): n is a, c, g, or t
  misc_feature (1304)..(1304): n is a, c, g, or t
  misc_feature (1309)..(1310): n is a, c, g, or t
  misc_feature (1314)..(1315): n is a, c, g, or t
  misc_feature (1318)..(1320): n is a, c, g, or t
  misc_feature (1322)..(1324): n is a, c, g, or t
  misc_feature (1326)..(1326): n is a, c, g, or t
  misc_feature (1328)..(1328): n is a, c, g, or t
  misc_feature (1330)..(1331): n is a, c, g, or t
  misc_feature (1334)..(1335): n is a, c, g, or t
  misc_feature (1338)..(1341): n is a, c, g, or t
  misc_feature (1343)..(1346): n is a, c, g, or t
  misc_feature (1349)..(1350): n is a, c, g, or t
  misc_feature (1352)..(1353): n is a, c, g, or t
  misc_feature (1356)..(1356): n is a, c, g, or t
  misc_feature (1359)..(1359): n is a, c, g, or t
  misc_feature (1362)..(1362): n is a, c, g, or t
  misc_feature (1364)..(1364): n is a, c, g, or t
  misc_feature (1366)..(1366): n is a, c, g, or t
  misc_feature (1368)..(1368): n is a, c, g, or t
  misc_feature (1370)..(1373): n is a, c, g, or t
  misc_feature (1375)..(1376): n is a, c, g, or t
  misc_feature (1379)..(1380): n is a, c, g, or t
  misc_feature (1385)..(1385): n is a, c, g, or t
  misc_feature (1389)..(1390): n is a, c, g, or t
  misc_feature (1392)..(1393): n is a, c, g, or t
  misc_feature (1395)..(1395): n is a, c, g, or t
  misc_feature (1397)..(1397): n is a, c, g, or t
  misc_feature (1400)..(1401): n is a, c, g, or t
  misc_feature (1409)..(1410): n is a, c, g, or t
  misc_feature (1412)..(1414): n is a, c, g, or t
  misc_feature (1416)..(1417): n is a, c, g, or t
  misc_feature (1420)..(1422): n is a, c, g, or t
  misc_feature (1424)..(1424): n is a, c, g, or t
  misc_feature (1427)..(1427): n is a, c, g, or t
  misc_feature (1430)..(1430): n is a, c, g, or t
  misc_feature (1434)..(1435): n is a, c, g, or t
  misc_feature (1439)..(1442): n is a, c, g, or t
  misc_feature (1446)..(1446): n is a, c, g, or t
  misc_feature (1453)..(1453): n is a, c, g, or t
  misc_feature (1455)..(1455): n is a, c, g, or t
  misc_feature (1461)..(1461): n is a, c, g, or t
  misc_feature (1464)..(1464): n is a, c, g, or t
  misc_feature (1468)..(1468): n is a, c, g, or t
ggtaccgcgaacggtgcgttacttacctcgactcttagcttgtcggggacggtaaccgggacccggtgtctgctcctgtcgccttcgcctcctaatccctagccactatgcgtgagtgcatctccatccacgttggccaggctggtgtccagattggcaatgcctgctgggagctctactgcctggaacacggcatccagcccgatggccagatgccaagtgacaagaccattgggggaggagatgactccttcaacaccttcttcagtgagacgggcgctggcaagcacgtgccccggggctgtgtttgtagacttggaacccacagtcattgatgaagttcgcactggcacctaccgccagctcttccaccctgagcagctcatcacaggcaaggaagatgctgccaataactatgcccgagggcactacaccattggcaaggagatcattgaccttgtgttggaccgaattcgcaagctggctgaccagtgcaccggtcttcagggcttcttggttttccacagctttggtgggggaactggttctgggttcacctcccctgctcatggaacgtctctcagttgattatggcaagaagtccaagctggagttctccatttacccagcaccccaggtttccacagctgtagttgagccctacaactccatcctcaccacccacaccaccctggagcactctgattgtgccttcatggtagacaatgaggccatctatgacatctgtcgtagaaacctcgatattgagcgtccaacctatactaacctgaataggttaataggtcaaattgtgtcctccatcactgcttccctgagatttgatggagccctgaatgttgacctgacagaattccagaccaacctggtgccctactccccgcatccacttccctctggccacatatgcccctgtcatctctgctgagaaagcctaccatgaacagctttctgtagcagagatcaccaatgcttgctttgagccagccaaccagatggtnaaatgtnancctcnncatngtaaatacatnncttnctnnntgttgtanngtngtnangtngttanaaaanatntnaatgntnnaattgnaanaataaagaaaaagngtannatnnantttnnnnatnnntnnnnaaannnattnaanntnnnaanaaaataanacnntnnaaatntnnnnnnnnnnnnananntncnnaannnananananntntnncaannannacaaaaanaaaacanatnnntcancaatnncatanaatncanaaaaanttncannncatntatcnnaaanngcnnntnnntnantnntannttnnnnannnnatnnannaangtnagntntnanannnncnngannacatncctnncnntnanaannagtatgannannntnntgnnnantcnggngaannagannnngagnaagaagnanaggaanacnaaancagttaaaacgtcacaaaggtgctgcttttacagggaagcttattctgttttaaacattgaaaagttgtggtctgatcagttaatttgtatgtagcagtgtatgctctcatatacaattactgacctatgctctaaaacatgaatgctttgttacagacccaagctgtccatttctgtgatgggttttgaataaagtattccctgttttaaatg

SEQ ID NO: 488718 - DNA, 410 bp, Homo sapiens
  misc_feature (155)..(155): n is a, c, g, or t
tggtatgagtgcatgtcacgactattcatgctggatggaacacttacacgttctacacaatgaagcatcttctgagactcacaggagaatatggaattgtgatctaccccaatcacagtcagtgtgattatttgtattcccaaaatatctacagnatgacaggagaatagatctccgatgttcgcatggtgtggggtcaggaggctgcctcttaaacaatctccagatgtactgtgattgtgagtttgaaaacgagttcctgaagtaccacatctgggagaacatggcactaagctggaagcttccccaaaaagttctacccaaagaggctggagggaatttgtattcttcatccttagcacaaagcaccttaaaaaaagtaaaagggagctctatattccagataaaca

SEQ ID NO: 488719 - DNA, 1946 bp, Homo sapiens
  misc_feature (1836)..(1836): n is a, c, g, or t
  misc_feature (1920)..(1920): n is a, c, g, or t
gccgggcttccgcccggtctgccggcaacgctgcggccccgcccacgtcatggcgcccgaggagaacgcggggaccgaactcttgctgcagagtttcgagcgccgcttcctggcggccgctcactgcgctccttcccctggcagagcttagaagcaaagttaagagactcatcagattctgagctgctgcgggatattttgcagaagactgtgaagcatcctgtgtgtgtgaagcacccgccgtcagtcaagtatgcccggtgctttctctcagaactcatcaaaaagccctcgggaggctcggtcacactctccaagagcacagccatcatctcccacggtaccacaggcctggtcacatgggacgccgccctctaccttgcagaatgggccatcgagaacccggcagccttcactaacaggactgtcctagagcttggcagtggtgccggcctcacaggcctggccatctgcaagatgtgccgcccccgggcatacatcttcagcgactgtcacagccgggtcctcgagcagctccgagggaatgtccttctcaatggcctctcattagaggcagacatcactgccaacttagacagccccagggtgacagtggcccagctggactgggacgtcgcgacggtccatcagctctctgccttccagccagatgttgtcattgcagcagacgtgctgtattgcccagaagccatcgtgtcgctggtcggggtcctgcggaggctggctgcctgccgggagcaccagcgggctcctgaggtctacgtggcctttaccgtccgcaacccagagacgtgccagctgttcaccaccgagctaggccgggctgggatcagatgggaagtggaagctcgtcatgaccagaaactgtttccctacgaagagcacttggagatggcaatgctgaacctcacactgtaggactcacacacgactccaacgggattgtgagaatcaagtcactctcatgggaagaatttttatatgggaaagcggataaaactttcattggactggaatgtttggagaatgttaatttccaaatcaggaaccacaaactgccctctaataagacatcggctatctaagcgtgtgggtgccccctttctgccagcagttctggttcttaagaaaatcaccataaatcagacatgaaaattctggctccaaaaatagcattttctttgtgcaaataaaaacgtgtgtatcaagtatgatgttcccccaacgtggacacactcgttcctcacaaagccaagcccgctgcagctgccacatccctgggcttatggtgcagcaggtgcttttttcaagacaggaatcaaagtgttaggaacacggcagaaaggtgacacctggagaccaaatgcaggatgaggagtactgcagaggtcacagggaagtcacagaacagtaatacgctagcaggggcatggggcatgaagaacagaagacaggaagcgtttcagagactccaaagaagaaatcagggccaaccacagcttcccgggtcacagaacaattcattcaccaggtggcaccactgccgtcatttcagcttctggccactgggaggcgctgctcgaaagggtttgccctgagactccaagaagaagctgcgggaaggacagcaggggccctggggttttagcctctggcccaggagttatgtgtccataaccaaagggagcacagtctgcacccagctctcatcccatcagagctgctgcgactcccgcaggttcttccggaactggtttagcttgcctgcaggatcaggaaagtttgagaaaagcatctgcagctgagctgccagtncctctgagtcctcaaagaccaggccattttcttcatgtttcaccagctcatgtaaacacttgaagttcacagcacacacaggcnaacagcacccgaacatgtccaccacc

SEQ ID NO: 488720 - DNA, 1224 bp, Homo sapiens
ggtaccgcgaacggtgcgttacttacctcgactcttagcttgtcggggacggtaaccgggacccggtgtctgctcctgtcgccttcgcctcctaatccctagccactatgcgtgagtgcatctccatccacgttggccaggctggtgtccagattggcaatgcctgctgggagctctactgcctggaacacggcatccagcccgatggccagatgccaagtgacaagaccattgggggaggagatgactccttcaacaccttcttcagtgagacgggcgctggcaagcacgtgccccggggctgtgtttgtagacttggaacccacagtcattgatgaagttcgcactggcacctaccgccagctcttccaccctgagcagctcatcacaggcaaggaagatgctgccaataactatgcccgagggcactacaccattggcaaggagatcattgaccttgtgttggaccgaattcgcaagctggctgaccagtgcaccggtcttcagggcttcttggttttccacagctttggtgggggaactggttctgggttcacctcccctgctcatggaacgtctctcagttgattatggcaagaagtccaagctggagttctccatttacccagcaccccaggtttccacagctgtagttgagccctacaactccatcctcaccacccacaccaccctggagcactctgattgtgccttcatggtagacaatgaggccatctatgacatctgtcgtagaaacctcgatattgagcgtccaacctatactaacctgaataggttaataggtcaaattgtgtcctccatcactgcttccctgagatttgatggagccctgaatgttgacctgacagaattccagaccaacctggtgccctactccccgcatccacttccctctggccacatatgcccctgtcatctctgctgagaaagcctaccatgaacagctttctgtagcagagatcaccaatgcttgctttgagccagccaaccagatggggaatttgaccccgcatgggaattcaatggttgttgctgtggaccgagtgagtggtccaagtttaatgttgcatgcaccacaagacaggtccacagtgggttgggcccctggtcaggtggacatcgcccccttgggccggggggccgcaggcaagggttttatttggaaacagcatgttaggcggtcccggcaatggccatttcaaa

SEQ ID NO: 488721 - DNA, 481 bp, Homo sapiens
  misc_feature (189)..(189): n is a, c, g, or t
tccactctccttctgtctctccctccctccaccccgcactgcagcgcctaatagcaccggcggagtgggaagcggccgcgccgcacacagtcacaaatcttccatattactccctctcctttatttacaccgggcacacagtagcaattcaatctgaaaaagtaccgtgttttcggaggcgcgcagccnaagaaattgatgtttgtgttaatcggtcttgtaggagcctgcggggctcagagaggtgtgacgcagggatttcttctattgattaattgaattccgggcagggaggatgggaagaaaaatcaaaccctccaagtacctggaagctttggagctaggtcaggcgccctgccaacccttgcccagcctgaggtgtggggggtcccctggctctgagcccccataatgtcctcttagctcagcctcaaacctggtcgggggtcaggactccagctccaaggccggctgtggctgg

SEQ ID NO: 488722 - DNA, 366 bp, Homo sapiens
cacttagatgctagtaaacagaatctcggacgggaggctagatatcctcccttggaacagaaagagcaggcaggtgtattctcacgaaattctccagaagattccttagtacactaaagttagcacggccttggatctttttctgaaccttaaaggctataccagtgtatttccttccaggtgcagtgactcacaccagataatcccagacacttggggacggtgacacgagggacggaccagcctgacggccaggacgttcgacgaccaccctggggcgacacagataagacgacccaactctctaaaactactttaaaacattagactggggccgggcgcgagtgactcacggggggatcctct

SEQ ID NO: 488723 - DNA, 1655 bp, Homo sapiens
  misc_feature (354)..(354): n is a, c, g, or t
  misc_feature (360)..(360): n is a, c, g, or t
  misc_feature (364)..(364): n is a, c, g, or t
  misc_feature (377)..(377): n is a, c, g, or t
  misc_feature (387)..(387): n is a, c, g, or t
  misc_feature (394)..(395): n is a, c, g, or t
  misc_feature (412)..(412): n is a, c, g, or t
  misc_feature (439)..(439): n is a, c, g, or t
  misc_feature (446)..(447): n is a, c, g, or t
gaccacacatgtctgattcatacacgcttgcaacgggagttgtgagaataactgtcagtctcatagagagaaactccattactggcgaaacgcggttcaaacctttcccttgtactgcgtatagacctgtacgtagaagagtaacactccataatctacaataaccacaaagctgctcggctctatgtaagacgatcggctagtcgtaaagcgatgtgggtgcccccgttgctgcacagcgagtccgtgcattcgttagcgaaactcaccaaatctcaacatgaaaatctggtcttagttcagataaacaagtgtcctatcaagtatgacagttccccaaatgtggacacactnggttcntcanaaagccaagcccnctgcagctgncacatcnntggacacactcggttcntcacaaagccaagcccgctgcagctgncacatcnntggacacactcgttcctcacaaagccaagcccgctgcagctgccacatccctgggcttatggtgcagcaggtgcttttttcaagacaggaatcaaagtgttaggaacacggcagaaaggtgacacctggagaccaaatgcaggatgaggagtactgcagaggtcacagggaagtcacagaacagtaatacgctagcaggggcatggggcatgaagaacagaagacaggaagcgtttcagagactccaaagaagaaatcagggccaaccacagcttcccgggtcacagaacaattcattcaccaggtggcaccactgccgtcatttcagcttctggccactgggaggcgctgctcgaaagggtttgccctgagactccaagaagaagctgcgggaaggacagcaggggccctggggttttagcctctggcccaggagttatgtgtccataaccaaagggagcacagtctgcacccagctctcatcccatcagagctgctgcgactcccgcaggttcttccggaactggtttagcttgcctgcaggatcaggaaagtttgagaaaagcatctgcaaaatactaaagagcagagcttacctcattgcctgtccccaccccatcccaggtcaccacctggctgaccccaggtccccgacccaacaacaacccctcccaagtccctaactccctcacttggactcgagacccttcacaccccagcagcactccgcctccaacttgacatcacagtttctggaaacttccccgcatgtcccactttcccacacttggtgccctggagcacctcccggcctctacgtgctgcccattcccctgtgagcaccctcctctcggcctctggccaacacagtcccacccatctgtgggtaacaagggggtgtcggtgttcttttcagccttgctaaactgtctgaatcaaggatcacaaactacagcctgcaggccaaatccagcccacagcctgtgtttgtaaataaagctttattggaacaaagccacaccccttaatctacagatgatctgtggctactttcacaccacaacagagtaccatggttctgacagagactgggggaccctgtctaaatgacttctgacctggacctttactgaaaatcctcccaatcattctgttgacaagaatgatgtattactttttgcaataagaaacaagtaacctttgcaaaa

SEQ ID NO: 488724 - DNA, 322 bp, Homo sapiens
  misc_feature (307)..(307): n is a, c, g, or t
agtaaatccctgaccccatcctacagccatagatgaacccttgaagatatcaggcccaagtccgatcagcccagtctcaagaggacaaatattatgtgactcctcttatatgaggtaccctagaggatcaaatttatagagacagaaagtagaatggcagctacccaggggctgggggagaggggagagggaactgcgaagtcaatgggtccagggtttcatgggtacagagtttcaggtttgcaagatgaaaagtgttctggagatggatggagtttgaggttgcagtgagctgtgatggcaccantgcactgcagcctgg

SEQ ID NO: 488725 - DNA, 972 bp, Homo sapiens
ggcacgaggagtaatcgttctggtcactgggacacagctgcgctcgcccattctaaaaagtcagcgccctcaggcccgcgggtaaccacctcctcctgagcgcggtgaccagagcttagaagcaaagttaagagactcatcagattctgagctgctgcgggatattttgcagaagactgtgaagcatcctgtgtgtgtgaagcacccgccgtcagtcaagtatgcccggtgctttctctcagaactcatcaaaaagaacctgaagatttcaccgtagacgtgctgtattgcccagaagccatcgtgtcgctggtcggggtcctgcggaggctggctgcctgccgggagcaccagcgggctcctgaggtctacgtggcctttaccgtccgcaacccagagacgtgccagctgttcaccaccgagctagttgagtccccacgcccacccgggcctgcatggtccccgagctgtccctgcaggactccagtggaagtgaaagaactgggcgccggcgtaaagctagcatgccccacactcccacaacatgcggggaactcgggcagaggccggccaggccaaggccgggctgggatcagatgggaagtggaagctcgtcatgaccagaaactgtttccctacgaagagcacttggagatggcaatgctgaacctcacactgtaggactcacacacgactccaacgggattgtgagaatcaagtcactctcatgggaagaatttttatatgggaaagcggataaaactttcattggactggaatgtttggagaatgttaatttccaaatcaggaaccacaaactgccctctaataagacatcggctatctaagcgtgtgggtgccccctttctgccagcagttctggttcttaagaaaatcaccataaatcagacatgaaaattctggctccaaaaatagcattttctttgtgcaaataaaaacgtgtgtatcaag

SEQ ID NO: 488726 - DNA, 120 bp, Homo sapiens
cctaagtggaatgctcgctcaggtcttcagctgcgactcgcgcaccgcaccagctcctccaggtagcccttctgcgcgtagacgatgcggaacttctgctccatcttgtgccacttaggc

SEQ ID NO: 488727 - DNA, 1887 bp, Homo sapiens
  misc_feature (695)..(695): n is a, c, g, or t
  misc_feature (707)..(708): n is a, c, g, or t
  misc_feature (710)..(710): n is a, c, g, or t
  misc_feature (712)..(712): n is a, c, g, or t
  misc_feature (750)..(750): n is a, c, g, or t
  misc_feature (831)..(831): n is a, c, g, or t
  misc_feature (871)..(871): n is a, c, g, or t
  misc_feature (888)..(888): n is a, c, g, or t
  misc_feature (908)..(908): n is a, c, g, or t
  misc_feature (911)..(911): n is a, c, g, or t
  misc_feature (916)..(917): n is a, c, g, or t
  misc_feature (969)..(969): n is a, c, g, or t
  misc_feature (1006)..(1006): n is a, c, g, or t
  misc_feature (1011)..(1011): n is a, c, g, or t
  misc_feature (1108)..(1108): n is a, c, g, or t
  misc_feature (1124)..(1124): n is a, c, g, or t
  misc_feature (1133)..(1133): n is a, c, g, or t
  misc_feature (1143)..(1143): n is a, c, g, or t
  misc_feature (1147)..(1147): n is a, c, g, or t
  misc_feature (1152)..(1152): n is a, c, g, or t
  misc_feature (1178)..(1178): n is a, c, g, or t
  misc_feature (1183)..(1183): n is a, c, g, or t
  misc_feature (1186)..(1186): n is a, c, g, or t
  misc_feature (1189)..(1189): n is a, c, g, or t
  misc_feature (1209)..(1209): n is a, c, g, or t
  misc_feature (1212)..(1212): n is a, c, g, or t
  misc_feature (1215)..(1216): n is a, c, g, or t
  misc_feature (1226)..(1226): n is a, c, g, or t
  misc_feature (1229)..(1229): n is a, c, g, or t
  misc_feature (1234)..(1234): n is a, c, g, or t
  misc_feature (1254)..(1254): n is a, c, g, or t
gccgggcttccgcccggtctgccggcaacgctgcggccccgcccacgtcatggcgcccgaggagaacgcggggaccgaactcttgctgcagagtttcgagcgccgcttcctggcggccgctcactgcgctccttcccctggcagagcttagaagcaaagttaagagactcatcagattctgagctgctgcgggatattttgcagaagccctcgggaggctcggtcacactctccaagagcacagccatcatctcccacggtaccacaggcctggtcacatgggacgccgccctctaccttgcagaatgggccatcgagaacccggcagccttcactcacaggtgacctcggggcgcagggcagggcaccgaggcaggcttaccctggtgcagtcacagacacggtcccctttcctcccacctaacaggactgtcctagagcttggcagtggtgccggcctcacaggcctggccatctgcaagatgtgccgcccccgggcatacatcttcagcgactgtcacagccgggtcctcgagcagctccgagggaatgtccttctcaatggcctctcattagaggcagacatcactgccaacttagacagccccagggtgacagtggcccagctggactgggacgtcgcgacggtccatcagctctctgccttccagccagatgttgtcattgcagcaggnaatgccagcccnngnantctgtgcaggcggtgtccttgcagctctacccagtctnggtctgggaaaagggaacaatggatgctgtcaggcatggacatgatggggcttccagaagagttactctgggcctccaggntgacatcaaaggacaggggtgcctcttaaggtgaccttcnagccacagccctcttgntggagacaggcatactcccnttncagtnntcaccacatggctctgtcccagagccatgccctgtgtccttcagagaccacnggaggaaaacaaccacttctgggatgaggacagggcncttgngagaaggtggtgtttggctgggccaccaaaacccctcacccctgccagcacactcagtcccctctctggtggaacagagctctgcctgtggtcctgngtcccagccctgaaanccacaggtncagcggtggncagngacanaggcccacccctcaagccagcagacnaatcngcnganacctgaaacacgaagttcanggnagnntcaggctttntgncattnaaagccctctagataggccnacgtgctgtattgcccagaagccatcgtgtcgctggtcggggtcctgcggaggctggctgcctgccgggagcaccagcgggctcctgaggtctacgtggcctttaccgtccgcaacccagagacgtgccagctgttcaccaccgagctaggccgggctgggatcagatgggaagtggaagctcgtcatgaccagaaactgtttccctacgaagagcacttggagatggcaatgctgaacctcacactgtaggactcacacacgactccaacgggattgtgagaatcaagtcactctcatgggaagaatttttatatgggaaagcggataaaactttcattggactggaatgtttggagaatgttaatttccaaatcaggaaccacaaactgccctctaataagacatcggctatctaagcgtgtgggtgccccctttctgccagcagttctggttcttaagaaaatcaccataaatcagacatagctttatggctgactccggcccccttcagagcccatagtcacaggcctcagggctggttctgtaagtcagagctctagagaaacctggctcagtctttctcactaagtaagcagggctggagactggtgggatcttccgttcagtggct

SEQ ID NO: 488728 - DNA, 107 bp, Homo sapiens
aatggggccctgctcgaagaggcacagtatacagctgctgtgttcccagcaacactctttctcttaatcaagacccaaagtgcaagagcaggtgctgctggcatatg

SEQ ID NO: 488729 - DNA, 167 bp, Homo sapiens
ccacattaaatgggcatcgtaattaagcctcatagggatgtcatgaaactaattgatatattaaagcgagtttagaacagtgctggcacataggactaaatacatgttaactgctatgctactgctactactactagtactactattactactactacaactgctag

SEQ ID NO: 488730 - DNA, 975 bp, Homo sapiens
atttgaggtgtccccggcaagatgttatctgccacctgtcgcatcagcatggggaacatcttcgggcaacctgcttcaaggagcctttgaggcaagagaagaattgcgcatcctcatggtgtggctgccgtgatgcaggggagaccatgcatcctctactaagcggttaaggcttgggtgacgcagcgggtgcacctgacccatttccgcacctataaggcgtgcatcctgtggaaaaacctgtggaaggtataagaacatcaagacttcacatgtgttgggaacgtgggtggacaaggcatgagcatcctggccctcgtgtggcgccgactacgtctcccgagaaaccagacaaggcgcgtgatccttcgagctggactaggaatgaacagagagcgtgttgaggcgagggcccgtgagagaagtcttgagtgaccagatgctgcgcgcgatcgatccgaagctccgtggaagtgcctgtacacatcctgggtgttacggaccagatcgaagcaggggacctgccactcagatcgctcactgaatttgcggggcactgggggaatcactaggacagacgtcggtggagctgcagctctctacggaccacaaggaaactgtggtacccattcgcaggcacatcttgtcggccaaaacagccgggtcgcacggggctctcagtggaacaggaccttgacgacttggcctggtccatatctacgcctgcagtggaccagtacagctgacagggcgaacgcacagcttcccctacgtgaggccctctgttgccccttctgtatattaagctcctccatgtagggccgcacgttccggcgtcgctgcctggtgcacatatctctgcaaggcctgcttcccgttggactgtggggccctcgcagttgcccctcacaaccgcggccggagacacgtacgccgctattgggcccgtgcgccggcgcccttttttaacgtggc

SEQ ID NO: 488731 - DNA, 364 bp, Homo sapiens
cacagtagatcccctgtattttcagaactttgcgatgtttaggcaggccaagcacgattgtctgagagggagaccatcctgaccaacatggacgaaaccctctctctactaaaaattcaattagttgggtttggtggtgcacgcctgtaatcctagctacctgggaggctgaggcaggagaatgacttgaacccactaggcggagattgcagagagccaagagcgcgccagttcactacagcctgggcaacagagcaagactttgtctaacaagaggtgagcggaccatgaagtcaggcgttcaagaccagcctcggtaatgtggtggccccatctttactattcagacattagctaggcgggg

SEQ ID NO: 488732 - DNA, 330 bp, Homo sapiens
ggggtttatcccaaaattttggtgggattcatcttcatggagcaaaatagacccctggtcaaaaagtaaatgaaaaattcataaccggggaaaaatttagttggggcctaaaaagaataatggggagaaaaattccttgaagccttttgcaactggccttaagtttataaaaagggataaattttctttgatccgaaaacattctttggacatgggccggggccaacatactttttacctatggggcttccctatggccctatccctatgcctaccctatctatatgccctttaaaagggatcccccggtttaactcaaagaaaatgggt

SEQ ID NO: 488733 - DNA, 15731 bp, Homo sapiens
  misc_feature (12275)..(12275): n is a, c, g, or t
  misc_feature (12367)..(12367): n is a, c, g, or t
caacccacaccgcccctgccagccaccatggggctgccactagcccgcctggcggctgtgtgcctggccctgtctttggcagggggctcggagctccagacagagggcagaacccgataccacggccgcaacgtctgcagcacctggggcaacttccactacaagaccttcgacggggacgtcttccgcttccccggcctctgcgactacaacttcgcctccgactgccgaggctcctacaaggaatttgctgtgcacctgaagcggggtccgggccaggctgaggcccccgccggggtggagtccatcctgctgaccatcaaggatgacaccatctacctcacccgccacctggctgtgcttaacggggccgtggtcagcaccccgcactacagccccgggctgctcattgagaagagcgatgcctacaccaaagtctactcccgcgccggcctcaccctcatgtggaaccgggaggatgcactcatgctggagctggacactaagttccggaaccacacctgtggcctctgcggggactacaacggcctgcagagctattcagaattcctctctgacggcgtgctcttcagtcccctggagtttgggaacatgcagaagatcaaccagcccgatgtggtgtgtgaggatcccgaggaggaggtggcccccgcatcctgctccgagcaccgcgccgagtgtgagaggctgctgaccgccgaggccttcgcggactgtcaggacctggtgccgctggagccgtatctgcgcgcctgccagcaggaccgctgccggtgcccgggcggtgacacctgcgtctgcagcaccgtggccgagttctcccgccagtgctcccacgccggcggccggcccgggaactggaggaccgccacgctctgccccaagacctgccccgggaacctggtgtacctggagagcggctcgccctgcatggacacctgctcacacctggaggtgagcagcctgtgcgaggagcaccgcatggacggctgtttctgcccagaaggcaccgtatatgacgacatcggggacagtggctgcgttcctgtgagccagtgccactgcaggctgcacggacacctgtacacaccgggccaggagatcaccaatgactgcgagcagtgtgtctgtaacgctggccgctgggtgtgcaaagacctgccctgccccggcacctgtgccctggacggcggctcccacatcaccaccttcgatgggaagacgtacaccttccacggggactgctactatgtcctggccaagggtgaccacaacgattcctacgctctcctgggcgagctggccccctgtggctccacagacaagcagacctgcctgaagacggtggtgctgctggctgacaagaagaagaatgtggtggtcttcaagtccgatggcagtgtactgctcaacgagctgcaggtgaacctgccccacgtgaccgcgagcttctctgtcttccgcccgtcttcctaccacatcatggtgagcatggccattggcgtccggctgcaggtgcagctggccccagtcatgcaactctttgtgacactggaccaggcctcccaggggcaggtgcagggcctctgcgggaacttcaacggcctggaaggtgacgacttcaagacggccagcgggctggtggaggccacgggggccggcttttgccaacacctggaaggcacagtcaagctgccatgacaagctggactggttggacgatccctgctccctgaacatcgagagcgccaactacgccgagcactggtgctccctcctgaagaagacagagaccccctttggcaggtgccactcggctgtggaccctgctgagtattacaagaggtgcaaatatgacacgtgtaactgtcagaacaatgaggactgcctgtgcgccgccctgtcctcctacgcgcgcgcctgcaccgccaagggcgtcatgctgtggggctggcgggagcatgtctgcaacaaggatgtgggctcctgccccaactcgcaggtcttcctgtacaacctgaccacctgccagcagacctgccgctccctctccgaggccgacagccactgtctcgagggctttgcgcctgtggacggctgcggctgccctgaccacaccttcctggacgagaagggccgctgcgtacccctggccaagtgctcctgttaccaccgcggtctctacctggaggcgggggatgtggtcgtcaggcaggaagaacgatgtgtgtgccgggatgggcggctgcactgtaggcagatccggctgatcggccagagctgcacggccccaaagatccacatggactgcagcaacctgactgcactggccacctcgaagccccgagccctcagctgccagacgctggccgccggctattaccacacagagtgtgtcagtggctgtgtgtgccccgacgggctgatggatgacggccggggtggctgcgtggtggagaaggaatgcccttgcgtccataacaacgacctgtattcttccggcgccaagatcaaggtggactgcaatacctgcacctgcaagagaggacgctgggtgtgcacccaggctgtgtgccatggcacctgctccatttacgggagtggccactacatcacctttgatgggaagtactacgactttgacggacactgctcctacgtggctgttcaggactactgcggccagaactcctcactgggctcattcagcatcatcaccgagaacgtcccctgtggcactacgggcgtcacctgctccaaggccatcaagatcttcatggggaggacggagctgaagttggaagacaagcaccgtgtggtgatccagcgtgatgagggtcaccacgtggcctacaccacgcgggaggtgggccagtacctggtggtggagtccagcacgggcatcatcgtcatctgggacaagaggaccaccgtgttcatcaagctggctccctcctacaagggcaccgtgtgtggcctgtgtgggaactttgaccaccgctccaacaacgacttcaccacgcgggaccacatggtggtgagcagcgagctggacttcgggaacagctggaaggaggcccccacctgcccagatgtgagcaccaaccccgagccctgcagcctgaacccgcaccgccgctcctgggccgagaagcagtgcagcatcctcaaaagcagcgtgttcagcatctgccacagcaaggtggaccccaagcccttctacgaggcctgtgtgcacgactcgtgctcctgtgacacgggtggggactgtgagtgcttctgctctgccgtggcctcctacgcccaggagtgtaccaaagagggggcctgcgtgttctggaggacgccggacctgtgccccatattctgcgactactacaaccctccgcatgagtgtgagtggcactatgagccatgtgggaaccggagcttcgagacctgcaggaccatcaacggcatccactccaacatctccgtgtcctacctggagggctgctacccccggtgccccaaggacaggcccatctatgaggaggatctgaagaagtgtgtcactgcagacaagtgtggctgctatgtcgaggacacccactacccacctggagcatcggttcccaccgaggagacctgcaagtcctgcgtgtgtaccaactcctcccaagtcgtctgcaggccggaggaaggaaagattcttaaccagacccaggatggcgccttctgctactgggagatctgtggccccaacgggacggtggagaagcacttcaacatctgttccattacgacacgcccgtccaccctgaccaccttcaccaccatcaccctccccaccacccccacctccttcaccactaccaccaccaccaccaccccgacctccagcacagttttatcaacaactccgaagctgtgctgcctctggtctgactggatcaatgaggaccaccccagcagtggcagcgacgacggtgaccgagaaccatttgatggggtctgcggggcccctgaggacatcgagtgcaggtcggtcaaggatccccacctcagcttggagcagcatggccagaaggtgcagtgtgatgtctctgttgggttcatttgcaagaatgaagaccagtttggaaatggaccatttggactgtgttacgactacaagatacgtgtcaattgttgctggcccatggataagtgtatcaccactcccagccctccaactaccactcccagccctccaccaaccacgacgaccacccttccaccaaccaccacccccagccctccaaccaccaccacaaccacccctccaccaaccaccacccccagccctccaataaccaccacgaccacccctctaccaaccaccactcccagccctccaataagcaccacaaccacccctccaccaaccaccactcccagccctccaaccaccactcccagccctccaaccaccactcccagccctccaacaaccaccacaaccacccctccaccaaccaccactcccagccctccaatgactacgcccatcactccaccagccagcactaccacccttccaccaaccaccactcccagccctccaacaaccaccacaaccacccctccaccaaccaccactcccagtcctccaacgactacgcccatcactccaccaaccagcactactacccttccaccaaccaccactcccagccctccaccaaccaccacaaccacccctccaccaaccaccactcccagccctccaacaaccaccactcccagtcctccaacaatcaccacaaccacccctccaccaaccaccactcccagccctccaacaacgaccacaaccacccctccaccaaccaccactcccagccctccaacgactacacccatcactccaccaaccagcactaccacccttccaccaaccaccactcccagccctccaccaaccaccacaaccacccctccaccaaccaccactcccagccctccaacaaccaccactcccagccctccaataaccaccacaaccacccctccaccaaccaccactcccagctctccaataaccaccactcccagccctccaacaaccaccatgaccaccccttcaccaaccaccacccccagctctccaataaccaccacaaccaccccttcctcaactaccactcccagccctccaccaaccaccatgaccaccccttcaccaaccaccactcccagccctccaacaaccaccatgaccacccttccaccaaccaccacttccagccctctaacaactactcctctacctccatcaataactcctcctacattttcaccattctcaacgacaacccctactaccccatgcgtgcctctctgcaattggactggctggctggattctggaaaacccaactttcacaaaccaggtggagacacagaattgattggagacgtctgtggaccaggctgggcagctaacatctcttgcagagccaccatgtatcctgatgttcccattggacagcttggacaaacagtggtgtgtgatgtctctgtggggctgatatgcaaaaatgaagaccaaaagccaggtggggtcatccctatggccttctgcctcaactacgagatcaacgttcagtgctgtgagtgtgtcacccaacccaccaccatgacaaccaccaccacagagaacccaactccgccaaccacgacacccatcaccaccaccactacggtgaccccaaccccaacacccaccggcacacagaccccaaccacgacacccatcaccaccaccactacggtgaccccaaccccaacacccaccggcacacagaccccaaccacgacacccatcaccaccaccactacggtgaccccaaccccaacacccaccggcacacagaccccaaccacgacacccatcaccaccaccactacggtgaccccaaccccaacacccaccggcacacagaccccaaccacgacacccatcaccaccaccactacggtgaccccaaccccaacacccaccggcacacagaccccaaccacgacacccatcaccaccaccactacggtgaccccaaccccaacacccaccggcacacagaccccaaccacgacacccatcaccaccaccactacggtgaccccaaccccaacacccaccggcacacagaccccaaccacgacacccatcaccaccaccactacggtgaccccaaccccaacacccaccggcacacagaccccaaccacgacacccatcaccaccaccactacggtgaccccaaccccaacacccaccggcacacagaccccaaccacgacacccatcaccaccaccactacggtgaccccaaccccaacacccaccggcacacagaccccaaccacgacacccatcaccaccaccactacggtgaccccaaccccaacacccaccggcacacagaccccaaccacgacacccatcaccaccaccactacggtgaccccaaccccaacacccaccggcacacagaccccaaccacgacacccatcaccaccaccactacggtgaccccaaccccaacacccaccggcacacagaccccaaccacgacacccatcaccaccaccactacggtgaccccaaccccaacacccaccggcacacagaccccaaccacgacacccatcaccaccaccactacggtgaccccaaccccaacacccaccggcacacagaccccaaccacgacacccatcaccaccaccactacggtgaccccaaccccaacacccaccggcacacagaccccaaccacgacacccatcaccaccaccactacggtgaccccaaccccaacacccaccggcacacagaccccaaccacgacacccatcaccaccaccactacggtgaccccaaccccaacacccaccggcacacagaccccaaccacgacacccatcaccaccaccactacggtgaccccaaccccaacacccaccggcacacagaccccaaccacgacacccatcaccaccaccactacggtgaccccaaccccaacacccaccggcacacagaccccaaccacgacacccatcaccaccaccactacggtgaccccaaccccaacacccaccggcacacagaccccaaccacgacacccatcaccaccaccactacggtgaccccaaccccaacacccaccggcacacagaccccaaccacgacacccatcaccaccaccactacggtgaccccaaccccaacacccaccggcacacagaccccaaccacgacacccatcaccaccaccactacggtgaccccaaccccaacacccaccggcacacagaccccaaccacgacacccatcaccaccaccactacggtgaccccaaccccaacacccaccggcacacagaccccaaccacgacacccatcaccaccaccactacggtgaccccaaccccaacacccaccggcacacagaccccaaccacgacacccatcaccaccaccactacggtgaccccaaccccaacacccaccggcacacagaccccaaccacgacacccatcaccaccaccactacggtgaccccaaccccaacacccaccggcacacagaccccaaccacgacacccatcaccaccaccactacggtgaccccaaccccaacacccaccggcacacagaccccaaccacgacacccatcaccaccaccactacggtgaccccaaccccaacacccaccggcacacagaccccaaccacgacacccatcaccaccaccactacggtgaccccaaccccaacacccaccggcacacagaccccaaccacgacacccatcaccaccaccactacggtgaccccaaccccaacacccaccggcacacagaccccaaccacgacacccatcaccaccaccactacggtgaccccaaccccaacacccaccggcacacagaccccaaccacgacacccatcaccaccaccactacggtgaccccaaccccaacacccaccggcacacagaccccaaccacgacacccatcaccaccaccactacggtgaccccaaccccaacacccaccggcacacagaccccaaccacgacacccatcaccaccaccactacggtgaccccaaccccaacacccaccggcacacagaccccaaccacgacacccatcaccaccaccactacggtgaccccaaccccaacacccaccggcacacagaccccaaccacgacacccatcaccaccaccactacggtgaccccaaccccaacacccaccggcacacagaccccaaccacgacacccatcaccaccaccactacggtgaccccaaccccaacacccaccggcacacagaccccaaccacgacacccatcaccaccaccactacggtgaccccaaccccaacacccaccggcacacagaccccaaccacgacacccatcaccaccaccactacggtgaccccaaccccaacacccaccggcacacagaccccaaccacgacacccatcaccaccaccactacggtgaccccaaccccaacacccaccggcacacagaccccaaccacgacacccatcaccaccaccactacggtgaccccaaccccaacacccaccggcacacagaccccaaccacgacacccatcaccaccaccactacggtgaccccaaccccaacacccaccggcacacagaccccaaccacgacacccatcaccaccaccactacggtgaccccaaccccaacacccaccggcacacagaccccaaccacgacacccatcaccaccaccactacggtgaccccaaccccaacacccaccggcacacagaccccaaccacgacacccatcaccaccaccactacggtgaccccaaccccaacacccaccggcacacagaccccaaccacgacacccatcaccaccaccactacggtgaccccaaccccaacacccaccggcacacagaccccaaccacgacacccatcaccaccaccactacggtgaccccaaccccaacacccaccggcacacagaccccaaccacgacacccatcaccaccaccactacggtgaccccaaccccaacacccaccggcacacagaccccaaccacgacacccatcaccaccaccactacggtgaccccaaccccaacacccaccggcacacagaccccaaccacgacacccatcaccaccaccactacggtgaccccaaccccaacacccaccggcacacagaccccaaccacgacacccatcaccaccaccactacggtgaccccaaccccaacacccaccggcacacagaccccaaccacgacacccatcaccaccaccactacggtgaccccaaccccaacacccaccggcacacagaccccaaccacgacacccatcaccaccaccactacggtgaccccaaccccaacacccaccggcacacagaccccaaccacgacacccatcaccaccaccactacggtgaccccaaccccaacacccaccggcacacagaccccaaccacgacacccatcaccaccaccactacggtgaccccaaccccaacacccaccggcacacagaccccaaccacgacacccatcaccaccaccactacggtgaccccaaccccaacacccaccggcacacagaccccaaccacgacacccatcaccaccaccactacggtgaccccaaccccaacacccaccggcacacagaccccaaccacgacacccatcaccaccaccactacggtgaccccaaccccaacacccaccggcacacagaccccaaccacgacacccatcaccaccaccactacggtgaccccaaccccaacacccaccggcacacagaccccaaccacgacacccatcaccaccaccactacggtgaccccaaccccaacacccaccggcacacagaccccaaccacgacacccatcaccaccaccactacggtgaccccaaccccaacacccaccggcacacagaccccaaccacgacacccatcaccaccaccactacggtgaccccaaccccaacacccaccggcacacagaccccaaccacgacacccatcaccaccaccactacggtgaccccaaccccaacacccaccggcacacagaccccaaccacgacacccatcaccaccaccactacggtgaccccaaccccaacacccaccggcacacagaccccaaccacgacacccatcaccaccaccactacggtgaccccaaccccaacacccaccggcacacagaccccaaccacgacacccatcaccaccaccactacggtgaccccaaccccaacacccaccggcacacagaccccaaccacgacacccatcaccaccaccactacggtgaccccaaccccaacacccaccggcacacagaccccaaccacgacacccatcaccaccaccactacggtgaccccaaccccaacacccaccggcacacagaccccaaccacgacacccatcaccaccaccactacggtgaccccaaccccaacacccaccggcacacagaccccaaccacgacacccatcaccaccaccactacggtgaccccaaccccaacacccaccggcacacagaccccaaccacgacacccatcaccaccaccactacggtgaccccaaccccaacacccaccggcacacagaccccaaccacgacacccatcaccaccaccactacggtgaccccaaccccaacacccaccggcacacagaccccaaccacgacacccatcaccaccaccactacggtgaccccaaccccaacacccaccggcacacagaccccaaccacgacacccatcaccaccaccactacggtgaccccaaccccaacacccaccggcacacagaccccaaccacgacacccatcaccaccaccactacggtgaccccaaccccaacacccaccggcacacagaccccaaccacgacacccatcaccaccaccactacggtgaccccaaccccaacacccaccggcacacagaccccaaccacgacacccatcaccaccaccactacggtgaccccaaccccaacacccaccggcacacagaccccaaccacgacacccatcaccaccaccactacggtgaccccaaccccaacacccaccggcacacagaccccaaccacgacacccatcaccaccaccactacggtgaccccaaccccaacacccaccggcacacagaccccaaccacgacacccatcaccaccaccactacggtgaccccaaccccaacacccaccggcacacagaccccaaccacgacacccatcaccaccaccactacggtgaccccaaccccaacacccaccggcacacagaccccaaccacgacacccatcaccaccaccactacggtgaccccaaccccaacacccaccggcacacagaccccaaccacgacacccatcaccaccaccactacggtgaccccaaccccaacacccaccggcacacagaccccaaccacgacacccatcaccaccaccactacggtgaccccaaccccaacacccaccggcacacagaccccaaccacgacacccatcaccaccaccactacggtgaccccaaccccaacacccaccggcacacagaccccaaccacgacacccatcaccaccaccactacggtgaccccaaccccaacacccaccggcacacagaccccaaccacgacacccatcaccaccaccactacggtgaccccaaccccaacacccaccggcacacagaccccaaccacgacacccatcaccaccaccactacggtgaccccaaccccaacacccaccggcacacagaccccaaccacgacacccatcaccaccaccactacggtgaccccaaccccaacacccaccggcacacagaccccaaccacgacacccatcaccaccaccactacggtgaccccaaccccaacacccaccggcacacagaccccaaccacgacacccatcaccaccaccactacggtgaccccaaccccaacacccaccggcacacagaccccaaccacgacacccatcaccaccaccactacggtgaccccaaccccaacacccaccggcacacagaccccaaccacgacacccatcaccaccaccactacggtgaccccaaccccaacacccaccggcacacagaccccaaccncgacacccatcaccaccaccactacggtgaccccaaccccaacacccaccggcacacagaccccaaccacgacacccatcaccaccaccacnacggtgaccccaaccccaacacccaccggcacacagaccccaaccacgacacccatcaccaccaccactacggtgaccccaaccccaacacccaccggcacacagaccccaaccacgacacccatcaccaccaccactacggtgaccccaaccccaacacccaccggcacacagaccccaaccatgatacccatcagcaccaccactacggtgaccccaaccccaacacccaccactggaagcacggggccccccacccacacaagcacagcaccgattgctgagttgaccacatccaatcctccgcctgagtcctcaacccctcagacctctcggtccacctcttcccctctcacggagtcaaccacccttctgagtaccctaccacctgccattgagatgaccagcacggccccaccctccacacccacggcacccacgaccacgagcggaggccacacactgtctccaccgcccagcaccaccacgtcccctccaggcacccccactcgcggtaccacgaccgggtcatcttcagcccccacccccagcactgtgcagacgaccaccaccagtgcctggaccccaacgccgaccccactctccacacccagcatcatcaggaccacaggcctgaggccctacccttcctctgtgcttatctgctgtgtcctgaacgacacctactacgcaccaggtgaggaggtgtacaacggcacatacggagacacctgttatttcgtcaactgctcactgagctgtacgttggagttctataactggtcctgcccatccacgccctccccaacacccacgccctccaagtcgacgcccacgccttccaagccatcgtccacgccctccaagccgacgcccggcaccaagccccccgagtgcccagactttgatcctcccagacaggagaacgagacttggtggctgtgcgactgcttcatggccacgtgcaagtacaacaacacggtggagatcgtgaaggtggagtgtgagccgccgcccatgcccacctgctccaacggcctccaacccgtgcgcgtcgaggaccccgacggctgctgctggcactgggagtgcgactgctactgcacgggctggggcgacccgcactatgtcaccttcgacggactctactacagctaccagggcaactgcacctacgtgctggtggaggagatcagcccctccgtggacaacttcggagtttacatcgacaactaccactgcgatcccaacgacaaggtgtcctgcccccgcaccctcatcgtgcgccacgagacccaggaggtgctgatcaagaccgtgcatatgatgcccatgcaggtgcaggtgcaggtgaacaggcaggcggtggcactgccctacaagaagtacgggctggaggtgtaccagtctggcatcaactacgtggtggacatccccgagctgggtgtcctcgtctcctacaatggcctgtccttctccgtcaggctgccctaccaccggtttggcaacaacaccaagggccagtgtggcacctgcaccaacaccacctccgacgactgcattctgcccagcggggagatcgtctccaactgtgaggctgcggctgaccagtggctggtgaacgacccctccaagccacactgcccccacagcagctccacgaccaagcgcccggccgtcactgtgcccgggggcggtaaaacgaccccacacaaggactgcaccccatctcccctctgccagctcatcaaggacagcctgtttgcccagtgccacgcactggtgcccccgcagcactactacgatgcctgcgtgttcgacagctgcttcatgccgggctcgagcctggagtgcgccagtctgcaggcctacgcagccctctgtgcccagcagaacatctgcctcgactggcggaaccacacgcatggggcctgcttggtggagtgcccatctcacagggagtaccaggcctgtggccctgcagaagagcccacgtgcaaatccagctcctcccagcagaacaacacagtcctggtggaaggctgcttctgtcctgagggcaccatgaactacgctcctggctttgatgtctgcgtgaagacctgcggctgtgtgggacctgacaatgtgcccagagagtttggggagcacttcgagttcgactgcaagaactgtgtctgcctggagggtggaagtggcatcatctgccaacccaagaggtgcagccagaagcccgttacccactgcgtggaagacggcacctacctcgccacggaggtcaaccctgccgacacctgctgcaacattaccgtctgcaagtgcaacaccagcctgtgcaaagagaagccctccgtgtgcccgctgggattcgaagtgaagagcaagatggtgcctggaaggtgctgtcctttctactggtgtgagtccaagggggtgtgtgttcacgggaatgctgagtaccagcccggttctccagtttattcctccaagtgccaggactgcgtgtgcacggacaaggtggacaacaacaccctgctcaacgtcatcgcctgcacccacgtgccctgcaacacctcctgcagccctggcttcgaactcatggaggcccccggggagtgctgtaagaagtgtgaacagacgcactgtatcatcaaacggcccgacaaccagcacgtcatcctgaagcccggggacttcaagagcgacccgaagaacaactgcacattcttcagctgcgtgaagatccacaaccagctcatctcgtccgtctccaacatcacctgccccaactttgatgccagcatttgcatcccgggctccatcacattcatgcccaatggatgctgcaagacctgcacccctcgcaatgagaccagggtgccctgctccaccgtccccgtcaccacggaggtttcgtacgccggctgcaccaagaccgtcctcatgaatcattgctccgggtcctgcgggacatttgtcatgtactcggccaaggcccaggccctggaccacagctgctcctgctgcaaagaggagaaaaccagccagcgtgaggtggtcctgagctgccccaatggcggctcgctgacacacacctacacccacatcgagagctgccagtgccaggacaccgtctgcgggctccccaccggcacctcccgccgggcccggcgctcccctaggcatctggggagcgggtgagcggggtgggcacagcccccttcactgccctcgacagctttacctcccccggaccctctgagcctcctaagctcggcttcctctcttcagatatttattgtctgagtctttgttcagtccttgctttccaataataaactcagggggacatgcaaaaaaaaaa

SEQ ID NO: 488734 - DNA, 10043 bp, Homo sapiens
  misc_feature (6587)..(6587): n is a, c, g, or t
  misc_feature (6679)..(6679): n is a, c, g, or t
caacccacaccgcccctgccagccaccatggggctgccactagcccgcctggcggctgtgtgcctggccctgtctttggcagggggctcggagctccagacagagggcagaacccgataccacggccgcaacgtctgcagcacctggggcaacttccactacaagaccttcgacggggacgtcttccgcttccccggcctctgcgactacaacttcgcctccgactgccgaggctcctacaaggaatttgctgtgcacctgaagcggggtccgggccaggctgaggcccccgccggggtggagtccatcctgctgaccatcaaggatgacaccatctacctcacccgccacctggctgtgcttaacggggccgtggtcagcaccccgcactacagccccgggctgctcattgagaagagcgatgcctacaccaaagtctactcccgcgccggcctcaccctcatgtggaaccgggaggatgcactcatgctggagctggacactaagttccggaaccacacctgtggcctctgcggggactacaacggcctgcagagctattcagaattcctctctgacggcgtgctcttcagtcccctggagtttgggaacatgcagaagatcaaccagcccgatgtggtgtgtgaggatcccgaggaggaggtggcccccgcatcctgctccgagcaccgcgccgagtgtgagaggctgctgaccgccgaggccttcgcggactgtcaggacctggtgccgctggagccgtatctgcgcgcctgccagcaggaccgctgccggtgcccgggcggtgacacctgcgtctgcagcaccgtggccgagttctcccgccagtgctcccacgccggcggccggcccgggaactggaggaccgccacgctctgccccaagacctgccccgggaacctggtgtacctggagagcggctcgccctgcatggacacctgctcacacctggaggtgagcagcctgtgcgaggagcaccgcatggacggctgtttctgcccagaaggcaccgtatatgacgacatcggggacagtggctgcgttcctgtgagccagtgccactgcaggctgcacggacacctgtacacaccgggccaggagatcaccaatgactgcgagcagtgtgtctgtaacgctggccgctgggtgtgcaaagacctgccctgccccggcacctgtgccctggacggcggctcccacatcaccaccttcgatgggaagacgtacaccttccacggggactgctactatgtcctggccaagggtgaccacaacgattcctacgctctcctgggcgagctggccccctgtggctccacagacaagcagacctgcctgaagacggtggtgctgctggctgacaagaagaagaatgtggtggtcttcaagtccgatggcagtgtactgctcaacgagctgcaggtgaacctgccccacgtgaccgcgagcttctctgtcttccgcccgtcttcctaccacatcatggtgagcatggccattggcgtccggctgcaggtgcagctggccccagtcatgcaactctttgtgacactggaccaggcctcccaggggcaggtgcagggcctctgcgggaacttcaacggcctggaaggtgacgacttcaagacggccagcgggctggtggaggccacgggggccggcttttgccaacacctggaaggcacagtcaagctgccatgacaagctggactggttggacgatccctgctccctgaacatcgagagcgccaactacgccgagcactggtgctccctcctgaagaagacagagaccccctttggcaggtgccactcggctgtggaccctgctgagtattacaagaggtgcaaatatgacacgtgtaactgtcagaacaatgaggactgcctgtgcgccgccctgtcctcctacgcgcgcgcctgcaccgccaagggcgtcatgctgtggggctggcgggagcatgtctgcaacaaggatgtgggctcctgccccaactcgcaggtcttcctgtacaacctgaccacctgccagcagacctgccgctccctctccgaggccgacagccactgtctcgagggctttgcgcctgtggacggctgcggctgccctgaccacaccttcctggacgagaagggccgctgcgtacccctggccaagtgctcctgttaccaccgcggtctctacctggaggcgggggatgtggtcgtcaggcaggaagaacgatgtgtgtgccgggatgggcggctgcactgtaggcagatccggctgatcggccagagctgcacggccccaaagatccacatggactgcagcaacctgactgcactggccacctcgaagccccgagccctcagctgccagacgctggccgccggctattaccacacagagtgtgtcagtggctgtgtgtgccccgacgggctgatggatgacggccggggtggctgcgtggtggagaaggaatgcccttgcgtccataacaacgacctgtattcttccggcgccaagatcaaggtggactgcaatacctgcacctgcaagagaggacgctgggtgtgcacccaggctgtgtgccatggcacctgctccatttacgggagtggccactacatcacctttgatgggaagtactacgactttgacggacactgctcctacgtggctgttcaggactactgcggccagaactcctcactgggctcattcagcatcatcaccgagaacgtcccctgtggcactacgggcgtcacctgctccaaggccatcaagatcttcatggggaggacggagctgaagttggaagacaagcaccgtgtggtgatccagcgtgatgagggtcaccacgtggcctacaccacgcgggaggtgggccagtacctggtggtggagtccagcacgggcatcatcgtcatctgggacaagaggaccaccgtgttcatcaagctggctccctcctacaagggcaccgtgtgtggcctgtgtgggaactttgaccaccgctccaacaacgacttcaccacgcgggaccacatggtggtgagcagcgagctggacttcgggaacagctggaaggaggcccccacctgcccagatgtgagcaccaaccccgagccctgcagcctgaacccgcaccgccgctcctgggccgagaagcagtgcagcatcctcaaaagcagcgtgttcagcatctgccacagcaaggtggaccccaagcccttctacgaggcctgtgtgcacgactcgtgctcctgtgacacgggtggggactgtgagtgcttctgctctgccgtggcctcctacgcccaggagtgtaccaaagagggggcctgcgtgttctggaggacgccggacctgtgccccatattctgcgactactacaaccctccgcatgagtgtgagtggcactatgagccatgtgggaaccggagcttcgagacctgcaggaccatcaacggcatccactccaacatctccgtgtcctacctggagggctgctacccccggtgccccaaggacaggcccatctatgaggaggatctgaagaagtgtgtcactgcagacaagtgtggctgctatgtcgaggacacccactacccacctggagcatcggttcccaccgaggagacctgcaagtcctgcgtgtgtaccaactcctcccaagtcgtctgcaggccggaggaaggaaagattcttaaccagacccaggatggcgccttctgctactgggagatctgtggccccaacgggacggtggagaagcacttcaacatctgttccattacgacacgcccgtccaccctgaccaccttcaccaccatcaccctccccaccacccccacctccttcaccactaccaccaccaccaccaccccgacctccagcacagttttatcaacaactccgaagctgtgctgcctctggtctgactggatcaatgaggaccaccccagcagtggcagcgacgacggtgaccgagaaccatttgatggggtctgcggggcccctgaggacatcgagtgcaggtcggtcaaggatccccacctcagcttggagcagcatggccagaaggtgcagtgtgatgtctctgttgggttcatttgcaagaatgaagaccagtttggaaatggaccatttggactgtgttacgactacaagatacgtgtcaattgttgctggcccatggataagtgtatcaccactcccagccctccaactaccactcccagccctccaccaaccacgacgaccacccttccaccaaccaccacccccagccctccaaccaccaccacaaccacccctccaccaaccaccacccccagccctccaataaccaccacgaccacccctctaccaaccaccactcccagccctccaataagcaccacaaccacccctccaccaaccaccactcccagccctccaaccaccactcccagccctccaaccaccactcccagccctccaacaaccaccacaaccacccctccaccaaccaccactcccagccctccaatgactacgcccatcactccaccagccagcactaccacccttccaccaaccaccactcccagccctccaacaaccaccacaaccacccctccaccaaccaccactcccagtcctccaacgactacgcccatcactccaccaaccagcactactacccttccaccaaccaccactcccagccctccaccaaccaccacaaccacccctccaccaaccaccactcccagccctccaacaaccaccactcccagtcctccaacaatcaccacaaccacccctccaccaaccaccactcccagccctccaacaacgaccacaaccacccctccaccaaccaccactcccagccctccaacgactacacccatcactccaccaaccagcactaccacccttccaccaaccaccactcccagccctccaccaaccaccacaaccacccctccaccaaccaccactcccagccctccaacaaccaccactcccagccctccaataaccaccacaaccacccctccaccaaccaccactcccagctctccaataaccaccactcccagccctccaacaaccaccatgaccaccccttcaccaaccaccacccccagctctccaataaccaccacaaccaccccttcctcaactaccactcccagccctccaccaaccaccatgaccaccccttcaccaaccaccactcccagccctccaacaaccaccatgaccacccttccaccaaccaccacttccagccctctaacaactactcctctacctccatcaataactcctcctacattttcaccattctcaacgacaacccctactaccccatgcgtgcctctctgcaattggactggctggctggattctggaaaacccaactttcacaaaccaggtggagacacagaattgattggagacgtctgtggaccaggctgggcagctaacatctcttgcagagccaccatgtatcctgatgttcccattggacagcttggacaaacagtggtgtgtgatgtctctgtggggctgatatgcaaaaatgaagaccaaaagccaggtggggtcatccctatggccttctgcctcaactacgagatcaacgttcagtgctgtgagtgtgtcacccaacccaccaccatgacaaccaccaccacagagaacccaactccgccaaccacgacacccatcaccaccaccactacggtgaccccaaccccaacacccaccggcacacagaccccaaccacgacacccatcaccaccaccactacggtgaccccaaccccaacacccaccggcacacagaccccaaccacgacacccatcaccaccaccactacggtgaccccaaccccaacacccaccggcacacagaccccaaccacgacacccatcaccaccaccactacggtgaccccaaccccaacacccaccggcacacagaccccaaccacgacacccatcaccaccaccactacggtgaccccaaccccaacacccatcaccaccaccactacggtgaccccaaccccaacacccaccggcacacagaccccaaccacgacacccatcaccaccaccactacggtgaccccaaccccaacacccaccggcacacagaccccaaccacgacacccatcaccaccaccactacggtgaccccaaccccaacacccaccggcacacagaccccaaccacgacacccatcaccaccaccactacggtgaccccaaccccaacacccaccggcacacagaccccaaccacgacacccatcaccaccaccactacggtgaccccaaccccaacacccaccggcacacagaccccaaccacgacacccatcaccaccaccactacggtgaccccaaccccaacacccaccggcacacagaccccaaccacgacacccatcaccaccaccactacggtgaccccaaccccaacacccaccggcacacagaccccaaccacgacacccatcaccaccaccactacggtgaccccaaccccaacacccaccggcacacagaccccaaccncgacacccatcaccaccaccactacggtgaccccaaccccaacacccaccggcacacagaccccaaccacgacacccatcaccaccaccacnacggtgaccccaaccccaacacccaccggcacacagaccccaaccacgacacccatcaccaccaccactacggtgaccccaaccccaacacccaccggcacacagaccccaaccacgacacccatcaccaccaccactacggtgaccccaaccccaacacccaccggcacacagaccccaaccatgatacccatcagcaccaccactacggtgaccccaaccccaacacccaccactggaagcacggggccccccacccacacaagcacagcaccgattgctgagttgaccacatccaatcctccgcctgagtcctcaacccctcagacctctcggtccacctcttcccctctcacggagtcaaccacccttctgagtaccctaccacctgccattgagatgaccagcacggccccaccctccacacccacggcacccacgaccacgagcggaggccacacactgtctccaccgcccagcaccaccacgtcccctccaggcacccccactcgcggtaccacgaccgggtcatcttcagcccccacccccagcactgtgcagacgaccaccaccagtgcctggaccccaacgccgaccccactctccacacccagcatcatcaggaccacaggcctgaggccctacccttcctctgtgcttatctgctgtgtcctgaacgacacctactacgcaccaggtgaggaggtgtacaacggcacatacggagacacctgttatttcgtcaactgctcactgagctgtacgttggagttctataactggtcctgcccatccacgccctccccaacacccacgccctccaagtcgacgcccacgccttccaagccatcgtccacgccctccaagccgacgcccggcaccaagccccccgagtgcccagactttgatcctcccagacaggagaacgagacttggtggctgtgcgactgcttcatggccacgtgcaagtacaacaacacggtggagatcgtgaaggtggagtgtgagccgccgcccatgcccacctgctccaacggcctccaacccgtgcgcgtcgaggaccccgacggctgctgctggcactgggagtgcgactgctactgcacgggctggggcgacccgcactatgtcaccttcgacggactctactacagctaccagggcaactgcacctacgtgctggtggaggagatcagcccctccgtggacaacttcggagtttacatcgacaactaccactgcgatcccaacgacaaggtgtcctgcccccgcaccctcatcgtgcgccacgagacccaggaggtgctgatcaagaccgtgcatatgatgcccatgcaggtgcaggtgcaggtgaacaggcaggcggtggcactgccctacaagaagtacgggctggaggtgtaccagtctggcatcaactacgtggtggacatccccgagctgggtgtcctcgtctcctacaatggcctgtccttctccgtcaggctgccctaccaccggtttggcaacaacaccaagggccagtgtggcacctgcaccaacaccacctccgacgactgcattctgcccagcggggagatcgtctccaactgtgaggctgcggctgaccagtggctggtgaacgacccctccaagccacactgcccccacagcagctccacgaccaagcgcccggccgtcactgtgcccgggggcggtaaaacgaccccacacaaggactgcaccccatctcccctctgccagctcatcaaggacagcctgtttgcccagtgccacgcactggtgcccccgcagcactactacgatgcctgcgtgttcgacagctgcttcatgccgggctcgagcctggagtgcgccagtctgcaggcctacgcagccctctgtgcccagcagaacatctgcctcgactggcggaaccacacgcatggggcctgcttggtggagtgcccatctcacagggagtaccaggcctgtggccctgcagaagagcccacgtgcaaatccagctcctcccagcagaacaacacagtcctggtggaaggctgcttctgtcctgagggcaccatgaactacgctcctggctttgatgtctgcgtgaagacctgcggctgtgtgggacctgacaatgtgcccagagagtttggggagcacttcgagttcgactgcaagaactgtgtctgcctggagggtggaagtggcatcatctgccaacccaagaggtgcagccagaagcccgttacccactgcgtggaagacggcacctacctcgccacggaggtcaaccctgccgacacctgctgcaacattaccgtctgcaagtgcaacaccagcctgtgcaaagagaagccctccgtgtgcccgctgggattcgaagtgaagagcaagatggtgcctggaaggtgctgtcctttctactggtgtgagtccaagggggtgtgtgttcacgggaatgctgagtaccagcccggttctccagtttattcctccaagtgccaggactgcgtgtgcacggacaaggtggacaacaacaccctgctcaacgtcatcgcctgcacccacgtgccctgcaacacctcctgcagccctggcttcgaactcatggaggcccccggggagtgctgtaagaagtgtgaacagacgcactgtatcatcaaacggcccgacaaccagcacgtcatcctgaagcccggggacttcaagagcgacccgaagaacaactgcacattcttcagctgcgtgaagatccacaaccagctcatctcgtccgtctccaacatcacctgccccaactttgatgccagcatttgcatcccgggctccatcacattcatgcccaatggatgctgcaagacctgcacccctcgcaatgagaccagggtgccctgctccaccgtccccgtcaccacggaggtttcgtacgccggctgcaccaagaccgtcctcatgaatcattgctccgggtcctgcgggacatttgtcatgtactcggccaaggcccaggccctggaccacagctgctcctgctgcaaagaggagaaaaccagccagcgtgaggtggtcctgagctgccccaatggcggctcgctgacacacacctacacccacatcgagagctgccagtgccaggacaccgtctgcgggctccccaccggcacctcccgccgggcccggcgctcccctaggcatctggggagcgggtgagcggggtgggcacagcccccttcactgccctcgacagctttacctcccccggaccctctgagcctcctaagctcggcttcctctcttcagatatttattgtctgagtctttgttcagtccttgctttccaataataaactcagggggacatgcaaaaaaaaaa

SEQ ID NO: 488735 - DNA, 293 bp, Homo sapiens
acaaagaatgtactgataacaaacacaggcgaaatggtggttagtaagcgtcgagccttataaaatttacatccacgactgtttcacagacaagattgctctctccagaaacactagccagtcaacaagcagcaaacgaaaccctcatattcacatcccatttgcacataatttcagcctaaacatatattttgctcggaaatgcattaaatggtgcagtgtgtcgaaatcgcatcttttttcaaaattcttattttttaacacacaaggcatgattatgcatttcagaagtc

SEQ ID NO: 488736 - DNA, 923 bp, Homo sapiens
tcctacaatgccgccgtggacacagtggaggaagcaaaggagcctgttgaagtgacatcactgagctctgccgggacaatgtctccaaaatggcacttacctgactggggaacttgacggccaccagtgaagaactataagctcctggaaaatatgaataaactcaccagcttgaagtatcttgaaaactgacaagatatggctatacaacattagtaggaaccttaccggaccttaacacccagaaatatgctggactgcagccttatctggatcagactcaatgtcattgaagagcaggtagcagctcttgagcaggcagcttacaagtgggactgcttattcaaaaacacactggaacgccaagtacaagaacgctggagaagcgatgagaaacttattttctactgggacagagtcttttatttctttcaacatgtcgaacgcaactgctctaataacaaccggaaatccttgaggctgcactgcactggtgaacaatcctcaaacaacggaaattattgctggtcaatcacaggaacatcccaacgttcagagcaacactggcaggcacggggcttatccctgcaaacctccttggaagacagaaatcccgtcagaattctccaacgttaataactttccaacctttacttgagtgcttggcaattcttcagcgaccagacacccccacaacgttcagcacaccacgcctggcttaccagtaaaactaaaagtaaggcccatttcccctggagtgggcgggacgacacaatattactaagaggaggatacgccaccaaggcaccgccagcccggacacgaagccaagggttgaccacgatccctatttacagaaacacacaccttgttctgcgctaccactgagtcgacacttcccactggcaccacactagcacacg

SEQ ID NO: 488737 - DNA, 8960 bp, Homo sapiens
caacccacaccgcccctgccagccaccatggggctgccactagcccgcctggcggctgtgtgcctggccctgtctttggcagggggctcggagctccagacagagggcagaacccgataccacggccgcaacgtctgcagcacctggggcaacttccactacaagaccttcgacggggacgtcttccgcttccccggcctctgcgactacaacttcgcctccgactgccgaggctcctacaaggaatttgctgtgcacctgaagcggggtccgggccaggctgaggcccccgccggggtggagtccatcctgctgaccatcaaggatgacaccatctacctcacccgccacctggctgtgcttaacggggccgtggtcagcaccccgcactacagccccgggctgctcattgagaagagcgatgcctacaccaaagtctactcccgcgccggcctcaccctcatgtggaaccgggaggatgcactcatgctggagctggacactaagttccggaaccacacctgtggcctctgcggggactacaacggcctgcagagctattcagaattcctctctgacggcgtgctcttcagtcccctggagtttgggaacatgcagaagatcaaccagcccgatgtggtgtgtgaggatcccgaggaggaggtggcccccgcatcctgctccgagcaccgcgccgagtgtgagaggctgctgaccgccgaggccttcgcggactgtcaggacctggtgccgctggagccgtatctgcgcgcctgccagcaggaccgctgccggtgcccgggcggtgacacctgcgtctgcagcaccgtggccgagttctcccgccagtgctcccacgccggcggccggcccgggaactggaggaccgccacgctctgccccaagacctgccccgggaacctggtgtacctggagagcggctcgccctgcatggacacctgctcacacctggaggtgagcagcctgtgcgaggagcaccgcatggacggctgtttctgcccagaaggcaccgtatatgacgacatcggggacagtggctgcgttcctgtgagccagtgccactgcaggctgcacggacacctgtacacaccgggccaggagatcaccaatgactgcgagcagtgtgtctgtaacgctggccgctgggtgtgcaaagacctgccctgccccggcacctgtgccctggacggcggctcccacatcaccaccttcgatgggaagacgtacaccttccacggggactgctactatgtcctggccaagggtgaccacaacgattcctacgctctcctgggcgagctggccccctgtggctccacagacaagcagacctgcctgaagacggtggtgctgctggctgacaagaagaagaatgtggtggtcttcaagtccgatggcagtgtactgctcaacgagctgcaggtgaacctgccccacgtgaccgcgagcttctctgtcttccgcccgtcttcctaccacatcatggtgagcatggccattggcgtccggctgcaggtgcagctggccccagtcatgcaactctttgtgacactggaccaggcctcccaggggcaggtgcagggcctctgcgggaacttcaacggcctggaaggtgacgacttcaagacggccagcgggctggtggaggccacgggggccggcttttgccaacacctggaaggcacagtcaagctgccatgacaagctggactggttggacgatccctgctccctgaacatcgagagcgccaactacgccgagcactggtgctccctcctgaagaagacagagaccccctttggcaggtgccactcggctgtggaccctgctgagtattacaagaggtgcaaatatgacacgtgtaactgtcagaacaatgaggactgcctgtgcgccgccctgtcctcctacgcgcgcgcctgcaccgccaagggcgtcatgctgtggggctggcgggagcatgtctgcaacaaggatgtgggctcctgccccaactcgcaggtcttcctgtacaacctgaccacctgccagcagacctgccgctccctctccgaggccgacagccactgtctcgagggctttgcgcctgtggacggctgcggctgccctgaccacaccttcctggacgagaagggccgctgcgtacccctggccaagtgctcctgttaccaccgcggtctctacctggaggcgggggatgtggtcgtcaggcaggaagaacgatgtgtgtgccgggatgggcggctgcactgtaggcagatccggctgatcggccagagctgcacggccccaaagatccacatggactgcagcaacctgactgcactggccacctcgaagccccgagccctcagctgccagacgctggccgccggctattaccacacagagtgtgtcagtggctgtgtgtgccccgacgggctgatggatgacggccggggtggctgcgtggtggagaaggaatgcccttgcgtccataacaacgacctgtattcttccggcgccaagatcaaggtggactgcaatacctgcacctgcaagagaggacgctgggtgtgcacccaggctgtgtgccatggcacctgctccatttacgggagtggccactacatcacctttgatgggaagtactacgactttgacggacactgctcctacgtggctgttcaggactactgcggccagaactcctcactgggctcattcagcatcatcaccgagaacgtcccctgtggcactacgggcgtcacctgctccaaggccatcaagatcttcatggggaggacggagctgaagttggaagacaagcaccgtgtggtgatccagcgtgatgagggtcaccacgtggcctacaccacgcgggaggtgggccagtacctggtggtggagtccagcacgggcatcatcgtcatctgggacaagaggaccaccgtgttcatcaagctggctccctcctacaagggcaccgtgtgtggcctgtgtgggaactttgaccaccgctccaacaacgacttcaccacgcgggaccacatggtggtgagcagcgagctggacttcgggaacagctggaaggaggcccccacctgcccagatgtgagcaccaaccccgagccctgcagcctgaacccgcaccgccgctcctgggccgagaagcagtgcagcatcctcaaaagcagcgtgttcagcatctgccacagcaaggtggaccccaagcccttctacgaggcctgtgtgcacgactcgtgctcctgtgacacgggtggggactgtgagtgcttctgctctgccgtggcctcctacgcccaggagtgtaccaaagagggggcctgcgtgttctggaggacgccggacctgtgccccatattctgcgactactacaaccctccgcatgagtgtgagtggcactatgagccatgtgggaaccggagcttcgagacctgcaggaccatcaacggcatccactccaacatctccgtgtcctacctggagggctgctacccccggtgccccaaggacaggcccatctatgaggaggatctgaagaagtgtgtcactgcagacaagtgtggctgctatgtcgaggacacccactacccacctggagcatcggttcccaccgaggagacctgcaagtcctgcgtgtgtaccaactcctcccaagtcgtctgcaggccggaggaaggaaagattcttaaccagacccaggatggcgccttctgctactgggagatctgtggccccaacgggacggtggagaagcacttcaacatctgttccattacgacacgcccgtccaccctgaccaccttcaccaccatcaccctccccaccacccccacctccttcaccactaccaccaccaccaccaccccgacctccagcacagttttatcaacaactccgaagctgtgctgcctctggtctgactggatcaatgaggaccaccccagcagtggcagcgacgacggtgaccgagaaccatttgatggggtctgcggggcccctgaggacatcgagtgcaggtcggtcaaggatccccacctcagcttggagcagcatggccagaaggtgcagtgtgatgtctctgttgggttcatttgcaagaatgaagaccagtttggaaatggaccatttggactgtgttacgactacaagatacgtgtcaattgttgctggcccatggataagtgtatcaccactcccagccctccaactaccactcccagccctccaccaaccacgacgaccacccttccaccaaccaccacccccagccctccaaccaccaccacaaccacccctccaccaaccaccacccccagccctccaataaccaccacgaccacccctctaccaaccaccactcccagccctccaataagcaccacaaccacccctccaccaaccaccactcccagccctccaaccaccactcccagccctccaaccaccactcccagccctccaacaaccaccacaaccacccctccaccaaccaccactcccagccctccaatgactacgcccatcactccaccagccagcactaccacccttccaccaaccaccactcccagccctccaacaaccaccacaaccacccctccaccaaccaccactcccagtcctccaacgactacgcccatcactccaccaaccagcactactacccttccaccaaccaccactcccagccctccaccaaccaccacaaccacccctccaccaaccaccactcccagccctccaacaaccaccactcccagtcctccaacaatcaccacaaccacccctccaccaaccaccactcccagccctccaacaacgaccacaaccacccctccaccaaccaccactcccagccctccaacgactacacccatcactccaccaaccagcactaccacccttccaccaaccaccactcccagccctccaccaaccaccacaaccacccctccaccaaccaccactcccagccctccaacaaccaccactcccagccctccaataaccaccacaaccacccctccaccaaccaccactcccagctctccaataaccaccactcccagccctccaacaaccaccatgaccaccccttcaccaaccaccacccccagctctccaataaccaccacaaccaccccttcctcaactaccactcccagccctccaccaaccaccatgaccaccccttcaccaaccaccactcccagccctccaacaaccaccatgaccacccttccaccaaccaccacttccagccctctaacaactactcctctacctccatcaataactcctcctacattttcaccattctcaacgacaacccctactaccccatgcgtgcctctctgcaattggactggctggctggattctggaaaacccaactttcacaaaccaggtggagacacagaattgattggagacgtctgtggaccaggctgggcagctaacatctcttgcagagccaccatgtatcctgatgttcccattggacagcttggacaaacagtggtgtgtgatgtctctgtggggctgatatgcaaaaatgaagaccaaaagccaggtggggtcatccctatggccttctgcctcaactacgagatcaacgttcagtgctgtgagtgtgtcacccaacccaccaccatgacaaccaccaccacagagaacccaactccgacacccatcaccaccaccactacggtgaccccaaccccaacacccaccggcacacagaccccaaccatgatacccatcagcaccaccactacggtgaccccaaccccaacacccaccactggaagcacggggccccccacccacacaagcacagcaccgattgctgagttgaccacatccaatcctccgcctgagtcctcaacccctcagacctctcggtccacctcttcccctctcacggagtcaaccacccttctgagtaccctaccacctgccattgagatgaccagcacggccccaccctccacacccacggcacccacgaccacgagcggaggccacacactgtctccaccgcccagcaccaccacgtcccctccaggcacccccactcgcggtaccacgaccgggtcatcttcagcccccacccccagcactgtgcagacgaccaccaccagtgcctggaccccaacgccgaccccactctccacacccagcatcatcaggaccacaggcctgaggccctacccttcctctgtgcttatctgctgtgtcctgaacgacacctactacgcaccaggtgaggaggtgtacaacggcacatacggagacacctgttatttcgtcaactgctcactgagctgtacgttggagttctataactggtcctgcccatccacgccctccccaacacccacgccctccaagtcgacgcccacgccttccaagccatcgtccacgccctccaagccgacgcccggcaccaagccccccgagtgcccagactttgatcctcccagacaggagaacgagacttggtggctgtgcgactgcttcatggccacgtgcaagtacaacaacacggtggagatcgtgaaggtggagtgtgagccgccgcccatgcccacctgctccaacggcctccaacccgtgcgcgtcgaggaccccgacggctgctgctggcactgggagtgcgactgctactgcacgggctggggcgacccgcactatgtcaccttcgacggactctactacagctaccagggcaactgcacctacgtgctggtggaggagatcagcccctccgtggacaacttcggagtttacatcgacaactaccactgcgatcccaacgacaaggtgtcctgcccccgcaccctcatcgtgcgccacgagacccaggaggtgctgatcaagaccgtgcatatgatgcccatgcaggtgcaggtgcaggtgaacaggcaggcggtggcactgccctacaagaagtacgggctggaggtgtaccagtctggcatcaactacgtggtggacatccccgagctgggtgtcctcgtctcctacaatggcctgtccttctccgtcaggctgccctaccaccggtttggcaacaacaccaagggccagtgtggcacctgcaccaacaccacctccgacgactgcattctgcccagcggggagatcgtctccaactgtgaggctgcggctgaccagtggctggtgaacgacccctccaagccacactgcccccacagcagctccacgaccaagcgcccggccgtcactgtgcccgggggcggtaaaacgaccccacacaaggactgcaccccatctcccctctgccagctcatcaaggacagcctgtttgcccagtgccacgcactggtgcccccgcagcactactacgatgcctgcgtgttcgacagctgcttcatgccgggctcgagcctggagtgcgccagtctgcaggcctacgcagccctctgtgcccagcagaacatctgcctcgactggcggaaccacacgcatggggcctgcttggtggagtgcccatctcacagggagtaccaggcctgtggccctgcagaagagcccacgtgcaaatccagctcctcccagcagaacaacacagtcctggtggaaggctgcttctgtcctgagggcaccatgaactacgctcctggctttgatgtctgcgtgaagacctgcggctgtgtgggacctgacaatgtgcccagagagtttggggagcacttcgagttcgactgcaagaactgtgtctgcctggagggtggaagtggcatcatctgccaacccaagaggtgcagccagaagcccgttacccactgcgtggaagacggcacctacctcgccacggaggtcaaccctgccgacacctgctgcaacattaccgtctgcaagtgcaacaccagcctgtgcaaagagaagccctccgtgtgcccgctgggattcgaagtgaagagcaagatggtgcctggaaggtgctgtcctttctactggtgtgagtccaagggggtgtgtgttcacgggaatgctgagtaccagcccggttctccagtttattcctccaagtgccaggactgcgtgtgcacggacaaggtggacaacaacaccctgctcaacgtcatcgcctgcacccacgtgccctgcaacacctcctgcagccctggcttcgaactcatggaggcccccggggagtgctgtaagaagtgtgaacagacgcactgtatcatcaaacggcccgacaaccagcacgtcatcctgaagcccggggacttcaagagcgacccgaagaacaactgcacattcttcagctgcgtgaagatccacaaccagctcatctcgtccgtctccaacatcacctgccccaactttgatgccagcatttgcatcccgggctccatcacattcatgcccaatggatgctgcaagacctgcacccctcgcaatgagaccagggtgccctgctccaccgtccccgtcaccacggaggtttcgtacgccggctgcaccaagaccgtcctcatgaatcattgctccgggtcctgcgggacatttgtcatgtactcggccaaggcccaggccctggaccacagctgctcctgctgcaaagaggagaaaaccagccagcgtgaggtggtcctgagctgccccaatggcggctcgctgacacacacctacacccacatcgagagctgccagtgccaggacaccgtctgcgggctccccaccggcacctcccgccgggcccggcgctcccctaggcatctggggagcgggtgagcggggtgggcacagcccccttcactgccctcgacagctttacctcccccggaccctctgagcctcctaagctcggcttcctctcttcagatatttattgtctgagtctttgttcagtccttgctttccaataataaactcagggggacatgcaaaaaaaaaa

SEQ ID NO: 488738 - DNA, 675 bp, Homo sapiens
  misc_feature (103)..(104): n is a, c, g, or t
  misc_feature (460)..(460): n is a, c, g, or t
  misc_feature (609)..(609): n is a, c, g, or t
  misc_feature (620)..(620): n is a, c, g, or t
ataaaggaaacgaggatttaataccgaggtcaataacttaaaaatgtgtaactgtaaaagtgagataatctaaacttacattcttccagctatgccatttttnngtattcaaactgtgccttttatgtaaatagcctaattatgtttcaacagaactaacacttgaggtcaaattctttcatatgtgtaaaataaaaatgctattccaaagtagcaaaggctgggcatggtggctcatgcctgtaatcccagtactttgggaggccaaggcgggcggatcacctgaggtcaggagttcaagaccagcctgaccaacacggagaaaccccatctttactaaaaatacaaattagctgggtgtggtggtgcatgcgtgtaaccccagctatttgggagactgagacaggagaatcacttgaactgggaggtggagcctgcagtaagccaagatcgcaccatngcactccagcctggttaacaaaagcaaaactctgtctcaaaaaaagaaaaaaagagaaagggtggaaaagagggattccagagtgccaggcacacagattttctggaaggttacatgaggacgctgtggttgaatgtgtccccaaagtntgtgttggaantcaaccctaatgcacagtgtgtcagggaccttagagggatagtatgaggtctgct

SEQ ID NO: 488739 - DNA, 4892 bp, Homo sapiens
  misc_feature (1436)..(1436): n is a, c, g, or t
  misc_feature (1528)..(1528): n is a, c, g, or t
acgcatcacctaaatctattgctgttctatgatttcccccttatgtcactcatcaccacaatgacacccccttacaatcaccactcccagccctccaacaaccaccatgaccacccttccaccaaccaccacttccagccctctaacaactactcctctacctccatcaataactcctcctacattttcaccattctcaacgacaacccctactaccccatgcgtgcctctctgcaattggactggctggctggattctggaaaacccaactttcacaaaccaggtggagacacagaattgattggagacgtctgtggaccaggctgggcagctaacatctcttgcagagccaccatgtatcctgatgttcccattggacagcttggacaaacagtggtgtgtgatgtctctgtggggctgatatgcaaaaatgaagaccaaaagccaggtggggtcatccctatggccttctgcctcaactacgagatcaacgttcagtgctgtgagtgtgtcacccaacccaccaccatgacaaccaccaccacagagaacccaactccgccaaccacgacacccatcaccaccaccactacggtgaccccaaccccaacacccaccggcacacagaccccaaccacgacacccatcaccaccaccactacggtgaccccaaccccaacacccaccggcacacagaccccaaccacgacacccatcaccaccaccactacggtgaccccaaccccaacacccaccggcacacagaccccaaccacgacacccatcaccaccaccactacggtgaccccaaccccaacacccaccggcacacagaccccaaccacgacacccatcaccaccaccactacggtgaccccaaccccaacacccatcaccaccaccactacggtgaccccaaccccaacacccaccggcacacagaccccaaccacgacacccatcaccaccaccactacggtgaccccaaccccaacacccaccggcacacagaccccaaccacgacacccatcaccaccaccactacggtgaccccaaccccaacacccaccggcacacagaccccaaccacgacacccatcaccaccaccactacggtgaccccaaccccaacacccaccggcacacagaccccaaccacgacacccatcaccaccaccactacggtgaccccaaccccaacacccaccggcacacagaccccaaccacgacacccatcaccaccaccactacggtgaccccaaccccaacacccaccggcacacagaccccaaccacgacacccatcaccaccaccactacggtgaccccaaccccaacacccaccggcacacagaccccaaccacgacacccatcaccaccaccactacggtgaccccaaccccaacacccaccggcacacagaccccaaccncgacacccatcaccaccaccactacggtgaccccaaccccaacacccaccggcacacagaccccaaccacgacacccatcaccaccaccacnacggtgaccccaaccccaacacccaccggcacacagaccccaaccacgacacccatcaccaccaccactacggtgaccccaaccccaacacccaccggcacacagaccccaaccacgacacccatcaccaccaccactacggtgaccccaaccccaacacccaccggcacacagaccccaaccatgatacccatcagcaccaccactacggtgaccccaaccccaacacccaccactggaagcacggggccccccacccacacaagcacagcaccgattgctgagttgaccacatccaatcctccgcctgagtcctcaacccctcagacctctcggtccacctcttcccctctcacggagtcaaccacccttctgagtaccctaccacctgccattgagatgaccagcacggccccaccctccacacccacggcacccacgaccacgagcggaggccacacactgtctccaccgcccagcaccaccacgtcccctccaggcacccccactcgcggtaccacgaccgggtcatcttcagcccccacccccagcactgtgcagacgaccaccaccagtgcctggaccccaacgccgaccccactctccacacccagcatcatcaggaccacaggcctgaggccctacccttcctctgtgcttatctgctgtgtcctgaacgacacctactacgcaccaggtgaggaggtgtacaacggcacatacggagacacctgttatttcgtcaactgctcactgagctgtacgttggagttctataactggtcctgcccatccacgccctccccaacacccacgccctccaagtcgacgcccacgccttccaagccatcgtccacgccctccaagccgacgcccggcaccaagccccccgagtgcccagactttgatcctcccagacaggagaacgagacttggtggctgtgcgactgcttcatggccacgtgcaagtacaacaacacggtggagatcgtgaaggtggagtgtgagccgccgcccatgcccacctgctccaacggcctccaacccgtgcgcgtcgaggaccccgacggctgctgctggcactgggagtgcgactgctactgcacgggctggggcgacccgcactatgtcaccttcgacggactctactacagctaccagggcaactgcacctacgtgctggtggaggagatcagcccctccgtggacaacttcggagtttacatcgacaactaccactgcgatcccaacgacaaggtgtcctgcccccgcaccctcatcgtgcgccacgagacccaggaggtgctgatcaagaccgtgcatatgatgcccatgcaggtgcaggtgcaggtgaacaggcaggcggtggcactgccctacaagaagtacgggctggaggtgtaccagtctggcatcaactacgtggtggacatccccgagctgggtgtcctcgtctcctacaatggcctgtccttctccgtcaggctgccctaccaccggtttggcaacaacaccaagggccagtgtggcacctgcaccaacaccacctccgacgactgcattctgcccagcggggagatcgtctccaactgtgaggctgcggctgaccagtggctggtgaacgacccctccaagccacactgcccccacagcagctccacgaccaagcgcccggccgtcactgtgcccgggggcggtaaaacgaccccacacaaggactgcaccccatctcccctctgccagctcatcaaggacagcctgtttgcccagtgccacgcactggtgcccccgcagcactactacgatgcctgcgtgttcgacagctgcttcatgccgggctcgagcctggagtgcgccagtctgcaggcctacgcagccctctgtgcccagcagaacatctgcctcgactggcggaaccacacgcatggggcctgcttggtggagtgcccatctcacagggagtaccaggcctgtggccctgcagaagagcccacgtgcaaatccagctcctcccagcagaacaacacagtcctggtggaaggctgcttctgtcctgagggcaccatgaactacgctcctggctttgatgtctgcgtgaagacctgcggctgtgtgggacctgacaatgtgcccagagagtttggggagcacttcgagttcgactgcaagaactgtgtctgcctggagggtggaagtggcatcatctgccaacccaagaggtgcagccagaagcccgttacccactgcgtggaagacggcacctacctcgccacggaggtcaaccctgccgacacctgctgcaacattaccgtctgcaagtgcaacaccagcctgtgcaaagagaagccctccgtgtgcccgctgggattcgaagtgaagagcaagatggtgcctggaaggtgctgtcctttctactggtgtgagtccaagggggtgtgtgttcacgggaatgctgagtaccagcccggttctccagtttattcctccaagtgccaggactgcgtgtgcacggacaaggtggacaacaacaccctgctcaacgtcatcgcctgcacccacgtgccctgcaacacctcctgcagccctggcttcgaactcatggaggcccccggggagtgctgtaagaagtgtgaacagacgcactgtatcatcaaacggcccgacaaccagcacgtcatcctgaagcccggggacttcaagagcgacccgaagaacaactgcacattcttcagctgcgtgaagatccacaaccagctcatctcgtccgtctccaacatcacctgccccaactttgatgccagcatttgcatcccgggctccatcacattcatgcccaatggatgctgcaagacctgcacccctcgcaatgagaccagggtgccctgctccaccgtccccgtcaccacggaggtttcgtacgccggctgcaccaagaccgtcctcatgaatcattgctccgggtcctgcgggacatttgtcatgtactcggccaaggcccaggccctggaccacagctgctcctgctgcaaagaggagaaaaccagccagcgtgaggtggtcctgagctgccccaatggcggctcgctgacacacacctacacccacatcgagagctgccagtgccaggacaccgtctgcgggctccccaccggcacctcccgccgggcccggcgctcccctaggcatctggggagcgggtgagcggggtgggcacagcccccttcactgccctcgacagctttacctcccccggaccctctgagcctcctaagctcggcttcctctcttcagatatttattgtctgagtctttgttcagtccttgctttccaataataaactcagggggacatgcaaaaaaaaaa

SEQ ID NO: 488740 - DNA, 667 bp, Homo sapiens
  misc_feature (52)..(52): n is a, c, g, or t
  misc_feature (55)..(55): n is a, c, g, or t
  misc_feature (104)..(104): n is a, c, g, or t
  misc_feature (146)..(146): n is a, c, g, or t
  misc_feature (427)..(427): n is a, c, g, or t
ttacaacccacgatcaccaaaaaaaaaaagatcaactggtgagtacagattnaanctgtgtccctctattaaatcattaacagtaacattactttttaaagtcngcttggtttaaaagcaaacaatagcgtttttttcaatttttngtaatgcaaataaaatagcacagccactattccagattatatgaaaatgacttcctttcctataacttttaatagcttaaaggaagtttctatcacttgatagaaaatttttaatttcccgaaagtaagcttggcagactttacaaccccacgactttacacaagataacaccccaaatcagatctgtgaaatactgtatcaatgacaataatgcatgctcttctataatactaaaggcttggccaggcgttgtggctcatgcctgtaattccagcacttngggaggccaaggcaggcagatcatgaggttaggagatcaagaccatcctggccaatatggtgaaaccctgtctctactaaaaatacaaaattagctgggtgtggtggcgcacgcctatagtcctagctactcaggaggctgaggcaggagaattgcttgaacccaggaaatggaggttgcagtgaaccgagactgcgcagttgcactacagtctgggcgacaagagtgaaactccgtctc

SEQ ID NO: 488741 - DNA, 9812 bp, Homo sapiens
  misc_feature (6587)..(6587): n is a, c, g, or t
  misc_feature (6679)..(6679): n is a, c, g, or t
caacccacaccgcccctgccagccaccatggggctgccactagcccgcctggcggctgtgtgcctggccctgtctttggcagggggctcggagctccagacagagggcagaacccgataccacggccgcaacgtctgcagcacctggggcaacttccactacaagaccttcgacggggacgtcttccgcttccccggcctctgcgactacaacttcgcctccgactgccgaggctcctacaaggaatttgctgtgcacctgaagcggggtccgggccaggctgaggcccccgccggggtggagtccatcctgctgaccatcaaggatgacaccatctacctcacccgccacctggctgtgcttaacggggccgtggtcagcaccccgcactacagccccgggctgctcattgagaagagcgatgcctacaccaaagtctactcccgcgccggcctcaccctcatgtggaaccgggaggatgcactcatgctggagctggacactaagttccggaaccacacctgtggcctctgcggggactacaacggcctgcagagctattcagaattcctctctgacggcgtgctcttcagtcccctggagtttgggaacatgcagaagatcaaccagcccgatgtggtgtgtgaggatcccgaggaggaggtggcccccgcatcctgctccgagcaccgcgccgagtgtgagaggctgctgaccgccgaggccttcgcggactgtcaggacctggtgccgctggagccgtatctgcgcgcctgccagcaggaccgctgccggtgcccgggcggtgacacctgcgtctgcagcaccgtggccgagttctcccgccagtgctcccacgccggcggccggcccgggaactggaggaccgccacgctctgccccaagacctgccccgggaacctggtgtacctggagagcggctcgccctgcatggacacctgctcacacctggaggtgagcagcctgtgcgaggagcaccgcatggacggctgtttctgcccagaaggcaccgtatatgacgacatcggggacagtggctgcgttcctgtgagccagtgccactgcaggctgcacggacacctgtacacaccgggccaggagatcaccaatgactgcgagcagtgtgtctgtaacgctggccgctgggtgtgcaaagacctgccctgccccggcacctgtgccctggacggcggctcccacatcaccaccttcgatgggaagacgtacaccttccacggggactgctactatgtcctggccaagggtgaccacaacgattcctacgctctcctgggcgagctggccccctgtggctccacagacaagcagacctgcctgaagacggtggtgctgctggctgacaagaagaagaatgtggtggtcttcaagtccgatggcagtgtactgctcaacgagctgcaggtgaacctgccccacgtgaccgcgagcttctctgtcttccgcccgtcttcctaccacatcatggtgagcatggccattggcgtccggctgcaggtgcagctggccccagtcatgcaactctttgtgacactggaccaggcctcccaggggcaggtgcagggcctctgcgggaacttcaacggcctggaaggtgacgacttcaagacggccagcgggctggtggaggccacgggggccggcttttgccaacacctggaaggcacagtcaagctgccatgacaagctggactggttggacgatccctgctccctgaacatcgagagcgccaactacgccgagcactggtgctccctcctgaagaagacagagaccccctttggcaggtgccactcggctgtggaccctgctgagtattacaagaggtgcaaatatgacacgtgtaactgtcagaacaatgaggactgcctgtgcgccgccctgtcctcctacgcgcgcgcctgcaccgccaagggcgtcatgctgtggggctggcgggagcatgtctgcaacaaggatgtgggctcctgccccaactcgcaggtcttcctgtacaacctgaccacctgccagcagacctgccgctccctctccgaggccgacagccactgtctcgagggctttgcgcctgtggacggctgcggctgccctgaccacaccttcctggacgagaagggccgctgcgtacccctggccaagtgctcctgttaccaccgcggtctctacctggaggcgggggatgtggtcgtcaggcaggaagaacgatgtgtgtgccgggatgggcggctgcactgtaggcagatccggctgatcggccagagctgcacggccccaaagatccacatggactgcagcaacctgactgcactggccacctcgaagccccgagccctcagctgccagacgctggccgccggctattaccacacagagtgtgtcagtggctgtgtgtgccccgacgggctgatggatgacggccggggtggctgcgtggtggagaaggaatgcccttgcgtccataacaacgacctgtattcttccggcgccaagatcaaggtggactgcaatacctgcacctgcaagagaggacgctgggtgtgcacccaggctgtgtgccatggcacctgctccatttacgggagtggccactacatcacctttgatgggaagtactacgactttgacggacactgctcctacgtggctgttcaggactactgcggccagaactcctcactgggctcattcagcatcatcaccgagaacgtcccctgtggcactacgggcgtcacctgctccaaggccatcaagatcttcatggggaggacggagctgaagttggaagacaagcaccgtgtggtgatccagcgtgatgagggtcaccacgtggcctacaccacgcgggaggtgggccagtacctggtggtggagtccagcacgggcatcatcgtcatctgggacaagaggaccaccgtgttcatcaagctggctccctcctacaagggcaccgtgtgtggcctgtgtgggaactttgaccaccgctccaacaacgacttcaccacgcgggaccacatggtggtgagcagcgagctggacttcgggaacagctggaaggaggcccccacctgcccagatgtgagcaccaaccccgagccctgcagcctgaacccgcaccgccgctcctgggccgagaagcagtgcagcatcctcaaaagcagcgtgttcagcatctgccacagcaaggtggaccccaagcccttctacgaggcctgtgtgcacgactcgtgctcctgtgacacgggtggggactgtgagtgcttctgctctgccgtggcctcctacgcccaggagtgtaccaaagagggggcctgcgtgttctggaggacgccggacctgtgccccatattctgcgactactacaaccctccgcatgagtgtgagtggcactatgagccatgtgggaaccggagcttcgagacctgcaggaccatcaacggcatccactccaacatctccgtgtcctacctggagggctgctacccccggtgccccaaggacaggcccatctatgaggaggatctgaagaagtgtgtcactgcagacaagtgtggctgctatgtcgaggacacccactacccacctggagcatcggttcccaccgaggagacctgcaagtcctgcgtgtgtaccaactcctcccaagtcgtctgcaggccggaggaaggaaagattcttaaccagacccaggatggcgccttctgctactgggagatctgtggccccaacgggacggtggagaagcacttcaacatctgttccattacgacacgcccgtccaccctgaccaccttcaccaccatcaccctccccaccacccccacctccttcaccactaccaccaccaccaccaccccgacctccagcacagttttatcaacaactccgaagctgtgctgcctctggtctgactggatcaatgaggaccaccccagcagtggcagcgacgacggtgaccgagaaccatttgatggggtctgcggggcccctgaggacatcgagtgcaggtcggtcaaggatccccacctcagcttggagcagcatggccagaaggtgcagtgtgatgtctctgttgggttcatttgcaagaatgaagaccagtttggaaatggaccatttggactgtgttacgactacaagatacgtgtcaattgttgctggcccatggataagtgtatcaccactcccagccctccaactaccactcccagccctccaccaaccacgacgaccacccttccaccaaccaccacccccagccctccaaccaccaccacaaccacccctccaccaaccaccacccccagccctccaataaccaccacgaccacccctctaccaaccaccactcccagccctccaataagcaccacaaccacccctccaccaaccaccactcccagccctccaaccaccactcccagccctccaaccaccactcccagccctccaacaaccaccacaaccacccctccaccaaccaccactcccagccctccaatgactacgcccatcactccaccagccagcactaccacccttccaccaaccaccactcccagccctccaacaaccaccacaaccacccctccaccaaccaccactcccagtcctccaacgactacgcccatcactccaccaaccagcactactacccttccaccaaccaccactcccagccctccaccaaccaccacaaccacccctccaccaaccaccactcccagccctccaacaaccaccactcccagtcctccaacaatcaccacaaccacccctccaccaaccaccactcccagccctccaacaacgaccacaaccacccctccaccaaccaccactcccagccctccaacgactacacccatcactccaccaaccagcactaccacccttccaccaaccaccactcccagccctccaccaaccaccacaaccacccctccaccaaccaccactcccagccctccaacaaccaccactcccagccctccaataaccaccacaaccacccctccaccaaccaccactcccagctctccaataaccaccactcccagccctccaacaaccaccatgaccaccccttcaccaaccaccacccccagctctccaataaccaccacaaccaccccttcctcaactaccactcccagccctccaccaaccaccatgaccaccccttcaccaaccaccactcccagccctccaacaaccaccatgaccacccttccaccaaccaccacttccagccctctaacaactactcctctacctccatcaataactcctcctacattttcaccattctcaacgacaacccctactaccccatgcgtgcctctctgcaattggactggctggctggattctggaaaacccaactttcacaaaccaggtggagacacagaattgattggagacgtctgtggaccaggctgggcagctaacatctcttgcagagccaccatgtatcctgatgttcccattggacagcttggacaaacagtggtgtgtgatgtctctgtggggctgatatgcaaaaatgaagaccaaaagccaggtggggtcatccctatggccttctgcctcaactacgagatcaacgttcagtgctgtgagtgtgtcacccaacccaccaccatgacaaccaccaccacagagaacccaactccgccaaccacgacacccatcaccaccaccactacggtgaccccaaccccaacacccaccggcacacagaccccaaccacgacacccatcaccaccaccactacggtgaccccaaccccaacacccaccggcacacagaccccaaccacgacacccatcaccaccaccactacggtgaccccaaccccaacacccaccggcacacagaccccaaccacgacacccatcaccaccaccactacggtgaccccaaccccaacacccaccggcacacagaccccaaccacgacacccatcaccaccaccactacggtgaccccaaccccaacacccatcaccaccaccactacggtgaccccaaccccaacacccaccggcacacagaccccaaccacgacacccatcaccaccaccactacggtgaccccaaccccaacacccaccggcacacagaccccaaccacgacacccatcaccaccaccactacggtgaccccaaccccaacacccaccggcacacagaccccaaccacgacacccatcaccaccaccactacggtgaccccaaccccaacacccaccggcacacagaccccaaccacgacacccatcaccaccaccactacggtgaccccaaccccaacacccaccggcacacagaccccaaccacgacacccatcaccaccaccactacggtgaccccaaccccaacacccaccggcacacagaccccaaccacgacacccatcaccaccaccactacggtgaccccaaccccaacacccaccggcacacagaccccaaccacgacacccatcaccaccaccactacggtgaccccaaccccaacacccaccggcacacagaccccaaccncgacacccatcaccaccaccactacggtgaccccaaccccaacacccaccggcacacagaccccaaccacgacacccatcaccaccaccacnacggtgaccccaaccccaacacccaccggcacacagaccccaaccacgacacccatcaccaccaccactacggtgaccccaaccccaacacccaccggcacacagaccccaaccacgacacccatcaccaccaccactacggtgaccccaaccccaacacccaccggcacacagaccccaaccatgatacccatcagcaccaccactacggtgaccccaaccccaacacccaccactggaagcacggggccccccacccacacaagcacagcaccgattgctgagttgaccacatccaatcctccgcctgagtcctcaacccctcagacctctcggtccacctcttcccctctcacggagtcaaccacccttctgagtaccctaccacctgccattgagatgaccagcacggccccaccctccacacccacggcacccacgaccacgagcggaggccacacactgtctccaccgcccagcaccaccacgtcccctccaggcacccccactcgcggtaccacgaccgggtcatcttcagcccccacccccagcactgtgcagacgaccaccaccagtgcctggaccccaacgccgaccccactctccacacccagcatcatcaggaccacaggcctgaggccctacccttcctctgtgcttatctgctgtgtcctgaacgacacctactacgcaccaggtgaggaggtgtacaacggcacatacggagacacctgttatttcgtcaactgctcactgagctgtacgttggagttctataactggtcctgcccatccacgccctccccaacacccacgccctccaagtcgacgcccacgccttccaagccatcgtccacgccctccaagccgacgcccggcaccaagccccccgagtgcccagactttgatcctcccagacaggagaacgagacttggtggctgtgcgactgcttcatggccacgtgcaagtacaacaacacggtggagatcgtgaaggtggagtgtgagccgccgcccatgcccacctgctccaacggcctccaacccgtgcgcgtcgaggaccccgacggctgctgctggcactgggagtgcgactgctactgcacgggctggggcgacccgcactatgtcaccttcgacggactctactacagctaccagggcaactgcacctacgtgctggtggaggagatcagcccctccgtggacaacttcggagtttacatcgacaactaccactgcgatcccaacgacaaggtgtcctgcccccgcaccctcatcgtgcgccacgagacccaggaggtgctgatcaagaccgtgcatatgatgcccatgcaggtgcaggtgcaggtgaacaggcaggcggtggcactgccctacaagaagtacgggctggaggtgtaccagtctggcatcaactacgtggtggacatccccgagctgggtgtcctcgtctcctacaatggcctgtccttctccgtcaggctgccctaccaccggtttggcaacaacaccaagggccagtgtggcacctgcaccaacaccacctccgacgactgcattctgcccagcggggagatcgtctccaactgtgaggctgcggctgaccagtggctggtgaacgacccctccaagccacactgcccccacagcagctccacgaccaagcgcccggccgtcactgtgcccgggggcggtaaaacgaccccacacaaggactgcaccccatctcccctctgccagctcatcaaggacagcctgtttgcccagtgccacgcactggtgcccccgcagcactactacgatgcctgcgtgttcgacagctgcttcatgccgggctcgagcctggagtgcgccagtctgcaggcctacgcagccctctgtgcccagcagaacatctgcctcgactggcggaaccacacgcatggggcctgcttggtggagtgcccatctcacagggagtaccaggcctgtggccctgcagaagagcccacgtgcaaatccagctcctcccagcagaacaacacagtcctggtggaaggctgcttctgtcctgagggcaccatgaactacgctcctggctttgatgtctgcgtgaagacctgcggctgtgtgggacctgacaatgtgcccagagagtttggggagcacttcgagttcgactgcaagaactgtgtctgcctggagggtggaagtggcatcatctgccaacccaagaggtgcagccagaagcccgttacccactgcgtggaagacggcacctacctcgccacggaggtcaaccctgccgacacctgctgcaacattaccgtctgcaagtgcaacaccagcctgtgcaaagagaagccctccgtgtgcccgctgggattcgaagtgaagagcaagatggtgcctggaaggtgctgtcctttctactggtgtgagtccaagggggtgtgtgttcacgggaatgctgagtaccagcccggttctccagtttattcctccaagtgccaggactgcgtgtgcacggacaaggtggacaacaacaccctgctcaacgtcatcgcctgcacccacgtgccctgcaacacctcctgcagccctggcttcgaactcatggaggcccccggggagtgctgtaagaagtgtgaacagacgcactgtatcatcaaacggcccgacaaccagcacgtcatcctgaagcccggggacttcaagagcgacccgaagaacaactgcacattcttcagctgcgggacatttgtcatgtactcggccaaggcccaggccctggaccacagctgctcctgctgcaaagaggagaaaaccagccagcgtgaggtggtcctgagctgccccaatggcggctcgctgacacacacctacacccacatcgagagctgccagtgccaggacaccgtctgcgggctccccaccggcacctcccgccgggcccggcgctcccctaggcatctggggagcgggtgagcggggtgggcacagcccccttcactgccctcgacagctttacctcccccggaccctctgagcctcctaagctcggcttcctctcttcagatatttattgtctgagtctttgttcagtccttgctttccaataataaactcagggggacatgcaaaaaaaaaa

SEQ ID NO: 488742 - DNA, 9626 bp, Homo sapiens
  misc_feature (6587)..(6587): n is a, c, g, or t
  misc_feature (6679)..(6679): n is a, c, g, or t
caacccacaccgcccctgccagccaccatggggctgccactagcccgcctggcggctgtgtgcctggccctgtctttggcagggggctcggagctccagacagagggcagaacccgataccacggccgcaacgtctgcagcacctggggcaacttccactacaagaccttcgacggggacgtcttccgcttccccggcctctgcgactacaacttcgcctccgactgccgaggctcctacaaggaatttgctgtgcacctgaagcggggtccgggccaggctgaggcccccgccggggtggagtccatcctgctgaccatcaaggatgacaccatctacctcacccgccacctggctgtgcttaacggggccgtggtcagcaccccgcactacagccccgggctgctcattgagaagagcgatgcctacaccaaagtctactcccgcgccggcctcaccctcatgtggaaccgggaggatgcactcatgctggagctggacactaagttccggaaccacacctgtggcctctgcggggactacaacggcctgcagagctattcagaattcctctctgacggcgtgctcttcagtcccctggagtttgggaacatgcagaagatcaaccagcccgatgtggtgtgtgaggatcccgaggaggaggtggcccccgcatcctgctccgagcaccgcgccgagtgtgagaggctgctgaccgccgaggccttcgcggactgtcaggacctggtgccgctggagccgtatctgcgcgcctgccagcaggaccgctgccggtgcccgggcggtgacacctgcgtctgcagcaccgtggccgagttctcccgccagtgctcccacgccggcggccggcccgggaactggaggaccgccacgctctgccccaagacctgccccgggaacctggtgtacctggagagcggctcgccctgcatggacacctgctcacacctggaggtgagcagcctgtgcgaggagcaccgcatggacggctgtttctgcccagaaggcaccgtatatgacgacatcggggacagtggctgcgttcctgtgagccagtgccactgcaggctgcacggacacctgtacacaccgggccaggagatcaccaatgactgcgagcagtgtgtctgtaacgctggccgctgggtgtgcaaagacctgccctgccccggcacctgtgccctggacggcggctcccacatcaccaccttcgatgggaagacgtacaccttccacggggactgctactatgtcctggccaagggtgaccacaacgattcctacgctctcctgggcgagctggccccctgtggctccacagacaagcagacctgcctgaagacggtggtgctgctggctgacaagaagaagaatgtggtggtcttcaagtccgatggcagtgtactgctcaacgagctgcaggtgaacctgccccacgtgaccgcgagcttctctgtcttccgcccgtcttcctaccacatcatggtgagcatggccattggcgtccggctgcaggtgcagctggccccagtcatgcaactctttgtgacactggaccaggcctcccaggggcaggtgcagggcctctgcgggaacttcaacggcctggaaggtgacgacttcaagacggccagcgggctggtggaggccacgggggccggcttttgccaacacctggaaggcacagtcaagctgccatgacaagctggactggttggacgatccctgctccctgaacatcgagagcgccaactacgccgagcactggtgctccctcctgaagaagacagagaccccctttggcaggtgccactcggctgtggaccctgctgagtattacaagaggtgcaaatatgacacgtgtaactgtcagaacaatgaggactgcctgtgcgccgccctgtcctcctacgcgcgcgcctgcaccgccaagggcgtcatgctgtggggctggcgggagcatgtctgcaacaaggatgtgggctcctgccccaactcgcaggtcttcctgtacaacctgaccacctgccagcagacctgccgctccctctccgaggccgacagccactgtctcgagggctttgcgcctgtggacggctgcggctgccctgaccacaccttcctggacgagaagggccgctgcgtacccctggccaagtgctcctgttaccaccgcggtctctacctggaggcgggggatgtggtcgtcaggcaggaagaacgatgtgtgtgccgggatgggcggctgcactgtaggcagatccggctgatcggccagagctgcacggccccaaagatccacatggactgcagcaacctgactgcactggccacctcgaagccccgagccctcagctgccagacgctggccgccggctattaccacacagagtgtgtcagtggctgtgtgtgccccgacgggctgatggatgacggccggggtggctgcgtggtggagaaggaatgcccttgcgtccataacaacgacctgtattcttccggcgccaagatcaaggtggactgcaatacctgcacctgcaagagaggacgctgggtgtgcacccaggctgtgtgccatggcacctgctccatttacgggagtggccactacatcacctttgatgggaagtactacgactttgacggacactgctcctacgtggctgttcaggactactgcggccagaactcctcactgggctcattcagcatcatcaccgagaacgtcccctgtggcactacgggcgtcacctgctccaaggccatcaagatcttcatggggaggacggagctgaagttggaagacaagcaccgtgtggtgatccagcgtgatgagggtcaccacgtggcctacaccacgcgggaggtgggccagtacctggtggtggagtccagcacgggcatcatcgtcatctgggacaagaggaccaccgtgttcatcaagctggctccctcctacaagggcaccgtgtgtggcctgtgtgggaactttgaccaccgctccaacaacgacttcaccacgcgggaccacatggtggtgagcagcgagctggacttcgggaacagctggaaggaggcccccacctgcccagatgtgagcaccaaccccgagccctgcagcctgaacccgcaccgccgctcctgggccgagaagcagtgcagcatcctcaaaagcagcgtgttcagcatctgccacagcaaggtggaccccaagcccttctacgaggcctgtgtgcacgactcgtgctcctgtgacacgggtggggactgtgagtgcttctgctctgccgtggcctcctacgcccaggagtgtaccaaagagggggcctgcgtgttctggaggacgccggacctgtgccccatattctgcgactactacaaccctccgcatgagtgtgagtggcactatgagccatgtgggaaccggagcttcgagacctgcaggaccatcaacggcatccactccaacatctccgtgtcctacctggagggctgctacccccggtgccccaaggacaggcccatctatgaggaggatctgaagaagtgtgtcactgcagacaagtgtggctgctatgtcgaggacacccactacccacctggagcatcggttcccaccgaggagacctgcaagtcctgcgtgtgtaccaactcctcccaagtcgtctgcaggccggaggaaggaaagattcttaaccagacccaggatggcgccttctgctactgggagatctgtggccccaacgggacggtggagaagcacttcaacatctgttccattacgacacgcccgtccaccctgaccaccttcaccaccatcaccctccccaccacccccacctccttcaccactaccaccaccaccaccaccccgacctccagcacagttttatcaacaactccgaagctgtgctgcctctggtctgactggatcaatgaggaccaccccagcagtggcagcgacgacggtgaccgagaaccatttgatggggtctgcggggcccctgaggacatcgagtgcaggtcggtcaaggatccccacctcagcttggagcagcatggccagaaggtgcagtgtgatgtctctgttgggttcatttgcaagaatgaagaccagtttggaaatggaccatttggactgtgttacgactacaagatacgtgtcaattgttgctggcccatggataagtgtatcaccactcccagccctccaactaccactcccagccctccaccaaccacgacgaccacccttccaccaaccaccacccccagccctccaaccaccaccacaaccacccctccaccaaccaccacccccagccctccaataaccaccacgaccacccctctaccaaccaccactcccagccctccaataagcaccacaaccacccctccaccaaccaccactcccagccctccaaccaccactcccagccctccaaccaccactcccagccctccaacaaccaccacaaccacccctccaccaaccaccactcccagccctccaatgactacgcccatcactccaccagccagcactaccacccttccaccaaccaccactcccagccctccaacaaccaccacaaccacccctccaccaaccaccactcccagtcctccaacgactacgcccatcactccaccaaccagcactactacccttccaccaaccaccactcccagccctccaccaaccaccacaaccacccctccaccaaccaccactcccagccctccaacaaccaccactcccagtcctccaacaatcaccacaaccacccctccaccaaccaccactcccagccctccaacaacgaccacaaccacccctccaccaaccaccactcccagccctccaacgactacacccatcactccaccaaccagcactaccacccttccaccaaccaccactcccagccctccaccaaccaccacaaccacccctccaccaaccaccactcccagccctccaacaaccaccactcccagccctccaataaccaccacaaccacccctccaccaaccaccactcccagctctccaataaccaccactcccagccctccaacaaccaccatgaccaccccttcaccaaccaccacccccagctctccaataaccaccacaaccaccccttcctcaactaccactcccagccctccaccaaccaccatgaccaccccttcaccaaccaccactcccagccctccaacaaccaccatgaccacccttccaccaaccaccacttccagccctctaacaactactcctctacctccatcaataactcctcctacattttcaccattctcaacgacaacccctactaccccatgcgtgcctctctgcaattggactggctggctggattctggaaaacccaactttcacaaaccaggtggagacacagaattgattggagacgtctgtggaccaggctgggcagctaacatctcttgcagagccaccatgtatcctgatgttcccattggacagcttggacaaacagtggtgtgtgatgtctctgtggggctgatatgcaaaaatgaagaccaaaagccaggtggggtcatccctatggccttctgcctcaactacgagatcaacgttcagtgctgtgagtgtgtcacccaacccaccaccatgacaaccaccaccacagagaacccaactccgccaaccacgacacccatcaccaccaccactacggtgaccccaaccccaacacccaccggcacacagaccccaaccacgacacccatcaccaccaccactacggtgaccccaaccccaacacccaccggcacacagaccccaaccacgacacccatcaccaccaccactacggtgaccccaaccccaacacccaccggcacacagaccccaaccacgacacccatcaccaccaccactacggtgaccccaaccccaacacccaccggcacacagaccccaaccacgacacccatcaccaccaccactacggtgaccccaaccccaacacccatcaccaccaccactacggtgaccccaaccccaacacccaccggcacacagaccccaaccacgacacccatcaccaccaccactacggtgaccccaaccccaacacccaccggcacacagaccccaaccacgacacccatcaccaccaccactacggtgaccccaaccccaacacccaccggcacacagaccccaaccacgacacccatcaccaccaccactacggtgaccccaaccccaacacccaccggcacacagaccccaaccacgacacccatcaccaccaccactacggtgaccccaaccccaacacccaccggcacacagaccccaaccacgacacccatcaccaccaccactacggtgaccccaaccccaacacccaccggcacacagaccccaaccacgacacccatcaccaccaccactacggtgaccccaaccccaacacccaccggcacacagaccccaaccacgacacccatcaccaccaccactacggtgaccccaaccccaacacccaccggcacacagaccccaaccncgacacccatcaccaccaccactacggtgaccccaaccccaacacccaccggcacacagaccccaaccacgacacccatcaccaccaccacnacggtgaccccaaccccaacacccaccggcacacagaccccaaccacgacacccatcaccaccaccactacggtgaccccaaccccaacacccaccggcacacagaccccaaccacgacacccatcaccaccaccactacggtgaccccaaccccaacacccaccggcacacagaccccaaccatgatacccatcagcaccaccactacggtgaccccaaccccaacacccaccactggaagcacggggccccccacccacacaagcacagcaccgattgctgagttgaccacatccaatcctccgcctgagtcctcaacccctcagacctctcggtccacctcttcccctctcacggagtcaaccacccttctgagtaccctaccacctgccattgagatgaccagcacggccccaccctccacacccacggcacccacgaccacgagcggaggccacacactgtctccaccgcccagcaccaccacgtcccctccaggcacccccactcgcggtaccacgaccgggtcatcttcagcccccacccccagcactgtgcagacgaccaccaccagtgcctggaccccaacgccgaccccactctccacacccagcatcatcaggaccacaggcctgaggccctacccttcctctgtgcttatctgctgtgtcctgaacgacacctactacgcaccaggtgaggaggtgtacaacggcacatacggagacacctgttatttcgtcaactgctcactgagctgtacgttggagttctataactggtcctgcccatccacgccctccccaacacccacgccctccaagtcgacgcccacgccttccaagccatcgtccacgccctccaagccgacgcccggcaccaagccccccgagtgcccagactttgatcctcccagacaggagaacgagacttggtggctgtgcgactgcttcatggccacgtgcaagtacaacaacacggtggagatcgtgaaggtggagtgtgagccgccgcccatgcccacctgctccaacggcctccaacccgtgcgcgtcgaggaccccgacggctgctgctggcactgggagtgcgactgctactgcacgggctggggcgacccgcactatgtcaccttcgacggactctactacagctaccagggcaactgcacctacgtgctggtggaggagatcagcccctccgtggacaacttcggagtttacatcgacaactaccactgcgatcccaacgacaaggtgtcctgcccccgcaccctcatcgtgcgccacgagacccaggaggtgctgatcaagaccgtgcatatgatgcccatgcaggtgcaggtgcaggtgaacaggcaggcggtggcactgccctacaagaagtacgggctggaggtgtaccagtctggcatcaactacgtggtggacatccccgagctgggtgtcctcgtctcctacaatggcctgtccttctccgtcaggctgccctaccaccggtttggcaacaacaccaagggccagtgtggcacctgcaccaacaccacctccgacgactgcattctgcccagcggggagatcgtctccaactgtgaggctgcggctgaccagtggctggtgaacgacccctccaagccacactgcccccacagcagctccacgaccaagcgcccggccgtcactgtgcccgggggcggtaaaacgaccccacacaaggactgcaccccatctcccctctgccagctcatcaaggacagcctgtttgcccagtgccacgcactggtgcccccgcagcactactacgatgcctgcgtgttcgacagctgcttcatgccgggctcgagcctggagtgcgccagtctgcaggcctacgcagccctctgtgcccagcagaacatctgcctcgactggcggaaccacacgcatggggcctgcttggtggagtgcccatctcacagggagtaccaggcctgtggccctgcagaagagcccacgtgcaaatccagctcctcccagcagaacaacacagtcctggtggaaggctgcttctgtcctgagggcaccatgaactacgctcctggctttgatgtctgcgtgaagacctgcggctgtgtgggacctgacaatgtgcccagagagtttggggagcacttcgagttcgactgcaagaactgtgtctgcctggagggtggaagtggcatcatctgccaacccaagaggtgcagccagaagcccgttacccactgcgtggaagacggcacctacctcgccacggaggtcaaccctgccgacacctgctgcaacattaccgtctgcaagtgcaacaccagcctgtgcaaagagaagccctccgtgtgcccgctgggattcgaagtgaagagcaagatggtgcctggaaggtgctgtcctttctactggtgtgagtccaagggggtgtgtgttcacgggaatgctgagtaccagcccggttctccagtttattcctccaagtgccaggactgcgtgtgcacggacaaggtggacaacaacaccctgctcaacgtcatcgcctgcacccacgtgccctgcaacacctcctgcagccctggcttcgaactcatggaggcccccggggagtgctgtaagaagtgtgaacagacgcactgtatcatcaaacggcccgacaaccagcacgtcatcctgaagcccggggacttcaagagcgacccgaagaacaactgcacattcttcagctgcgtgaagatccacaaccagctcatctcgtccgtctccaacatcacctgccccaactttgatgccagcatttgcatcccgggctccatcacattcatgcccaatggatgctgcaagacctgcacccctcgcaatgagaccaggtgcctgctctacaagtccccgtcacccgagagtttgttcccgttgcaccacggccctgtaatgcgtatta

SEQ ID NO: 488743 - DNA, 662 bp, Homo sapiens
  misc_feature (424)..(424): n is a, c, g, or t
ggccgatgggaatggtctgtcacaatctgctccgttttgttgttgtccggccacacgtaactgagatggctcctttagaataaagcggtatgggtgttgtcaatgtcaaaaaaaagagaaaaaaaaaagaagaaaaaacagtatgtcgtgtggccgcgcctgggtcccgtagtgagaagttcttgtaatgaacacctattctgtgtggtgcggagccgagggggcgcacgatgctaggcatgaagcggcagcagtggcgccaaaatacacggtgttcccgctcacagggagaacgccggggcggccaagtgaacatggtgcgctgggggatttcctccacaccaatatatataaaaacacgcgccgggggggggggaacacccccgggacgcgtgtctccgtgtggacaaacactcccgcaaanatggggcgagttgccgagagagaggctcactataccgacgggggggtctctctatatcgacagacagggtgcgatctcccaacaggcgcgagagacgctctctgatatatacttcaaagtatttagcgcgccccgagtcgccgttgggggagaccctacgttgccccaaggatacttgtagggtcgcaaattaccttgtcgatagaatccattctcatcgcccaaaggatatgcgaat

SEQ ID NO: 488744 - DNA, 8679 bp, Homo sapiens
  misc_feature (6587)..(6587): n is a, c, g, or t
  misc_feature (6679)..(6679): n is a, c, g, or t
caacccacaccgcccctgccagccaccatggggctgccactagcccgcctggcggctgtgtgcctggccctgtctttggcagggggctcggagctccagacagagggcagaacccgataccacggccgcaacgtctgcagcacctggggcaacttccactacaagaccttcgacggggacgtcttccgcttccccggcctctgcgactacaacttcgcctccgactgccgaggctcctacaaggaatttgctgtgcacctgaagcggggtccgggccaggctgaggcccccgccggggtggagtccatcctgctgaccatcaaggatgacaccatctacctcacccgccacctggctgtgcttaacggggccgtggtcagcaccccgcactacagccccgggctgctcattgagaagagcgatgcctacaccaaagtctactcccgcgccggcctcaccctcatgtggaaccgggaggatgcactcatgctggagctggacactaagttccggaaccacacctgtggcctctgcggggactacaacggcctgcagagctattcagaattcctctctgacggcgtgctcttcagtcccctggagtttgggaacatgcagaagatcaaccagcccgatgtggtgtgtgaggatcccgaggaggaggtggcccccgcatcctgctccgagcaccgcgccgagtgtgagaggctgctgaccgccgaggccttcgcggactgtcaggacctggtgccgctggagccgtatctgcgcgcctgccagcaggaccgctgccggtgcccgggcggtgacacctgcgtctgcagcaccgtggccgagttctcccgccagtgctcccacgccggcggccggcccgggaactggaggaccgccacgctctgccccaagacctgccccgggaacctggtgtacctggagagcggctcgccctgcatggacacctgctcacacctggaggtgagcagcctgtgcgaggagcaccgcatggacggctgtttctgcccagaaggcaccgtatatgacgacatcggggacagtggctgcgttcctgtgagccagtgccactgcaggctgcacggacacctgtacacaccgggccaggagatcaccaatgactgcgagcagtgtgtctgtaacgctggccgctgggtgtgcaaagacctgccctgccccggcacctgtgccctggacggcggctcccacatcaccaccttcgatgggaagacgtacaccttccacggggactgctactatgtcctggccaagggtgaccacaacgattcctacgctctcctgggcgagctggccccctgtggctccacagacaagcagacctgcctgaagacggtggtgctgctggctgacaagaagaagaatgtggtggtcttcaagtccgatggcagtgtactgctcaacgagctgcaggtgaacctgccccacgtgaccgcgagcttctctgtcttccgcccgtcttcctaccacatcatggtgagcatggccattggcgtccggctgcaggtgcagctggccccagtcatgcaactctttgtgacactggaccaggcctcccaggggcaggtgcagggcctctgcgggaacttcaacggcctggaaggtgacgacttcaagacggccagcgggctggtggaggccacgggggccggcttttgccaacacctggaaggcacagtcaagctgccatgacaagctggactggttggacgatccctgctccctgaacatcgagagcgccaactacgccgagcactggtgctccctcctgaagaagacagagaccccctttggcaggtgccactcggctgtggaccctgctgagtattacaagaggtgcaaatatgacacgtgtaactgtcagaacaatgaggactgcctgtgcgccgccctgtcctcctacgcgcgcgcctgcaccgccaagggcgtcatgctgtggggctggcgggagcatgtctgcaacaaggatgtgggctcctgccccaactcgcaggtcttcctgtacaacctgaccacctgccagcagacctgccgctccctctccgaggccgacagccactgtctcgagggctttgcgcctgtggacggctgcggctgccctgaccacaccttcctggacgagaagggccgctgcgtacccctggccaagtgctcctgttaccaccgcggtctctacctggaggcgggggatgtggtcgtcaggcaggaagaacgatgtgtgtgccgggatgggcggctgcactgtaggcagatccggctgatcggccagagctgcacggccccaaagatccacatggactgcagcaacctgactgcactggccacctcgaagccccgagccctcagctgccagacgctggccgccggctattaccacacagagtgtgtcagtggctgtgtgtgccccgacgggctgatggatgacggccggggtggctgcgtggtggagaaggaatgcccttgcgtccataacaacgacctgtattcttccggcgccaagatcaaggtggactgcaatacctgcacctgcaagagaggacgctgggtgtgcacccaggctgtgtgccatggcacctgctccatttacgggagtggccactacatcacctttgatgggaagtactacgactttgacggacactgctcctacgtggctgttcaggactactgcggccagaactcctcactgggctcattcagcatcatcaccgagaacgtcccctgtggcactacgggcgtcacctgctccaaggccatcaagatcttcatggggaggacggagctgaagttggaagacaagcaccgtgtggtgatccagcgtgatgagggtcaccacgtggcctacaccacgcgggaggtgggccagtacctggtggtggagtccagcacgggcatcatcgtcatctgggacaagaggaccaccgtgttcatcaagctggctccctcctacaagggcaccgtgtgtggcctgtgtgggaactttgaccaccgctccaacaacgacttcaccacgcgggaccacatggtggtgagcagcgagctggacttcgggaacagctggaaggaggcccccacctgcccagatgtgagcaccaaccccgagccctgcagcctgaacccgcaccgccgctcctgggccgagaagcagtgcagcatcctcaaaagcagcgtgttcagcatctgccacagcaaggtggaccccaagcccttctacgaggcctgtgtgcacgactcgtgctcctgtgacacgggtggggactgtgagtgcttctgctctgccgtggcctcctacgcccaggagtgtaccaaagagggggcctgcgtgttctggaggacgccggacctgtgccccatattctgcgactactacaaccctccgcatgagtgtgagtggcactatgagccatgtgggaaccggagcttcgagacctgcaggaccatcaacggcatccactccaacatctccgtgtcctacctggagggctgctacccccggtgccccaaggacaggcccatctatgaggaggatctgaagaagtgtgtcactgcagacaagtgtggctgctatgtcgaggacacccactacccacctggagcatcggttcccaccgaggagacctgcaagtcctgcgtgtgtaccaactcctcccaagtcgtctgcaggccggaggaaggaaagattcttaaccagacccaggatggcgccttctgctactgggagatctgtggccccaacgggacggtggagaagcacttcaacatctgttccattacgacacgcccgtccaccctgaccaccttcaccaccatcaccctccccaccacccccacctccttcaccactaccaccaccaccaccaccccgacctccagcacagttttatcaacaactccgaagctgtgctgcctctggtctgactggatcaatgaggaccaccccagcagtggcagcgacgacggtgaccgagaaccatttgatggggtctgcggggcccctgaggacatcgagtgcaggtcggtcaaggatccccacctcagcttggagcagcatggccagaaggtgcagtgtgatgtctctgttgggttcatttgcaagaatgaagaccagtttggaaatggaccatttggactgtgttacgactacaagatacgtgtcaattgttgctggcccatggataagtgtatcaccactcccagccctccaactaccactcccagccctccaccaaccacgacgaccacccttccaccaaccaccacccccagccctccaaccaccaccacaaccacccctccaccaaccaccacccccagccctccaataaccaccacgaccacccctctaccaaccaccactcccagccctccaataagcaccacaaccacccctccaccaaccaccactcccagccctccaaccaccactcccagccctccaaccaccactcccagccctccaacaaccaccacaaccacccctccaccaaccaccactcccagccctccaatgactacgcccatcactccaccagccagcactaccacccttccaccaaccaccactcccagccctccaacaaccaccacaaccacccctccaccaaccaccactcccagtcctccaacgactacgcccatcactccaccaaccagcactactacccttccaccaaccaccactcccagccctccaccaaccaccacaaccacccctccaccaaccaccactcccagccctccaacaaccaccactcccagtcctccaacaatcaccacaaccacccctccaccaaccaccactcccagccctccaacaacgaccacaaccacccctccaccaaccaccactcccagccctccaacgactacacccatcactccaccaaccagcactaccacccttccaccaaccaccactcccagccctccaccaaccaccacaaccacccctccaccaaccaccactcccagccctccaacaaccaccactcccagccctccaataaccaccacaaccacccctccaccaaccaccactcccagctctccaataaccaccactcccagccctccaacaaccaccatgaccaccccttcaccaaccaccacccccagctctccaataaccaccacaaccaccccttcctcaactaccactcccagccctccaccaaccaccatgaccaccccttcaccaaccaccactcccagccctccaacaaccaccatgaccacccttccaccaaccaccacttccagccctctaacaactactcctctacctccatcaataactcctcctacattttcaccattctcaacgacaacccctactaccccatgcgtgcctctctgcaattggactggctggctggattctggaaaacccaactttcacaaaccaggtggagacacagaattgattggagacgtctgtggaccaggctgggcagctaacatctcttgcagagccaccatgtatcctgatgttcccattggacagcttggacaaacagtggtgtgtgatgtctctgtggggctgatatgcaaaaatgaagaccaaaagccaggtggggtcatccctatggccttctgcctcaactacgagatcaacgttcagtgctgtgagtgtgtcacccaacccaccaccatgacaaccaccaccacagagaacccaactccgccaaccacgacacccatcaccaccaccactacggtgaccccaaccccaacacccaccggcacacagaccccaaccacgacacccatcaccaccaccactacggtgaccccaaccccaacacccaccggcacacagaccccaaccacgacacccatcaccaccaccactacggtgaccccaaccccaacacccaccggcacacagaccccaaccacgacacccatcaccaccaccactacggtgaccccaaccccaacacccaccggcacacagaccccaaccacgacacccatcaccaccaccactacggtgaccccaaccccaacacccatcaccaccaccactacggtgaccccaaccccaacacccaccggcacacagaccccaaccacgacacccatcaccaccaccactacggtgaccccaaccccaacacccaccggcacacagaccccaaccacgacacccatcaccaccaccactacggtgaccccaaccccaacacccaccggcacacagaccccaaccacgacacccatcaccaccaccactacggtgaccccaaccccaacacccaccggcacacagaccccaaccacgacacccatcaccaccaccactacggtgaccccaaccccaacacccaccggcacacagaccccaaccacgacacccatcaccaccaccactacggtgaccccaaccccaacacccaccggcacacagaccccaaccacgacacccatcaccaccaccactacggtgaccccaaccccaacacccaccggcacacagaccccaaccacgacacccatcaccaccaccactacggtgaccccaaccccaacacccaccggcacacagaccccaaccncgacacccatcaccaccaccactacggtgaccccaaccccaacacccaccggcacacagaccccaaccacgacacccatcaccaccaccacnacggtgaccccaaccccaacacccaccggcacacagaccccaaccacgacacccatcaccaccaccactacggtgaccccaaccccaacacccaccggcacacagaccccaaccacgacacccatcaccaccaccactacggtgaccccaaccccaacacccaccggcacacagaccccaaccatgatacccatcagcaccaccactacggtgaccccaaccccaacacccaccactggaagcacggggccccccacccacacaagcacagcaccgattgctgagttgaccacatccaatcctccgcctgagtcctcaacccctcagacctctcggtccacctcttcccctctcacggagtcaaccacccttctgagtaccctaccacctgccattgagatgaccagcacggccccaccctccacacccacggcacccacgaccacgagcggaggccacacactgtctccaccgcccagcaccaccacgtcccctccaggcacccccactcgcggtaccacgaccgggtcatcttcagcccccacccccagcactgtgcagacgaccaccaccagtgcctggaccccaacgccgaccccactctccacacccagcatcatcaggaccacaggcctgaggccctacccttcctctgtgcttatctgctgtgtcctgaacgacacctactacgcaccaggtgaggaggtgtacaacggcacatacggagacacctgttatttcgtcaactgctcactgagctgtacgttggagttctataactggtcctgcccatccacgccctccccaacacccacgccctccaagtcgacgcccacgccttccaagccatcgtccacgccctccaagccgacgcccggcaccaagccccccgagtgcccagactttgatcctcccagacaggagaacgagacttggtggctgtgcgactgcttcatggccacgtgcaagtacaacaacacggtggagatcgtgaaggtggagtgtgagccgccgcccatgcccacctgctccaacggcctccaacccgtgcgcgtcgaggaccccgacggctgctgctggcactgggagtgcgactgctactgcacgggctggggcgacccgcactatgtcaccttcgacggactctactacagctaccagggcaactgcacctacgtgctggtggaggagatcagcccctccgtggacaacttcggagtttacatcgacaactaccactgcgatcccaacgacaaggtgtcctgcccccgcaccctcatcgtgcgccacgagacccaggaggtgctgatcaagaccgtgcatatgatgcccatgcaggtgcaggtgcaggtgaacaggcaggcggtggcactgccctacaagaagtacgggctggaggtgtaccagtctggcatcaactacgtggtggacatccccgagctgggtgtcctcgtctcctacaatggcctgtccttctccgtcaggctgccctaccaccggtttggcaacaacaccaagggccagtgtggcacctgcaccaacaccacctccgacgactgcattctgcccagcggggagatcgtctccaactgtgaggctgcggctgaccagtggctggtgaacgacccctccaagccacactgcccccacagcagctccacgaccaagcgcccggccgtcactgtgcccgggggcggtaaaacgaccccacacaaggactgcaccccatctcccctctgccagctcatcaaggacagcctgtttgcccagtgccacgcactggtgcccccgcagcactactacgatgcctgcgtgttcgacagctgcttcatgccgggctcgagcctggagtgcgccagtctgcaggcctacgcagccctctgtgcccagcagaacatctgcctcgactggcggaaccacacgaagacgaccgcgtcccggcctgcggcggccggggtgggagcccagccctctggagagcccgccgtcccaaagcacag

SEQ ID NO: 488745 - DNA, 129 bp, Homo sapiens
gaaacccagcccatgacccctaacaggggccctctcagccctcctaatgactcggctagcatgtgatttacattcactccataacgctcctcatactagggctactaaccaacacactaaccatataac

SEQ ID NO: 488746 - DNA, 8521 bp, Homo sapiens
caacccacaccgcccctgccagccaccatggggctgccactagcccgcctggcggctgtgtgcctggccctgtctttggcagggggctcggagctccagacagagggcagaacccgataccacggccgcaacgtctgcagcacctggggcaacttccactacaagaccttcgacggggacgtcttccgcttccccggcctctgcgactacaacttcgcctccgactgccgaggctcctacaaggaatttgctgtgcacctgaagcggggtccgggccaggctgaggcccccgccggggtggagtccatcctgctgaccatcaaggatgacaccatctacctcacccgccacctggctgtgcttaacggggccgtggtcagcaccccgcactacagccccgggctgctcattgagaagagcgatgcctacaccaaagtctactcccgcgccggcctcaccctcatgtggaaccgggaggatgcactcatgctggagctggacactaagttccggaaccacacctgtggcctctgcggggactacaacggcctgcagagctattcagaattcctctctgacggcgtgctcttcagtcccctggagtttgggaacatgcagaagatcaaccagcccgatgtggtgtgtgaggatcccgaggaggaggtggcccccgcatcctgctccgagcaccgcgccgagtgtgagaggctgctgaccgccgaggccttcgcggactgtcaggacctggtgccgctggagccgtatctgcgcgcctgccagcaggaccgctgccggtgcccgggcggtgacacctgcgtctgcagcaccgtggccgagttctcccgccagtgctcccacgccggcggccggcccgggaactggaggaccgccacgctctgccccaagacctgccccgggaacctggtgtacctggagagcggctcgccctgcatggacacctgctcacacctggaggtgagcagcctgtgcgaggagcaccgcatggacggctgtttctgcccagaaggcaccgtatatgacgacatcggggacagtggctgcgttcctgtgagccagtgccactgcaggctgcacggacacctgtacacaccgggccaggagatcaccaatgactgcgagcagtgtgtctgtaacgctggccgctgggtgtgcaaagacctgccctgccccggcacctgtgccctggacggcggctcccacatcaccaccttcgatgggaagacgtacaccttccacggggactgctactatgtcctggccaagggtgaccacaacgattcctacgctctcctgggcgagctggccccctgtggctccacagacaagcagacctgcctgaagacggtggtgctgctggctgacaagaagaagaatgtggtggtcttcaagtccgatggcagtgtactgctcaacgagctgcaggtgaacctgccccacgtgaccgcgagcttctctgtcttccgcccgtcttcctaccacatcatggtgagcatggccattggcgtccggctgcaggtgcagctggccccagtcatgcaactctttgtgacactggaccaggcctcccaggggcaggtgcagggcctctgcgggaacttcaacggcctggaaggtgacgacttcaagacggccagcgggctggtggaggccacgggggccggcttttgccaacacctggaaggcacagtcaagctgccatgacaagctggactggttggacgatccctgctccctgaacatcgagagcgccaactacgccgagcactggtgctccctcctgaagaagacagagaccccctttggcaggtgccactcggctgtggaccctgctgagtattacaagaggtgcaaatatgacacgtgtaactgtcagaacaatgaggactgcctgtgcgccgccctgtcctcctacgcgcgcgcctgcaccgccaagggcgtcatgctgtggggctggcgggagcatgtctgcaacaaggatgtgggctcctgccccaactcgcaggtcttcctgtacaacctgaccacctgccagcagacctgccgctccctctccgaggccgacagccactgtctcgagggctttgcgcctgtggacggctgcggctgccctgaccacaccttcctggacgagaagggccgctgcgtacccctggccaagtgctcctgttaccaccgcggtctctacctggaggcgggggatgtggtcgtcaggcaggaagaacgatgtgtgtgccgggatgggcggctgcactgtaggcagatccggctgatcggccagagctgcacggccccaaagatccacatggactgcagcaacctgactgcactggccacctcgaagccccgagccctcagctgccagacgctggccgccggctattaccacacagagtgtgtcagtggctgtgtgtgccccgacgggctgatggatgacggccggggtggctgcgtggtggagaaggaatgcccttgcgtccataacaacgacctgtattcttccggcgccaagatcaaggtggactgcaatacctgcacctgcaagagaggacgctgggtgtgcacccaggctgtgtgccatggcacctgctccatttacgggagtggccactacatcacctttgatgggaagtactacgactttgacggacactgctcctacgtggctgttcaggactactgcggccagaactcctcactgggctcattcagcatcatcaccgagaacgtcccctgtggcactacgggcgtcacctgctccaaggccatcaagatcttcatggggaggacggagctgaagttggaagacaagcaccgtgtggtgatccagcgtgatgagggtcaccacgtggcctacaccacgcgggaggtgggccagtacctggtggtggagtccagcacgggcatcatcgtcatctgggacaagaggaccaccgtgttcatcaagctggctccctcctacaagggcaccgtgtgtggcctgtgtgggaactttgaccaccgctccaacaacgacttcaccacgcgggaccacatggtggtgagcagcgagctggacttcgggaacagctggaaggaggcccccacctgcccagatgtgagcaccaaccccgagccctgcagcctgaacccgcaccgccgctcctgggccgagaagcagtgcagcatcctcaaaagcagcgtgttcagcatctgccacagcaaggtggaccccaagcccttctacgaggcctgtgtgcacgactcgtgctcctgtgacacgggtggggactgtgagtgcttctgctctgccgtggcctcctacgcccaggagtgtaccaaagagggggcctgcgtgttctggaggacgccggacctgtgccccatattctgcgactactacaaccctccgcatgagtgtgagtggcactatgagccatgtgggaaccggagcttcgagacctgcaggaccatcaacggcatccactccaacatctccgtgtcctacctggagggctgctacccccggtgccccaaggacaggcccatctatgaggaggatctgaagaagtgtgtcactgcagacaagtgtggctgctatgtcgaggacacccactacccacctggagcatcggttcccaccgaggagacctgcaagtcctgcgtgtgtaccaactcctcccaagtcgtctgcaggccggaggaaggaaagattcttaaccagacccaggatggcgccttctgctactgggagatctgtggccccaacgggacggtggagaagcacttcaacatctgttccattacgacacgcccgtccaccctgaccaccttcaccaccatcaccctccccaccacccccacctccttcaccactaccaccaccaccaccaccccgacctccagcacagttttatcaacaactccgaagctgtgctgcctctggtctgactggatcaatgaggaccaccccagcagtggcagcgacgacggtgaccgagaaccatttgatggggtctgcggggcccctgaggacatcgagtgcaggtcggtcaaggatccccacctcagcttggagcagcatggccagaaggtgcagtgtgatgtctctgttgggttcatttgcaagaatgaagaccagtttggaaatggaccatttggactgtgttacgactacaagatacgtgtcaattgttgctggcccatggataagtgtatcaccactcccagccctccaactaccactcccagccctccaccaaccacgacgaccacccttccaccaaccaccacccccagccctccaaccaccaccacaaccacccctccaccaaccaccacccccagccctccaataaccaccacgaccacccctctaccaaccaccactcccagccctccaataagcaccacaaccacccctccaccaaccaccactcccagccctccaaccaccactcccagccctccaaccaccactcccagccctccaacaaccaccacaaccacccctccaccaaccaccactcccagccctccaatgactacgcccatcactccaccagccagcactaccacccttccaccaaccaccactcccagccctccaacaaccaccacaaccacccctccaccaaccaccactcccagtcctccaacgactacgcccatcactccaccaaccagcactactacccttccaccaaccaccactcccagccctccaccaaccaccacaaccacccctccaccaaccaccactcccagccctccaacaaccaccactcccagtcctccaacaatcaccacaaccacccctccaccaaccaccactcccagccctccaacaacgaccacaaccacccctccaccaaccaccactcccagccctccaacgactacacccatcactccaccaaccagcactaccacccttccaccaaccaccactcccagccctccaccaaccaccacaaccacccctccaccaaccaccactcccagccctccaacaaccaccactcccagccctccaataaccaccacaaccacccctccaccaaccaccactcccagctctccaataaccaccactcccagccctccaacaaccaccatgaccaccccttcaccaaccaccacccccagctctccaataaccaccacaaccaccccttcctcaactaccactcccagccctccaccaaccaccatgaccaccccttcaccaaccaccactcccagccctccaacaaccaccatgaccacccttccaccaaccaccacttccagccctctaacaactactcctctacctccatcaataactcctcctacattttcaccattctcaacgacaacccctactaccccatgcgtgcctctctgcaattggactggctggctggattctggaaaacccaactttcacaaaccaggtggagacacagaattgattggagacgtctgtggaccaggctgggcagctaacatctcttgcagagccaccatgtatcctgatgttcccattggacagcttggacaaacagtggtgtgtgatgtctctgtggggctgatatgcaaaaatgaagaccaaaagccaggtggggtcatccctatggccttctgcctcaactacgagatcaacgttcagtgctgtgcacccccactcgcggtaccacgaccgggtcatcttcagcccccacccccagcactgtgcagacgaccaccaccagtgcctggaccccaacgccgaccccactctccacacccagcatcatcaggaccacaggcctgaggccctacccttcctctgtgcttatctgctgtgtcctgaacgacacctactacgcaccaggtgaggaggtgtacaacggcacatacggagacacctgttatttcgtcaactgctcactgagctgtacgttggagttctataactggtcctgcccatccacgccctccccaacacccacgccctccaagtcgacgcccacgccttccaagccatcgtccacgccctccaagccgacgcccggcaccaagccccccgagtgcccagactttgatcctcccagacaggagaacgagacttggtggctgtgcgactgcttcatggccacgtgcaagtacaacaacacggtggagatcgtgaaggtggagtgtgagccgccgcccatgcccacctgctccaacggcctccaacccgtgcgcgtcgaggaccccgacggctgctgctggcactgggagtgcgactgctactgcacgggctggggcgacccgcactatgtcaccttcgacggactctactacagctaccagggcaactgcacctacgtgctggtggaggagatcagcccctccgtggacaacttcggagtttacatcgacaactaccactgcgatcccaacgacaaggtgtcctgcccccgcaccctcatcgtgcgccacgagacccaggaggtgctgatcaagaccgtgcatatgatgcccatgcaggtgcaggtgcaggtgaacaggcaggcggtggcactgccctacaagaagtacgggctggaggtgtaccagtctggcatcaactacgtggtggacatccccgagctgggtgtcctcgtctcctacaatggcctgtccttctccgtcaggctgccctaccaccggtttggcaacaacaccaagggccagtgtggcacctgcaccaacaccacctccgacgactgcattctgcccagcggggagatcgtctccaactgtgaggctgcggctgaccagtggctggtgaacgacccctccaagccacactgcccccacagcagctccacgaccaagcgcccggccgtcactgtgcccgggggcggtaaaacgaccccacacaaggactgcaccccatctcccctctgccagctcatcaaggacagcctgtttgcccagtgccacgcactggtgcccccgcagcactactacgatgcctgcgtgttcgacagctgcttcatgccgggctcgagcctggagtgcgccagtctgcaggcctacgcagccctctgtgcccagcagaacatctgcctcgactggcggaaccacacgcatggggcctgcttggtggagtgcccatctcacagggagtaccaggcctgtggccctgcagaagagcccacgtgcaaatccagctcctcccagcagaacaacacagtcctggtggaaggctgcttctgtcctgagggcaccatgaactacgctcctggctttgatgtctgcgtgaagacctgcggctgtgtgggacctgacaatgtgcccagagagtttggggagcacttcgagttcgactgcaagaactgtgtctgcctggagggtggaagtggcatcatctgccaacccaagaggtgcagccagaagcccgttacccactgcgtggaagacggcacctacctcgccacggaggtcaaccctgccgacacctgctgcaacattaccgtctgcaagtgcaacaccagcctgtgcaaagagaagccctccgtgtgcccgctgggattcgaagtgaagagcaagatggtgcctggaaggtgctgtcctttctactggtgtgagtccaagggggtgtgtgttcacgggaatgctgagtaccagcccggttctccagtttattcctccaagtgccaggactgcgtgtgcacggacaaggtggacaacaacaccctgctcaacgtcatcgcctgcacccacgtgccctgcaacacctcctgcagccctggcttcgaactcatggaggcccccggggagtgctgtaagaagtgtgaacagacgcactgtatcatcaaacggcccgacaaccagcacgtcatcctgaagcccggggacttcaagagcgacccgaagaacaactgcacattcttcagctgcgtgaagatccacaaccagctcatctcgtccgtctccaacatcacctgccccaactttgatgccagcatttgcatcccgggctccatcacattcatgcccaatggatgctgcaagacctgcacccctcgcaatgagaccagggtgccctgctccaccgtccccgtcaccacggaggtttcgtacgccggctgcaccaagaccgtcctcatgaatcattgctccgggtcctgcgggacatttgtcatgtactcggccaaggcccaggccctggaccacagctgctcctgctgcaaagaggagaaaaccagccagcgtgaggtggtcctgagctgccccaatggcggctcgctgacacacacctacacccacatcgagagctgccagtgccaggacaccgtctgcgggctccccaccggcacctcccgccgggcccggcgctcccctaggcatctggggagcgggtgagcggggtgggcacagcccccttcactgccctcgacagctttacctcccccggaccctctgagcctcctaagctcggcttcctctcttcagatatttattgtctgagtctttgttcagtccttgctttccaataataaactcagggggacatgcaaaaaaaaaa

SEQ ID NO: 488747 - DNA, 202 bp, Homo sapiens
aagcctgctcgatacagagaggggcaggtagcctatttcatctgatgtttgtccctcgtgacttccacctagctggaaagggcaaagcgggcaaggaaagggtgtctagggcgccacacccttaagtaaatcggaccgcctacgcaggagcagtcgcacctgtcctaagtcgagtgaaggtggtccgtctccacccgagctc

SEQ ID NO: 488748 - DNA, 7588 bp, Homo sapiens
  misc_feature (6587)..(6587): n is a, c, g, or t
  misc_feature (6679)..(6679): n is a, c, g, or t
caacccacaccgcccctgccagccaccatggggctgccactagcccgcctggcggctgtgtgcctggccctgtctttggcagggggctcggagctccagacagagggcagaacccgataccacggccgcaacgtctgcagcacctggggcaacttccactacaagaccttcgacggggacgtcttccgcttccccggcctctgcgactacaacttcgcctccgactgccgaggctcctacaaggaatttgctgtgcacctgaagcggggtccgggccaggctgaggcccccgccggggtggagtccatcctgctgaccatcaaggatgacaccatctacctcacccgccacctggctgtgcttaacggggccgtggtcagcaccccgcactacagccccgggctgctcattgagaagagcgatgcctacaccaaagtctactcccgcgccggcctcaccctcatgtggaaccgggaggatgcactcatgctggagctggacactaagttccggaaccacacctgtggcctctgcggggactacaacggcctgcagagctattcagaattcctctctgacggcgtgctcttcagtcccctggagtttgggaacatgcagaagatcaaccagcccgatgtggtgtgtgaggatcccgaggaggaggtggcccccgcatcctgctccgagcaccgcgccgagtgtgagaggctgctgaccgccgaggccttcgcggactgtcaggacctggtgccgctggagccgtatctgcgcgcctgccagcaggaccgctgccggtgcccgggcggtgacacctgcgtctgcagcaccgtggccgagttctcccgccagtgctcccacgccggcggccggcccgggaactggaggaccgccacgctctgccccaagacctgccccgggaacctggtgtacctggagagcggctcgccctgcatggacacctgctcacacctggaggtgagcagcctgtgcgaggagcaccgcatggacggctgtttctgcccagaaggcaccgtatatgacgacatcggggacagtggctgcgttcctgtgagccagtgccactgcaggctgcacggacacctgtacacaccgggccaggagatcaccaatgactgcgagcagtgtgtctgtaacgctggccgctgggtgtgcaaagacctgccctgccccggcacctgtgccctggacggcggctcccacatcaccaccttcgatgggaagacgtacaccttccacggggactgctactatgtcctggccaagggtgaccacaacgattcctacgctctcctgggcgagctggccccctgtggctccacagacaagcagacctgcctgaagacggtggtgctgctggctgacaagaagaagaatgtggtggtcttcaagtccgatggcagtgtactgctcaacgagctgcaggtgaacctgccccacgtgaccgcgagcttctctgtcttccgcccgtcttcctaccacatcatggtgagcatggccattggcgtccggctgcaggtgcagctggccccagtcatgcaactctttgtgacactggaccaggcctcccaggggcaggtgcagggcctctgcgggaacttcaacggcctggaaggtgacgacttcaagacggccagcgggctggtggaggccacgggggccggcttttgccaacacctggaaggcacagtcaagctgccatgacaagctggactggttggacgatccctgctccctgaacatcgagagcgccaactacgccgagcactggtgctccctcctgaagaagacagagaccccctttggcaggtgccactcggctgtggaccctgctgagtattacaagaggtgcaaatatgacacgtgtaactgtcagaacaatgaggactgcctgtgcgccgccctgtcctcctacgcgcgcgcctgcaccgccaagggcgtcatgctgtggggctggcgggagcatgtctgcaacaaggatgtgggctcctgccccaactcgcaggtcttcctgtacaacctgaccacctgccagcagacctgccgctccctctccgaggccgacagccactgtctcgagggctttgcgcctgtggacggctgcggctgccctgaccacaccttcctggacgagaagggccgctgcgtacccctggccaagtgctcctgttaccaccgcggtctctacctggaggcgggggatgtggtcgtcaggcaggaagaacgatgtgtgtgccgggatgggcggctgcactgtaggcagatccggctgatcggccagagctgcacggccccaaagatccacatggactgcagcaacctgactgcactggccacctcgaagccccgagccctcagctgccagacgctggccgccggctattaccacacagagtgtgtcagtggctgtgtgtgccccgacgggctgatggatgacggccggggtggctgcgtggtggagaaggaatgcccttgcgtccataacaacgacctgtattcttccggcgccaagatcaaggtggactgcaatacctgcacctgcaagagaggacgctgggtgtgcacccaggctgtgtgccatggcacctgctccatttacgggagtggccactacatcacctttgatgggaagtactacgactttgacggacactgctcctacgtggctgttcaggactactgcggccagaactcctcactgggctcattcagcatcatcaccgagaacgtcccctgtggcactacgggcgtcacctgctccaaggccatcaagatcttcatggggaggacggagctgaagttggaagacaagcaccgtgtggtgatccagcgtgatgagggtcaccacgtggcctacaccacgcgggaggtgggccagtacctggtggtggagtccagcacgggcatcatcgtcatctgggacaagaggaccaccgtgttcatcaagctggctccctcctacaagggcaccgtgtgtggcctgtgtgggaactttgaccaccgctccaacaacgacttcaccacgcgggaccacatggtggtgagcagcgagctggacttcgggaacagctggaaggaggcccccacctgcccagatgtgagcaccaaccccgagccctgcagcctgaacccgcaccgccgctcctgggccgagaagcagtgcagcatcctcaaaagcagcgtgttcagcatctgccacagcaaggtggaccccaagcccttctacgaggcctgtgtgcacgactcgtgctcctgtgacacgggtggggactgtgagtgcttctgctctgccgtggcctcctacgcccaggagtgtaccaaagagggggcctgcgtgttctggaggacgccggacctgtgccccatattctgcgactactacaaccctccgcatgagtgtgagtggcactatgagccatgtgggaaccggagcttcgagacctgcaggaccatcaacggcatccactccaacatctccgtgtcctacctggagggctgctacccccggtgccccaaggacaggcccatctatgaggaggatctgaagaagtgtgtcactgcagacaagtgtggctgctatgtcgaggacacccactacccacctggagcatcggttcccaccgaggagacctgcaagtcctgcgtgtgtaccaactcctcccaagtcgtctgcaggccggaggaaggaaagattcttaaccagacccaggatggcgccttctgctactgggagatctgtggccccaacgggacggtggagaagcacttcaacatctgttccattacgacacgcccgtccaccctgaccaccttcaccaccatcaccctccccaccacccccacctccttcaccactaccaccaccaccaccaccccgacctccagcacagttttatcaacaactccgaagctgtgctgcctctggtctgactggatcaatgaggaccaccccagcagtggcagcgacgacggtgaccgagaaccatttgatggggtctgcggggcccctgaggacatcgagtgcaggtcggtcaaggatccccacctcagcttggagcagcatggccagaaggtgcagtgtgatgtctctgttgggttcatttgcaagaatgaagaccagtttggaaatggaccatttggactgtgttacgactacaagatacgtgtcaattgttgctggcccatggataagtgtatcaccactcccagccctccaactaccactcccagccctccaccaaccacgacgaccacccttccaccaaccaccacccccagccctccaaccaccaccacaaccacccctccaccaaccaccacccccagccctccaataaccaccacgaccacccctctaccaaccaccactcccagccctccaataagcaccacaaccacccctccaccaaccaccactcccagccctccaaccaccactcccagccctccaaccaccactcccagccctccaacaaccaccacaaccacccctccaccaaccaccactcccagccctccaatgactacgcccatcactccaccagccagcactaccacccttccaccaaccaccactcccagccctccaacaaccaccacaaccacccctccaccaaccaccactcccagtcctccaacgactacgcccatcactccaccaaccagcactactacccttccaccaaccaccactcccagccctccaccaaccaccacaaccacccctccaccaaccaccactcccagccctccaacaaccaccactcccagtcctccaacaatcaccacaaccacccctccaccaaccaccactcccagccctccaacaacgaccacaaccacccctccaccaaccaccactcccagccctccaacgactacacccatcactccaccaaccagcactaccacccttccaccaaccaccactcccagccctccaccaaccaccacaaccacccctccaccaaccaccactcccagccctccaacaaccaccactcccagccctccaataaccaccacaaccacccctccaccaaccaccactcccagctctccaataaccaccactcccagccctccaacaaccaccatgaccaccccttcaccaaccaccacccccagctctccaataaccaccacaaccaccccttcctcaactaccactcccagccctccaccaaccaccatgaccaccccttcaccaaccaccactcccagccctccaacaaccaccatgaccacccttccaccaaccaccacttccagccctctaacaactactcctctacctccatcaataactcctcctacattttcaccattctcaacgacaacccctactaccccatgcgtgcctctctgcaattggactggctggctggattctggaaaacccaactttcacaaaccaggtggagacacagaattgattggagacgtctgtggaccaggctgggcagctaacatctcttgcagagccaccatgtatcctgatgttcccattggacagcttggacaaacagtggtgtgtgatgtctctgtggggctgatatgcaaaaatgaagaccaaaagccaggtggggtcatccctatggccttctgcctcaactacgagatcaacgttcagtgctgtgagtgtgtcacccaacccaccaccatgacaaccaccaccacagagaacccaactccgccaaccacgacacccatcaccaccaccactacggtgaccccaaccccaacacccaccggcacacagaccccaaccacgacacccatcaccaccaccactacggtgaccccaaccccaacacccaccggcacacagaccccaaccacgacacccatcaccaccaccactacggtgaccccaaccccaacacccaccggcacacagaccccaaccacgacacccatcaccaccaccactacggtgaccccaaccccaacacccaccggcacacagaccccaaccacgacacccatcaccaccaccactacggtgaccccaaccccaacacccatcaccaccaccactacggtgaccccaaccccaacacccaccggcacacagaccccaaccacgacacccatcaccaccaccactacggtgaccccaaccccaacacccaccggcacacagaccccaaccacgacacccatcaccaccaccactacggtgaccccaaccccaacacccaccggcacacagaccccaaccacgacacccatcaccaccaccactacggtgaccccaaccccaacacccaccggcacacagaccccaaccacgacacccatcaccaccaccactacggtgaccccaaccccaacacccaccggcacacagaccccaaccacgacacccatcaccaccaccactacggtgaccccaaccccaacacccaccggcacacagaccccaaccacgacacccatcaccaccaccactacggtgaccccaaccccaacacccaccggcacacagaccccaaccacgacacccatcaccaccaccactacggtgaccccaaccccaacacccaccggcacacagaccccaaccncgacacccatcaccaccaccactacggtgaccccaaccccaacacccaccggcacacagaccccaaccacgacacccatcaccaccaccacnacggtgaccccaaccccaacacccaccggcacacagaccccaaccacgacacccatcaccaccaccactacggtgaccccaaccccaacacccaccggcacacagaccccaaccacgacacccatcaccaccaccactacggtgaccccaaccccaacacccaccggcacacagaccccaaccatgatacccatcagcaccaccactacggtgaccccaaccccaacacccaccactggaagcacggggccccccacccacacaagcacagcaccgattgctgagttgaccacatccaatcctccgcctgagtcctcaacccctcagacctctcggtccacctcttcccctctcacggagtcaaccacccttctgagtaccctaccacctgccattgagatgaccagcacggccccaccctccacacccacggcacccacgaccacgagcggaggccacacactgtctccaccgcccagcaccaccacgtcccctccaggcacccccactcgcggtaccacgaccgggtcatcttcagcccccacccccagcactgtgcagacgaccaccaccagtgcctggaccccaacgccgaccccactctccacacccagcatcatcaggaccacaggcctgaggccctacccttcctctgtgcttatctgctgtgtcctgaacgacacctactacgcaccaggtgaggaggtgtacaacggcacatacggagacacctgttatttcgtcaactgctcactgagctgtacgttggagttctataactggtcctgcccatccacgccctccccaacacccacgccaacgttgggcctcacggtggcctctccaagctcagctcctgccctccaatggcatctgcaggccccaaatggtctccagtcgtggatatca

SEQ ID NO: 488749 - DNA, 879 bp, Homo sapiens
cggtgacctgggccgagcctcccggtcggctacgattgctgaggaggcggcgggtagctggtcaggcgccgacttccgagaggccgccgtccgggcgaggtgtcctcatgacttctcttgtggaccttgttcgtgatcttttttgcctgtgtggtacgggtaagggatggactgcccctctcagcctctactgagtttttaccacacccaagattttatggaatggaggagacggctcaggagtttagccttgctgactgtgcccagtatccaggtcgaggttctgcataaggctgtgactttatgtatactatttttcttctttcggcggagcgtggctctgcattggcatatcttgcatccgtgccaagatgtccacgcacgccatgagccttcatgctgtcctggatgacccgtgtgggtgggaattcacagacttccgtatgacactaccgtgcattggccgtagcctccaggccatacgcttttcttgagtttgacagcatcagttcagaagagtgacagtggccactctttaactatgtaagttcctctcagatggagtgcagctgtggaaaaaattcaggaggagctcaagttgcagcctccagcggttctcactctggaggacacagatgtggcaaatggggtgatgaatggtcacacaccgatgcacttggagcctggtcctaatttccgaatggaaccagtgacagccctgggtatcctctccctcattgctcaagcatcatgtgtgctgccctgaatctcattcgaggagttcatcttgctgaacattctttacaggttgcccatgaggaaattgggacacattctggcttttctttgtcctttcgtagcctgcattttccaggattc

SEQ ID NO: 488750 - DNA, 654 bp, Homo sapiens
agcggctggcatgacctacaatatgaccggggagctgggaccaaatggatcagatcgaggtggaatgctgagtggatgcacagaccgattccgctgtacagagtgacttgactgaaggactgagcgatgagtagaacaccacgaggactgagtgtctggtgtacactatgcgtacgtgcacctagcaagaaagaggaccacagagttttgctgaaaacttcgcaagctcactttccgctatttccctcgcatttcacgtagtcctcaatgcagtccaaagaggcacgctaaacggtcgtcattcgtcgcgactttgtatagctcgtcctaattaccccttgaaccgtcacagcggttttaggaattgaccaacgttgctcttgttgcacctatgaaggggcattacctccgcaattgtaccgctagttactagttccctcgtacgttgtgccaccgacagaccgcgcagttgtgcagctcccgcttgccgtacgtacccacaataacagcgatcacgcgataaccgccaccacatatcacgccatgggtagactaaaggcagcgcacaccgacacccctatccgcagccctgtaacaatcttcacgcacacgccacggtacaacgttatgaccacatcgatacctccgcgtacg

SEQ ID NO: 488751 - DNA, 2328 bp, Homo sapiens
  misc_feature (81)..(81): n is a, c, g, or t
  misc_feature (95)..(95): n is a, c, g, or t
  misc_feature (147)..(147): n is a, c, g, or t
gtagtagctctcgttcaggacacagcagataagcacagaggaaggttagggcctcaggcctgtggtcctgatgatgttggntgtgaagagtgggntcggcgtggggatccaggcaccggtggtggtcgtctgcacagtgctggggtngggggctgaagatgacccagtcgtgtacccgcgagtgggacatcgacaactaccactgcgatcccaacgacaaggtgtcctgcccccgcaccctcatcgtgcgccacgagacccaggaggtgctgatcaagaccgtgcatatgatgcccatgcaggtgcaggtgcaggtgaacaggcaggcggtggcactgccctacaagaagtacgggctggaggtgtaccagtctggcatcaactacgtggtggacatccccgagctgggtgtcctcgtctcctacaatggcctgtccttctccgtcaggctgccctaccaccggtttggcaacaacaccaagggccagtgtggcacctgcaccaacaccacctccgacgactgcattctgcccagcggggagatcgtctccaactgtgaggctgcggctgaccagtggctggtgaacgacccctccaagccacactgcccccacagcagctccacgaccaagcgcccggccgtcactgtgcccgggggcggtaaaacgaccccacacaaggactgcaccccatctcccctctgccagctcatcaaggacagcctgtttgcccagtgccacgcactggtgcccccgcagcactactacgatgcctgcgtgttcgacagctgcttcatgccgggctcgagcctggagtgcgccagtctgcaggcctacgcagccctctgtgcccagcagaacatctgcctcgactggcggaaccacacgcatggggcctgcttggtggagtgcccatctcacagggagtaccaggcctgtggccctgcagaagagcccacgtgcaaatccagctcctcccagcagaacaacacagtcctggtggaaggctgcttctgtcctgagggcaccatgaactacgctcctggctttgatgtctgcgtgaagacctgcggctgtgtgggacctgacaatgtgcccagagagtttggggagcacttcgagttcgactgcaagaactgtgtctgcctggagggtggaagtggcatcatctgccaacccaagaggtgcagccagaagcccgttacccactgcgtggaagacggcacctacctcgccacggaggtcaaccctgccgacacctgctgcaacattaccgtctgcaagtgcaacaccagcctgtgcaaagagaagccctccgtgtgcccgctgggattcgaagtgaagagcaagatggtgcctggaaggtgctgtcctttctactggtgtgagtccaagggggtgtgtgttcacgggaatgctgagtaccagcccggttctccagtttattcctccaagtgccaggactgcgtgtgcacggacaaggtggacaacaacaccctgctcaacgtcatcgcctgcacccacgtgccctgcaacacctcctgcagccctggcttcgaactcatggaggcccccggggagtgctgtaagaagtgtgaacagacgcactgtatcatcaaacggcccgacaaccagcacgtcatcctgaagcccggggacttcaagagcgacccgaagaacaactgcacattcttcagctgcgtgaagatccacaaccagctcatctcgtccgtctccaacatcacctgccccaactttgatgccagcatttgcatcccgggctccatcacattcatgcccaatggatgctgcaagacctgcacccctcgcaatgagaccagggtgccctgctccaccgtccccgtcaccacggaggtttcgtacgccggctgcaccaagaccgtcctcatgaatcattgctccgggtcctgcgggacatttgtcatgtactcggccaaggcccaggccctggaccacagctgctcctgctgcaaagaggagaaaaccagccagcgtgaggtggtcctgagctgccccaatggcggctcgctgacacacacctacacccacatcgagagctgccagtgccaggacaccgtctgcgggctccccaccggcacctcccgccgggcccggcgctcccctaggcatctggggagcgggtgagcggggtgggcacagcccccttcactgccctcgacagctttacctcccccggaccctctgagcctcctaagctcggcttcctctcttcagatatttattgtctgagtctttgttcagtccttgctttccaataataaactcagggggacatgcaaaaaaaaaa

SEQ ID NO: 488752 - DNA, 407 bp, Homo sapiens
ctctagcaggatccccgcgactcgcgtgtctatgtgatatatggtagtactaggtctttctgggaagagagtgcccagtcgatctctctgccccgaagtactaaccaggtcccttttacggtccctgatgcaacagcagcctgggagcaatcccagcctttcaaaggctgacaaggcaccgagtggatgaatggaacgaacgatacataaaaaaaacactttggctgataaaacctccaacctgtaggcagggacagtgtcgcacgctgacatgcagaaacataactgtagcagagatcatgatgatgagaaatgcttcgcatttcccacactgccgatatcccgtgccctgtgctaccaccctctccccgaacacacacacacacacacacacacagactacgcga

SEQ ID NO: 488753 - DNA, 461 bp, Homo sapiens
acacccattccggtctgggtaagtggaactgaattctgtattaatggcacaatgtttgtgaaaatggtgtagacacattactaatatatcattatttacttttaaatgtggtatagtgatggagagacattaacgtggccctagaaaccagcagtaagtgttgaccatgaaggcatgccagtgcaaaacgaggacaagaatagaactgcttttcacaaagaactttttttttaatactttttaatatttattgctaacaaagattttttctagacccagagcagtggctcacacctgtaatcccagcactttgggaggccgaggcaggcagatcacttgaggtcggcagttcgagaccagcccggctaatgtggtgaaaccccaactctactaaaagcacaaaaaattagccgggtgtgttggtgcatgcctgtaatcccagctacccaggatcccgggat

SEQ ID NO: 488754 - DNA, 620 bp, Homo sapiens
  misc_feature (368)..(368): n is a, c, g, or t
gacgcgtgtgcggacgcgtggagctgcgcatgagccgcagggccgtaggcagccatggggcccagccggagtggcatgggtactttgaacgcctcctactgttccacaaggcactgttgagtcggtgccgtggacatcgtggtttcatacctaagacggggccaggtaagattccgtgatgaacgtataggcccgcgacaaaagccaacgggcgactcccgttattgtggtccagtactcccgatgtctggtgtcctcgatcacaggccctcaatcggtgcagtctagtccgcactggtttctgtcttatcccatcaacgtaaaaggggttgccggcgtgcagtgttcccgttcgcggctctttcagncctgagtgagggcaagtccatcaaggcggggtatgcggtgcccggtgccccaattttacctaccttcaagccaataacgcgattggagccacctcgtggggaatcccaaatttcggccctcgaggtttatccgtgtgctgtgtaatgtcccggagcgaaaaggggtccgtgaaaggaccaaacgttttcccagaaccgccgtacggttttccctctttgccctaaggtggcctcgaaataggcgttttggcc

SEQ ID NO: 488755 - DNA, 199 bp, Homo sapiens
acttatcagcagtacatcttcgttgggcggctgctgcccagcatcccgccttcgagcaggaggcgcaccgcgccggctggtggtggagcgccgcatggcattcggccgcgactatgcggagacgctcaggcgctggcgccagtccttcgaggagcgcctggaggccgtgcgtgcccagggctttgacgaacgcttcgtg

SEQ ID NO: 488756 - DNA, 143 bp, Homo sapiens
gccttccgacgacgatacaaaaaaatagggacgggcatcgcccgtcccccgtcatcggccgcctggcgggttgagcctgacgcaggcacgaagcgcgcgctcagtcgaccttggtgcccgacgccttgaccaccggtgcccag

SEQ ID NO: 488757 - DNA, 1217 bp, Homo sapiens
  misc_feature (1035)..(1035): n is a, c, g, or t
  misc_feature (1048)..(1048): n is a, c, g, or t
  misc_feature (1084)..(1084): n is a, c, g, or t
  misc_feature (1104)..(1104): n is a, c, g, or t
  misc_feature (1108)..(1108): n is a, c, g, or t
  misc_feature (1114)..(1114): n is a, c, g, or t
  misc_feature (1145)..(1145): n is a, c, g, or t
  misc_feature (1154)..(1154): n is a, c, g, or t
ggtaccgcgaacggtgcgttacttacctcgactcttagcttgtcggggacggtaaccgggacccggtgtctgctcctgtcgccttcgcctcctaatccctagccactatgcgtgagtgcatctccatccacgttggccaggctggtgtccagattggcaatgcctgctgggagctctactgcctggaacacggcatccagcccgatggccagatgccaagtgacaagaccattgggggaggagatgactccttcaacaccttcttcagtgagacgggcgctggcaagcacgtgccccggggctgtgtttgtagacttggaacccacagtcattgatgaagttcgcactggcacctaccgccagctcttccaccctgagcagctcatcacaggcaaggaagatgctgccaataactatgcccgagggcactacaccattggcaaggagatcattgaccttgtgttggaccgaattcgcaagctggctgaccagtgcaccggtcttcagggcttcttggttttccacagctttggtgggggaactggttctgggttcacctcccctgctcatggaacgtctctcagttgattatggcaagaagtccaagctggagttctccatttacccagcaccccaggtttccacagctgtagttgagccctacaactccatcctcaccacccacaccaccctggagcactctgattgtgccttcatggtagacaatgaggccatctatgacatctgtcgtagaaacctcgatattgagcgtccaacctatactaacctgaataggttaataggtcaaattgtgtcctccatcactgcttccctgagatttgatggagccctgaatgttgacctgacagaattccagaccaacctggtgccctactccccgcatccacttccctctggccacatatgcccctgtcatctctgctgagaaagcctaccatgaacagctttctgtagcagagatcaccaatgcttgctttgagccagccaaccagatgggtgaaatgtggacccttngccatggtaaaanacatggggtttgcttgccctgtttgttaccgtggtngacgtgggtttcccaaaggntgtnaaatgntggccattggccaaccattcaaggaccaagnggtaccatncagtttttgtgggattgggtgccccaatgggttaaaagggttgggaattaacttaaccaggct

SEQ ID NO: 488758 - DNA, 782 bp, Homo sapiens
  misc_feature (72)..(72): n is a, c, g, or t
  misc_feature (81)..(81): n is a, c, g, or t
  misc_feature (107)..(107): n is a, c, g, or t
  misc_feature (147)..(147): n is a, c, g, or t
  misc_feature (152)..(152): n is a, c, g, or t
  misc_feature (167)..(167): n is a, c, g, or t
gagcggtgtgggcggacgcggcggacgtgggtgagggcgcggcgtaagagagcgggacgcggggtgcccggngcgtggtgngggtccccggcgcctgcccccacggnacccaagaaggcctggccagggtaccctccgcggagcccnggggngtggggggctgcggngccccatgtgagccgaagatgggcagccgggagccccaagacaggacggagctggcagcagacacacagcggaccgctgacccttggtggcgcgggtgacgcgtaaggccggtggaccaagagtggctcaaggggacgcgttgttgccgccggtccaatgatgggtacaccatagccctgcattggctcataacctagcgacactcgggatgcagcagccctaacagggtccccggcgagcgcagggggcatgcaagggacatagccatggcatgaggaggcaacaaagcggatgggaccccgaagcagaggagaccataggagacaaagcgaaccgcggacatgaacggttgggaggagcaataaacgtcatcaggggggacggggaccacaagactcaacacagtacgaagaacacattggcagtttgagtgtacagctagaggatatacaagagcaacccaggcgcgtctaaatgggggccgatttgggcgaatgcgcgcgttgggagagtcgtgaggccagccgaacgggtacagtgacagacgacccagtagggaattcggtacgcccatagcgccaacagtataacgacttcgcttaccagaggcccac

SEQ ID NO: 488759 - DNA, 2439 bp, Homo sapiens
  misc_feature (1623)..(1624): n is a, c, g, or t
ggtaccgcgaacggtgcgttacttacctcgactcttagcttgtcggggacggtaaccgggacccggtgtctgctcctgtcgccttcgcctcctaatccctagccactatgcgtgagtgcatctccatccacgttggccaggctggtgtccagattggcaatgcctgctgggagctctactgcctggaacacggcatccagcccgatggccagatgccaagtgacaagaccattgggggaggagatgactggcaagcacgtgccccgggctgtgtttgtagacttggaacccacagtcattgatgaagttcgcactggcacctaccgccagctcttccaccctgagcagctcatcacaggcaaggaagatgctgccaataactatgcccgagggcactacaccattggcaaggagatcattgaccttgtgttggaccgaattcgcaagctggctgaccagtgcaccggtcttcagggcttcttggttttccacagctttggtgggggaactggttctgggttcacctcccctgctcatggaacgtctctcagttgattatggcaagaagtccaagctggagttctccatttacccagcaccccaggtttccacagctgtagttgagccctacaactccatcctcaccacccacaccaccctggagcactctgattgtgccttcatggtagacaatgaggccatctatgacatctgtcgtagaaacctcgatatcgagcgcccaacctacactaaccttaaccgccttattagccagattgtgtcctccatcactgcttccctgagatttgatggagccctgaatgttgacctgacagaattccagaccaacctggtgccctactccccgcatccacttccctctggccacatatgcccctgtcatctctgctgagaaagcctaccatgaacagctttctgtagcagagatcaccaatgcttgctttgagccagccaaccagatggtgaaatgtgaccctcgccatggtaaatacatggcttgctgcctgttgtaccgtggtgacgtggttcccaaagatgtcaatgctgccattgccaccatcaaaaccaagcgcagcatccagtttgtggattggtgccccactggcttcaaggttggcatcaactaccagcctcccactgtggtgcctggtggagacctggccaaggtacagagagctgtgtgcatgctgagcaacaccacagccattgctgaggcctgggctcgcctggaccacaagtttgacctgatgtatgccaagcgtgcctttgttcactggtacgtgggtgaggggatggaggaaggcgagttttcagaggcccgtgaagatatggctgcccttgagaaggattatgaggaggttggtgtggattctgttgaaggagagggtgaggaagaaggagaggaatactaattatccattccttttggccctgcagcatgtcatgctcccagaatttcagcttcagcttaactgacagacgttaaagctttctggttagattgttttcacttggtgatcatgtcttttccatgtgtacctgtaatatttttccatcatatctcaaagtaaagtcattaacatccaaaaaaaaaaaaataannaaaaaaaaaaaaaaaaaaaaacaaacaaaaaaaaaaaaaaaaagaaacaaaaaaaaaaaacaaaaaaacaaaaaaaaaaacaaaaaaaaagaaaagcaaaaaacaacagaacaaaaaaaggagaagagaggggggggcggggcccgctaaaacattcctccgcgccgggggcgggcgcaccaacaccgcccccgcacgccggctctgatggacaggagaggcgccgcccccatacgaatgatgagagacataatatcaaacacgaccaggcgggcgcggcgcatgccacaaaccacaaacaccgctggagaggaacaaaaccaaacaaggaggagtgacactctcagctggaacgacgaccaccacccactttgtgtggcgggacgccaaacacggcgacacaccacccccacaacaaaatacccagcggcgcggagaaacaacaaaccgcacggcgagctagaggatgcaacaacaccaacacgttatctgtgcggagcgacagaaaatagcgacaagaggagacgagagaaaaaaaataatcgacgggcggcttgatgaaataaaccacgcgcagcgacagccagagcaacgacacgagaacgcccacgaccacagcccacgcccacccaccccaacgccacggaacaccgaaacgagaagaagcagacagacaccgcagcaccaccagaaccgaacaccgccgacacgacagcagcagagtacacccgccacacgaacaagcacgccaacgcagaacgaccgacagacaccaccgagcacggaacgaccggcaccacaagcaggagacaacc

SEQ ID NO: 488760 - DNA, 321 bp, Homo sapiens
  misc_feature (25)..(25): n is a, c, g, or t
  misc_feature (93)..(93): n is a, c, g, or t
  misc_feature (112)..(112): n is a, c, g, or t
  misc_feature (131)..(131): n is a, c, g, or t
  misc_feature (164)..(164): n is a, c, g, or t
  misc_feature (176)..(176): n is a, c, g, or t
  misc_feature (192)..(192): n is a, c, g, or t
  misc_feature (298)..(298): n is a, c, g, or t
  misc_feature (315)..(315): n is a, c, g, or t
cactgtgacaagctgacacgtggancctgagaacttcaggctcctgggcaacgtgctggtcctgtgtgctggcccatccactttgggcaaagnaatttcaccccaccagtgncaggactgccctattcagnaaagtggtggctggtgtggctaatggccctggncccacaagtatncactaagctcgctttncttgctgtcccaatttctattaaaggttcctttgttccctaagtaccaactactaaactgggggatattatgcaagggccttgagtcatctggattctgcctaatnaaaaacatttcattttncattgc

SEQ ID NO: 488761 - DNA, 2422 bp, Homo sapiens
  misc_feature (1606)..(1607): n is a, c, g, or t
ggtaccgcgaacggtgcgttacttacctcgactcttagcttgtcggggacggtaaccgggacccggtgtctgctcctgtcgccttcgcctcctaatccctagccactatgcgtgagtgcatctccatccacgttggccaggctggtgtccagattggcaatgcctgctgggagctctactgcctggaacacggcatccagcccgatggccagatgccaagtgacaagaccattgggggaggagatgactccttcaacaccttcttcagtgagacgggcgctggcaagcacgtgccccggggctgtgtttgtagacttggaacccacagtcattgatgaagttcgcactggcacctaccgccagctcttccaccctgagcagctcatcacaggcaaggatcattgaccttgtgttggaccgaattcgcaagctggctgaccagtgcaccggtcttcagggcttcttggttttccacagctttggtgggggaactggttctgggttcacctcccctgctcatggaacgtctctcagttgattatggcaagaagtccaagctggagttctccatttacccagcaccccaggtttccacagctgtagttgagccctacaactccatcctcaccacccacaccaccctggagcactctgattgtgccttcatggtagacaatgaggccatctatgacatctgtcgtagaaacctcgatatcgagcgcccaacctacactaaccttaaccgccttattagccagattgtgtcctccatcactgcttccctgagatttgatggagccctgaatgttgacctgacagaattccagaccaacctggtgccctactccccgcatccacttccctctggccacatatgcccctgtcatctctgctgagaaagcctaccatgaacagctttctgtagcagagatcaccaatgcttgctttgagccagccaaccagatggtgaaatgtgaccctcgccatggtaaatacatggcttgctgcctgttgtaccgtggtgacgtggttcccaaagatgtcaatgctgccattgccaccatcaaaaccaagcgcagcatccagtttgtggattggtgccccactggcttcaaggttggcatcaactaccagcctcccactgtggtgcctggtggagacctggccaaggtacagagagctgtgtgcatgctgagcaacaccacagccattgctgaggcctgggctcgcctggaccacaagtttgacctgatgtatgccaagcgtgcctttgttcactggtacgtgggtgaggggatggaggaaggcgagttttcagaggcccgtgaagatatggctgcccttgagaaggattatgaggaggttggtgtggattctgttgaaggagagggtgaggaagaaggagaggaatactaattatccattccttttggccctgcagcatgtcatgctcccagaatttcagcttcagcttaactgacagacgttaaagctttctggttagattgttttcacttggtgatcatgtcttttccatgtgtacctgtaatatttttccatcatatctcaaagtaaagtcattaacatccaaaaaaaaaaaaataannaaaaaaaaaaaaaaaaaaaaacaaacaaaaaaaaaaaaaaaaagaaacaaaaaaaaaaaacaaaaaaacaaaaaaaaaaacaaaaaaaaagaaaagcaaaaaacaacagaacaaaaaaaggagaagagaggggggggcggggcccgctaaaacattcctccgcgccgggggcgggcgcaccaacaccgcccccgcacgccggctctgatggacaggagaggcgccgcccccatacgaatgatgagagacataatatcaaacacgaccaggcgggcgcggcgcatgccacaaaccacaaacaccgctggagaggaacaaaaccaaacaaggaggagtgacactctcagctggaacgacgaccaccacccactttgtgtggcgggacgccaaacacggcgacacaccacccccacaacaaaatacccagcggcgcggagaaacaacaaaccgcacggcgagctagaggatgcaacaacaccaacacgttatctgtgcggagcgacagaaaatagcgacaagaggagacgagagaaaaaaaataatcgacgggcggcttgatgaaataaaccacgcgcagcgacagccagagcaacgacacgagaacgcccacgaccacagcccacgcccacccaccccaacgccacggaacaccgaaacgagaagaagcagacagacaccgcagcaccaccagaaccgaacaccgccgacacgacagcagcagagtacacccgccacacgaacaagcacgccaacgcagaacgaccgacagacaccaccgagcacggaacgaccggcaccacaagcaggagacaacc

SEQ ID NO: 488762 - DNA, 1673 bp, Homo sapiens
ggcaggttcgcttacatcgaccgcctaagagtcgcgctgtaagaagcaacaacctctcctcttcgtctccgccatcagctcggcagtcgcgaagcagcaaccatgcgtgagtgcatctccatccacgttggccaggctggtgtccagattggcaatgcctgctgggagctctactgcctggaacacggcatccagcccgatggccagatgccaagtgacaagaccattgggggaggagatgattccttcaacaccttcttcagtgagacgggggctggcaagcatgtgccccgggcagtgtttgtagacttggaacccacagtcattgatgaagttcgcactggcacctaccgccagctcttccaccctgagcagctcatcacaggcaaggaagatgctgccaataactatgcccgagggcactacaccattggcaaggagatcattgaccttgtgttggaccgaattcgcaagctggctgaccagtgcaccggtcttcagggcttcttggttttccacagctttggtgggggaactggttctgggttcacctcccctgctcatggaacgtctctcagttgattatggcaagaagtccaagctggagttctccatttacccagcaccccaggtttccacagctgtagttgagccctacaactccatcctcaccacccacaccaccctggagcactctgattgtgccttcatggtagacaatgaggccatctatgacatctgtcgtagaaacctcgatattgagcgtccaacctatactaacctgaataggttaataggtcaaattgtgtcctccatcactgcttccctgagatttgatggagccctgaatgttgacctgacagaattccagaccaacctggtgccctactccccgcatccacttccctctggccacatatgcccctgtcatctctgctgagaaagcctaccatgaacagctttctgtagcagagatcaccaatgcttgctttgagccagccaaccagatggtgaaatgtgaccctcgccatggtaaatacatggcttgctgcctgttgtaccgtggtgacgtggttcccaaagatgtcaatgctgccattgccaccatcaaaaccaagcgcagcatccagtttgtggattggtgccccactggcttcaaggttggcatcaactaccagcctcccactgtggtgcctggtggagacctggccaaggtacagagagctgtgtgcatgctgagcaacaccacagccattgctgaggcctgggctcgcctggaccacaagtttgacctgatgtatgccaaacgtgcctttgttcactggtacgttggggaggggatggaggaaggtgagttttcagaggcccgtgaggacatggctgcccttgagaaggattatgaggaggttggtgtggattctgttgaaggagagggtgaggaagaaggagaggaatactaaagttaaaacgtcacaaaggtgctgcttttacagggaagcttattctgttttaaacattgaaaagttgtggtctgatcagttaatttgtatgtagcagtgtatgctctcatatacaattactgacctatgctctaaaacatgaatgctttgttacagacccaagctgtccatttctgtgatgggttttgaataaagtattccctgttttaaatg

SEQ ID NO: 488763 - DNA, 561 bp, Homo sapiens
cgcagtggctcacgcctgtaatcccagcactttgggaggctgaggcaggtggatcacctgaggtcaggagttcgagaccagtctggtcaacataacaaaaccccatctctactaaaaatacaaaaatattagccaggcgtggtggcgggagcctataatcccagctactcgggaggctgaggcaggaaaatcatttgaacccgggaggcggaggttgcagtgagccgggatcgcgccattgcactccagcctgggtgacagggtgagactccatctcaaaaaaaaaaattatttgtatatggtttcccttatttctttgaacatatttggaattgatgttttgaagtctttgtgtaccaagtcctgtatttgatctccttcacagatagtttgtttctattgactatttttatttctgtacactttgcatgtgtcatagttgtttgttgtaaattggacattttgtgtaatatattgcagcagctttggattttgatttcttctcccccaggagatggttgttgtttcaggattatttgtttattgacttgcctcgactaa

SEQ ID NO: 488764 - DNA, 2483 bp, Homo sapiens
  misc_feature (397)..(399): n is a, c, g, or t
  misc_feature (402)..(411): n is a, c, g, or t
  misc_feature (420)..(422): n is a, c, g, or t
  misc_feature (1667)..(1668): n is a, c, g, or t
ggtaccgcgaacggtgcgttacttacctcgactcttagcttgtcggggacggtaaccgggacccggtgtctgctcctgtcgccttcgcctcctaatccctagccactatgcgtgagtgcatctccatccacgttggccaggctggtgtccagattggcaatgcctgctgggagctctactgcctggaacacggcatccagcccgatggccagatgccaagtgacaagaccattgggggaggagatgaccttcttcagtgagacgggcgctggcaagcacgtgccccgggctgtgtttgtagacttggaacccacagtcattgatgaagttcgcactggcacctaccgccagctcttccaccctgagcagctcatcacaggcaaggaagatggctggnnnccnnnnnnnnnnaaaaaaaannncactatgcccgagggcactacaccattggcaaggagatcattgaccttgtgttggaccgaattcgcaagctggctgaccagtgcaccggtcttcagggcttcttggttttccacagctttggtgggggaactggttctgggttcacctcccctgctcatggaacgtctctcagttgattatggcaagaagtccaagctggagttctccatttacccagcaccccaggtttccacagctgtagttgagccctacaactccatcctcaccacccacaccaccctggagcactctgattgtgccttcatggtagacaatgaggccatctatgacatctgtcgtagaaacctcgatatcgagcgcccaacctacactaaccttaaccgccttattagccagattgtgtcctccatcactgcttccctgagatttgatggagccctgaatgttgacctgacagaattccagaccaacctggtgccctactccccgcatccacttccctctggccacatatgcccctgtcatctctgctgagaaagcctaccatgaacagctttctgtagcagagatcaccaatgcttgctttgagccagccaaccagatggtgaaatgtgaccctcgccatggtaaatacatggcttgctgcctgttgtaccgtggtgacgtggttcccaaagatgtcaatgctgccattgccaccatcaaaaccaagcgcagcatccagtttgtggattggtgccccactggcttcaaggttggcatcaactaccagcctcccactgtggtgcctggtggagacctggccaaggtacagagagctgtgtgcatgctgagcaacaccacagccattgctgaggcctgggctcgcctggaccacaagtttgacctgatgtatgccaagcgtgcctttgttcactggtacgtgggtgaggggatggaggaaggcgagttttcagaggcccgtgaagatatggctgcccttgagaaggattatgaggaggttggtgtggattctgttgaaggagagggtgaggaagaaggagaggaatactaattatccattccttttggccctgcagcatgtcatgctcccagaatttcagcttcagcttaactgacagacgttaaagctttctggttagattgttttcacttggtgatcatgtcttttccatgtgtacctgtaatatttttccatcatatctcaaagtaaagtcattaacatccaaaaaaaaaaaaataannaaaaaaaaaaaaaaaaaaaaacaaacaaaaaaaaaaaaaaaaagaaacaaaaaaaaaaaacaaaaaaacaaaaaaaaaaacaaaaaaaaagaaaagcaaaaaacaacagaacaaaaaaaggagaagagaggggggggcggggcccgctaaaacattcctccgcgccgggggcgggcgcaccaacaccgcccccgcacgccggctctgatggacaggagaggcgccgcccccatacgaatgatgagagacataatatcaaacacgaccaggcgggcgcggcgcatgccacaaaccacaaacaccgctggagaggaacaaaaccaaacaaggaggagtgacactctcagctggaacgacgaccaccacccactttgtgtggcgggacgccaaacacggcgacacaccacccccacaacaaaatacccagcggcgcggagaaacaacaaaccgcacggcgagctagaggatgcaacaacaccaacacgttatctgtgcggagcgacagaaaatagcgacaagaggagacgagagaaaaaaaataatcgacgggcggcttgatgaaataaaccacgcgcagcgacagccagagcaacgacacgagaacgcccacgaccacagcccacgcccacccaccccaacgccacggaacaccgaaacgagaagaagcagacagacaccgcagcaccaccagaaccgaacaccgccgacacgacagcagcagagtacacccgccacacgaacaagcacgccaacgcagaacgaccgacagacaccaccgagcacggaacgaccggcaccacaagcaggagacaacc

SEQ ID NO: 488765 - DNA, 146 bp, Homo sapiens
tcgctgaggcgggaccgtgtggcgtcgagagattcgtcgattatcagtaagtcgaccgatgctgctcatccggaagctgtccttccagaggttggtgagggagatcgacgcaggatttcaaacaccgagcctgaaggtttcatgag

SEQ ID NO: 488766 - DNA, 2449 bp, Homo sapiens
  misc_feature (1633)..(1634): n is a, c, g, or t
ggtaccgcgaacggtgcgttacttacctcgactcttagcttgtcggggacggtaaccgggacccggtgtctgctcctgtcgccttcgcctcctaatccctagccactatgcgtgagtgcatctccatccacgttggccaggctggtgtccagattggcaatgcctgctgggagctctactgcctggaacacggcatccagcccgatggccagatgccaagtgacaagaccattgggggaggagatgactggcaagcacgtgccccgggctgtgtttgtagacttggaacccacagtcattgatgaagttcgcactggcacctaccgccagctcttccaccctgagcagctcatcacaggcaaggaagatgctgccaataactatgcccgactatgcccgagggcactacaccattggcaaggagatcattgaccttgtgttggaccgaattcgcaagctggctgaccagtgcaccggtcttcagggcttcttggttttccacagctttggtgggggaactggttctgggttcacctcccctgctcatggaacgtctctcagttgattatggcaagaagtccaagctggagttctccatttacccagcaccccaggtttccacagctgtagttgagccctacaactccatcctcaccacccacaccaccctggagcactctgattgtgccttcatggtagacaatgaggccatctatgacatctgtcgtagaaacctcgatatcgagcgcccaacctacactaaccttaaccgccttattagccagattgtgtcctccatcactgcttccctgagatttgatggagccctgaatgttgacctgacagaattccagaccaacctggtgccctactccccgcatccacttccctctggccacatatgcccctgtcatctctgctgagaaagcctaccatgaacagctttctgtagcagagatcaccaatgcttgctttgagccagccaaccagatggtgaaatgtgaccctcgccatggtaaatacatggcttgctgcctgttgtaccgtggtgacgtggttcccaaagatgtcaatgctgccattgccaccatcaaaaccaagcgcagcatccagtttgtggattggtgccccactggcttcaaggttggcatcaactaccagcctcccactgtggtgcctggtggagacctggccaaggtacagagagctgtgtgcatgctgagcaacaccacagccattgctgaggcctgggctcgcctggaccacaagtttgacctgatgtatgccaagcgtgcctttgttcactggtacgtgggtgaggggatggaggaaggcgagttttcagaggcccgtgaagatatggctgcccttgagaaggattatgaggaggttggtgtggattctgttgaaggagagggtgaggaagaaggagaggaatactaattatccattccttttggccctgcagcatgtcatgctcccagaatttcagcttcagcttaactgacagacgttaaagctttctggttagattgttttcacttggtgatcatgtcttttccatgtgtacctgtaatatttttccatcatatctcaaagtaaagtcattaacatccaaaaaaaaaaaaataannaaaaaaaaaaaaaaaaaaaaacaaacaaaaaaaaaaaaaaaaagaaacaaaaaaaaaaaacaaaaaaacaaaaaaaaaaacaaaaaaaaagaaaagcaaaaaacaacagaacaaaaaaaggagaagagaggggggggcggggcccgctaaaacattcctccgcgccgggggcgggcgcaccaacaccgcccccgcacgccggctctgatggacaggagaggcgccgcccccatacgaatgatgagagacataatatcaaacacgaccaggcgggcgcggcgcatgccacaaaccacaaacaccgctggagaggaacaaaaccaaacaaggaggagtgacactctcagctggaacgacgaccaccacccactttgtgtggcgggacgccaaacacggcgacacaccacccccacaacaaaatacccagcggcgcggagaaacaacaaaccgcacggcgagctagaggatgcaacaacaccaacacgttatctgtgcggagcgacagaaaatagcgacaagaggagacgagagaaaaaaaataatcgacgggcggcttgatgaaataaaccacgcgcagcgacagccagagcaacgacacgagaacgcccacgaccacagcccacgcccacccaccccaacgccacggaacaccgaaacgagaagaagcagacagacaccgcagcaccaccagaaccgaacaccgccgacacgacagcagcagagtacacccgccacacgaacaagcacgccaacgcagaacgaccgacagacaccaccgagcacggaacgaccggcaccacaagcaggagacaacc

SEQ ID NO: 488767 - DNA, 688 bp, Homo sapiens
catctcaaagacccttcgtcaaccacttgtccccccatgcccccttgtcctccccggcacgggaactcttccaatggtgccccccgaggttcatccccctcactataattgcctcctctctcaagctactccatcttgaacgtccgcttgccttcgcgactttctgatacccttctctgcaacagttatcacaagaacctagtaccccccataagtgattcttagggcttttttgaccaatcctcccagtaaccgtcttgcactatgcccccccccttcttaacctacccctggtagaaccttctctactgtattatagacaacccccccttctttgcctctgtccacataaatttacctcttcttcccgagtcttgacttcgagtagtctctcaacagcacatcgcgtagtgatttacacgccgctcgcccatttttacgaccacgctctgaatacacttattttaatttccctcccccgcaccctccctgtgggctgctcacactcctccactccacccacatggacacaacacttagacaccctctcatttaccaccacgagtaacgacccctccactgcgttgataacaccctcttccccgccatcttttcctctccctttcctctcctccaccgcccaatactacacatatcccggggttttcctcccacatcactataacca

SEQ ID NO: 488768 - DNA, 2544 bp, Homo sapiens
  misc_feature (267)..(267): n is a, c, g, or t
  misc_feature (1728)..(1729): n is a, c, g, or t
ggtaccgcgaacggtgcgttacttacctcgactcttagcttgtcggggacggtaaccgggacccggtgtctgctcctgtcgccttcgcctcctaatccctagccactatgcgtgagtgcatctccatccacgttggccaggctggtgtccagattggcaatgcctgctgggagctctactgcctggaacacggcatccagcccgatggccagatgccaagtgacaagaccattgggggaggagatgactgcactcccttcaacaccntctccttcagctgacgaccggtgcgcctggcgaacgcacgctgcccccgggcctgatgttctgctagcaccttgagcatagcccaccagtcacttcgattgcagacgctttctgacaccgtgtgcctagccgtcagcacggcccaggcttcgttccagccacatgaatgcagtctcattcgacaggcgtccagacggcaagatgctgccacactaacctatgccctgagggcactacaccattggcaaggagatcattgaccttgtgttggaccgaattcgcaagctggctgaccagtgcaccggtcttcagggcttcttggttttccacagctttggtgggggaactggttctgggttcacctcccctgctcatggaacgtctctcagttgattatggcaagaagtccaagctggagttctccatttacccagcaccccaggtttccacagctgtagttgagccctacaactccatcctcaccacccacaccaccctggagcactctgattgtgccttcatggtagacaatgaggccatctatgacatctgtcgtagaaacctcgatatcgagcgcccaacctacactaaccttaaccgccttattagccagattgtgtcctccatcactgcttccctgagatttgatggagccctgaatgttgacctgacagaattccagaccaacctggtgccctactccccgcatccacttccctctggccacatatgcccctgtcatctctgctgagaaagcctaccatgaacagctttctgtagcagagatcaccaatgcttgctttgagccagccaaccagatggtgaaatgtgaccctcgccatggtaaatacatggcttgctgcctgttgtaccgtggtgacgtggttcccaaagatgtcaatgctgccattgccaccatcaaaaccaagcgcagcatccagtttgtggattggtgccccactggcttcaaggttggcatcaactaccagcctcccactgtggtgcctggtggagacctggccaaggtacagagagctgtgtgcatgctgagcaacaccacagccattgctgaggcctgggctcgcctggaccacaagtttgacctgatgtatgccaagcgtgcctttgttcactggtacgtgggtgaggggatggaggaaggcgagttttcagaggcccgtgaagatatggctgcccttgagaaggattatgaggaggttggtgtggattctgttgaaggagagggtgaggaagaaggagaggaatactaattatccattccttttggccctgcagcatgtcatgctcccagaatttcagcttcagcttaactgacagacgttaaagctttctggttagattgttttcacttggtgatcatgtcttttccatgtgtacctgtaatatttttccatcatatctcaaagtaaagtcattaacatccaaaaaaaaaaaaataannaaaaaaaaaaaaaaaaaaaaacaaacaaaaaaaaaaaaaaaaagaaacaaaaaaaaaaaacaaaaaaacaaaaaaaaaaacaaaaaaaaagaaaagcaaaaaacaacagaacaaaaaaaggagaagagaggggggggcggggcccgctaaaacattcctccgcgccgggggcgggcgcaccaacaccgcccccgcacgccggctctgatggacaggagaggcgccgcccccatacgaatgatgagagacataatatcaaacacgaccaggcgggcgcggcgcatgccacaaaccacaaacaccgctggagaggaacaaaaccaaacaaggaggagtgacactctcagctggaacgacgaccaccacccactttgtgtggcgggacgccaaacacggcgacacaccacccccacaacaaaatacccagcggcgcggagaaacaacaaaccgcacggcgagctagaggatgcaacaacaccaacacgttatctgtgcggagcgacagaaaatagcgacaagaggagacgagagaaaaaaaataatcgacgggcggcttgatgaaataaaccacgcgcagcgacagccagagcaacgacacgagaacgcccacgaccacagcccacgcccacccaccccaacgccacggaacaccgaaacgagaagaagcagacagacaccgcagcaccaccagaaccgaacaccgccgacacgacagcagcagagtacacccgccacacgaacaagcacgccaacgcagaacgaccgacagacaccaccgagcacggaacgaccggcaccacaagcaggagacaacc

SEQ ID NO: 488769 - DNA, 158 bp, Homo sapiens
  misc_feature (5)..(5): n is a, c, g, or t
  misc_feature (60)..(60): n is a, c, g, or t
agaanacacagaggacggttgcgagaagacacgaaggttacgctgctgagacacgaaggntacgctgctagaagacacgagggtacgctgcgagaagacgacgagggtacgctgctagaagacgacagagggtacgctgcgagaagactacagaaggg

SEQ ID NO: 488770 - DNA, 2372 bp, Homo sapiens
  misc_feature (1556)..(1557): n is a, c, g, or t
ggtaccgcgaacggtgcgttacttacctcgactcttagcttgtcggggacggtaaccgggacccggtgtctgctcctgtcgccttcgcctcctaatccctagccactatgcgtgagtgcatctccatccacgttggccaggctggtgtccagattggcaatgcctgctgggagctctactgcctggaacacggcatccagcccgatggccagatgccaagtgacaagaccattgggggaggagatgactggcaagcacgtgccccgggctgtgtttgtagacttggaacccacagtcattgatgaagttcgcactggcacctaccgccagctcttccaccctgagcagctcatcacaggcaaggaagatgctgccaataactatgcccgagggcactacaccattggcaaggagtggttttccacagctttggtgggggaactggttctgggttcacctcccctgctcatggaacgtctctcagttgattatggcaagaagtccaagctggagttctccatttacccagcaccccaggtttccacagctgtagttgagccctacaactccatcctcaccacccacaccaccctggagcactctgattgtgccttcatggtagacaatgaggccatctatgacatctgtcgtagaaacctcgatatcgagcgcccaacctacactaaccttaaccgccttattagccagattgtgtcctccatcactgcttccctgagatttgatggagccctgaatgttgacctgacagaattccagaccaacctggtgccctactccccgcatccacttccctctggccacatatgcccctgtcatctctgctgagaaagcctaccatgaacagctttctgtagcagagatcaccaatgcttgctttgagccagccaaccagatggtgaaatgtgaccctcgccatggtaaatacatggcttgctgcctgttgtaccgtggtgacgtggttcccaaagatgtcaatgctgccattgccaccatcaaaaccaagcgcagcatccagtttgtggattggtgccccactggcttcaaggttggcatcaactaccagcctcccactgtggtgcctggtggagacctggccaaggtacagagagctgtgtgcatgctgagcaacaccacagccattgctgaggcctgggctcgcctggaccacaagtttgacctgatgtatgccaagcgtgcctttgttcactggtacgtgggtgaggggatggaggaaggcgagttttcagaggcccgtgaagatatggctgcccttgagaaggattatgaggaggttggtgtggattctgttgaaggagagggtgaggaagaaggagaggaatactaattatccattccttttggccctgcagcatgtcatgctcccagaatttcagcttcagcttaactgacagacgttaaagctttctggttagattgttttcacttggtgatcatgtcttttccatgtgtacctgtaatatttttccatcatatctcaaagtaaagtcattaacatccaaaaaaaaaaaaataannaaaaaaaaaaaaaaaaaaaaacaaacaaaaaaaaaaaaaaaaagaaacaaaaaaaaaaaacaaaaaaacaaaaaaaaaaacaaaaaaaaagaaaagcaaaaaacaacagaacaaaaaaaggagaagagaggggggggcggggcccgctaaaacattcctccgcgccgggggcgggcgcaccaacaccgcccccgcacgccggctctgatggacaggagaggcgccgcccccatacgaatgatgagagacataatatcaaacacgaccaggcgggcgcggcgcatgccacaaaccacaaacaccgctggagaggaacaaaaccaaacaaggaggagtgacactctcagctggaacgacgaccaccacccactttgtgtggcgggacgccaaacacggcgacacaccacccccacaacaaaatacccagcggcgcggagaaacaacaaaccgcacggcgagctagaggatgcaacaacaccaacacgttatctgtgcggagcgacagaaaatagcgacaagaggagacgagagaaaaaaaataatcgacgggcggcttgatgaaataaaccacgcgcagcgacagccagagcaacgacacgagaacgcccacgaccacagcccacgcccacccaccccaacgccacggaacaccgaaacgagaagaagcagacagacaccgcagcaccaccagaaccgaacaccgccgacacgacagcagcagagtacacccgccacacgaacaagcacgccaacgcagaacgaccgacagacaccaccgagcacggaacgaccggcaccacaagcaggagacaacc

SEQ ID NO: 488771 - DNA, 1743 bp, Homo sapiens
ggtaccgcgaacggtgcgttacttacctcgactcttagcttgtcggggacggtaaccgggacccggtgtctgctcctgtcgccttcgcctcctaatccctagccactatgcgtgagtgcatctccatccacgttggccaggctggtgtccagattggcaatgcctgctgggagctctactgcctggaacacggcatccagcccgatggccagatgccaagtgacaagaccattgggggaggagatgactccttcaacaccttcttcagtgagacgggcgctggcaagcacgtgccccggggctcatgtggttgtgtatgacgtatgcgagagcccgatcgaggtcattgtgactgaaggttgcgtccagcatggagacatcgcgtagctctggcaggctcgtatccccaggcgctgtagacaggctcgatcacgaagggcagaaggtagaggacttgctaggctagagtaagcgtagtgtccctgaagggcactacaccattggcaaggagatcattgaccttgtgttggaccgaattcgcaagctggctgaccagtgcaccggtcttcagggcttcttggttttccacagctttggtgggggaactggttctgggttcacctcccctgctcatggaacgtctctcagttgattatggcaagaagtccaagctggagttctccatttacccagcaccccaggtttccacagctgtagttgagccctacaactccatcctcaccacccacaccaccctggagcactctgattgtgccttcatggtagacaatgaggccatctatgacatctgtcgtagaaacctcgatattgagcgtccaacctatactaacctgaataggttaataggtcaaattgtgtcctccatcactgcttccctgagatttgatggagccctgaatgttgacctgacagaattccagaccaacctggtgccctactccccgcatccacttccctctggccacatatgcccctgtcatctctgctgagaaagcctaccatgaacagctttctgtagcagagatcaccaatgcttgctttgagccagccaaccagatggtgaaatgtgaccctcgccatggtaaatacatggcttgctgcctgttgtaccgtggtgacgtggttcccaaagatgtcaatgctgccattgccaccatcaaaaccaagcgcagcatccagtttgtggattggtgccccactggcttcaaggttggcatcaactaccagcctcccactgtggtgcctggtggagacctggccaaggtacagagagctgtgtgcatgctgagcaacaccacagccattgctgaggcctgggctcgcctggaccacaagtttgacctgatgtatgccaaacgtgcctttgttcactggtacgttggggaggggatggaggaaggtgagttttcagaggcccgtgaggacatggctgcccttgagaaggattatgaggaggttggtgtggattctgttgaaggagagggtgaggaagaaggagaggaatactaaagttaaaacgtcacaaaggtgctgcttttacagggaagcttattctgttttaaacattgaaaagttgtggtctgatcagttaatttgtatgtagcagtgtatgctctcatatacaattactgacctatgctctaaaacatgaatgctttgttacagacccaagctgtccatttctgtgatgggttttgaataaagtattccctgttttaaatg

SEQ ID NO: 488772 - DNA, 1673 bp, Homo sapiens
  misc_feature (404)..(404): n is a, c, g, or t
  misc_feature (406)..(406): n is a, c, g, or t
  misc_feature (408)..(408): n is a, c, g, or t
  misc_feature (412)..(412): n is a, c, g, or t
  misc_feature (419)..(419): n is a, c, g, or t
  misc_feature (428)..(430): n is a, c, g, or t
  misc_feature (437)..(438): n is a, c, g, or t
  misc_feature (517)..(517): n is a, c, g, or t
  misc_feature (529)..(529): n is a, c, g, or t
ggtaccgcgaacggtgcgttacttacctcgactcttagcttgtcggggacggtaaccgggacccggtgtctgctcctgtcgccttcgcctcctaatccctagccactatgcgtgagtgcatctccatccacgttggccaggctggtgtccagattggcaatgcctgctgggagctctactgcctggaacacggcatccagcccgatggccagatgccaagtgacaagaccattgggggaggagatgattccttcaacaccttcttcagtgagacgggggctggcaagcatgtgccccgggcagtgtttgtagacttggaacccacagtcattgatgaagttcgcactggcacctaccgccagctcttccaccctgagcagctcatcacaggcaagggagggggngngnaggncgggggncgggggggnnngggcggnnggcgggggggggggggggggggtgggggggggggggcgcagggggggggggggggggggggggggaggggggggggggnggggggaggggnggggggggggggggggggggggggggggggggggggggggggggctcagttgattatggcaagaagtccaagctggagttctccatttacccagcaccccaggtttccacagctgtagttgagccctacaactccatcctcaccacccacaccaccctggagcactctgattgtgccttcatggtagacaatgaggccatctatgacatctgtcgtagaaacctcgatattgagcgtccaacctatactaacctgaataggttaataggtcaaattgtgtcctccatcactgcttccctgagatttgatggagccctgaatgttgacctgacagaattccagaccaacctggtgccctactccccgcatccacttccctctggccacatatgcccctgtcatctctgctgagaaagcctaccatgaacagctttctgtagcagagatcaccaatgcttgctttgagccagccaaccagatggtgaaatgtgaccctcgccatggtaaatacatggcttgctgcctgttgtaccgtggtgacgtggttcccaaagatgtcaatgctgccattgccaccatcaaaaccaagcgcagcatccagtttgtggattggtgccccactggcttcaaggttggcatcaactaccagcctcccactgtggtgcctggtggagacctggccaaggtacagagagctgtgtgcatgctgagcaacaccacagccattgctgaggcctgggctcgcctggaccacaagtttgacctgatgtatgccaaacgtgcctttgttcactggtacgttggggaggggatggaggaaggtgagttttcagaggcccgtgaggacatggctgcccttgagaaggattatgaggaggttggtgtggattctgttgaaggagagggtgaggaagaaggagaggaatactaaagttaaaacgtcacaaaggtgctgcttttacagggaagcttattctgttttaaacattgaaaagttgtggtctgatcagttaatttgtatgtagcagtgtatgctctcatatacaattactgacctatgctctaaaacatgaatgctttgttacagacccaagctgtccatttctgtgatgggttttgaataaagtattccctgttttaaatg

SEQ ID NO: 488773 - DNA, 1212 bp, Homo sapiens
agcggtgctgggtgactcatgcctgtagtcccaacactttggtaggttcaggtccgccgatcggatgactgcccggagtcgacaacctgactgtgctagactgtggtctacgtcacgtctctacttacagatgatccaatatacatagagagttcatgctgcggctgtggctgtgtacactccgggtacatccactgtctagcattatgagattgcgcgtgttgatgattcaccttggatgcctagagatgatactatcgctgcttcagtagtgcgataccatcactgcggacattgagcctcttagctcatcttctcgcatgatcatgttagagacgcggtgctcatccctggagaggcatcttaatatttacccgagactccctccaaatcattgcgctgtgcagcgcagtgaaaatgtctcccctccagggatcgaagaaccgagtagaaccattgggtcaagaccaatcgattcttttgctgtagatgcgcttgtgtgccaattctaacccggcaattcgagtccattgggcaagattgtaccactttatgccaaccattgggccttgaagccctattcaggttgtcctatctatggaacccccgcataggccgcaatccgggccccattctgtgaacctaagcccattgctatgtggcccttacttcccacttgttttggcggcgcttggccttcagcccgttagggccctgttcgtaagcccttctttcttgtggcgacgtcttggcgttggggcaatcgtcggggcaagtagagagggctgcccccttggccccgatggctcaagaagccgccaaggcccgtccgttttgctacacaagaatttcttcattcgctgcgacgaatccttttgtggcccgtcgcccatttggggccctcgttttgagcggggttccaatccgtccgccacagtttgcgtctcacaggaacccgttccccaaggtaggctttcgacacgcacattggggggtggagcgctatgcactttgcacctacttggttggtcgggcggcttggggggccccgttggtcccttccacaccgtgtgtggacttttgtcacttggcgcgggtgtgttttttccccttggtggtaccaccgggccttggccggctctgtggggttcccccgttatcaccctttttccgggcgggcttggaggcgcgtccggtggggccccctctccg

SEQ ID NO: 488774 - DNA, 358 bp, Homo sapiens
  misc_feature (130)..(131): n is a, c, g, or t
  misc_feature (152)..(153): n is a, c, g, or t
  misc_feature (191)..(191): n is a, c, g, or t
  misc_feature (206)..(206): n is a, c, g, or t
  misc_feature (217)..(217): n is a, c, g, or t
  misc_feature (278)..(278): n is a, c, g, or t
  misc_feature (317)..(317): n is a, c, g, or t
  misc_feature (334)..(334): n is a, c, g, or t
gttgtcttgtatgctcagcgaggcccggagagaccgggagagagctaggccgagtccaccgcccgagtctgctgcccgagcccgcgttacgcacaaagccgccgatccccggcctggggtgagcagacgnncaccgcccgggagcagcgcgnngagaccacggtgcgccctatgcccccgcgcccccaccncccccgccgcggcancgaaagcgcantgtagaacgcgccaccgggggcccgggtgcagctagcgaccctctcgccacctgcgcgcancccgaaggtgaagcagtgaagcggcaaacgagagggcanccaaggcgtttcgcggngccccctccttgcttgccccgggg

SEQ ID NO: 488775 - DNA, 100 bp, Homo sapiens
tcgagctcgcccattctgctggggttgtggggtatgtgctattgaaacttctaaaactaagcattgctgcctggggttctaacactaagtgctattgaaa

SEQ ID NO: 488776 - DNA, 468 bp, Homo sapiens
tcttcataaaagcccaaaagtggaaccaatttaaatgtccatcatctggtaaaaacatacatgtggtctatccatacagtagcatattactagacaattggaaggaatgaagtactgacacaggctacaacatggatgaatattgcaaacatcacgctaaatgaaagaagccagtcacaaaagactccatgattccgtttctgtaacatgcccagaacaggaaagtgtatagaggcagaaagtagattagtggctgtttagggctgggggttgaggtgaaatggggactgactgctaaggggtacagtgtttctttctggggtgatggaaatgtgctaaaattgattgtgatgatggctgcacaattctgtgaatatactaaaaagcactgaatcaggttcaacactttaaaagggttaattatatggtatgtgaattacacctcaataaagctgccataaaaaatgg

SEQ ID NO: 488777 - DNA, 291 bp, Homo sapiens
caaaatacatcgtgttacattcttttgtaaatctttatgttagcttttcttttttgagatggagttttactcctgttgcccaagctggagtgcaatggcgcaatctcggctcactacaacctccacctcctgggttcaagtgcattctcctgcttcagcctcctaagtagctgggattacaggggcctgccaccacacccagctaatttttgtatttttagtagagatggggtttcatcatgttggccaggctggtctcaaactcctgacctcaggtgatccacccgcctt

SEQ ID NO: 488778 - DNA, 391 bp, Homo sapiens
  misc_feature (145)..(145): n is a, c, g, or t
ttatattgttacttgctatgcagaagtataagtctgaattactacaggatgtttgtggtttgaaaaatacaaatgctatatctcatcagtatataattatatatgtacacagtctatataaacacaatttatgtatttgtctatnatatgcaaaccaaagtctttagttgagctcaagctaaatagtctttgtttttaaaaaatttccaattgttgccgggtgcggcggctcacgcctgtaatcctagcactttgggaggctgaagtgggtggatcaactgacgtcgggagttcgagaccaacctaatcaacatgcagaaaccccgcctctactaaaaatacaaaattagccgggcgtagcggcccatgcctgtaatcccagctacttggg

SEQ ID NO: 488779 - DNA, 684 bp, Homo sapiens
ggacgccgccttcgccgctggctccgtctgttggggggcgaacacgccgcggtcctcgtcgtggtgagcgcagccactcaggctggtcctgggggtggggctgtaggggaaagtgctaaagccgctgaggctctgagagattcctctgcgaatctgtttttagctatcaagtggcatccacgcttaaacaggtgaaacatgatcagcaagttgctcggatggaaaaactagctggtttggtagaagagctggaggctgacgagtggcggtttaagcccatcgagcagctgctgggattcaccccctcttcaggttgatactgcctggatggtcacctctggtgcgcagcaagtgcaaagccagtgggggactttctcacagcttacatagccatccagagatccacagctacgtcactgaattgttaatgcacatttgtacttggtttctctgtatctattcacaggcaacaaatacttatatgtgtgatctttcaaataaaacaacccccctacccctcacccacactcacaacaaggaaacaacacctcctccctcacaaaccatgccggccgcctggcctcggctttagactcggcaggcttatgcatgcggcccgaattcggctcactggcccaattccccctatagggagccgtatacaatcaactggcggggtttccc

SEQ ID NO: 488780 - DNA, 522 bp, Homo sapiens
  misc_feature (437)..(437): n is a, c, g, or t
  misc_feature (456)..(456): n is a, c, g, or t
cggacgcgtgggtcgacccacgcgtccgggcgaacacgccgcggtcctcgtcgtggtgagcgcagccactcaggctggtcctgggggtggggctgtaggggaaagtgctaaagccgctgaggtaagaggccgaggggtcgagggccctcgggagcttggtgaaaagggagttaacccccaggatcctacctgcagggactagaaaaatggagaaggtaggaggagaaacaggagactgctgcagcagacgtgcgataggaaatttccccaggccgggtttgaccgagtgcgcatgcgggccgagggctggcgcctgcgcagtgggacagcgccgatggcgtagtttcctggggacccagctgggtgggctggccactttttctccacgctaacctctcttccctttttcttcctcccttccccccttccccctcctncttctattctcttcccttnctcttcccctttttcttctttccaccctctccctcctctctcctctctctctttcttcttctctcc

SEQ ID NO: 488781 - DNA, 1032 bp, Homo sapiens
gcggcgcgagcccctcgtgctggtggaagtgccccatgcgtgcagtgctgctaggagggctgctggctgcctgtgcggaatgaatgccctgtcccctgcagcttgcgacctggagatccactgaatgtcccaatgtcccatgtgaccctgtgcgctgtccctgtggacgactggcgctgtgcggcgctccatgcacgatgttttcctgccaatggacatcgagtgtggcacatggttaacccttgtgaccaatgtagcctggtggcttcggtgtgcatcgtcaaccaacgtggccttcccatgttgaggcaagaccgagagtaaactacactcatgctcgtcgacctgcacgcccgatacgctgagtgtggtttgctggatcctggccttcccgtgtaaccagttcgggaagcagtgagccagtgcagtaaccgaagatgatcaaagagttcgccgcgggctacaacgtcaaattcgatatgttcagcaagatctgcgtgaacggggacgacgcccacccgctgtggcaagttggatgaagatccaacccaagggcaaggggcattcctgggaaatgccatcaagtggaacttcaccaaagttcctcatcgacaagaacggttgcgtgctgaagcgctacggacccattggaggagccccttggtgatagagaaggacctgcccactatttctagcttccacaagttgttttggcccgcctgagcccttgccaggccctcggaggcttccacctggattcttgacgggctgccttgaactgctggtgggcaggaccgaaatcatgtgcacccgcggaggaagtccatggcctgctgagtttgacttgagccccacccccgtggtacttggtgggattaactggcacttatgccatacacaacaaaaaaaaaactggcaacacatcagggtggaacacattatgacagggacagtacaatgtgtcagaccacatcataaagtagaaatatgggccaaatagggtataaccgcacaaataagacaaataacagt

SEQ ID NO: 488782 - DNA, 447 bp, Homo sapiens
gaggggaaaaattgttcttcaaaaaaaaaaagaaagaaaaataaaataaaattaaaaattcagagccacaagaaagtaccagtccaccaactcacattttctatattaataattcttaactaaaagaagttccatattcgacagcattttagttttttaatagtacttattagcatcaaccatcttgataatcaccaagggaaaaattaaaaatacctagactgcaataaacctttaaattggattttcagtgagaatttagaagcaatcactacctttctcgtttcatttgtgtaaccatgcagcataggcactgtgttacatcatctttacgctttggtatttgaacttattacagaattttttctctaaattggatgtttctttatatgaccttggaaactgaagtgatcttagcattaaacaaaaatgctttttaaagcaaaa

SEQ ID NO: 488783 - DNA, 158 bp, Homo sapiens
tgaggcaggatctattctgttaccaggcaggagtcagtggcacaatcagggctcactgcagcagccttgacctcccgggctctagtgatcctcctgactcttttttttttggcagagacaaggtctccctatgtggcctatgcgggtctcaaactccg

SEQ ID NO: 488784 - DNA, 886 bp, Homo sapiens
  misc_feature (80)..(80): n is a, c, g, or t
  misc_feature (83)..(83): n is a, c, g, or t
  misc_feature (86)..(86): n is a, c, g, or t
  misc_feature (90)..(92): n is a, c, g, or t
  misc_feature (103)..(103): n is a, c, g, or t
  misc_feature (111)..(111): n is a, c, g, or t
  misc_feature (157)..(157): n is a, c, g, or t
  misc_feature (183)..(183): n is a, c, g, or t
gacggtcctgacattcatccatggctcaggtgacctatccgtactcagctcccaaagtgctgaaattacaggcgtgagcnacnggntggnnnaaaggtatttntaatgagnaagcaatatgtatttcctaactagttccccttccctgggaacagancacagtgttattctggaatgttattnggaaaatattataatttattgttgtggcttgatcaggatgtatccaagaaaaactgtcctatgaagtgtgatgcttttatcctcgtataacttatttcctctgtcaaatttctgccttggcactgccatatcaccccttcataactcataaatcacccacagtcaatcttagttgacataaacagttcgctaatggtaggaattcatgttttaagtagatatactattcttaagcatattttcagttcaaaacctgactgatattttggcctgagacatcaataaaatattgtgaaagtagagagcatagaaaaaaggggagctaactctttacaaaactgtatgctggcccttacagcagctagaatgaaatgttgtcactctcacttccataaacttgccaattgctgtttttctttctctgtagtgaagtaagaactctgctagagaggaaatggctgcttcatcatcatcctcctcagctggtggggtcagtggaagttctgtcactggatctggtttcagtgtctcagaccttgccccaccacggaaagcccttttcacctaccccaaaggagctggagagatgttagaagatgatctcatgctgctttctgaataattggattcagatctgcaatgcatattaattgtaaagaagctattaagtggattaaagatgagtttgccctgaaaaaaaaaa

SEQ ID NO: 488785 - DNA, 170 bp, Homo sapiens
tctgagatcccagctccaacaagattaacatgagatatcccatcagcaaatggatgcaatatattgatcattgctgaagtcaagggagggatatctggggtctcattgtgttattccttctacttttctgtaagattaaaagttgttcagagtaaaaagatttttttgtg

SEQ ID NO: 488786 - DNA, 545 bp, Homo sapiens
cccctatgagctgtccaaacgtaccaattacattaggaaaggtaggcatatagtcaaaactcagctgagtatatatgggtgaatctatttctatattgtatactcctccactaataccacactgtgggtgactctagtagctgtacagtaactcttaacatcatatacgggcaattctttccactttattgatttatattttcagaatggctttagcttttcttgtcccttgcctttccataaaaattcagaataagctatgtaagtgtctacaaacaaacctgccataattttgataagaattaaagcagaggtgtccaatctttgggcttccctgggccacagtggaagaagaagtgtcgtgggccacacataaaatacacacacacaaaaacacacacactaatgggcggtgtatagtcatcattttatatctaccaccacagatcagcaaagatcgtcgcttgcataatactcctaattatgcactgccccattcagagggtctttcaaaatcattgaacaggtccagaagtagatgctta

SEQ ID NO: 488787 - DNA, 683 bp, Homo sapiens
  misc_feature (34)..(34): n is a, c, g, or t
  misc_feature (40)..(40): n is a, c, g, or t
  misc_feature (61)..(61): n is a, c, g, or t
  misc_feature (84)..(84): n is a, c, g, or t
  misc_feature (91)..(91): n is a, c, g, or t
  misc_feature (101)..(101): n is a, c, g, or t
  misc_feature (120)..(120): n is a, c, g, or t
  misc_feature (141)..(141): n is a, c, g, or t
  misc_feature (149)..(149): n is a, c, g, or t
  misc_feature (160)..(160): n is a, c, g, or t
  misc_feature (162)..(162): n is a, c, g, or t
  misc_feature (164)..(164): n is a, c, g, or t
  misc_feature (179)..(179): n is a, c, g, or t
  misc_feature (212)..(212): n is a, c, g, or t
  misc_feature (217)..(217): n is a, c, g, or t
  misc_feature (264)..(264): n is a, c, g, or t
  misc_feature (266)..(266): n is a, c, g, or t
  misc_feature (279)..(279): n is a, c, g, or t
  misc_feature (281)..(281): n is a, c, g, or t
  misc_feature (325)..(325): n is a, c, g, or t
  misc_feature (335)..(335): n is a, c, g, or t
  misc_feature (351)..(351): n is a, c, g, or t
  misc_feature (367)..(368): n is a, c, g, or t
  misc_feature (371)..(371): n is a, c, g, or t
  misc_feature (373)..(373): n is a, c, g, or t
  misc_feature (379)..(379): n is a, c, g, or t
  misc_feature (441)..(441): n is a, c, g, or t
  misc_feature (445)..(445): n is a, c, g, or t
  misc_feature (447)..(447): n is a, c, g, or t
  misc_feature (516)..(516): n is a, c, g, or t
  misc_feature (520)..(520): n is a, c, g, or t
  misc_feature (527)..(527): n is a, c, g, or t
  misc_feature (554)..(554): n is a, c, g, or t
  misc_feature (591)..(591): n is a, c, g, or t
  misc_feature (682)..(682): n is a, c, g, or t
tggggtcgcccagtttattggtaaaacgggcacngagcgnggcgagcgccgggcgcggaancctggggcgggggcgcctttccncttgaanaacttccacnggaccttgaaggcgagcanccagtcgctgaccgagggccnctggcaancggaggtgcananangcgcctggcgggggngcggggcgccggagcggcgcgcggggcgggggnggggngggggccgggccggggttcggagcgcggcgccgccgcgggagggtcncnccgcgggcgcccncncttcacttgcccgccttctgcgccttctgcgccgacttggtgancttgccggcnccgccgctcttcttcnccacgttcttaaaaannccnanggccancgtctgcctcaagtcgcgcacggcgaacggccgaaaagcgggtactgggaaaaactctccanaaanangggctttcccggcaccatctccacgatggccgcgtctccagacttcagggacttggggttgtcctccancttnttgccanagcgccggtcaatcttctccttcagcnccgcaaacttgcaggcgatgtgggctgtgtggcagtngatgaccggggagtagccggcgctaatctgccccgggtggttcaggatgatgactggggaggtgaactgagcacctcctgcggcgggtcana

SEQ ID NO: 488788 - DNA, 890 bp, Homo sapiens
  misc_feature (25)..(25): n is a, c, g, or t
  misc_feature (29)..(29): n is a, c, g, or t
  misc_feature (34)..(34): n is a, c, g, or t
  misc_feature (43)..(43): n is a, c, g, or t
  misc_feature (49)..(49): n is a, c, g, or t
  misc_feature (63)..(63): n is a, c, g, or t
  misc_feature (874)..(875): n is a, c, g, or t
taggggtttaccccagacatatcantaangaatncctcttacnctgctntagcatctcacatntctgctggatctcttcctcactcaaaagcacccaacatcccaatagttagatgaagctttttaggattctggaaaatgctgctgtcaaccccatgatccatggagcacttcgccagtacttcctcctggaatctcaggaatccttcctgaacctcaacttcattgaggaaaaaggcaaggaagtgagtgaagggctgctttcttcgaaaagtgtccaaaagaacatcaatccgtgttcgggctgaaattacaccatttcgatgctggccagtgattacaatttccccgtcttgtccaggtttaggaatgctaatagaagttttggtctccatttctattttcttcctagtgtcccctctctttccaactatatgcttatagagcaagctgggggccctcaaagtagaccggaatccttgtggggtctgctccacctcgtaggcatcacagggctcatcagcacactccatggagccttgatagaagtcctcttcatcttcttcatgttgataggtctgttcttggactggattcttcctgtaattccggccatcaattcttataagctgtggacgcagaacttccatgacactttctccaaatgatattccaattatgcccctgcttcgaggtggtttggagaggaagaggaaagctgtgtctttctgcaatatcgtgagggaagccgaggccctgaatcatcaaagagaaggagaagaggactaggcggctgcaggtaaaccaaggtagggcgaggaggaggacccggaattcctctacgcgagcgcgttctctgctcccctcctcgcgnntccgccccggccacc

SEQ ID NO: 488789 - DNA, 835 bp, Homo sapiens
  misc_feature (25)..(25): n is a, c, g, or t
  misc_feature (29)..(29): n is a, c, g, or t
  misc_feature (34)..(34): n is a, c, g, or t
  misc_feature (43)..(43): n is a, c, g, or t
  misc_feature (49)..(49): n is a, c, g, or t
  misc_feature (63)..(63): n is a, c, g, or t
  misc_feature (819)..(820): n is a, c, g, or t
taggggtttaccccagacatatcantaangaatncctcttacnctgctntagcatctcacatntctgctggatctcttcctcactcaaaagcacccaacatcccaatagttagatgaagctttttaggattctggaaaatgctgctgtcaaccccatgatccatggagcacttcgccagtacttcctcctggaatctcaggaatccttcctgaacctcaacttcattgaggaaaaaggcaaggaagtgagtgaagggctgctttcttcgaaaagtgtccaaaagaacatcaatccgtgttcgggctgaaattacaccatttcgatgctggccagtgattacaatttccccgtcttgtccaggtttaggaatgctaatagaagttttggtctccatttctattttcttcctagtgtcccctctctttccaactatatgcttatagagcaagctgggggccctcaaagtagaccggaatccttgtggggtctgctccacctcgtaggcatcacagggctcatcagcacactccatggagccttgatagaagtcctcttcatcttcttcatgttgataggtctgttcttggactggattcttcctgtaattccggccatcaattcttataagctgtggacgcagaacttccatgacactttctccaaatgatattccaattatgccgtgagggaagccgaggccctgaatcatcaaagagaaggagaagaggactaggcggctgcaggtaaaccaaggtagggcgaggaggaggacccggaattcctctacgcgagcgcgttctctgctcccctcctcgcgnntccgccccggccacc

SEQ ID NO: 488790 - DNA, 705 bp, Homo sapiens
tagtccccgcagatgtaatcatgtctgaaccaatcatactgcttgtgactggagctggtgctcaaattgcatattcactgctgtacagaattggaaatggatctgactttgctaaagatcagactatagtccttagtactgtctggatatcacccctatgatgcatgtgctggacagtgtcctaatgcaactgcaagactgtgcccttccacttctgaaagatgtcatcgctacagataaagaagacgctgccttcaaagagctggatgtggacattctagtgggctccatgccaagaagggtaggcatgtagaggatttactgaaagcagatgtgaaggttattgtcgtggcttatccacacaataccaactgtctgactgcttgcaagtcagctccatccatccgcaaggagaactccagatgcttgactcgttaggatcacaaccgagctaaatctcaaatagctctcatactctggcgtgactgctaatgatgtaaagaatgtcattatctgaagaaaccattgctcgactcagcatccatatgtcaaccatgccaaggtgaaattgcaacgggaagccggtgcttatgaagctctgatagatgacagctggctcaatggagaatctgtacgactgtgcagccacggggcgctgctgtcataacgctcataccaattcagtgccatgtctgctgcatccat

SEQ ID NO: 488791 - DNA, 505 bp, Homo sapiens
  misc_feature (25)..(25): n is a, c, g, or t
  misc_feature (29)..(29): n is a, c, g, or t
  misc_feature (34)..(34): n is a, c, g, or t
  misc_feature (43)..(43): n is a, c, g, or t
  misc_feature (49)..(49): n is a, c, g, or t
  misc_feature (63)..(63): n is a, c, g, or t
taggggtttaccccagacatatcantaangaatncctcttacnctgctntagcatctcacatntctgctggatctcttcctcactcaaaagcacccaacatcccaatagttagatgaagctttttaggattctggaaaatgctgctgtcaaccccatgatccatggagcacttcgccagtacttcctcctggaatctcaggaatccttcctgaacctcaacttcattgaggaaaaaggcaaggaagtgagtgaagggctgctttcttcgaaaagtgtccaaaagaacatcaatccgtgttcgggctgaaattacaccatttcgatgctggccagtgattactgtaaacaaagaagaaagggtaaactgctcaaggacccccaaatacttataaaacaggacctcttgatactgtcacctctgaggagctaaagcagttctgaatgcgtatatgaatctaaacaggggacaataacaaatataagaaaactgctaattaattcaat

SEQ ID NO: 488792 - DNA, 356 bp, Homo sapiens
aggcacactgtcctttagcatgccttcgtgaatcctgtacacatgaatgctgacagtcacagctagcttggacttcactgcttccaatttatcttctctcactactgcacccttgtggcaggaatgtccattctcttttcgtttcctttcaccatactcatacagcatctgtttggcctggttaccatgaacccctagtgtatagctcagccatttgtatgtcacgctcttgttttggtccgtgacgacctcgtctatattttccagataaagctggtccgccatggtgcgacagcgctgggacccgcctctaacccctctctctatcacagccacagctcccggcggcggaaacc

SEQ ID NO: 488793 - DNA, 760 bp, Homo sapiens
  misc_feature (25)..(25): n is a, c, g, or t
  misc_feature (29)..(29): n is a, c, g, or t
  misc_feature (34)..(34): n is a, c, g, or t
  misc_feature (43)..(43): n is a, c, g, or t
  misc_feature (49)..(49): n is a, c, g, or t
  misc_feature (63)..(63): n is a, c, g, or t
taggggtttaccccagacatatcantaangaatncctcttacnctgctntagcatctcacatntctgctggatctcttcctcactcaaaagcacccaacatcccaatagttagatgaagctttttaggattctggaaaatgctgctgtcaaccccatgatccatggagcacttcgccagtacttcctcctggaatctcaggaatccttcctgaacctcaacttcattgaggaaaaaggcaaggaagtgagtgaagggctgctttcttcgaaaagtgtccaaaagaacatcaatccgtgttcgggctgaaattacaccatttcgatgctggccagtgattactgtaatcccagcactctggggcaaaggccaaggcaggaggattgcctgaggccaggagttccagacagcctaggcaatttactgaaactctgtctctacagtggttggaggtggagaagcttctgatgttccattgcctgagatttcaaaacagacaagaccagatccttgtctagaggattaaaagctaccagatcatttccttctctgatttctcaatttccccgtcttgtccaggtttaggaatgctaatagaagttttggtctccatttctattttcttcctagtgtcccctctctttccaactatatgcctggacttccaagtataaatattctgacaatccaaagttatcttctggaacccacagtcgtttgatgtgttcaagtgaatgagactgagaatcaccccatccgct

SEQ ID NO: 488794 - DNA, 198 bp, Homo sapiens
tagatcccctggtaatgattcttctactttatgtctctataaatgtgactattctagggatctcatgtaagtggaataatacaatatttgtccttttgggcctagcttaattaacttggcataatgtccacaaggttcatctatgttgtaacgtgtcagaatttccttctggctgaattaaatttaatgttagagata

SEQ ID NO: 488795 - DNA, 1202 bp, Homo sapiens
ggacgccgccttcgccgctggctccgtctgttggggggcgaacacgccgcggtcctcgtcgtggtgagcgcagccactcaggctggtcctgggggtggggctgtaggggaaagtgctaaagccgctgagtgaagtaagaactctgctagagaggaaatggctgcttcatcatcatcctcctcagctggtggggtcagtggaagttctgtcactggatctggtttcagtgtctcagaccttgccccaccacggaaagcccttttcacctaccccaaaggagctggagagatgttagaagatggctctgagagattcctctgcgaatctgtttttagctatcaagtggcatccacgcttaaacaggtgaaacatgatcagcaagttgctcggatggaaaaactagctggtttggtagaagagctggaggctgacgagtggcggtttaagcccatcgagcagctgctgggattcaccccctcttcaggttgatactgcctggatggtcacctctggtgcgcagcaagtgcaaagccagtgggggactttctcacagcttacatagccatccagagatccacagctacgtcactgaattgttaatgcacatttgtacttggtttctctgtatctattcacaggcaacaaatacttatatgtgtgatctttcagggaatgttttgtttatttgtttttaaaagtattgggaatcagattaagacaatcagtttcagagaaccaggaggtttggggttaagagatactcaaaaattttcacaagccaagtagggcatatatcagatttggccaactgaatggcgtctgtcctgtcatccatatggtgcctggaaatatttaccagtcaaggtcaaggtcagcatctgtggttaaaaatatagcattctgacctaaaaaagttattttgcagatgaatgtgttttcaactcaggacctatccaaatgaggaatttttaaatattcttttttttttcctatttttagacatcaattctatagattctgactttttctaacctcttatagacatgccaaatgctggcaaaaagaagtgctttttggatatggcagcacttgtaaaaataaagcagtaagcaaaatccttttaaacacagaaatcctgagttcttctcattggtggactcaagcaattctgtagcaaataaatcctttgaaagagctccaaa

SEQ ID NO: 488796 - DNA, 1136 bp, Homo sapiens
ggacgccgccttcgccgctggctccgtctgttggggggcgaacacgccgcggtcctcgtcgtgtgaagtaagaactctgctagagaggaaatggctgcttcatcatcatcctcctcagctggtggggtcagtggaagttctgtcactggatctggtttcagtgtctcagaccttgccccaccacggaaagcccttttcacctaccccaaaggagctggagagatgttagaagatggctctgagagattcctctgcgaatctgtttttagctatcaagtggcatccacgcttaaacaggtgaaacatgatcagcaagttgctcggatggaaaaactagctggtttggtagaagagctggaggctgacgagtggcggtttaagcccatcgagcagctgctgggattcaccccctcttcaggttgatactgcctggatggtcacctctggtgcgcagcaagtgcaaagccagtgggggactttctcacagcttacatagccatccagagatccacagctacgtcactgaattgttaatgcacatttgtacttggtttctctgtatctattcacaggcaacaaatacttatatgtgtgatctttcagggaatgttttgtttatttgtttttaaaagtattgggaatcagattaagacaatcagtttcagagaaccaggaggtttggggttaagagatactcaaaaattttcacaagccaagtagggcatatatcagatttggccaactgaatggcgtctgtcctgtcatccatatggtgcctggaaatatttaccagtcaaggtcaaggtcagcatctgtggttaaaaatatagcattctgacctaaaaaagttattttgcagatgaatgtgttttcaactcaggacctatccaaatgaggaatttttaaatattcttttttttttcctatttttagacatcaattctatagattctgactttttctaacctcttatagacatgccaaatgctggcaaaaagaagtgctttttggatatggcagcacttgtaaaaataaagcagtaagcaaaatccttttaaacacagaaatcctgagttcttctcattggtggactcaagcaattctgtagcaaataaatcctttgaaagagctccaaa

SEQ ID NO: 488797 - DNA, 176 bp, Homo sapiens
tacttttcccagggatccagagacatacttttctccaaagaagatcttttcctttcttttttcttcttttgggttgggtacccaaagtttaaaacagaagtaaggaactaggaacggtattaagacctcctttggaaggacatgtaagattggtactttggaagtatgggtaatgg

SEQ ID NO: 488798 - DNA, 269 bp, Homo sapiens
ttctactcactgccctcacaaattacagggacatcagtgcactgtcctgacagaggaggagaagcggacctgattgtgagggtacccattcccacaaaaattcccctcacaaagccgaggagaaggcttgaagagaagtcggaggaaaatcaagaacaagatctcagcccaaggagagcccgtcgtaagaagaaggagtatgtggagtgtctagaaaagaaggtggagacatttacactctgagaacaatgaactgtggaagaaggcgt

SEQ ID NO: 488799 - DNA, 344 bp, Homo sapiens
  misc_feature (2)..(2): n is a, c, g, or t
  misc_feature (29)..(29): n is a, c, g, or t
  misc_feature (63)..(63): n is a, c, g, or t
  misc_feature (303)..(303): n is a, c, g, or t
tncccctgggatgcaactccgttacgagntgctgatcaaaggtcattcaataaagtgatcgtnactatttaatggcgaaggtaaagggataagctcgttatcttcaaaataaaaatcaaatgcggtcagtaaagcatcttttgccgcttccatcgcttcagcgacagtttcgccctgggtcaacgcttcagggatatccacaaaagaaaccatataaccgccttccggcgcgggtgtaagagtgacgggataacgcataatttcgactgtctctcgcatgtcattaacctttttaattggcgnttaactcaaaccgagttgtttcaggattgctttacgcaatt

SEQ ID NO: 488800 - DNA, 1071 bp, Homo sapiens
cccacgcgtccgggcatgttcattcttcactttctttctgcttttacaaaagaacttggatgtatgttccaaagggtcctcattctgttcctctttgaacttttcctttgtccttgtattaaagtggttttaaaggggtctaaaaagatttggcaaaacatatttgcagatgtagattagctggtgaagaaaattactgctagagatcaactgattaactggtaaagaacgtttattttataacccttgaagaatagaaggacatagttggattattgtgtgtgcattgtatttttacttctattttttttttgcttccattttccagttagcagagataaaatgagagcgttttaacttcaatgtaccattttactgagtgctaaggaagcatatcaattccaatattttataaccaaagctctatcagaacatatttataaaacttgtggaatttttacggctttggtgtagtcatgtaggtaaatcatttaaaatataaaacaatctcaatttagatcaagggttatttcttagatcaaatttatgccaattatatgaaaagattttaactccgagacaggagtctttcagtgctgaatttttagactgtaaatgagttcttcttaacttagctgtttccctacttctgtgacttctgtgttagccatcttatttctttaaaatctgagtcctgattggcttaatgattttgcagcagacatgtctccacatattctcaaatgctgtcatgcggaaacgtatgaaacagatgaagaatgactgacccagattttagatgtataatgttgttaaagtacatactactgtaaaaatatgggatgaattttatatattaagaaatgccaaaaacatagtttctgcaccaagttaattatccctgtcctttcacatttatagggggaaaataaatactttatagcctaacagttatttgatgttattcttgcagagggaatggaaaggaatggaaagatttgttggcgtaatttttgaatatttgttatgatcatatgaataagtaaaaaaattcatcctgaaaaaaaaaaa

SEQ ID NO: 488801 - DNA, 530 bp, Homo sapiens
  misc_feature (26)..(26): n is a, c, g, or t
  misc_feature (36)..(36): n is a, c, g, or t
  misc_feature (89)..(89): n is a, c, g, or t
  misc_feature (103)..(103): n is a, c, g, or t
  misc_feature (109)..(109): n is a, c, g, or t
  misc_feature (164)..(164): n is a, c, g, or t
  misc_feature (282)..(282): n is a, c, g, or t
  misc_feature (521)..(521): n is a, c, g, or t
gaaacccccagaataaaattaaaccnacccccaacntcaaattggggtcaaaaaaaggtgggtttgtacccccgggttccatatactgncccaacagtatggncctcanaaaaactgaccccccttaaccctttgtttgtgttacctgccctacactcattganagttgggacctatttcacacatacagtccccgggcatgtagaagggaccttaatgttgaaagaaggggaggcattttaaaatcccacatcaaaaaaatgttgttctgtttgggagtgngtgtcacgcctgcaatcccagcactttgggaggccgaggcgggtggatcacctgaggtcaggagttcgagatcaacctgagcaacatggtgaaaccccgtctctactaaagatacaaacattggctgagcatgggggtgggatcctgtaatcccagctacttgggaggcttaggcacttgaatgagaatcacttggacccaggaggtggaggttgcagtgagcaatgattgtgccactncctgggcaa

SEQ ID NO: 488802 - DNA, 770 bp, Homo sapiens
  misc_feature (749)..(749): n is a, c, g, or t
ggtaccgcgaacggtgcgttacttacctcgactcttagcttgtcggggacggtaaccgggacccggtgtctgctcctgtcgccttcgcctcctaatccctagccactatgcgtgagtgcatctccatccacgttggccaggctggtgtccagattggcaatgcctgctgggagctctactgcctggaacacggcatccagcccgatggccagatgccaagtgacaagaccattgggggaggagatgactccttcaacaccttcttcagtgagacgggcgctggcaagcacgtgccccggggctgtgtttgtagacttggaacccacagtcattgatgaagttcgcactggcacctaccgccagctcttccaccctgagcagctcatcacaggcaaggaagatgctgccaataactatgcccgagggcactacaccattggcaaggagatcattgaccttgtgttggaccgaattcgcaagctggctgaccagtgcaccggtcttcagggcttcttggttttccacagctttggtgggggaactggttctgggttcacctcccctgctcatggaacgtctctcagttgattatggcaagaagtccaagctggagttctccatttacccagcaccccaggtttccacagctgtagttgagccctacaactccatcctcaccacccacaccaccctggagcactctgattgtgcccccactggtactcagctgctaggagtggtaatgaagnaaaactaatggctttactgac

SEQ ID NO: 488803 - DNA, 897 bp, Homo sapiens
  misc_feature (775)..(775): n is a, c, g, or t
  misc_feature (791)..(791): n is a, c, g, or t
  misc_feature (838)..(838): n is a, c, g, or t
ggtaccgcgaacggtgcgttacttacctcgactcttagcttgtcggggacggtaaccgggacccggtgtctgctcctgtcgccttcgcctcctaatccctagccactatgcgtgagtgcatctccatccacgttggccaggctggtgtccagattggcaatgcctgctgggagctctactgcctggaacacggcatccagcccgatggccagatgccaagtgacaagaccattgggggaggagatgaccttcttcagtgagacgggcgctggcaagcacgtgccccgggctgtgtttgtagacttggaacccacagtcattgatgaagttcgcactggcacctaccgccagctcttccaccctgagcagctcatcacaggcaaggaagatgctgccaataactatgcccgagggcactacaccattggcaaggagatcattgaccttgtgttggaccgaattcgcaagctggctgaccagtgcaccggtcttcagggcttcttggttttccacagctttggtgggggaactggttctgggttcacctcccctgctcatggaacgtctctcagttgattatggcaagaagtccaagctggagttctccatttacccagcaccccaggtttccacagctgtagttgagccctacaactccatcctcaccacccacaccaccctggagcactctgattgtgccttcatggtagacaatgaggccatctatgacatctgtcgtagaaacctcgatatcgagcgccaactatatacttancgcgttattggcagantgtgtctccatcactgttcctgagattgatgggcctgatgtgcctgngattccgaccactgtgcctacccggtcattctcttggcatgcccgtttttgtggaagcc

SEQ ID NO: 488804 - DNA, 608 bp, Homo sapiens
  misc_feature (427)..(427): n is a, c, g, or t
ggtaccgcgaacggtgcgttacttacctcgactcttagcttgtcggggacggtaaccgggacccggtgtctgctcctgtcgccttcgcctcctaatccctagccactatgcgtgagtgcatctccatccacgttggccaggctggtgtccagattggcaatgcctgctgggagctctactgcctggaacacggcatccagcccgatggccagatgccaagtgacaagaccattgggggaggagatgactggcaagcacgtgccccgggctgtgtttgtagacttggaacccacagtcattgatgaagttcgcactggcacctaccgccagctcttccaccctgagcagctcatcacaggcaaggcacgacgtagccactcactatgccccgtggtcttcaccataggctttgcaacaacgccttttntttctccaaatttgctgctacttttcaataattctttctaaatggtttctccccttttactattcggcacccctctccaatttttttaatttctcatttttgatctacgtctctttttccggtttgccccccgcctctcctcttcccttccatccactccgtcttttctatcaaatgataa

SEQ ID NO: 488805 - DNA, 238 bp, Homo sapiens
ttgagacccatacaaatagcttaccttgcagttaaatctgtgggttcagaattaaagaagagggccaggcacagttggctcacaccatgtaatcccagctactcaggaggctgaagcatgagaatcgcttgaacctgggaggcagaggttgcagtgagtggagatcatgccactgcactcctgtctgggtgacagagcgaaactgtgcctcaaaaaaaccaaaacacctattgtatgt

SEQ ID NO: 488806 - DNA, 481 bp, Homo sapiens
aatcggctatcgaagtctggtaggaggccagtacaagtggtgcaaagtgagaaagatcttggaggggcacaaaagggaatccctcatctggtgactcatgatgcccggcaccatctgctaccccgatcccctcatcaaggtgaatgataccattcagatggatttacgagactggcacgattactgatttcatcaagttcgacactggtaacctgtgtatggtgactggaggtgctaacctaggaagaattggtgtgatcaccaacagagagaggcaccctggatcttttgacgtggttcacgtgaaagatgccaatggcaacagctttgccactcgactttccaacatttttgttattggcaagggcaacaaaccatggatttctcttccccgaggaaagggtatccgcctcaccattgctgaagagagagacaaaagactggcggccaaacagagcagtgggtgacatgggtccctggg

SEQ ID NO: 488807 - DNA, 361 bp, Homo sapiens
  misc_feature (102)..(102): n is a, c, g, or t
  misc_feature (119)..(119): n is a, c, g, or t
  misc_feature (268)..(268): n is a, c, g, or t
gtcctgtgtgcgcgctcgtcctctgctgtttcccgccagagctcgttgggcctccccggcccgcccggcccatggacctgcctcacagacggtttttcctgngagctccgaggcgagancatctttttcctgcggcccaaagaggtggagctgctgctgaaaacctggctacccggggagggtgctgtgcaaaaccatgtcctgacactgctacgatggagagcctacctgctgctcaccacctgcctcccgctgagggtggactgcncgttcagctacctggaggtccaggccatggcgctgcgggagactccccctccagtcacctttgagctggagtcccttcgtgagctggtcctgg

SEQ ID NO: 488808 - DNA, 342 bp, Homo sapiens
agggaataacgcggggtatatgaaatgaaggcaggaattcagaatgtaagaagatactaacgtatctcatcactggaaggtccggtggtgatggttatcccggggagaatcttcaccggctttatgtgcagtaataaatttctctcgtcatagctgttgactgtcatcttgtaatcgggatgtaatcttttttgcttagctctgcctgaggtaaagtaaacttcagcctcttataaacaagagtgatagagagctgcaggctgctacaacaaataccatagacaggttggtttataaataacatgaatttatttctcacagttctggacgctggttattccg

SEQ ID NO: 488809 - DNA, 98 bp, Homo sapiens
gggaaaagggttttagtaaaagggtgattggttttttccccaggggttttttttatataaatgttttggtttttccaattaaaatgccccaaacccca

SEQ ID NO: 488810 - DNA, 131 bp, Homo sapiens
atctattgtgtctcctccactcccactgtattacttgagtctgcttaaaatgattcagatcggcttggacataggttggctcacgccctgtaatacccagcactttgtggaggccaatgcagtaggggatc

SEQ ID NO: 488811 - DNA, 110 bp, Homo sapiens
agtgaggcctcaggtgtcctcaccacagcgtctggtgccctccgaccgcggacctgagcggggcgtgtcctcgccctgtcgggcgacagacacgtttgtcggtaacacgc

SEQ ID NO: 488812 - DNA, 586 bp, Homo sapiens
ccagctggcagtcgagtgggtggcgacctttaaaggaatgggacccacccggagttcttctttctcctgtctctctctctctctctctctctctctctctctctctctctctctctctctctctctgtgtctctagctgtcgtctgtgtgtgtgtctctgtctctctgtctctctctctctctctctctctctctctcttctctctctctctctctcatcatcaacatacacaaaacaacagagaatagaacaccacaccacggaaaaacaaagacacaaaaaacaacagaagggagaacaaaccaaatgcaggcacgaggcagagcacaaacagcaacacacaaacaaacaagagaagacacagccacacaacaaccacgacaaccacaaagacgaaagcaaagccaacacaacaagagcacaaaaccaccaagaacaaacacacgaccaacaaaaaaccacaaccaaacaaaataaaccaagaaaacagaacaaaagaaccagacatcgaccacaccaaacaaagcaaaaacaaagaaaaaccaaaagacaagaaaacaaacaaccaaaacaacaaaacaggag

SEQ ID NO: 488813 - DNA, 876 bp, Homo sapiens
ggctaggtaggaggctgggtgtgaatcggccgaggatagcttgctgcagccttgatctcccaggatcttgcctcagcctcccgagtagctgggactgcatgcttgtgccaccacactcggttaatatttgtagagatggggtcttgctatgttgcccaggctggcttcaaactcctgaacttaaaagcctcctgtttagtttggttttttatcactttttttttttttttggaaatggagcctgtggtccccatcggtgcgggttgggagtggcggggggctcagtctcggctcactggcaggcttctggcctctcgggttcaacgcgattctcctttctcagcctcttgagtacgctgggaattaccagtggtgcgccaccaccaccacgccgggctagttttctctggtgttttagtagagacggggtttggctattgtgggccagggctgggtcttgaactactggacctctggtggatctaccctggtctgggccttccaagggtggctagggattacagagcggtaagccacagcgcctgggcctggctacattttttttcttttgttgtttgttgtttttgaccaagacacgtggggcgccgccttttttgttgcccccaaattgtgttctgcccgtggcgccacaaagcagcttatgtgtgcggcgagacctcaccacaaaggcggcgggggatgtatgcggggggtggagggcctccgtgtggtggccccttgatttaagaatagaggggcggcatgtgttgtagaaccacggtgtaccaagacggccgcggagagtgcctcaaaaggggggggggaacgagggggggacatcgcgtggcgccagtgggggagctttttcaaaaagac

SEQ ID NO: 488814 - DNA, 278 bp, Homo sapiens
  misc_feature (13)..(13): n is a, c, g, or t
gtatggcatactnatagatggtgtggatgtaaatcgcagagtaaaatcacaagcaaagctgataggaaagaataaatagtgggtgtctgagggggaaggtcgcagcttcgggcagctttgagaagcggtacaagagtactgtgcctgtgtgtcgcagccctgtgcagccaggcagtggatttattttgaagctcttataagcaactcctggatcaggaatgcgtgacccctgagatgggtctacgcatctctctacacttccgttctctccgtgggat

SEQ ID NO: 488815 - DNA, 251 bp, Homo sapiens
aatttagtgatgggattttttaataacatgcaggatataaatgggcagattttatgcgtgttggcaaaatcctttttcagcctgccaaatggggctgcaatattacctttttcccttaagcagttttttacatttacggtggtgctttttaaaatgaatgtgaaagccctcttttatggctgcaacctgccttttcccttacagaaatttttgtttgatggaatccataaactttggtatgatatgattta

SEQ ID NO: 488816 - DNA, 647 bp, Homo sapiens
ggtacggcccggaagtacgggatgcggcggcggacgcgcggctcccaccgctcccctctcacgggctctcacctccccagtgggggtcgcagaccactaccctctggaaggtgataggccaggccccagagcgcaggctagacgagcctagggtgcccggacatgggctgtatcggctctcggagcccgcggggtcaggcatttctggggaccaacagcattggccgaggctcagggatagagacggctgcatccagctaaaggtgaatgttggagacacagtcgcgatgctgccaagtcccggcgagccctaactatccaggagatcgctgcgctggacaggtcctccctgcatggtatttcccaggtggtgaaggaccacagtgaacaagcctaccagacatggcccagggccgagtggctcacctcattgagtggaagggctggagcaaagccgagtgactcacctgcatgcccatggaactcagccatatgacactcctattcagaccatcagcgagggcgaacaagaggctcgctatggcagacaggagtggctgagcaagtgggcactcgcggaagccaaggctccgagcatggtctatacggtgggatggccgagggaatccactgatgaactcctatga

SEQ ID NO: 488817 - DNA, 311 bp, Homo sapiens
ggggaaaaggggggtttttgctgggttttaagggccggaaggaaaattaaaaggctcctttttaaattggaaggttttggtaaaaaccctttatttgggaaaaaagtaatttggaagtttgtccaccggaaaaggattgaaaaaaaaaaaaaacatggtttttggaaaaacccccaaaaattggaaaaggtcaattttaggggtttgaaaaggaaaaaaaataaaatgggggacaagggtgggggttttaaaaatggttggaaaaacctcctttccttttacaatgaaaataaaacctttttcccggggga

SEQ ID NO: 488818 - DNA, 678 bp, Homo sapiens
ccagatgaaaaatgaaaaataatacacagttatagatgtagaacactaaaatttctgttgatgggaatgtaaagtggtataatactttgaaaactgcagttctaaggctcaatgtgccctaggacctggcactttcactctgaggtatagaccaccggaaatgcatatatgtgtgtgtgtgtgtgtgtttatgtatgtatatattcaccaaaagatgtttactcatgtaaaagtctttaccggtgctaaataaccaaaagtaagaaactactcaaatgcacactagaattatttttgtcaattcagttgtgtcacattcacgtaattggatactatataataatgagaataaatgctttataactagcaacaaaatggatgaaagtaataaacaatataccaaagaagccagacgcagtagtacatcctatgtaattctattaatatgaaatacaaaaacacaactatgctgctacaagtcaggatagtgcttacccttgggaaaggaagaattgactggaagaaaggacaaaaaggattctggaatgttggtaatgttttgtgttctgttatgtttttctgaatttgagtattgaccacatgatgaattcagttgtacaaacttaggtgcacttttttgtatgtgtagtatactccaataaagtttttaaaaataca

SEQ ID NO: 488819 - DNA, 470 bp, Homo sapiens
aggatacgatgtccgtctcaaaaaaaaaatcattagtagcgttctcggtcagtttatggtgggaaagggaatcaagtaaacaaattctcaaaaagattggcttcaaataagagaacacggtttaggtggaagatctcctttttcagcagggtcttcccaaggtaacaagggggtggggatggactggggggtgtctgacataatggagacacagacacatttacgtcggcgggttaaaagtgacgctgaaatccaggacgtacggttttcctcaagggcttataaaaaactggaagagtgacccaggtttcctcattttaaacaggggctaatttctacatggctaatacgggttatgcagagtattaaactttcggataacggttttacgtaaaaactaattctctccatgtcggggcatatataatttactaatatatggcccggacatcgggatcctcgggtaccga

SEQ ID NO: 488820 - DNA, 140 bp, Homo sapiens
aatcagaagaactgtctgtcagtgtctgaggaggtaggatctgggtgccggtagaaggatctgggactgccagtatctgaggaggtaggatctggcccttgcatgaggatctgtgtctgtcagacctgagcaagccaggt

SEQ ID NO: 488821 - DNA, 934 bp, Homo sapiens
gcagcgcgctctgtggaggcccggacacgtcgcgagtgtggtgtgtgttagatgagaagtcgtgcagactgtcccctgtgctcgcggtggaccggggaagtgcaggttgtgttggccggtgcgaggccctcgcgagagggggttgccctgtcgtgggggggtgcgccacgccccgccccctccggtggcggtgtcggtgtgtttggcgggcccccgtctgcgcggtgtttgggtttggaggctctcgccaagcgttcccgtctgcgcgttgccgtacattggccggagctccggcggggacagcatagtgggttcacaaatgcctctctggcacgagaaggtaatcgcttcgggcgcccaacgcagagtgggtagaagtgtgctggccccgctgttgcgatgggagggggcgttaagcccgcaccttcgcttgtctcttatcgttgttggtccacccgggcctccgctgggttttggtgcaatcgacggcgccggtgctgatggtgtgttctgggttcgcgccgctgcccggtattgtctgtgtgcgcaggaaccctcctagtcgcgctggcttcgtcactcgttgtctcgcagtccggtggacaagggctcgcgcacgtactagtatagtcatgcaccagccccttgtgtagacgacgcacgcagcccccagcgccgtttgccacaaatgtagaatcatgagaaaaggcacatcatgagcaatggggatcattgaaatggcgcccggtgggattattgagagtatcgggaggtgttacagcatcggaaatctcgttaaagatgtgaagtttctatgttggagtgatcccctaaagaaactgtttgaatgggaagaggtgcgtatatacaaatcttgtcaaacatgctttctttataaaagaaaacctaaaccagtggggggcacaacaagaca

SEQ ID NO: 488822 - DNA, 413 bp, Homo sapiens
tgtcatctggctcggatgcgtcacctacgccatcgacacgcatcggccaactgatgcgacctgggatttatccgccgctacagcgccgcccattcggcgcgatgcgccagcagaaaatccacaaacgcccgcacccgatggggcacatagcggccgtggggatacagcaaggtaaacggccgtgagcgcccgccgtaaggctgcaacacctccaccaggctgccgttggccaactcctcctctacgatgaacttgtaggtctggaataaccccgcgccgtgcttggccagggttacgccacccagcacgtcgtcagagcagctgtagcctgcttccccagcaaactcccgctgctggcggtattcctggcgctgtccccgcatgtcacggtcgatgtccgcatcagcagaggt

SEQ ID NO: 488823 - DNA, 807 bp, Homo sapiens
ctcctccccaactcattctatgaggccacatcatcttgataccaaaatctggcagatacacacacacacacacacacacacacacacacacacaatctacaggccaataccctcgcatgaacatcagtgcaaaaatcctcaacaaaatagtggcaaaccaaatccagcagcacatcgaaagaagttaatccatcatgatcgaagtatgcttcatccccaggtatgcagagggttgcctcaacatacacatatcaattactctgattcatcacatgaacaaaactagagtataaaacaccatgtggttatctcaatataagcagaaaaggctttcatataaatattcatagtgcctctccatattaaaaactctaaaaattatctgggtattgaagacaacatagctcaaaatgatgagctgtttgtgtatcagtatcatgctgttgtggtcactgtagccctgtatgtatggtgagaagttggggtaacatgatgcctccagcttcgttctttgagctgaggactcgcttggactataagggctcttttaaggggttccatatgaatttgtgaaatagtgtgctctagttctgtgagagaatgccgatggtaatttaatagggataacttgcatctgtaaatcactggggcagtatggccatataatgacataaattcttcctatccagtagagcatgacatgtgtaaccatgagtgcgtgtcttctctggattctgatgagcagtgttgtgaaattcttctagagatctcctagagatcttcactccctggataaggtgaatacca

SEQ ID NO: 488824 - DNA, 1313 bp, Homo sapiens
tcaaaaattgaaaaagatgttttaaaatattcacaaaaatacaactggaagatcaaaacaataataatggacgcttgatgggttttcccctaagctggattattattcccattggaaaacactcagagtatatgtttggaatattctcaatctcttaatgtaatggccttatggatgtggctccctataacagagatattacgcgcgctatatattttacaagacgagaccctgtgtgttggccagggacagaaaactatgggacaaggggcaaagatcctggccctttaaggccaaccttaagttcggttatattctggcgaaccgaggaaaggcaggtcgctagaggcaccaggggaacagagggagagcacaaaagggctgacagggcggtgggctggagcagggctgtggagaaaaaggtccgtgcccgtaaaaggcctcactctcacggggtgacgcagctatcctttacagggaaaaaccgtggtccgtggccagaagacacacagttcgtggccacgcgtgcccctggccagtggggaggaacggctgagggagaaaacacgggcggagggactcaatcgtgccagaaagtgcacagagggacacgtagacaagaaggttagcacggagagtcaagcggtgagagaaagagaaggccacaaaaaaagtcgagcgcgtgggggaaagggagagcgtggaaaaagagggacgcgaacacaggggccccccacagggtggtacacttcacacattgaagtgggaccccccccaagagaggcacaccaagaggtcacaaacgaaaagaccaaatgggggatcccacgcaggagcccacgcaaagaaaaagaacagctggaaggcggaccaatgggcagccaccaggagaaaccacacggcaagagattgtgccactcgacagtcaaacgcgaggcaaacgggtgtgaaaaacacgcggtgacacaatcacaaaggtgcccgtaatctctgggaaaacaccacatgtaaaggaacaaatgaacacgagcagtcaataacaaggtttagcccgcgggaccacaagacaaaccaccagctaccgcaacgagggatcacaggcgcgaccagagacccagagagtacactagaaagaggttcacaaaccgacaacaccaccaccaaaaagaaagaagccaaaagcaaaatagtaaaaaagacacacacaatgaacaaacagacaacaagaccaagaactcacaccagagcaacataggagacaagagagagagagctcacacaagaaagcacagatagactaccagcggagaaca

SEQ ID NO: 488825 - DNA, 156 bp, Homo sapiens
gaagagctgagcaaggcctatgaggatgatggtgacgctacagcagcatcatggtcaagggcgctggggggaccggcttggcagaggccttttgcagaaggagctccatgaaagagttcgccgagaacctgtgggccctactgtggcagtaggcca

SEQ ID NO: 488826 - DNA, 837 bp, Homo sapiens
tcgccgtgtgtccagggtagaatctcggagaagtccactcacgtacctagggcatgcatattctactgaactgcagagtgatcttgagagatagctcatcaggaagttccgactactggactgtgttgaagactagggagtagagagacctcggtatcgaagctagtgctgcaaggaatcattgggataaaaggcttggtgaggacatgacgtcgctaggaaaccgctgactagtcgaagcgaactatggataatgcttcgcgttgatggcaaggtctcgaagagcgagactctaacataatggtgaagtatcatttgacaggagcagcacagcaggatgactccgatccacagaacacatgataccatgctcacctgtcaggctagacgtgtgctgtcacctgattagaagcggctggtgtagtcgaattggaagcagatgctctcctcaagaggacctgagtcagaagccgtaccgaatgcatggcgcgtatctaggacttagacacctggagtgagatggagcttatggtcaggtgtagaacaagatatggatgccactataggccacggccatacagacagaaggagaatatagaggcaataggttcacggcagtcagtacctatagcacttaatgaagaattgcgattggaaacggcagataatagttgcaggctctgagtcgcccaaagaaacaggatctggggcgtgtgacgacttgccagtgcctaggaggtgcacccgttggtaaaaattgtcgattggccaagaagtggctccggggaaggtccgcgcggtaatggattctgcagaattgcaaaattgcgaagacag

SEQ ID NO: 488827 - DNA, 472 bp, Homo sapiens
taaccctgtcatccagctacagtagacagacaccgcgatgacgaccaccatggcacgatgaccagcggcaagatgaggctgagcggcacgtcgctcacccgtgtgtcgtactccacgcggaccagcacccactcgcgagagccgaacttcacaatgaactcgggcaggttgtgtgtggtgtctcgtttctgccgccgcttgtgcgggaccgctgcaagaaggaattcacagacctgatgatcgagatggaggaccagaccaacgatgtgcaacgaggccggcatccccgtgcttggactacaagacctacaccgaccgcgtctactacctgccctccaaaggacggcgacaaaggacgttgatgatcacccggcaagctgtacatccccgatgccggcggctggccaggatgctggagcaggccctctaccagttctccaacctgctgaacagaaattcttacctcatcaat

SEQ ID NO: 488828 - DNA, 334 bp, Homo sapiens
atcttagctccactgggttggcataaaaataatataaaagtacaggactagaattaggcctcagatcctaaaaatttcactatctctgggcagctcagaacatcacagccagccgggcgtggtggctcacaccttgtaatcccagcacttggggaggctgaggcgggtgatcacctgaggtcgggagtacgagacctgcctgaccaacatggggaaaccccatctctactaaaaatacaaaaattagtcagacatcgtggtgcacgcctgtaatcctagccactccagaggctgaggtgggaggatcgcttgagcctgggaggcagaggtggca

SEQ ID NO: 488829 - DNA, 128 bp, Homo sapiens
cttagcacgcaagacatccagtctccaacctgtttctagtatgtatgtttgcgttcagccgcactctcccagtgacaacatcgctatagtttgtcacttctcttaggtggctctgggactgggagagg

SEQ ID NO: 488830 - DNA, 110 bp, Homo sapiens
  misc_feature (2)..(2): n is a, c, g, or t
  misc_feature (5)..(5): n is a, c, g, or t
  misc_feature (11)..(11): n is a, c, g, or t
  misc_feature (15)..(16): n is a, c, g, or t
  misc_feature (39)..(39): n is a, c, g, or t
  misc_feature (46)..(46): n is a, c, g, or t
  misc_feature (53)..(53): n is a, c, g, or t
  misc_feature (56)..(56): n is a, c, g, or t
  misc_feature (73)..(73): n is a, c, g, or t
  misc_feature (79)..(79): n is a, c, g, or t
  misc_feature (83)..(83): n is a, c, g, or t
  misc_feature (87)..(87): n is a, c, g, or t
  misc_feature (98)..(99): n is a, c, g, or t
tnttntcactntttnncttttgtttatataactcaacgnaatgttnttttatntcntttcctgatctcttaantaaatntttngatnatattaataanntaaataaattg

SEQ ID NO: 488831 - DNA, 224 bp, Homo sapiens
gctcgacacagggtcttgttatgatgcccaagctggtctcaaactcctggactcaaacgatcctcccacttgagctcccaaaatggtgaaattacagacatatcctttttttttcttttgagacagtctcgctctgtcgcccaggctagagtgcagtggcacaatcttggctcactgcaagctccacctcccgggttcacaccattctcctgcctcgtcgacgc

SEQ ID NO: 488832 - DNA, 106 bp, Homo sapiens
ctcgtgcatacacttaagctatctgatttggaccattacttcgaatgaagaaatttggtgcccaatagttacctatgatcgctcgtgcctttcggggcgtattctg

SEQ ID NO: 488833 - DNA, 229 bp, Homo sapiens
atattacccttactgtgtgtagcagaaatacgatatcatcaggtatgactggaagtatggagagcaaacatccaaacaccagtgattagggtctgaactgatgatagcattagagctactggggactaaaacgaactgtgcttggtttgaatgtatggggtaagattaagcccagatttctgtctttggtccctgagctaaggacagtgccactctcttgagttgggac

SEQ ID NO: 488834 - DNA, 151 bp, Homo sapiens
tcgcgtacccgtgatacattgcgtgtccccttgttaaaatttaactcgttagctccacagaggatggaacagctctttggacactacgagaataataatccttgtagagagagtaaaaaattgtgaacacccatcagtagagcgcctaaaa

SEQ ID NO: 488835 - DNA, 393 bp, Homo sapiens
gcatcccgaatagctgggattacaggcgcgcaccaccacgcccagcttatttttgaattttaatagagacgcaatttcaccatgttgggcacggtgaaactcctgacctcaggtaatccgtgtgcctcggcctcccaaagtgctgggattacaggcatgagccaccgcacccgaccttttttttggttttgtaaagcctctgatcaacactaccttgtactttggcttttaaaaatttcaatttagctctgcttcttcatctttaaatgaagttaagaacttgtgggaacttcgtttcaactatgagcccctctgcttacttgctgtgtgatctcgggcaagtgccttcactcctctgtgcctgcaattcctccttgtcaaaagggtgagcgt

SEQ ID NO: 488836 - DNA, 1359 bp, Homo sapiens
tgaccattgcccatatgctcaacacgatcctgaactcagaccgggatgctgtgtgctacaatgctggggagagtggtagatgctggactcccctgtgacaccctgctgcaaacagccccactccctgttccagcagcttgctgcagagcagccagcagggacgtccctgcctcactcgtgagtgtccctgagcccaatcccacaccctgcagagttctcccactctactctgataccagtgcctgtggcctatacagaggtgcttggcttgctatgataaacatatctacctacttgcggtgactctaagctacttccagcacattaccaccagaaatgcgagaacagtggcaacccttggataactactattgtgaaatacaaatacctatgcgatgggccagcgatacctagagtgctaaccaccagaacccaaggcctacatgctactaggacccctacttgcatacttgtgaactgccagtgatggacatcacgaactaggcataagcgagccccacgttagcataaagcataagctcacagaatcaaggcatacgacgagttccagtcctttaacattttcatggaggatatcaaccaagaagcaactcaactactgccacgtgggacgaacaagacaagacacaagtaaaaagacaacgagaacacccgacacctcgaatagtagcaaagatacttgtgagcagtacgcacccaacaaacgcacaagatggcagagtcaccagacaaaaaagatgatgcaaaaaggaagaaacggctgcaggagatactgtgtgacgccagacagcgaatgaaagcaacatagctaaccccagaaactttaaatagtgtacgaaaaaaacattcagggacgaacaaacgaacgaagggaagagtaaccacccacacacaaagagagctaagacacagaacaaaaaaaaagaacgcagacaaaacaaaaccggcggaggcacaagccaccgaggcgacacgaaaactaggacaccagaacaaaacgagacgagcaaaaacgagacgaagcaccgccgcgcagcggacgaacgacgacaagaagcaaggcagcagaaaacaaggcaccacgcaaagaagaagcgccgagcgcggaggagagacggaaaaaaagcgagcagaacgcacgccggagccgaaacaggaaagcagaggaggacaagaccgcggtacacaacaggccgagaaacgagaccagaaaagacgaacaacgagacgccaacagcggaggcagggcgagatgagggcgcaagaaagacgacagagagagagagacagcggacagaaggaaagagaacaagaaagggaaagcccgaggaggagcaa

SEQ ID NO: 488837 - DNA, 517 bp, Homo sapiens
aacgcgctgatagcctcctgacgatgggtggccgggcagagacgctgctcactttctagacgggatggcggccgggaagaggcgctcctcagttcccagactgggcagccgggcagaggggctcctcacatcccagacgatgggcggccaggcagagatgctcctcacttcccagacggggtggcggccgggcagaggctgcaatctcggcactttgggaggccaaggcaggcggctgggaggtggaggttgtagcgagcggaggtcacgccactgcactccagcctggcaacattgagcactgagtgaacgagactccatctgcaatcccggcacctcaggaggccgaggctggcagatcactcccggttaggagctggagaccagcccggccaacacagcgaaaccccgtctccaccaaaaaatacgaaaaccagtcaggcgtggcagcgcatgcctgcaatcgcaggcactcggcaggctgaggcaggaggctatcagcgcgttgggtaccgag

SEQ ID NO: 488838 - DNA, 110 bp, Homo sapiens
ggactacaggcgcatcacccatgccggcttaatattgttttttaccccgtcttctaatgtaaaatacacaaaaaaccccaaaacccaaaaaaaatgctttttggaggaca

SEQ ID NO: 488839 - DNA, 500 bp, Homo sapiens
tggtcgagctggataaaaccatccggtatatgttacttactcatcagtagtgtacgaaaggctgaaatgaacacaggctgttgtacaacaccttgaaggagctcttcaccttcagatacattaaaaaacatattcaggactctcatgctgaaaatgaaataagagaaaatcgtgccaccctcccccagatccccatctccgtccagcatgtattcacagctaagctcgacaccctggaccgcatttgtttactccacacctggggtaccactcattcctcagctcaccactgcctcacttctgctagcctcagcagcaaaacaccttactgcaaaattcatcagtgccctccactgtggcagatcaaaagcatggtagtccatcctctgctagcctgaagtctactacgtagtggatgccgctcgccattcttttctacttaacggtctcctccctgatttctgtgtgggccccgatcctgagttccttctatttcttcg

SEQ ID NO: 488840 - DNA, 366 bp, Homo sapiens
cacaggctcgtacagaacggcacgaggttcttaaatgttgtagtattactttctaaactgatgcttcagctacaaaataatttgaagtaaatgtttgatatgatttatttatgaaccctaatgaagcagaattaaatcctgtattaaaataagttcgctgtctttaaacaaatggagatggctactaagtcacattgcctttaacataaggtatccctataccttatttgttaaaatatagccggtatacattttatatattttagcacttaatcctatgaaaacaaataattgtaaaggattcttgtcagattacagtaagaatgcacatatttgtggcatcgagataaagtttatatttcccct

SEQ ID NO: 488841 - DNA, 140 bp, Homo sapiens
tccagaggatcccccactgtgttcatacctggctctctgtatcgggggggggtatgaacaacagtgcaagtatgaacaacagtgcaggtatgaacaacagtgcaagtatgaacaacagtgcaagtatgaacaacagtgca

SEQ ID NO: 488842 - DNA, 138 bp, Homo sapiens
gaaggtgcgacacaagccctgcagtcactgagattcatcaagtctgaacggggcacatggagacgcagttagtcatggggtccgggcaggctttgaatggcaggaacaagatgctggatctgcatgtgtgaatcggca

SEQ ID NO: 488843 - DNA, 873 bp, Homo sapiens
cgcgggtaatgcgggggtgcgcaagcgaggggaaagcccggcccccgtaggagggacgacgagggggccgcccaaactgaggcgcgcaccaaggaagacccccgttgggcgaaccacacggcgcgaccacacgcgtgtttcacagcgtcgtcggaaactgctcgcgtgaaacacaaaacggggtcgccacccagagagagggattaaaaagcgctgggagagacaaacgtctagccgcgttcgccacggcgcagagatatatatacgcgcgcgcacccttctttggagagggaaggggggagaggcccacattccacagcgacaccccaccccgcgatcgctgtttggttgaggccgcgttgttggtgaaacagcccacagacgcccccgggcgcgccaccaaacgaggccgccccgcttggagaagcgctgtttttatatggagacgagttttttcgcgcccgcgctcttgtgtgtatagagaggagatggatgcggcttgcacaaagagcgcttgccgagatatataggaggaccgcttcgctttatcgcccgagaggagagggggttaaaacaacactcttgtttgcttgcgacacatcacacgacctgcctctagaggctttatataacactcccccctattttaaaagacctatctccgccctctccatctgaggaaaaaaagagaaaagaaaattagaaagaataccacaacgtttatattcatactcgttgtttccttttttttccgttgtgtgaaaaccaccaaccccgcttcttaaaaacataaaatatttctctttaataccatttgccctcctttttctttttggttccatttaaaaaaaaagggaaaaaaccccaaaaaaa

SEQ ID NO: 488844 - DNA, 707 bp, Homo sapiens
ctgtccctagctagctagctagctctctcgcgttgtcggcacggcacctagaggttgagacttgcattgcatctgatttaatgaacttaagtctgtggatccgcccttgtgttaacgactggtattcggtcaccagcatatttagagaaaagacttggagcttaatataaaacttaggcccaatagacgcttagctgctgatctaccagagaacttcttgtaactttaaagatttccagtcatagccaaactggtgttttaaactattgccagtagctgggactttttagtgtgaacccagccatttattggagaagtgaatccaccagggaaataaagatgagttaaagccaagatgatgctcctccacgaactggagagccccagtttatcttacgtctgcctccccgaatatgcctctactgtgagaagggccagtaccagtctggtcatgtcaacctcaaggaccagactgaccattgagttacatcctgatgggcgtcatggaatcgtccagagtggacccgtgttcccttggcctccaaaattagtagacctgcccctgtgttatggaagcttgaaacccttgataaaaaactttttacccagacagctgatatctgtcagatgcttgtatccaccgttgatggtgatctctatcctcctgtggaggagcccgttgctagcactgatccttaagccagcca

SEQ ID NO: 488845 - DNA, 120 bp, Homo sapiens
cggatccccttcgatgtgtctcagagcactggctcccagagaaagccaggaagtccccgtggtgtaccctgtgcctccccccaccctctgctgcaggaggtgtggcaccaccagatgctc

SEQ ID NO: 488846 - DNA, 235 bp, Homo sapiens
aacacttggtatctcaatatctcacatgtgacatgggaattagaaaatcaaccaagacaggaggatacaaaaattcaaggaggtaatgcacaaaggaaatgcctagaagagtacccaactcatgaaaaaccctcgagatgcagaattctgttttaagctagttcatggattgaaagaaaactggccttagctcccagtgcctgttgggttcccgctccaccagccaaacctggtt

SEQ ID NO: 488847 - DNA, 183 bp, Homo sapiens
agatgagccggtaccgaatctcgaagttgtgcatggggcaggtgcattgtgatgcctgtaatcccagtgctttgggaagctgaggcaggaggatcccttgaggccaggagtttgagaccagcctggggaacatagcaagatcccctctctacaaaaaattgaaaaatttgccgagtatggtgg

SEQ ID NO: 488848 - DNA, 765 bp, Homo sapiens
  misc_feature (15)..(15): n is a, c, g, or t
agcgggtctctggcngccccgtggcgcccgagtgcactgaagatggcggctgctgtaggacggttgctccgagcgtcggttgcccgacatgtgagtgccattccttggggcatttctgccactgcagccctcaggcctgctgcatgtggaagaacgagcttgacaaatttattgtgttctggttccagtcaagcaaaattattcagcaccagttcctcatgccatgcacctgctgtcacccagcatgcaccctattttaaggggtacagccgttgtcaatggagagttcaaagacctaagccttgatgactttaaggggaaatatttggtgcttttcttctatccttgggatttcaccttgtgtgtgtcctacagaaatgtgtgcttttagtgacaaagctaacgaatttcacgatgtgaacctgtgaagttgtcgcagtctcagtggattcccactttagccatctttgcctggataaatacaccaagaaagaatggtggttggggccacatgaacatcgcactcttgtcagacttaactaagcagatttcccgagactacggtgtgctgttagaaggttctggtcttgcactaagaggttctcttcataattgaccccaatggagtcatcaagcatttgagcgtcaacgatctcccagtgggccgaagcggtggaagaaaccctccggttggggaagggtccagtttgttgaacacctgggaattctgccggagtggacgggtttcaaatagcagtactttta

SEQ ID NO: 488849 - DNA, 690 bp, Homo sapiens
  misc_feature (15)..(15): n is a, c, g, or t
agcgggtctctggcngccccgtggcgcccgagtgcactgaagatggcggctgctgtaggacggttgctccgagcgtcggttgcccgacatgtgagtgccattccttggggcatttctgccactgcagccctcaggcctgctgcatgtggaagaacgagcttgacaaatttattgtgttctggttccagtcaagcaaaattattcagcaccagttcctcatgccatgcacctgctgtcacccagcatgcaccctattttaaggggtacagccgttgtcaatggagagttcaaagacctaagccttgatgactttaaggggaaatatttggtgcttttcttctaatcctttggatttacaccttttgtggtggtcctacaagaaaattgttgcttttagtgacaaagctaacgaatttcacgatgtgaacctgtgaagttgtcgcagtctcagtggattcccactttagccatctttgcctggataaatacaccaagaaagaatggtggttggggccacatgaacatcgcactcttgtcagacttaactaagcagatttcccgagactacggtgtgctgttagaaggttctggtcttgcactaagaggttctcttcttgacccgggcagatatagggcttctggaggtaactaattcctaagcggcccgactcccggagccctccctgttct

SEQ ID NO: 488850 - DNA, 594 bp, Homo sapiens
  misc_feature (15)..(15): n is a, c, g, or t
agcgggtctctggcngccccgtggcgcccgagtgcactgaagatggcggctgctgtaggacggttgctccgagcgtcggttgcccgacatgtgagtgccattccttggggcatttctgccactgcagccctcaggcctgctgcatgtggaagaacgagcttgacaaatttattgtgttctggttccagtcaagcaaaattattcagcaccatgcttttagtgacaaagctaacgaatttcacgatgtgaacctgtgaagttgtcgcagtctcagtggattcccactttagccatctttgcctggataaatacaccaagaaagaatggtggttggggccacatgaacatcgcactcttgtcagacttaactaagcagatttcccgagactacggtgtgctgttagaaggttctggtcttgcactaagaggttctcttcataattgaccccaatggagtcatcaagcatttgagcgtcaacgatctcccagtgggccgaagcggtggaagaaaccctccggttggggaagggtccagtttgttgaacacctgggaattctgccggagtggacgggtttcaaatagcagtactttta

SEQ ID NO: 488851 - DNA, 503 bp, Homo sapiens
  misc_feature (226)..(226): n is a, c, g, or t
  misc_feature (363)..(363): n is a, c, g, or t
catctctgctcccagatcacgcgattctcttgcctcagcctcccaagcaactgagattacaggcctgtgtcactatgcccagctaatttttgtatttttagtagagatggggttttcaccatgttggtcaggctggtctcaaactcctgacctcaagtgatccaccagcctcgtcctcccaaagtgctggattacaattgtgagccactgtgtctggccacacacngactttcactgtaatatctggatgttttatgtaacatatctgggcaatagggcttatggcagaattggccctcgtggtgtaggccttccaagttccaagtctcatttttagtattcctccgttccaacccctggatncaccagttccaacagcctggatccaccttgatattgacagccaggcagatgcttctgctgatcaccgcagctctagcaatggaaatggatatttttagaaaatacttgtctattcttttattttggtggtttaaactatt

SEQ ID NO: 488852 - DNA, 387 bp, Homo sapiens
  misc_feature (110)..(110): n is a, c, g, or t
  misc_feature (247)..(247): n is a, c, g, or t
agatcactctctctcagctcccagcactgaatacaggctatatcaggctgtctcaacaactcccaaagtgctggattacaattgtgagccactgtgtctggccacacacngactttcactgtaatatctggatgttttatgtaacatatctgggcaatagggcttatggcagaattggccctcgtggtgtaggccttccaagttccaagtctcatttttagtattcctccgttccaacccctggatncaccagttccaacagcctggatccaccttgatattgacagccaggcagatgcttctgctgatcaccgcagctctagcaatggaaatggatatttttagaaaatacttgtctattcttttattttggtggtttaaactatt

SEQ ID NO: 488853 - DNA, 332 bp, Homo sapiens
cttatacaatggttagagaaaatatgaatggacttgtgtggtgtgtggtttacagaatgaaccagttgtaacccggtaactgatatacaaagggaaaaaagtgaaaaaagtacatatttggtggcagatgacagaacagaacaaaataactaaagtgtcatgacattgacagtggccatgcatgtagagtgtcacatgtaactacgaacttattataatttcacaaggttggctaaacatgctaaccatctacatgtgcatggacgagcttatgttaaaaactctaaagaatactctcccctttgaaattttgtactcgaaaaaaagctttg

SEQ ID NO: 488854 - DNA, 232 bp, Homo sapiens
cacacagccctggcagccgccggtctctgacttggaaaaacctccggatgaatggatggaatggaatagggtgaataatgaatggagtgagtgagtgaatgatgaatgtaatgaacaatgaatgatggagtgagtgagtgacgatggcaagactgggaaggaatggaattgaatggacggggtgaatggagtgaagtggaatgcatggaatggagtggagtgagtggaatgc

SEQ ID NO: 488855 - DNA, 360 bp, Homo sapiens
tgggctgtgcaaacttttagaaaaagtgatcagttgccttcaacacaaaaaaagcaagatgaaaagagaacctacagactgaaaaagatctcaaggaatacatctcaagcaatcactaacttacagaccttatttgagtcccaatccaaacacatgaggaaaacacaataaaaaaattgagaaaacatgaatatttgataatattaaggaataagttcattttctataggtaggataatgctattatagtaatttatgtgatctttcagagatatacaaaaataacttgacaggttaaatgatatgactgggatttgctctaaaataactgggcagagggtatatatataaaacaagatt

SEQ ID NO: 488856 - DNA, 747 bp, Homo sapiens
  misc_feature (643)..(643): n is a, c, g, or t
cggaccgcgtgggccacaggccacttgttttggcaaataaagttttattggagcacaaccatgcacatttgcttacaaattgtctatggttgctttcacactacaatgacagagtagttgtgatagaaaccatttggcccacaggtcaaaatatttatcatctaatcatttacagagaaagtttgccaacccctgctctattgtatagctatatcaaattgtatttaactcactctcattgataggtcttcactattttatatctaactataaccttgggcatccttagggacactaatcttactacttcttcgagagggtacttagaagtggaattgttgggcaaaacaggtacacattttaaattgagaaatattgtcagcttaccattaaacaatagtttgtatcaatttgggactctcacaaaaagaagtatgtataagttccttttagccatgtacagcagctcatgcctataatcctaatgctttgggaggctggggcaggaggatcgcttgaggccaggagttgagaccagcttgggcaccatagtgaaaccccatctctacaaaaaatacaaaattagcttggcatggtggtgtgcacctgtagtcacaactagttgggaggctgaggcgagaangatcacttgagacaggaggtcagatctgtagtgagccatgattggggccactgtattccggcctgggtgacagagcaagaacttgtctccaaaaaaaaacaaag

SEQ ID NO: 488857 - DNA, 254 bp, Homo sapiens
atcccctgataggacgagccatagctcagcttcacgcttacgctgcgcaatggctgatggccggcatatgaagtgtgcgtcatcatctgtggaagaagggcgagattgttaagagaatcctggagcagaggtagtgcccggatcagcatctccgcgggctcctgctgtgaacgcatcatcaccatcatcgtggtttacatcagctgtcttccatgcctatctgccatatacttaggtttaaagagtggagtgat

SEQ ID NO: 488858 - DNA, 329 bp, Homo sapiens
actacaattcgagctcgtaccctgttacagcctgctgagatagctcacagtcaaggagccaggatgtgttacactctctcttgaccaaccagagattctgtgtggatctcctaacagaaggtactttagacccacacaacgagctgtatgtattctgataacaggctctgccattttcttccctataaagacagtctccaaaatatatctccaaggctcttttggactctgagctatcatgtctcttgagtgaatccaagtgatgaaatcttcatatttcactataaaactcaatttcttagagatcagaacataatgtttctcttttt

SEQ ID NO: 488859 - DNA, 249 bp, Homo sapiens
ccacgcgtttaggattactcaagcatgacctttcattccaattaataaaatgcacactctgctagattctagaataactaaaaggaaaatggcaccaactaaaacaaacaaacttcatttcgacctgaacatgcactttacgtttttggctactaatcaacccacataatccattttacctcgcaacctgaccaccaactttgccctttacactaaacaactctgctggttaacatatgacaacgatgc

SEQ ID NO: 488860 - DNA, 301 bp, Homo sapiens
  misc_feature (24)..(24): n is a, c, g, or t
gaggcgggggctcgctctgttgcncaggctggagtgcagtggcacaatcttggcttactgcagcctcctcctcccgggttcaagtgattctcctgcctcagcctcctgggtagctgggactataggtgtgagccaccacgcccagccagatttaatttcatttattgctcctttttgccgggtgcagtggctcacacctgtaatcccagcactttgggaggccaaagtgggcggatcacctgaggtcaggagttccagaccagcctggctaacatagcaaaaccccttctgtcgtcttctc

SEQ ID NO: 488861 - DNA, 238 bp, Homo sapiens
gcagctactcaggaggctgaggcaggagaatcacttgaacccaggcggcagaggttgcagtgagccgagatcgtgccactgcactccagcctgagcaacagagtaagacgccgtctcaaaaaaggaaggaaaaaggaaaaaaaaaggaagggaaggaaaagaagggaaggaagggaggaagggaggaaggaagaaccaaagaaggaaggaaccttagggttggcaacctgggcttatt

SEQ ID NO: 488862 - DNA, 969 bp, Homo sapiens
gcagcatgcctgaccctgacatctgtctcttggatatgtattgttcggagggcatacagatgcgctcactctattctcctcttcctagcgtgctcgaatccatcttagctccgcagacttccggtacccatcttctggctcgttccatctcatgaatgctgagaccctgtccacgctagcacgttgtctagtggtgttcatgcgtgctcttccattcgcactacaccgaaaaactctagttgaagtcgcacctatgaacttgcagatcaatagagtataatgtacgaactcggacgatgagatggcagccatttccgaccattgctgttttcaatcaaggacctggctccgtgttctacctactttgtacccttctctgatggtgccacctcctactcctgaccccagaggattgattattggcctctgtgcgagaggtcgagatcgcaagctggatggattctttggctcgacgaaagcctcgagacgaagaagggattaaagtgcggaatcgtgcgtacaaatgctagatcctcccgctagtcaagagtgacggtatcgaagggagtggcgggacttgtgcgattttcggattcgaagtaccaataaaatgcatgccttgctttgctattggaagattgagtggaataatgccttatacagcttatagcacctgtctattgcatcggaacactgtgagggaggttaatgcctaatcgttgagccccctggaccgagtgtactcttatcttccactgaggttctatcgtccgaagtggagctcctccatctgtttggaatgtactcctgaagcacggctttgttccatagaagtgaagcatcctagagaggtgatgccaacatatgagggtggcgaacgtgaacaaatctccataagcatggggtcgagcctgcatggtcagattggcgactcttcatctctcatgggctcaaacgcttgctacgatt

SEQ ID NO: 488863 - DNA, 1078 bp, Homo sapiens
  misc_feature (24)..(24): n is a, c, g, or t
tacagttgtagtccgtatgcaatncagtactaactgtgtatatcataatctttgttgacgacgaacaattgtatgagaagagagagttgacctgtaggaccattggaagacatgagtaagccgtagaatttcggttttgaatactctgtaggaattcctctaagctctgctttatttggggtattaagaaggccataaaaataggaggggaaatctcttgaaatctctttcgttagcactcgctaatagtaagatatagcatagagtggtcaaataatattataaaatgaaggtagcgtgaaattgttgctcgggctcttgatgagcttcctaggcctagagttgatgaacgctttcatgtaaatgctatggctccaccatgctgttgacctgcatgtttatgagaaaggccatgttatgtagagaccctggcaaattctcaactcctgtattggcaaattatatctcactatcatcgcaatgaggactacgtggggagaacaattatttacacccacggtatattgtatgattcgctctttatttatatctgtcactgacgaaacctatgaaccaacgcgcgttttaaggcgctcaacttacacacgatgagggaagcaagatttcccagaaaaggaccagaagggcatttttattccacaaggaaaattgggttccctggccccagatgaacagaaaaaatgggagctctggctaagttggccttaagtctgactgacttcagtggctcataaccgtgagccaagtattttggtgggtcataactgttgttttgtgaactatgtcttacatgtctagagttctggctggatctaaggaaaggaggagctatcgaagtcaacggatcaaaaaaaaacaaggctttttgtcactgccttcttggcaggtagtggcctagaagagagagtaaactgtaagagtctgagtcttttgacttcaccttttcaaggtgtacttctagttgtcagcttctcgagacaataaacttgacaagctgggttgcttcggcacagaagaaaggggactattggtgccccacgaaagctgggactacaag

SEQ ID NO: 488864 - DNA, 406 bp, Homo sapiens
tatttatctccctatcccaccccctaccccacctaacacatttgcactgccaggaatggacactggaagtgccaggaggaaggaaggctggtttggtggggtagtggggaggtcagggaggcggggccaagggtgtcccacatttccaacaccgccctttgatcaccatgggaatctttggactcaggacagggccaggtgcagggctttccctcctttcccctttgctgtcccctccccctggagggcatggtgtcggggggtggcattaactatagatacccgggaaggttaagaaaccccacaaacaaagccacctagggatgagtatagatgctggtgactgtgtttcatagccccagtccagggctgtttaagaaataaagatcaacagcccccccctgga

SEQ ID NO: 488865 - DNA, 303 bp, Homo sapiens
ctgctccctcttcagaatatgccttccgcatgtctcgttcagtgccggtatttggtgaaagtcaccagggctactaattcccaggtctacttaaaagtggtgagaacactgttaagtgaactgccttagccaagaaaaagggagattatgattgggattcaaaatcaacaacactttacgctggaactcattgcagacccctcccgatttcttgggactctaacaaaattaaccatcaggaatttatgggattaagcaaaaacgactaaagaagcttcgtggaaaggagaaaccaaagaaagg

SEQ ID NO: 488866 - DNA, 113 bp, Homo sapiens
cttcctccattcttgtgtagttgtcccctgcagccaggttgcaatctaaactccagtccaggcaaaggaagaacaatggaagtgccagcagtcctggggccagccagagagaa

SEQ ID NO: 488867 - DNA, 559 bp, Homo sapiens
tcgtctggtgttccggaggatccccagactcggtaccgattcaggagataggctgggcgaggactccatgactaaaacacccgaagcaatggcaagcaaaagccaaaatagacaaattgggatctactgaaactaaagagcttctgcaaatgcaaaagaaagctaccatcagagtgaccaggcgacctacagaaggggaggaaattttcacaacctactcgtctggacaaagggcctaatatctcagaatctacaatgaactctcaacaaagttacaagaaagaaaacgaacaaccccattcaacaaatgggcgacggagtatgaagagacatctctcgaaagaagagcatttatgcagccagaacacacatgatcaaaatgctcagtcgtcacatggccatcagtagaacatgcaatattcaaaaccacaatgagataccatctcatgccagttagaatggcaatcattaacaagtcaggaaacaacaggtgctggggaggatgtggagaaataggaacacttttacactgttggtgggactgtaaactagttcaacc

SEQ ID NO: 488868 - DNA, 120 bp, Homo sapiens
tggcctccgggggttaagttgctgctggagatgtaaggcttgggagtctccaagtataaggtgaaggtgaatgtcggaactgtcttctctagctctcatcacctcgctttatatgacgtt

SEQ ID NO: 488869 - DNA, 280 bp, Homo sapiens
acccccccctttttttttttccccttttgggggatttttaaaaaaagggcccccggccccccttttttaaaattttgggagggggggagggggttttttccagttttttttttttttcccccccaaaaaagggaaaaaatttttttaaaaaaaaccccccttttttggggggttggggttttgggggttttttaaaaaaaattcccccccctttttaagggggggaaaggtttttttttttttttggggccccccttaaaaatttttttaggggggggga

SEQ ID NO: 488870 - DNA, 191 bp, Homo sapiens
ttaaaaaaaaggggggggaatttcccaaccaatttttggaaaatttttaaaaaattttaaaaatttcccaagcaattcccccaaatttggggggggtggggaacccccccgttcataatggaaagggggggtaaaaactttaaaataaaaggtgttttaaagggggccaaaaaaaaaaagggtttcgccca

SEQ ID NO: 488871 - DNA, 1004 bp, Homo sapiens
gtccagactggctagagttagaaggcagacctaggctttggaagcaggtggcctccaggagccttgccattaaaaggctgaaggcagccgggcgcagtggtctcacgcctgtaatcccagcactttgggaggctgaggcgggcggatcctgacgtcagcgagatcgatgaccatcctggctaacgtggtgaaaccccatctctactaaaaatatcataagatacattacatccacggcatggtgacgggcgcctgtaactcccatgtctactctgtgaggctaagtgcaagagaagtcccttgaacccgggagggtgaacgtttgcagtgagccgaggatcgcaccactgcgactccagcctggatgacaggagcaagtctccctctcaagaatacatcataaaagatacacaatatacacaaaagagaaaaaagatagacacatacaatagacacacaaataacagagagaaaacccataaaacacatgacataccacaaacaccacagtaacataccaagatacaagcagattgaagcccaataacacagagtaccaatctcaagagacatccaatctgatcacagtagactcattgctccgagggagccaccactgtgatcgagggatgcctcacacagtgagtccacaggcgcgcagcgtcgacaacacgtggagagccttaccgtgatggtgcatagaattgaatgatcatcacactctagggaaaacaaccagcatccgactagggccaacaatacaacacgacagccaagactaagacactgactgaacggccagcaaaaccacctcacaataccgacagaggctaaaaacacgagtggcacacacgacatcaccccaacgctaccgccaagagacaaacaacagtcgactgaacaaaattcaacatcttacctaggatcacaagtactccgccaacaaacatacagcacatcacaaatatacataccgatacagttcgaacgcaacacgcacacag

SEQ ID NO: 488872 - DNA, 324 bp, Homo sapiens
gctgctaccgttatctggcacgcataacatctgccggtcttctgtcccacgaaggatggtgaactgctgacttactgtagccctaatgcctccacactgagctgatagcttgtattcagtcttattgaagacaagcgacacttcatcctctgccatgaaattatctagtcgtattgctgtcagttactgacccctggattcctgggctctctggtctctcaatggcttataactcattaccatgcttaattatgttggtgtgaaacaatcccagacaaggttggtggaggttgcttgacaattgataggtgctcacatcatttc

SEQ ID NO: 488873 - DNA, 461 bp, Homo sapiens
tatcccggcctccttgtgttgctggtgccatgcttgtactgtctgtagacgtcatgagccaatgaaacctctttatctttttaatttttttttttaaagaaaaaattttcacttttgttgcccaggtggaagtgcatgggccaattctcggctcattgaaacctcggcctcccaggttaaattaattctctgtgcttcagcctcccaaggtacatggatatttaagattgcctgccaccacacctggcaaatttttggtttatttagtagagacgggttttcgccagtgtgggccaggcgtgtctcaacctcggggacctcagttaactcggccgtgcctcgaacctccaaaaggtgcgggaactacaggcataatgtgccgcgttcagccctgagtccctttattttttaatggggggggaattccaactgtgttccccgggcggtatggaaggcgcaaa

SEQ ID NO: 488874 - DNA, 1190 bp, Homo sapiens
  misc_feature (137)..(137): n is a, c, g, or t
  misc_feature (257)..(257): n is a, c, g, or t
ggtttcggccaaatgtgtggcaccaaccctgtttcacgggaggtcgccccgtcgggtgtaagaagagtttaatgctcccccctgctaaagatttagggtgatgaatatgtgatatgtgaaccccccatagtgggtgntggataataccccgccttttgtgggtggaggaccccctcctcttgtggattggtcccccacgaatatggtctctcgcggggatagtccccctcacgtagaataagcccctacgacgaagnttgtgtggtgttaataataaagatagaataggctgcccctcctaatttatattatggaggggacgtacctttttaaaaaataaagataacagtatgggtgtatattacgtgccccacaataagcatcccaacgtgtcgtcatcgtacacctcattgcttttctacgcgacgagaatagacaacaccacatattacgcctgcaactactctatcacctcaatggggggctcacgtctccgacgtgagtaatgagataacgacccccctcttgtggtttgagtaagagtaggcgcccacaactgttggcaacgcgagagtgcgtctgtctcgcacacagcggcaccctcttgagaggtgtgtggagacaccggggtgtgtggctcccccgcgcctgtgtttgtgtagcctcgtgtttagaccccgcccacagtgtgttgtgggcccaccgctacagggcgccacatagatatgtgttcctccccccacatttgcgcgctctcacagtgtctctctcagtgtgctcccctccaacaccagagcgcccccggtgtggcgccacatgtaagaacgcccaccccttggtgtggtaacacaccggacacagtctgcgccacaatagtgtttatatctcctactctccacggtgtaagacatttgtctcaccagatctcatatgggaataatatatagttgagatttttttggcgacccacaacccgttttgtcttttagaaagtatggttccattgttttgtgattgccatagatttcccttcccttctcaacactgggttcttccccggccattccagaagaagaggagaggagaaggagagaaaaagaaggggagggaaacttcccccaacataacccccacccgtgcttttggcccttattttgagaataaatttctgtttccaaccgtttaaaaaa

SEQ ID NO: 488875 - DNA, 297 bp, Homo sapiens
aagggacccttggtgtctggaaacacaacatgaacgcagagccacggatgatgaagacagtgccctaccacaatgaccacgaggcccacagacaaccccagggctgcagaccacagtctctgtgagctctgacataggggctggactctcgggctcccagtgtttcatgaagaggcttgtccagtccccagtgctccaccttgccaggcatcactctcctcagcagaagggcggagggtgaggtcactgctcttgacaacggagtgatcactcttggggcggcagctggtctcagaa

SEQ ID NO: 488876 - DNA, 812 bp, Homo sapiens
aatcatcctgatgttgcaagcaaattggctacttgtcccttcaatgctcgccaccaggttcctagagctgaaattagccatcatatctcatgctgtgatgacaaaagttgtattgagcaagatgttgtcaaccaaaccaggagccttagacaagagactctggctgagagcactggtcatagccctacttgatattaacactgggataaagattcgggggatcataccagcaatcccatttgggtggggcacaactcactacagcagacaacaacagccctgtgagctacatagttacaaaacataaaaatctcctgacttctagcatgccagttcacaactctctggcgaatttccccgcatggaaaaacaatgtaaaggcaccgaccctaataccctctcttatcgaatgccagcccgtaaaatactggcagcctttcatactacaagcgggttggcattttcctcctatgctagccctagacggggaacccccgttggtatttttccaaaatggcaatatcaactttttttctgcaattattcgtgtgtgcattcggttcaggacatagcaatagttaagagactctcaaagaactccataagcgtgccggtaccgatgcgggagctcacaataatagtgtaatttaatagaaggctatttatccagcatccgcgcagctgactgtaccacgatagaccgctaaatgcgatctttgctcgaagtgactgcgtcgcctgataatccagcattttgattttggagacatgcatgcggtgactctatgatctctatctcttctgtatggcgt

SEQ ID NO: 488877 - DNA, 139 bp, Homo sapiens
ggaccgaactcgacatgtgtgcacactaaaatatcaaatcaggtgcttggttttaaagtaaatgtttttctaaagaaagctgtgttcttctgttgacccagacgaatagggcacagcctgggtaccggctcgatctaca

SEQ ID NO: 488878 - DNA, 1039 bp, Homo sapiens
ggcaatggccctcatgatgtatagagctagcacattctggaactacaccatcagaagcttccaagacaaggcaggaacgagcaggtctgtaccgactggtgaatgcaagtgagtcgtaattgtggcatgaaaacgatggtacacctcttttactagttatctccactgcacgttacatgaatgagatacagcagattcacgtgaattgaatgttcatgaatggaggtggtgtgaaaagtcgcgtctcacctcttagtatgatcatgacattatatcggtggaaaactgggaaagaggactacgattgtatgcacgtgaaaaaactgtgtaactctgacatgatgctattacatgggattaggacgagtcgttgtagcagcagacagagaggactatgtgcatgtggtgtacacaaagtagtcatgtgcaacttgggagggtaaaatgggagttacgagtgagtgagagaatggcgcctgagatgcgagtgagcttagaaacatgaaagtatggggccgaaatgtgtgtcaagagaggaatctctctcacttggtaatgtggcaaggcagggatgggggaggccacttaggaggggccttgaaggagtttgcatagttgggcacccatgtaagaactgtatgccaaattatttgtctcactagggtcatgtaatacactccaagctcggtaataagtcacgagatggtatattcgggaaaaagtgtataagtcgcgactcgaacattgggtttaggaaggaacggctactcaatagtcaggagttaacccaaggaaattgtacaaagcgactgagtaagaaacaccctataagttcggttaggggaagcttgaagtaatgagtctttataacttagactccggtgcagaaccgggagagtagattgcgagaaggattagttgccaaagctttcaaagatgtggctgggagatttgggggaggtaaaacgtttgagaacgttggaaagtcaggggagaaactgggtctagaggggagagacgctagaattccagtagacgg

SEQ ID NO: 488879 - DNA, 1068 bp, Homo sapiens
  misc_feature (518)..(518): n is a, c, g, or t
ctatagcgtccagtcgcccttcacccgcagcgcccagagcagcccagagtgcgcggcagcacggcggccgctggagagcgaccagggtgaccccttcacgctcttcaacgtcttcaacgcctgggtgcaggtgaaatctgaacggagcagaaactctcgcaagtggtgccgccgccggggcatagaggagcatcgactgtacgaaatggccaaccttcggcgccagttcaaggagctgttggaggaccacgggctgctggctggggcccaggccgcgcaggtaggggacagctacagtcggttgcagcagcgccgggagcgccgggccctgcaccagctgaaacgccagcacgaggagggcgcgggggcgcagggcgcaagggtgtgtggcgggtgtgcggagagagacgcagagacggggggtctccagatgacgaggacaggggctggcaccagaccccaccaggggaccagtgatggcgtggacatccagggatgtgacgttcaacgcttcggcnatgacactggcgcagctggcaggcccgctgcccagctcagccccaggacctggagccgcgaagcagctaggctctggctgaagctgtgtgctggggccggggcctgtacccacagttggccggtccccgacgccttcaacagcagccgaaagggactcagagcagattttccacacgcaggccaaagcagggcgccgtgctgcaccccactgcgtctacgctgggcagcccgaggtgctgcacgcacaggaggctggaggccaggcaactgggacggaagccgaggcatggtgcgtgctgagacgtcacattcagaattgggtgacctccgggacggagccaggcacaaaggcaggccagaaacaggtcaacgagtaggagcaaaaacagcccatacagctcgggcctgctggacaacacaaagggacctgggcaagggtcggcatactgacccaagaccacgagttagccggcttggcacacgggatgtaccacggggccacgagggcagggcagaaagagaaggccagcaggggacagagagcacgga

SEQ ID NO: 488880 - DNA, 188 bp, Homo sapiens
acacacagaaacacacacagacatatgatagtgacttagctagtggcagcaatatgtttatatgtgtgcccaatcattggtgcaaagcagtatgtggttacagtggtaagaaaaaaggtttacatcaactatatatatcaagcggaacttcacaagtattcccaacaactcactatagtgacgtgaga

SEQ ID NO: 488881 - DNA, 754 bp, Homo sapiens
  misc_feature (109)..(109): n is a, c, g, or t
  misc_feature (433)..(433): n is a, c, g, or t
  misc_feature (440)..(440): n is a, c, g, or t
  misc_feature (456)..(456): n is a, c, g, or t
  misc_feature (460)..(460): n is a, c, g, or t
  misc_feature (463)..(463): n is a, c, g, or t
  misc_feature (468)..(468): n is a, c, g, or t
  misc_feature (475)..(475): n is a, c, g, or t
  misc_feature (719)..(719): n is a, c, g, or t
  misc_feature (721)..(721): n is a, c, g, or t
tagcatttagaataattaatattcctgagattgtcttgaaaagacttccatgtatcgctaataggattcctaatgcatgtaagtcttttggaaagttagttacatcttnaagaatcttgagcaaattctggtttattcactagatggatatatgtgagaaactaatttttgataaatctgaggataagaactgtgtatttaaaaaatttttaaaaacagaaaaaattgtgtattaaatgtaattacaattatttctttttaagaaactgcaatggaaaaaaagactggaaagaaatgttagcagtatttgtagttgggtaatgagactatggctattttcttttctctgtatgctaaattttacttagtatgcactagttttacaatgaaacaattaaagaaaaaagaggaaggaaggaagaaaagaaggaanaaagganggaagggagaaaatangaangancactncttaaangtaagaaaatggcctaattagaccagttagtaaccacttagttaaatgctataattaagcttttaccctatcaaggaactttctaagtgatcacaaatgataactaagtcatataatatctgcactgaagggacatcttacctaattctgtcatttgacatgtgtagcatataaattataattattcaatgctttacagtttacagagtgtgttcattttaagatcgagaaatttaggttacananatagtaatgtgctctaataataatgctattatt

SEQ ID NO: 488882 - DNA, 495 bp, Homo sapiens
gtaagggctgaggatttgtggtccgcagctcctgctctgactcaccgctgtcgctctcgccgaggaacaagtcggtcaggaagcccgcgcgcaaagcatggtttaaaggataccggaaaacacacccgtgagccggaggtgcaattcaccgaatacgaatcaccctaacaaggcgcaaggtaaaatccttggacacagggtgtgtgcctgacttgataagaggcgcacaaagaaaaagactctcaaagtgaacaggaccagttcgaattgcctaccaagattggagaatcataaagaaaaactccttgtggtgaagggttctaagacgtgggatcgttcccaggaatgagaattcacaaggcgatcattgatatgcaacagtccttctgagatggttaagcagataacttccatcagttatgagccaggaagtagaggtggaagtcaccatgggagatgttaagtcaaactatcttataacatgtgatgaccagt

SEQ ID NO: 488883 - DNA, 1471 bp, Homo sapiens
  misc_feature (546)..(546): n is a, c, g, or t
gacccacgcgtccgtcgacccacgcgtccgtttttttttttggttcgcaacgggtttgccgccaaaacacaggtgtcgtgaaaactacccctaaaagccaaaatgggagaaaggaaaaagactgctattatcaccattgtgtcgtctattggagaccacggtaagattgcgggcgcaatgtccaccactaactgggcgcatctggatctataatatggcggtgggctatcggacaaaaagaaccaattggaacaatatttgagaagaagggagggctgcgctgagaaatgggagaacaggggctcccttacaagtgttatgcgcctgggtgttcttggagtataaactctgagacaacgctgagagctgtgagaactgtggggttatcaccccattgagatatatcttcccttgtgtgtgcgaacacaatttgtgcagaacacacagcaagagttcacctgagtgtgtgacactatactccagtgtgagagtgacccccccgagggacacccacgagagagacacttatataactcacacaaacanagtggtatttccacccggggcccactatcttcgagggctgtggaactgtgggcggctgtgcatcacgatggatatgtggatgtgcagtcgctgatggagtgtatgtggagtgaaatctttgtgacacagccgatggaaaaatctctccagagaaaatgtgggggacgaagcacccccggaagaacgcctagttgccccatttcaaggggatataaacaaacactgtggggagtggtgtagaaacacaaaaccaataaatctgcgactccgaggtgtatatacaccaacacacaggggggaatatctccccagcggtgggaagcacaacccctcgataagcacggccccagaaagagaaagagattagttgcaggaacaatctgggtcacaacggcgacaagtcctcacggccccttctccagttttagagagaaacaaacttgggcataacaaaaccccccagaacaccgcaggcgaaagcaaatggggacggccaaaatatcccgagaatggcgacaagcggcgacccaaccagtgcccgcggacgccaaaggggtcaaaccaacagccctagggtgtacacaaggggaacggcgcaaacagcccccccgataaaaggatgcgccaccgccagagaggggaaaccaactcggtcgcagtgaaaggcacagcaaaataggcatccctacaccaaccaaacgacgcgccacgcgtggaaagccccctggtgcccatgcgcttcccagagaggctaacaaagggagcgcaaagaagcacacacgcggaggccaacaagaacacgaggcccaacaccagataggacaactgaacaaaaagaacaccaggcagaaaactgaaagcacaaaacgcaagcagcaacgacgaacacgggagacacatacaaagatcagacaaaacgaaacag

SEQ ID NO: 488884 - DNA, 283 bp, Homo sapiens
attaggcgcgtactggtgctggtgacaaggacgacatcacggagcctgccgtctgcgctctgtgccactcactagcctgcacctgaggccgagcatggcccagaactctgtgcgtctacaactattgcatcccagccatcgtgaagctgctcaaccagcccaaccagtggccactggtcaaggcaaccatcggcttgatcaggaatctggacctgtgcccagccaaccatgccccggtgcaggaggcaagcggtcatcccaccgaggcagaacgcgcctaatc

SEQ ID NO: 488885 - DNA, 202 bp, Homo sapiens
aagggagaaagcgagagaggaaggaacagggagtgagaaaggaaggattggaggaaggagagagaaaaaaaggaaggcaggagagagaggagaaggcaagtgggggaggaagggagaagggggaatgaagcggggagagaggggagggagggagagagagctagagagcggaacggagggagaaactgaggcagaccacagg

SEQ ID NO: 488886 - DNA, 837 bp, Homo sapiens
taaaagtttcatctttaatgaaatgactttggaaattatccgtacatttcccatgtgacaccaatactacagttttcggagtcacagtaagatacacagaattacatccgtaattaatatgaatgccaacttgtcaagcagtaattggttacagtggcaaacaaaatcaagaaagcaaccatcaaacaaaagagacccatagcttcagacaaggcaaattcccaggatagcttttgagaacagcgtgcgtgcttcagcaaagggttccggggcatacccaagtgataaggctgccaaagacgtgttccaattaccagcaccagaaccagccactccatacgtgtgtgcagcacctgtgcaccaattaaattgggcagcagtatcaagtgtctcgtgcgtgatgtgcccgtggtctgaaactcccttgggattagctgagacacaccattcgtgggccccattaaataccgtaaagccctctccagtcctattagcctctggtcgagataaccactgatgcagaaatgggtcttgtatgcacactctggatccagctcggatcaaaaaggggtgtgcaggcaagcttggcgcaggcgaacattcttacactcttcggagactgcgcggctgagaaatatggggtagacaggcaacgtgggctcctctcccgattcctcttttcccaggaggcggaggggcaccggcattgcacccaaaggtctactgcgaaatgacgactattctcagaatcagactgtccaaatttccagaaattgtcgcacattacactctgaagggaccccacaggttatcgggaagggccccagaggaacccct

SEQ ID NO: 488887 - DNA, 269 bp, Homo sapiens
atgtggatactcctgatcgcagccaattataatgatatcaatgatgtcaaacgactgacccctgactacttagaagctactgtggactgatatacaaggtatcaggttcctgatggacaaccagaaactgcgtctgcgtttaatgcagactttacagatcaggcactttgccctcgatattattaaaagcactcatgaccattggcacgcatcagtgactaagaaaacgaatggaccaggactcagaagcatgaaaacaactttgtctg

SEQ ID NO: 488888 - DNA, 824 bp, Homo sapiens
gactgggtttcggccaggcacagtggcttacacttgtaatcccagcactttgggaggccaaggcagtggatcacctgaggtcaggagttcgaggctagcctgaccaaaatggtgaatcctagtctctactaaaagtaaaaggccgggcgtggtggctcacgcctgtagtcccagcattttggaagactgaggtgggtggatcacaaggtcaagagatcgagatgagcctcgccaacatggtgaaaccccgtctctactaaaaatacaaaaattaggcctggcacagtggctcacgctgtaatcccagcactttgggaggctgaggtgggcgaatcacctgaggtcgggagttcaaaaccagcctgaccaacatggtgaaaccctgtctctactaaaaatacaaaattagcctggcatggtggcacatgcctgtaatcccagctacttgggcaggctgaggcaggagaatcacttgaacccgcgaggcagaggttacggtgagccgagatcgcgccatggtaatccagcctgggcaacaagagcaaaactccgtctcaaaaacaaaaattagctggacatggtggcatgtgcctgtagtaccagctactcgggaggctgaggcaggagaaatctcttgaaaccggggaggcagaggttgcaattgaagccaaagaatcgcgcttatgcacttcagacttggtgacggagcaaagacttcatctcaaaaacaaagaataaagagaaaaaacagaattaggcgggtgaagcatgcgtgttatcccaggaattgagaagtgaggaggagataggtgaaccgggagttg

SEQ ID NO: 488889 - DNA, 878 bp, Homo sapiens
cttagagggactaggctgggtgtgtgagctgcatcgtatccacaggccccaggatgcgaggccctggtgctactcactctgcagttggagccctcctcgggcacagtcagctgccagaacccgtgtcagtccgctccgagtaggtagggcctccccagatcccgacagcacaagtgggctgcgtggatggatggaggaggatccttgtcattcaaagctccccgtgaacaagctggcatgcggcttgtgcctccaacttcggctatgacctgtaccgggtgccgaatccagcatgagccgcactgaccaatcgtgcatccgtgtcatccgtctccacgatgtggccgacggaccctctcggccctcatcgcatgggatgctggagcatcgaacgagaattccatcattcaccgggctctctagtatgagttgatcagcagaccagacatccatggtacctataaggatggctccttgacatcggtcacttggccccgcagatagaacctctaatgagtgcgtcccggatcgtctttgagaagaagctgcgcatagaatccagcttggtggcacctctggataagtcatatgggaccaggcccatgagtcctgacgggtgcaacctcgtcgctttggactcttgcaatgcaggatcaagctaactgggtgtcaaggcggcagcatgataatggggaatggctcgcctaggttccacaaaggaaatttccctgatgagtatcagcctagtgctccttctcgggtggtggcggcagtttcagggggggcaagtggggtaatcaaagtttggctccggaaaagaactttccctccgaggagtttccgaacttggatggaagggaagaccaggggaagggtac

SEQ ID NO: 488890 - DNA, 444 bp, Homo sapiens
cccctactccagctttcctgtattcttcagggtctgttagcctccagcccacctccttcacgaagtcttccctgatcaccaggcttgagggttctcctgagatgttgggtcttggggtgaaccctgacatttgtgatatgcatgaagagaaagaagttctgacatctcagacctctggctgcccctttggagcctggggcagggttcaaaagacccgagatccaatcccgagccagccatttgtaatcatgagatctgatcctgcaggattttcagcagctcccctctgccttctgggaaattggaactctggcgcttgtttacccacttacccatgccacttagcactcaagtcctttcagctcccagtcactcacagcctgggggctttgcacctgctgttccctctctgggatgtgcccctcccacacctcttccctaagc

SEQ ID NO: 488891 - DNA, 151 bp, Homo sapiens
gggcccaagaataaactgtagggggatatacaaaaatagtccccatgtatgtaaaaggttaccaaataaaacccagtgttctatatttgtttataaactgtagggggaaaaataatttaaaagcttgttttaataaacttttcccccccta

SEQ ID NO: 488892 - DNA, 920 bp, Homo sapiens
ctcgttttggtaaacttttgcccccaacaatgtctcggttttcccggggtcggggtagccccgtgtagatcccatggcttggaccaccccgccgtgggaacttattacatgtgcccgctgccaccagaggtgtttaagacgtggggtccgactttcaccatgggggatcccacgagtgaataaccgcaccatgggtgtccacagagtgggcccccttttacatattcgcggtatgaagctcccccggttctttctaatagttgtccttggtacagcccgccgctaacatagtaaccttggtgcgaaaatacataaagagggcaaaatattgtctcgagcaataaaaaaaaatgaggggacaaacaagtgaaggagggaaacccactcttagtaagacaaatagaaagaggccaacacataaacacccgcggaagggatgctcaaaaatttggtaatccacactaaccacaaagggttgggaataacaaccaggactcacccgccgacgggccaacgcgcggtgggtgataaacacctccccccgcaccctactccagtcaaagagaaatactgtatgtgtttacggcacgacgaaagggagaaggataggctactaagcaaacttctctgtctcttttacccgtcgggccactttccttctggcggaagaattttgtccagactaacacactgtggtgcgaccccgctcacaagtggcttaaaaatcctttctaagtaggtccagacccgccgcaaaaatatttaaataatatagtggttacactaccatgatgcgtgttgtgcattcgttaataatactgtatgcagcacacaggggggcgggacaatgattaacgctcgtgattatttaatgtaacacacacaaggaaaaaattttatgccctccgcaccacaaaaca

SEQ ID NO: 488893 - DNA, 521 bp, Homo sapiens
atcgagacatgtaagcagcatcatggaggtttgacagatgccgcatttggattggatgaattccaaattctgcgtagctagcttttaactatcgatatgcttatacgcgtgtacactttatgcaccacaatgtaggggttatacatgatgttaaaatggacatgatcatactttataatcctactaagagtgctgactccatgtatgatgtaatctgagcaggttgctaccacaggtagctctaggagggctaggcgacttagaggtggggagcagagaattctcttatccaacatcaacatcttggtcagatttgaactcttcaatctcttgcactcaaagcttgttaagatagttcagcgtgcataagttaacttccaatttacatactctgcttagaatttgggggcaaaatttagaaatataattgacaggattattggaaatttgttataatgaatgaaacattttgtcatataagattcatatttacttcttatacatttgataaagtaaggcat

SEQ ID NO: 488894 - DNA, 125 bp, Homo sapiens
tgatgacatgtggtctgcgaggatgcagggctaaactgggacatgagacactcaatgtcctgctagcgctgagatatatacggtgtgtcttgtcgcagtgtgcaacagttgccagtcacctgtca

SEQ ID NO: 488895 - DNA, 118 bp, Homo sapiens
atattcaaccacccccacccccaccctgaggcttcccggttggggcgggcagccttggaggcgggcggtggcggcatgcctgggagaagatgaatatatcatgagtgatgtgcggccg

SEQ ID NO: 488896 - DNA, 560 bp, Homo sapiens
cccgtcatctactcaaccatcttcgcaggcagactcatcagagcggctaagctcgcactgatttttcacctgagtaggcctagaaataaacatgctagcttttattccagttctaaccaaaacgaataaaccctcggttgccacagaagcgtggcagtcaagtattgtcctcacgcaagcaaccgcatccataatccttctaatagctatccctcttcaagcaagtagtacgtcgtccggaccaagtgacaccagtaaccaagtacgtagccaagtcgaagtagcgtcagtcagtgtaactaagtcagtaagtggccctatagccaagtaaacagcgtaaggacataggccccccatttttcacctttcttgaacgtctccagcaggttaccccaagggcgaccccgtcgtgagcattccggcccttgctgttctatcgtcaccagtgaccacacacaacctaagcgcgcccgagtcctccaaactcagttatacccaagaagtctcctcgaccttcacgctacaaccggtaccagcccgtttcgtccgtcaacgtctct

SEQ ID NO: 488897 - DNA, 245 bp, Homo sapiens
  misc_feature (9)..(9): n is a, c, g, or t
  misc_feature (18)..(19): n is a, c, g, or t
  misc_feature (39)..(39): n is a, c, g, or t
  misc_feature (46)..(46): n is a, c, g, or t
  misc_feature (62)..(66): n is a, c, g, or t
  misc_feature (91)..(91): n is a, c, g, or t
  misc_feature (105)..(105): n is a, c, g, or t
  misc_feature (110)..(110): n is a, c, g, or t
  misc_feature (125)..(125): n is a, c, g, or t
  misc_feature (192)..(192): n is a, c, g, or t
  misc_feature (195)..(195): n is a, c, g, or t
  misc_feature (223)..(223): n is a, c, g, or t
  misc_feature (235)..(235): n is a, c, g, or t
  misc_feature (244)..(244): n is a, c, g, or t
cccccttcnaatgactgnnaatatattttcactgtttcncaatgtntttaattcataaagtnnnnnttttatgaaaagaaacttgcaaggnaaatcctagttttnagtcnactcgccccactttntagtagcttcactgaatttcctgctttcctggttgaattttctactgtttcacgtggtgtaaccctnggntggcgcccttggcgtgcccctttgtgtntgaataaacttntctcccccng

SEQ ID NO: 488898 - DNA, 118 bp, Homo sapiens
atccccccaggtaaataggcggtcctgatgtttgtgctgaggttggtgcacatttgtttgttatatgcccctgacttacagcagaaagagctcacctccttttgttcacacgatagta

SEQ ID NO: 488899 - DNA, 140 bp, Homo sapiens
  misc_feature (7)..(7): n is a, c, g, or t
cggaggnttgcagcagtgagctgagaatcatgccactgcatgccagcctgggcaacaagagcaaaactccatctcaaaaaaataaaaaaataaaaaataaataaaaactaaaaagggactcaccattctagatggccatt

SEQ ID NO: 488900 - DNA, 323 bp, Homo sapiens
  misc_feature (209)..(209): n is a, c, g, or t
  misc_feature (226)..(226): n is a, c, g, or t
  misc_feature (242)..(242): n is a, c, g, or t
  misc_feature (268)..(268): n is a, c, g, or t
  misc_feature (281)..(281): n is a, c, g, or t
  misc_feature (317)..(317): n is a, c, g, or t
caggtatatcacagccttcttatgcttaggaatgctcagcagcacttcagcactacagttggggaccattataaacagcaaaatcactaacaaaaagcacccaaaaaatgcaaaatatgtgacactaaatagtcctcagaaaggatacttatttccagtgatgagagctgaaataagaaggtggaggcttgacctcagctgggaatgtncctgcagagtgactttncagctctgtgcatgtncgtgtccagaaatgaccgtgaaagtncctcaagtattgnttttggagtaacaaataaattttagtgaaaaggtanattcac

SEQ ID NO: 488901 - DNA, 1582 bp, Homo sapiens
  misc_feature (365)..(365): n is a, c, g, or t
  misc_feature (942)..(942): n is a, c, g, or t
  misc_feature (1071)..(1071): n is a, c, g, or t
  misc_feature (1220)..(1220): n is a, c, g, or t
ctagtgtgcggcctcttctttcacgtcttgtgctgtggcctcagaagagcttttgtgtgggatcctctgtctgcagcaactcgccacgcatttcgcagaaggtcctgtttctcctcctgtgggggacactttttttgtggcgtctcggcctctcctggagaagtttttttggcagacaccagaagggcttctgcatgattctgtgtgtgaggtgtgggcacaaaggtgtttccgttgccccttatggccccctgttgtgcgcccacttttgttgtcgcgtccagagaacgttgcacaccaccccccctattctatcggccctcccggcggtgtttcctaccccggagttggaactctcccctcgnggggattggggccctgttgatgagtcccccccgacagcttctgttctgtgtttgtcccgggtggggcttctccggaggcgccccccccgtgtgtgctagttttttatagggaagcgcttcttcgttggacctggggggggcacaacaccctgcccccagggggaagcttgggcgcccagcgcccagccccgtggtgatgttgtgggatggccttttcccccctttggttgtgagctgtgtggcctgtttccccgcctttctctgagtgcgccccgctggactatttcttggtgtgggggacaaaagtcctcaatcgtcgtaattgccgccccgagcactcatgttggtgggccgccccccccatcccccaatttttgtcgcgcggtggcacccgtgttctcgttgccccccaagaccacccacggggaatcttttttacgcccagcccccctacgagtagtcgcccccccggtttacttgccgcccctgttctccccctcgcgcatatataggcttgttctctgaataggggtgggtttcactatctgggagtccccctgtttcgcctgctgtgggngcgctctcaatacgcgcccaacactcggtgtattgtctttctcccctctgtttagctcggtgtgtagatatattatatgttctcaccccccccccgtgtaaatatgtgtttttgggggagcccacgcgncgcccaatacccctcttctccccactcttagctcatatacatatgtgtgttggagaatataaaccgtctcacaccacaaagatgtggcgtcttctccctccttggctctgagagaagatatggagaaggcgctctggtgtgggatattntgctctctctctgggtgttcacctataggggcccctcttgtggagagggccacagagaagagggtaacaccactccctctctctcccctcttctctataccccgctgcgagggcccacacagagttctcctctcctcgagagaggcaccgcgagagttgctcgcccctctctctccccatcggtggcccgctcgccctcttgttgcctgtgttatgtgaacaccacacccaagtggaggggataaaacacctggccacataggtctttgttggtttgttctttcgcccttctcactggacattgccccagaataatctttccctttttgaggccagcctatataaatgatcatttttgccca

SEQ ID NO: 488902 - DNA, 101 bp, Homo sapiens
attttttaagggtaatattcccttgtatgcatgggccccctttcgctttcagtagtcctttttaagctctataaaataaaatgaaaaaagggcagttccca

SEQ ID NO: 488903 - DNA, 204 bp, Homo sapiens
aaaggcacatatatccacacatgcacacacagcacacacacaaacgcacagcacacacaaacgcacagcacacacgcacacacagcacacacacgagcacacagcacacaaacgcacagcacacgcacacacatgcacacacagcacacacactagcacacagcacacacacaaagacacagtacacatggaatggcacacaca

SEQ ID NO: 488904 - DNA, 123 bp, Homo sapiens
tctaagcatcctctatgatttgtgttgatcccatctgccatctaattcttcccgatcaggttcttatctgattttggtccggtcaatgagagggagagtactatcatcatatgaatgactgct

SEQ ID NO: 488905 - DNA, 176 bp, Homo sapiens
tagcttttttggaatcttggggtgggggtcatctttggggattatggctaccccccggaatttgagtgtagggagtgtgggagcacccttggcaaatggggcacccgtgccctgcaggtgtttacaagatccgccctttgtaatgtccttggcccaataaaaccaaatgtcagtta

SEQ ID NO: 488906 - DNA, 241 bp, Homo sapiens
tctgtgaggtactccttccatggctgaaggaattatggaagggtccagctcatcctggctgtaaaaaaacacaaccccagtggccttgtcagaagtggctggatgctgaggctgaagacaacaatggcagagggctcaccagggccatcatgtggtgtaatctaaacagtggaagtatcctttgtggcgtccatcagagtcaggcctgtttcaacagggaatacgaacagtgctttcagca

SEQ ID NO: 488907 - DNA, 313 bp, Homo sapiens
atgtaatctccacatacatcacacgcccccacacacgcagacgtagccctcacaccccacacgtatatcacacacagacatatactacacacatcacacatccatatgctcccctaacactacacacacacacacacgtgcacactccacatgcccctacatcctcccctgcgtacacacacctgcagattgtctcggcaggcccagtttgctgcacataaagcccttaccactcttgggcatctgagctggatcaagcagcccagctcctaggcctgtggtagatgtgggtatgcttctgttcctgtgggga

SEQ ID NO: 488908 - DNA, 520 bp, Homo sapiens
agagaatagaatacctaggatccaacttacaacggacgtgaaggacttcttcaaggagaactacaaaccactgctcaatgaaataaaagaggatacaaacaaaaggaagaacattccatgctcatggataggaagaatcaatatcatgaaaatggccatactgcccgaggtaatttatagattcaatgccatccccatcaagctaccaatgactttcttcacagagttggaaaaaactactttaaagttcatgtggaaccaaaaaagagcccacattgccaagtcaatcctaagccaaaagaacaaagctggaggcatcacactacctgacttcaaactatactacaaggctacagtaaccaaaacaccatggtactgttaccaaaacagagatatagaccaatggaacagagcagagccctcagaaataatgccgcatatctacaactatctgacctttccatcctagaaaaaatggggaaaacagaagaaaaaaagacaaaatcgaccataaaagacc

SEQ ID NO: 488909 - DNA, 953 bp, Homo sapiens
tggcagctcgtatttatttaaatacaaaaatactttaacatagcaaattaggcaattggtaaggataaaataacaaatactttaaaaatcatacaaaagatggccgggcagggtgtggcctcacagctgataactcccagcccttataggaggctgagggtgggcggatccacgaaggttcaggagtttgaaaacagccgtgccaatagtgggtgaacacctcatctctactaaaaatacaaaaataagccgagggtgtgggtgctacacgccgtgtagtcgcagctacatggggaaggctaaggcaggagaaactcgcctgaaccgtgggaggcggaagtttgcaggtgagcaagaatcagtgaacaagcaacaatacctcaagggcactttataattaatacaccaccaaacacagtgtggtgcctttcgtggaccacagcgagaagatcacatgtcgtggtgggtatctacagagctatgtgaagtgcgggtgcacaagaactgtgtcgcttcccttaggctaagagtgccacgatttccaaagctcttagagtaccaacaaaccaggcaagatcttttctggcaaaaaacaggtgttcgaacttttaaaaaagagggtatagaggggtctggagcgtagggggggactatgtgtttgcgtgtaactctccaggttttaatagtgggaagggcttaggagttaagcaagcgcaaaggaataggcgccagtgtgcatctatacaggcctgggcagaacgaagcgagaactcttcaaaggggggctaataatatacaccttcaaatttatgggccccaagttttccaagatgtggtaaaccctcccggttgaaaaaaacacacggtatccaacctccctttattattagcccttaatatgtattgccaagagcaagcgtaatcttcttcccaagagttggaacgttaaacga

SEQ ID NO: 488910 - DNA, 118 bp, Homo sapiens
gacagcattcaagattatgaaagtgttacaatgaccgcttcaagtactgcgaaaacctcaaaacgtagccgacttgacaaatatttgagttttacggcagatttaaaatccatctggc

SEQ ID NO: 488911 - DNA, 309 bp, Homo sapiens
ctgacacttgttgacccaaatagtactgtctcccagcatactccatgtaatcagatttgtgaagttctatttcatgctgtccaaccaagacatcaacattctacattacgagtagatttctcggatccagaggctttgagcacctatataggaggaagggcatctttgatgagattttcttggagactttgtttcttctagttcctttattgtagccctctggtatattttcagcattgtagcaggcaccccactcttccatcctattctgatttgaactcttgtaatcagtatgggcatcctcgcttc

SEQ ID NO: 488912 - DNA, 200 bp, Homo sapiens
actcttgagaaataagtaaaatactcctattttcagtatctgtagcacctgaaataggtctttgtatagccagaacaatgttattttgaagttagctttctttgtcaacagttttggcaataaaaatcttaagtattacacttgatattctactggggcccttcaaacttggttgggagaattcacccagatatctacat

SEQ ID NO: 488913 - DNA, 136 bp, Homo sapiens
ccttttcttcaccgattcaggtctcatgcagcccgtcaggaggaatgacagcagctcctgtagagtcatgctgctggtagcccagcaaatgggatgcaaaatggccaaccttgttctggaacacatgtggcaaaat

SEQ ID NO: 488914 - DNA, 363 bp, Homo sapiens
taaagatgtcatttcttccaaagattagatgcaattcctatcaaagagtcacagcatagatctgttctagatacagaaaagtgtatactaacaatttatctggaataggacacaaggaactagtaataaccagtatacaattttgtataagcgaaaataaaaggggctaatcagtcagtgtacctgacttccgagaagctctattatatagctaatagtgatcaggacaatatatgatcagctgggggacatacgcagtatcaatgacatacagtagaaaatgcaaaaagtgatgaacagatatgtccatgtgatttgtgagagaggtgcataatatcttcagtggtgaaccaataggctttt

SEQ ID NO: 488915 - DNA, 476 bp, Homo sapiens
ttctcctactgtatctagggagtggtggggactgtggcggacagaggaagcccatggcccagctaaagtggcggccactgctcagctctggttccttgtggccccttgttgtggggagggtgggcagcccaatgtttctctttatagagcagctggagagctgggttttatatcaaatctcccaatttccaaattcaatttataaaaaacatacgtggcgtgaaaaacaatcaaagactaaaaaactgccatgaaccagagaccagggggatacagcaacgagacgcagtggggtttgcttgattggatctcgggacggaaagaggacagaaatggaaaaactggtgaaatgtaaatgacctctggagtttagttgatagaaacataccagtgctggtttgttagtttgcaccatgcatcctggtgatggaagatgttaacaatggggaaatcagttgtaggatacagtagggaga

SEQ ID NO: 488916 - DNA, 298 bp, Homo sapiens
cagcacatctgcacttgtcagccacagacgcaagaggcttcagacgccagagagggacctgctggtactgggacaagtgcgagaactggatgaaataaaccatttctccctcctctgtctggaaacaagcctgtgatgggaatctgaagggctggatttattcctgggtttggctgctttaaacctgtggtccctctcaagcctcagtttccccacttgtcagaggagagtgttctctgccctgcagcactccctggatgataagatggtggctgttcggagtccccaaagaaaagtc

SEQ ID NO: 488917 - DNA, 141 bp, Homo sapiens
cgtagacgagttaagtcctcgtctgacgtgagaggtacgacgactaccatcgacagactaacggaccctatcttgggatacttcagaccccaaaaagccccccccttcccggaagtttacttagcccgaaccatcattaag

SEQ ID NO: 488918 - DNA, 398 bp, Homo sapiens
ctgatacccggtaagagcggtccatgtattgtccatttaattctcaaagtaaccctgtgagatggtctccatcccaaacttacagatgtgaaaataaatacaaacaagtcagataattttctcaaggccataaagacagtaagggttcaaatgagatttaaacataggtctcattgctcagtgggtaggtcttagttaaagtaaaacctcatggagtggagttcccgtcatggtgcagcgcaaatgaatccgactaggaaccatgaggttgcaggttccatccctggccttgctgagtgggttaaggatccggcgttgccatgagctgtggtgtaggtagcagacgcggctcagatctggctctgattagacccctaggctggcaacctccatatgcc

SEQ ID NO: 488919 - DNA, 258 bp, Homo sapiens
agggtgattatcatattcttctcaggagtacccagcaagagtttagcaaagaggttgtattcagtgagtaggggattcatgtagctctctaacaggcatctggattttgggtgctacagcggggggggggagaccaaaagagaaggatgttccacagtccttgggtgttatctcacggttggtggcctgaagaatccatcaactttttcagggtattcaaaaggtgatgaacaattgtgttaatattggcaagatcta

SEQ ID NO: 488920 - DNA, 1527 bp, Homo sapiens
gtctgtgggttgtgtgtgtgtgtggtgttgttctgtttgttttgtctgtcgtttgtacttttatatactcggatcggctggttgtgcttgtcggggcggggcctggctgttttgtgtgatctacttgtgtggacgactttggttggtgattgtcctgttcggggactcgatttcgcgggtggggttccgctgtctcccagggtggttttctctgtccgccggtgggggcccgtcccccctcgcgccaggagcttctcgcccttatggacgtttggcttttttgatgccggggggctccctcgggggttccccggtggtggtgatgttgtgtgcagacggtgctggttcttcgtgtgccttggtctgtgtgaccgccgcctcagggcttttctttgggggatctcctagagctcctcctaagagtcgttgtgtggcgcccctgtaaggttgagtgtcctggtgtcgtttggacctggggacaccttgggttttctgtttgatttccattgggcccgcgaggtatcccacccagtgccctgatgtgatggtggccccagttgggatatttgtggggtaaggaaccacccgtgggggaccctctttaaggaaccccccgctcttgggaattttaggggtcgtggaaaaatgttggtatttgggaatatagtgttgttttcccccgggaatttatgtgatatacctccgccgtggggagcctacccctcttgttcccgagggctttaactcttggattctcgtgtgtttgggcacaataaggccatgggcaccatattataggcttttggtgttgggcaccctctggggctgtgtctggcttctttttgttttcacagggaaaagcttgcgcccccacaaggataagtggtgcggacaccttgcggatataagatagtagatatatttatgtttggaaataggtttttgtgtgagaaatacccgcgagagttcgcacagatgctttggggatagatctcccagagaaccctagaataagactttttatttagagagagagtacattgggagacaccctttggaaaagacaccatatgtggttctgctgcccccatacaccagatgtgtactgtaggaagatatagtgtgaacttatagaatctctgaagagccagctcaagtgaatttagtgtggctgttttgaagagaatacaccaataatatatatagctggggccaagaaataggtgggcttgttgtgtgttgttggtgatccagtgccatgtttgtctgttcttttatatctcactgttaccattctcgttaaatgcgttcactggtacggtagagttatagagtctggtagcgtatatactgtccaaatgttgtgtttaaagagcaccaacgtggttaaaaatggtggggtagttgttgttaaaagccaattaatttgtaagagcttggttcccatagcccacataacttgcagactccccttttatgggtcatccatagggtcctatgccaatgtaaattatttgccagggtcct

SEQ ID NO: 488921 - DNA, 189 bp, Homo sapiens
  misc_feature (70)..(70): n is a, c, g, or t
  misc_feature (129)..(129): n is a, c, g, or t
tctcactctgttacccatgctggagtgcagtggcacaatcttggctcagagcaacctctgcctcccaggntcaagcaatcctcccacttcagtctaagtagctgggactacaggcacgtgccaccaggnccagctaatttttgtgttttgttagagatgaggttttgcccatgtttgcccagggtcgtt

SEQ ID NO: 488922 - DNA, 387 bp, Homo sapiens
  misc_feature (158)..(158): n is a, c, g, or t
  misc_feature (171)..(171): n is a, c, g, or t
  misc_feature (180)..(180): n is a, c, g, or t
  misc_feature (194)..(194): n is a, c, g, or t
  misc_feature (201)..(201): n is a, c, g, or t
  misc_feature (208)..(208): n is a, c, g, or t
  misc_feature (213)..(213): n is a, c, g, or t
  misc_feature (223)..(223): n is a, c, g, or t
  misc_feature (240)..(240): n is a, c, g, or t
accaaagtcaactgcacgtgttttatatttttaagagatcgtaggcaattagagatcgaagcctcctatctccacatctctgaagaagttgaggggtgggggagagaatgacttctgccttcatctgcagtaacggggggacctatatgaccttttcncccagcctttganaaacagttntaaggtgggttggnaaatttnccaaaancctgnacttcttttnccacttcaccaaccagnactgaaaaccacgcgtgaatttgggggatttttcagtggaacccttgcccccaaatgtcgaccagcccccaaatgtcgaagaattttcttcttgccaattttgttgtttaaaaaaaaaattcagggaaaattaaaaaactggaactc

SEQ ID NO: 488923 - DNA, 1116 bp, Homo sapiens
  misc_feature (119)..(119): n is a, c, g, or t
  misc_feature (131)..(132): n is a, c, g, or t
  misc_feature (152)..(152): n is a, c, g, or t
  misc_feature (155)..(155): n is a, c, g, or t
  misc_feature (162)..(162): n is a, c, g, or t
  misc_feature (169)..(170): n is a, c, g, or t
  misc_feature (172)..(172): n is a, c, g, or t
  misc_feature (182)..(182): n is a, c, g, or t
  misc_feature (203)..(203): n is a, c, g, or t
  misc_feature (348)..(348): n is a, c, g, or t
  misc_feature (354)..(354): n is a, c, g, or t
  misc_feature (364)..(364): n is a, c, g, or t
  misc_feature (366)..(366): n is a, c, g, or t
  misc_feature (381)..(381): n is a, c, g, or t
  misc_feature (383)..(383): n is a, c, g, or t
  misc_feature (389)..(389): n is a, c, g, or t
  misc_feature (404)..(405): n is a, c, g, or t
  misc_feature (410)..(411): n is a, c, g, or t
  misc_feature (413)..(413): n is a, c, g, or t
  misc_feature (415)..(415): n is a, c, g, or t
  misc_feature (420)..(420): n is a, c, g, or t
  misc_feature (430)..(431): n is a, c, g, or t
  misc_feature (439)..(440): n is a, c, g, or t
  misc_feature (444)..(444): n is a, c, g, or t
  misc_feature (446)..(446): n is a, c, g, or t
  misc_feature (451)..(451): n is a, c, g, or t
  misc_feature (454)..(454): n is a, c, g, or t
  misc_feature (481)..(482): n is a, c, g, or t
  misc_feature (492)..(492): n is a, c, g, or t
tagacaggactagtgcataaaattaatcttgcgctcgagaatatatatcgggactatcgctgagatttgttaaatctcttacatcggtgtgttctacagattctgcctcttagctgcanaagggaatgganngtcttattaaaagcctccanatnttttcanactcttnnanaatgtatgtnaatgcatactaatcatatctnatgtgaaagagttttaaagcagttgccattattcaaatacagagaaatagccacagggctagtgtttttcaaatgcattttaaagaacatggggatttttttttgtagttgtcagttcactgaccaaaaaaaaaaaaaaattcanaattanttggatcggngnaaccccaaattctcnantactcnaaaaagcggggaggnnaaccnncnanggccnggggcctacnnagctggcnntctncngctancgnaggggccaggggcggccatcagccatnncccaaaacanaagggcctgccctgtccggccagtggatggtcctgggttttacacctatctggaaaatgtcttttcccccagggtggtggaggctttggcagcgcatgtggtcgttgtcgtgtggtgtcaagagccagttaaagtccttcattttggtcagaccagaatgtggggacgctcacacagctggcattgaggaggggcacgcgcgtgcatttaagccatgtcggccactgggagggggctctggttggcccctcgggcgtcaaataccctggtgagtacacggcctaagcacagcagaaggtcttttgggcgtatcaagagaaacgtggaaacccctttggcgcggggggaggggtgaacttctacaaaataggacaaatttccctctctgcaaacttgaacagggggttgaacaactaccagcgaattgccggctacaatattaaagctagtgtctgaaaaaaaaaacgcggtgattaactaatcttttgcaaaagaaagtttcttgtgcgcctcagaacacaaaacgctggcagacagttttctcaatataaatgtaggagaaagcctggtgggggggggtacccaagttccccacgctgttgccttggtgttccacatatcagc

SEQ ID NO: 488924 - DNA, 1244 bp, Homo sapiens
  misc_feature (119)..(119): n is a, c, g, or t
  misc_feature (131)..(132): n is a, c, g, or t
  misc_feature (152)..(152): n is a, c, g, or t
  misc_feature (155)..(155): n is a, c, g, or t
  misc_feature (162)..(162): n is a, c, g, or t
  misc_feature (169)..(170): n is a, c, g, or t
  misc_feature (172)..(172): n is a, c, g, or t
  misc_feature (182)..(182): n is a, c, g, or t
  misc_feature (203)..(203): n is a, c, g, or t
  misc_feature (476)..(476): n is a, c, g, or t
  misc_feature (482)..(482): n is a, c, g, or t
  misc_feature (492)..(492): n is a, c, g, or t
  misc_feature (494)..(494): n is a, c, g, or t
  misc_feature (509)..(509): n is a, c, g, or t
  misc_feature (511)..(511): n is a, c, g, or t
  misc_feature (517)..(517): n is a, c, g, or t
  misc_feature (532)..(533): n is a, c, g, or t
  misc_feature (538)..(539): n is a, c, g, or t
  misc_feature (541)..(541): n is a, c, g, or t
  misc_feature (543)..(543): n is a, c, g, or t
  misc_feature (548)..(548): n is a, c, g, or t
  misc_feature (558)..(559): n is a, c, g, or t
  misc_feature (567)..(568): n is a, c, g, or t
  misc_feature (572)..(572): n is a, c, g, or t
  misc_feature (574)..(574): n is a, c, g, or t
  misc_feature (579)..(579): n is a, c, g, or t
  misc_feature (582)..(582): n is a, c, g, or t
  misc_feature (609)..(610): n is a, c, g, or t
  misc_feature (620)..(620): n is a, c, g, or t
tagacaggactagtgcataaaattaatcttgcgctcgagaatatatatcgggactatcgctgagatttgttaaatctcttacatcggtgtgttctacagattctgcctcttagctgcanaagggaatgganngtcttattaaaagcctccanatnttttcanactcttnnanaatgtatgtnaatgcatactaatcatatctnatgtgaaagagtttgaaagtatatagagagcaaaaactggcaggatcgtaagtgaaggtgactagtaatctaattaaaatcacctgcagctaagcatgattgaccctgccagaggaaaacatgcctatttgaccattccctttaaagcagttgccattattcaaatacagagaaatagccacagggctagtgtttttcaaatgcattttaaagaacatggggatttttttttgtagttgtcagttcactgaccaaaaaaaaaaaaaaattcanaattanttggatcggngnaaccccaaattctcnantactcnaaaaagcggggaggnnaaccnncnanggccnggggcctacnnagctggcnntctncngctancgnaggggccaggggcggccatcagccatnncccaaaacanaagggcctgccctgtccggccagtggatggtcctgggttttacacctatctggaaaatgtcttttcccccagggtggtggaggctttggcagcgcatgtggtcgttgtcgtgtggtgtcaagagccagttaaagtccttcattttggtcagaccagaatgtggggacgctcacacagctggcattgaggaggggcacgcgcgtgcatttaagccatgtcggccactgggagggggctctggttggcccctcgggcgtcaaataccctggtgagtacacggcctaagcacagcagaaggtcttttgggcgtatcaagagaaacgtggaaacccctttggcgcggggggaggggtgaacttctacaaaataggacaaatttccctctctgcaaacttgaacagggggttgaacaactaccagcgaattgccggctacaatattaaagctagtgtctgaaaaaaaaaacgcggtgattaactaatcttttgcaaaagaaagtttcttgtgcgcctcagaacacaaaacgctggcagacagttttctcaatataaatgtaggagaaagcctggtgggggggggtacccaagttccccacgctgttgccttggtgttccacatatcagc

SEQ ID NO: 488925 - DNA, 250 bp, Homo sapiens
cgtcagggagtagccgctacgaccagccgttagtgacagccgtacttatttcgcgatgattctaaagaaatattgcggcgaatacttctgtaatgatccgctcttcgctaaacatgagcagtccagccaacagataattccttctattactgctgtttcttagctttccccatgctaccgattttgtattacacatattctttcgtttcaacgcccattccacggatgattcggtgtctaaatgccatca

SEQ ID NO: 488926 - DNA, 246 bp, Homo sapiens
tgatacttacatcctgatgacttgtaacctgaaatcttgacatttcagcaacattaagtaggattatattcaattttcatatgcttacatttttcattgggcagtaaagctgagaacacatcatcctttcacactgtacgggctaatgatttccattgtgaaatagccccaagtatattattaaccttttgggtagctgaagtttctgatgcctgaaatgtgtatctactgaatggcgttagttat

SEQ ID NO: 488927 - DNA, 449 bp, Homo sapiens
tctagaggatcgcccgctgtacagttgcggggggagacgcccccgcgttctcgtgtgcacccgctcggcccttgcactttgctttaactgcctgggcgccctctggctccgttacttcgggagcggtgccgcctccgtgagctcctggtgtccgcccactggggaccggggacgctgctggggcgcacgggttggagaacgcgactcagcctgagcccctctcacggttggggctagggggtgagcgggggcgtttggcaagcagctttccggcgaggactgtgccacccgtcaggctgacgctggtatgcgtggggccaggggtgtggccggggctttctgaataggtgggaggtgggcaggatttcagtccagtgaggacaccggccacctcccctttcgggcgcaattggtagggggggggggtacggagctcgaatccggatcat

SEQ ID NO: 488928 - DNA, 329 bp, Homo sapiens
tgccactcactgggcactgcgaaggccatgactgaagaattaacagctttccctcaggcgcaggaccaggtgcagggtcgagtctttctggatggtgtagtcagaaagagcgcggccatcttccagctgcttgcctgcaaagatgagcctctgctggacaggagggatgccttccttatcttgaatctggaactagacatattggatgttgctactgggctccactttcagagtgccggtcttgccgagtgagggtcttcacgaagatctgcataccacctctcagacgcaggaccagatgcaggttctacttcttctggatgttgtag

SEQ ID NO: 488929 - DNA, 112 bp, Homo sapiens
gttatcccactatacagtcattgacagttgtgaaagtctattttatgacctgtaaatctatttctacagaatataagaaacatcactgacctgatctgtacttcctcctcct

SEQ ID NO: 488930 - DNA, 240 bp, Homo sapiens
acccaacatcatgtaagcgctgtaacggtgagtactcgagcaggagatctactttaactggtctctgcgcatgctcctgcggcagccactcgggcttctggttatgtctcctgggggaccacctgcatgagcttctgacacaggacggccgtggagaagatgccctggaggagccacttgctcttgtttgtccaccagaccctgaagaagtagacttgcagcccgctgaagatgttggga

SEQ ID NO: 488931 - DNA, 524 bp, Homo sapiens
  misc_feature (49)..(49): n is a, c, g, or t
  misc_feature (105)..(105): n is a, c, g, or t
  misc_feature (118)..(118): n is a, c, g, or t
  misc_feature (131)..(131): n is a, c, g, or t
  misc_feature (137)..(137): n is a, c, g, or t
  misc_feature (139)..(139): n is a, c, g, or t
  misc_feature (141)..(141): n is a, c, g, or t
  misc_feature (145)..(146): n is a, c, g, or t
  misc_feature (299)..(300): n is a, c, g, or t
  misc_feature (308)..(308): n is a, c, g, or t
  misc_feature (312)..(312): n is a, c, g, or t
  misc_feature (314)..(316): n is a, c, g, or t
  misc_feature (321)..(321): n is a, c, g, or t
  misc_feature (335)..(335): n is a, c, g, or t
  misc_feature (338)..(338): n is a, c, g, or t
  misc_feature (352)..(352): n is a, c, g, or t
  misc_feature (355)..(355): n is a, c, g, or t
  misc_feature (358)..(358): n is a, c, g, or t
  misc_feature (369)..(369): n is a, c, g, or t
  misc_feature (375)..(375): n is a, c, g, or t
  misc_feature (378)..(380): n is a, c, g, or t
  misc_feature (404)..(404): n is a, c, g, or t
  misc_feature (407)..(407): n is a, c, g, or t
  misc_feature (429)..(429): n is a, c, g, or t
  misc_feature (457)..(457): n is a, c, g, or t
ggggggggggggggttggggggggcttgggggggggggtgggggggggngggggggtgtgtggcctcctgtagcagggcgctcttaacagactcaggtgtaaggnttgggtcccttgntacatcacaaatnagtttnangngggnnttcagtaagaccacaagtctgcaggaaactctgggccaagtatgttgcatgagaagttttagggtttccaatatcttcagtctagcttcctcctcaggtccatcataaacctccagataaccaatgatgactctctccagcctctttaagtgnnggggagtnaggntnnncaacntgttcacgaaagcnggnaggtttcttgcgtnggnggngggtaaaagangggggnggnnngggtccatgtgggtgggggtgagnggnagacctcatcaaaatgggtggngggtggggctccatctcctttccagtgnggggttttctccaggatggggaataaatccagcagacacaggagcacagcctgaatgaggtggtgct

SEQ ID NO: 488932 - DNA, 1062 bp, Homo sapiens
  misc_feature (392)..(392): n is a, c, g, or t
gatccttcgtcgcgcgatagtagtccacacaccggaggaaaggtcaagggctgctgtatggtagtctactatagctgaagctagtcttgatttgtcttactccgcgaagcctggcataggaaatggcatagtctcgaatagcatgctgcaagcttggaccaaagctgaggcacagagagatccattgaatccttagcactaaccaagtataacgaccgagaagtggtacttttggtaggagacacgcgagtgccgtgccgggacttcctgcgtaagacctagactcgccatgctcatgtataccagcaacagaggctttaggtacattctcccaaggagtgtgctggatgtttagcagactatagattgcctcgacagagagaggtgcgtgncagctcacctgagcgctctcgtgctgactgttcccgtttgctgccagcgtgcaggagttcactgctgcctgatataccacgaatgcctccctgtaaccggaaacgcgcgatcaatggactcttcgtttcgcaaaaggcaaagcgtaggctatcctccagcttggtccgactgggaccgggctctacctagtcccatattggagaagggactgctagtgcgttggctccaaatgagggagacgttggggcaaacgcgggtgctgagtgcgctcgcttctgtgtggtaggccattctccccaggaggaggcctcgatccagggcgctttgttccctcccgttggaacagggttgtcgcccgaagattttgcacacttgcactcttcagttgtctcgacctgaggtgcgacgttgtaaaagcccaaccaatgtttgttgaatacccccaattctgtaatctcgcctggtgttaggccacctgtaggtggatagcatggcacagtcctataccttggacagtgtctccgacgtcgaaagcacccattgtgggggttcccgagaccggtttgttcggtccttttctcaagacaccgtgtgttagcaagagggcgaccctacgaaatgttggcagaggccccatatgcgcccaagtggcgtgaggctgtaagggga

SEQ ID NO: 488933 - DNA, 252 bp, Homo sapiens
tccgacggtatcactgttacaggtcaccggtggcatggctctgcgctagcagctggcacgagggcgtgctcggaagagcgctccggccaccggcggttcaagaagccccatcgcgggtcggcctggtacagtggctctccgcgagattctgccgctaccagaagtccaccgagctgctgatcagaacgctgccttttcagccgtcgggatgcgtgacgactcgcgcaggaccttcaacgacccgaccttgcg

SEQ ID NO: 488934 - DNA, 578 bp, Homo sapiens
  misc_feature (540)..(540): n is a, c, g, or t
tgcactctcttctctgagcttcccggaccccaacatccctctccagggacagcctgttgagaaatcttcgtggagtggtggaccagaggcgaggagtttaaaagttggggcttgaaagacaggaagatacgatggcttcctcgtctggcaacgacgatgatctcactatccccagagctgctataaataagatgatcaaaagagactcttcctaatgtccgggtggccaacgattgcccgagagctggtagtgaactgctgcacggaattcattcaccttatatcttctgaagccaacgagatttgtaacaagtcagaaaagaagacaatttcaccagagcatgttatacaagcactggaaagtttgggctttggctcttacatcagtgaagtaaaagaagtcttacaagaatgcaagacagtagcattaaaaagaagaaaggccagttctcgtttggaaaacctcggcattcctgaagagggattattgagacagcacagggattatttgccaaagctagcagccaccagcagattggncccacaggaatggcttccaatgcagcagcagctccaac

SEQ ID NO: 488935 - DNA, 416 bp, Homo sapiens
gttcccagatgtgtagaggaacgtcatatgatagtcgggatggggatgatatacgaatctataaattgacctaggacagtctggccatgcatgatatgattcttcctacccgtgaggatggaatgtccctccatttgtttgtatcctcttttatttcattgagtagtggtttgtagttctccttgaagaggtccttcacgtcccatgtaagctggattcctaggtattttattctcttagaagcaatagtgaacgggagttcactcatgatttggctctctgtttgcctgttattggtgtatacagaatgcttgtgatttttgcacattgattttgtatactgagactttgctgaagttgcttatcagcttaaggagattatgggctgagacaatggggttttctagatatactat

SEQ ID NO: 488936 - DNA, 424 bp, Homo sapiens
ttcacgtgcaccacgtcatagatcctagggtgcatctctcatgtgcgtgatcatcacgcaaatctgcactaggttatcaccgctcagtcactcatacacaggttgctagtgtcgaacttgataataatcgataatcttgccattctctaaatcaatctgaatggtatcattcaccttgactgacgggatcggggatagcggattggttgcgggcatcatgagtcaccagatgatcggattccttgtgtgcccatcaaagatctttctcactttgcacaacttgtacttgacctcctcaggttgtatacgatgtacagcaaaatgcgaccctgtgtgtcttacattttactgtttttatctcccgtcttggtcatgctgatgacatccaatgaatccagcaggggtaggttatttcagttcggac

SEQ ID NO: 488937 - DNA, 183 bp, Homo sapiens
  misc_feature (11)..(11): n is a, c, g, or t
  misc_feature (30)..(30): n is a, c, g, or t
  misc_feature (83)..(83): n is a, c, g, or t
  misc_feature (116)..(116): n is a, c, g, or t
  misc_feature (124)..(124): n is a, c, g, or t
  misc_feature (132)..(132): n is a, c, g, or t
  misc_feature (170)..(170): n is a, c, g, or t
tctaatagttntgtaacagtatcgctcatngtggtcttattttgatgtgaaacatcttttcatgtgcttttcgtcatcctttntagtaaaatatctcttcctatctttcgtctatnctctaatngaatattnttgttgttttactgtatgagttatttagagttcattanatactctagatat

SEQ ID NO: 488938 - DNA, 1222 bp, Homo sapiens
cgtggtgcagccatcaatgaacaaaggagagctgagctgccatcgcagggctgaactctgcctccatccatccaacccgccctgaccgaagtggaccctgacaccatcctgaaaggcactcttcaagtcctcaggggccatctggtgaccacgaccagcccaccagacattcgagaaatcgacagctatgtgagccagtggtgcagctcgcaggcatgccagcacagttgtggggccagcagtgcagggttggctctagtttcccccaaggccaaagcttcatgcacctaatggcgcccatcggcactggcagcaccccgtgatctgctggcgcaagggtatgccacagaggcatcacaagcagctatcactcgactgggcatagggcaccaccaggccgttcacgatggttgctactgatggctatcctttgccccacactgattggcagtccatatacatacgattcgataacagggattttaaacacaggtaagaacacataggagttaaaggatacttggctaacaccaatattccaactacattacaacattccgggacggcacaacagggggctaaaggcgcccatatagcagatggttacagtatatccaggggatagcataggattggcccataccccccactgcaccggccactctaaggacagcacccacaacaggaccttgaacgtcatagtcgattttacttccacagggggagacaccacgtggggatcaacccaaactactgggaaaaacactcactccttccataggagaagagatgtaggacaatatcatccatgtggagttggacgacaccccccaaatatggcggaagaccattgagcaacacacacggatagaggacgtggccaatggcatcccattcgacaaggtgggaaaccacacccgatgggagacaattacacaaacatccacaaaccgagggggtagaacccacgtaaacaggggtaggggaccaatgggaccaacttatataatctccccatttattaacgggcatgaagatatagaataacttcttcaccaggggccttaacatcacgacgcacaaaaacaaccaaaaaccgtcagggggaaacgacgggcgcgcaaacatcgtcgagacgacacaggacacaccgacgacagggaaggcgattgacgcatccccccatttcggacaacacgtgccgtggagacaagtcacccca

SEQ ID NO: 488939 - DNA, 308 bp, Homo sapiens
tgatcgagctcggtccttctttgatcaccaccacagagaccaccttcacacagatcctccatagcttgagttctgccatcatcaccactgagaccaggtcacacagtcctcccatctttacttcttcgatcaccaccacagagaccacctcacacagtcctcctagcttcacttctttgatcaccaccaccgagaccacctcacggagtctcgctgtgtttcccagagtgcttcgggagtccttctctagatctagctgtgcgcgtgtgcactctgttcacatgtgcgctctctgttttcacagtctc

SEQ ID NO: 488940 - DNA, 1102 bp, Homo sapiens
tgctgctccagcgcggtcttatcggagttgcgcacaaaaattgaccccactattgtgccgggctgacagaatggtggcggcaagtacttggtgcagtcggagctttacctgagatattcaccgaatcggaaatttcctactatcctgcttagacggcttctagcgtgtacgcactgaaggagacaagacacagcagcaaaggttcacaagctgtctaagaatgatcgtgctcatggctgaaccataggatccctgatcaacacggcgggacgagttagctgctgtcaaggccgacttcggctacaaacttgttcttgaccaactccagctgtgcacacgacgcgtacgtgagacccaaattgccctctagccgacagagctctcgacacaccactggcgcttctacttgcgcttgggcgtcacgataacaacgcggcagtgacaatcacagcctaacagttcccgatgcatgcactgacaagcaacttacgcagtctcaagacttaattcaccatttctgcgcacttgcgcactcttcgcgacaaccgcttcgcgaatttccctccgtctaaacgcacacccaaatggcggcttccgtctctctccaccactgcacagtcatcttgcggtgcaactacgcactttccatcaagctcttccgttatacccatttacgcttccgtgttccacacggcttaacgcgcttcactctacctcttctactgtagtctgtccctcgcctattccctatgcgagtatactaaacacatcctttcggctcacaatccctctctctcatctatctcacccccgtctctgtacacctcttagtagtctcaggcactaaatctaattctacactcacataactggtctcacaatcctactatcaccttcattaatcctcacccaaacatcttagtaaccattaaatacttcattctacccactctctagtataatcacaccactctgtcctcatacatctatatatcatatcacaaaaatcactataataacttctagactcaatcaaaagacactcatatacaccatcgattacatcctcacaattatttttattaaatctacatacagaacg

SEQ ID NO: 488941 - DNA, 735 bp, Homo sapiens
  misc_feature (323)..(323): n is a, c, g, or t
attggaagatgtgctgaggttcaggacgtagtaggagtgcctcggtctgcagtatctgtccccagtctgcgatggaagaggctgtccccgagtagacagccagcccccactgtcctggcccaccctggtctcccagcttgaacatctctcattaaactgaaaaggcagagtttgtcaccttgaatcattttgccagttcccctggcttttagggccactagcatgttctgagtcctcgatgccgccctgtgagagcaggtcgctgcgtcgcagcagtgcagacagggccacccttctctcgctcaccaatctcccctgcgggntcttacggagggtgattgaagccagcaaacccacggccagtgccggatggagcctcagggctttgcgggtattgggcttgtggcccttgttccgggacagattgagatggtgctgttatagaagcaactgtctcgaatttccccaagagcaagggcttgggtgcagatcgcctgtttaggagatgatcacaggcctaagggaatcgggagagtgatgctgagaggagtaagccccatgattctgggctgctgtacactcagggctccgtcccacctctgaggagcctgcccgaggcctccaggagtgtgcctgggaagggccaaaggcggggctctgctcgcaggggttgagggctccccagggtgttaactccctgtgctttgcttggcagagcttgtgccgcacaatgtg

SEQ ID NO: 488942 - DNA, 367 bp, Homo sapiens
  misc_feature (1)..(1): n is a, c, g, or t
ncttgaggatccccttacgaaaaggctgggcacggtggctcatgcctataatcccctatttttggctcatgcctataaacattttgggaggctgaggtgtgaagatcatttgaggtcaggcgcttgagagcagcctgggcaaaatagtgagaccctgtttctataaacaaacaaacaaacaaacaaacaacatgctgggtgtggtggctcatgcctgttatcccagcactttgggaggccaaggcaggcagatcacctgaagtcaggagttcaagaccagcctaacatggagaaaccccatctctactaaaaatacaaaattagctgggcgtgatggtgcatgcctgtaatcccagctactcaggag

SEQ ID NO: 488943 - DNA, 271 bp, Homo sapiens
cagagacaaaatctttttatctgaggaatttaaaagggagcaaagaccacctggtgactatcaggccatgcagaggcaaaatgccttatttggggaaaattaaaagtaattagactttcctattatctaaagcaggcatctggttccagatttcttttccccgaaaaaaaccttagaagtaactaaaatttctgtacatctccggaatgccatgctgaaactcactgcaaccccacggtcccgctttaaggtccataaatatccctaagga

SEQ ID NO: 488944 - DNA, 128 bp, Homo sapiens
  misc_feature (62)..(62): n is a, c, g, or t
cgaagtgcaatggctggggtaattgtcacagtagcaacaggaaatcagtacaagccctgganctggccattcttcatgtcccttcccaagctccaagcccacatgggcacttgccaagatcagagctc

SEQ ID NO: 488945 - DNA, 891 bp, Homo sapiens
aaacagtatgcaaaaccctgttgaaaaagaacaatatgaccagcactttgcgaggctgaggtgggtggatcacttgatgacaggaattcaagaccagacctggccaacatggcgaaaccccgtctctactaaacaataaaaaaaattagccaggtgtggtggtgggcacctgtaatcacagctacttgggagtctgagacaggagaatcactcgaactcaggagtcagaagttgcagtgagccaagatcgcgccactgcactccagcctgggccgacacagagagacttgtggcgccgggaggagggaacgatatgggaagattgctctaccaacgtataaacactttttcataaagccacagtcaattcaggatagggtctctatctgagacaagacggagcaacaaagcaagactggccacatcacttgaattcataaacagtcccattcgtatatctatatatatatatatcatagtgaggtgactccgagacgttgtgcagatcacgtagtacatatgcaccataattggaaaaaaggtaaagcacgaaacagatggtttggatggagaaaagctgctgcctcctaataattcggaggaccttaacgggactaataaagtattcaaatactctgttgtttctgcaacaggatgatagcaagccatagtcctcagaatagataaaacgaacatcatggccttccccgcagtggcactaactcttgatcaggccaagacttccttttggaagatatatagacaagtatcatctaactctacgagagtttcatgtggcaactgtacacacaatatcataaacacacaaactgtatcgcaacagcatcaaatagtttaacagatctggtgcgcgacgcagatataatcaag

SEQ ID NO: 488946 - DNA, 290 bp, Homo sapiens
gggtgatctacaggatctccagtcttgctcccatcagatcagtgctcttgttgcttcctacatacacacacttttagaaaacaggtgccacttttaggcagggcacggtggctgatgcctgcaatcccagcaccttgggaggctgaagcaggaggatcacttgagtccaggagttcaccagcctgggcaacagtgggaccttgtctctacaaaaaataaacaaaattagctgggcatggtggcgggcacctgtaattccagctactcaggaggctgatgggagaagatgg

SEQ ID NO: 488947 - DNA, 519 bp, Homo sapiens
  misc_feature (2)..(2): n is a, c, g, or t
  misc_feature (72)..(73): n is a, c, g, or t
  misc_feature (100)..(100): n is a, c, g, or t
  misc_feature (127)..(127): n is a, c, g, or t
  misc_feature (135)..(135): n is a, c, g, or t
  misc_feature (141)..(141): n is a, c, g, or t
  misc_feature (147)..(148): n is a, c, g, or t
  misc_feature (154)..(154): n is a, c, g, or t
  misc_feature (157)..(158): n is a, c, g, or t
  misc_feature (160)..(160): n is a, c, g, or t
  misc_feature (163)..(163): n is a, c, g, or t
  misc_feature (167)..(168): n is a, c, g, or t
  misc_feature (170)..(170): n is a, c, g, or t
  misc_feature (175)..(175): n is a, c, g, or t
  misc_feature (185)..(186): n is a, c, g, or t
  misc_feature (190)..(190): n is a, c, g, or t
  misc_feature (193)..(193): n is a, c, g, or t
  misc_feature (198)..(199): n is a, c, g, or t
  misc_feature (201)..(201): n is a, c, g, or t
  misc_feature (214)..(214): n is a, c, g, or t
  misc_feature (216)..(216): n is a, c, g, or t
  misc_feature (218)..(218): n is a, c, g, or t
  misc_feature (226)..(226): n is a, c, g, or t
  misc_feature (228)..(228): n is a, c, g, or t
  misc_feature (231)..(231): n is a, c, g, or t
  misc_feature (242)..(242): n is a, c, g, or t
  misc_feature (245)..(245): n is a, c, g, or t
  misc_feature (250)..(250): n is a, c, g, or t
  misc_feature (258)..(258): n is a, c, g, or t
  misc_feature (264)..(264): n is a, c, g, or t
  misc_feature (267)..(267): n is a, c, g, or t
  misc_feature (270)..(270): n is a, c, g, or t
  misc_feature (276)..(276): n is a, c, g, or t
  misc_feature (280)..(280): n is a, c, g, or t
  misc_feature (282)..(282): n is a, c, g, or t
  misc_feature (288)..(288): n is a, c, g, or t
  misc_feature (294)..(294): n is a, c, g, or t
  misc_feature (301)..(301): n is a, c, g, or t
  misc_feature (304)..(304): n is a, c, g, or t
  misc_feature (307)..(307): n is a, c, g, or t
  misc_feature (321)..(321): n is a, c, g, or t
  misc_feature (330)..(330): n is a, c, g, or t
  misc_feature (342)..(343): n is a, c, g, or t
  misc_feature (349)..(349): n is a, c, g, or t
  misc_feature (406)..(406): n is a, c, g, or t
  misc_feature (413)..(413): n is a, c, g, or t
  misc_feature (447)..(447): n is a, c, g, or t
  misc_feature (518)..(518): n is a, c, g, or t
tntcttccctgggcggccccggccccggcctcgccccccatcccgggctgcccctctgggcccccgcctggnntgggctccctgggtcttttcctttttnttggggaacttctggtcacaaaggcgncccctgcntcgttncttttnnctccgnttnngnttncgcnntngtgtnttggctagcnntttnttnttggnntnggggtactggtcntntntgggcgcntngcnctccgcttggntgnttttntcgttgtnttcttnttnttntttttntttntntttttncttttnctggttngtngtnttttttgggtttcntgtggcttntttttttttctnncgtttngttctttcttttgctctcctggttcttctttctttgggttttgttgttctttttgcnctgttcnttctgggcctgttgggttgcctctgcgccttctnccgcagcttcttctccttggcttcccggctggcctgccgctcctcctccgtcttgctccccaaactgtggna

SEQ ID NO: 488948 - DNA, 115 bp, Homo sapiens
ggcctaggatgttgaaaaaaactatgggtttttcccccttttggccctttccctttttaggaaggtttttttttaagggccagggcccccccaataaaggaatgttttttcttta

SEQ ID NO: 488949 - DNA, 113 bp, Homo sapiens
tgagctggatacgcgttgtgcacagattgcctcatgatctcgtaaggattaagtgactcattcaattacggtctcgaaagatctgtattgtatttttcgcactactcccgggt

SEQ ID NO: 488950 - DNA, 569 bp, Homo sapiens
  misc_feature (531)..(531): n is a, c, g, or t
  misc_feature (543)..(543): n is a, c, g, or t
ggtggagagggggtctcaccaggtggccaggctggtctcgaactccttgacctcaggtggtccaccggtctgggcctcgtagagggtggggattacaggcatgagccaccacgctcggcccagtccagactttttaactaccgggccccactgcagacacagttccctctagtccttcccagagttacaagaagagaactccagtagccttattcggtcagggacgagtggtttaccccaggataaggtaggatatcataaattcttcttcaaaggttttagccggtaattggttaagtacatggagttcggagatcctctccaaagaaccaaggtatcagtatgttcagctcaccggtgcttggttcttcattttaacttttaatttcctcattctttatgtctcctggcccctagtttcagtaaacaatcccctcctagcctcggtcaccggctcggaccggagtcacctttagtcaccgggtccgtaaccatcttgccggtctaaatttctcaccccaccagtctggnttatacccctgntctctttaaaatacgcagtcagaatt

SEQ ID NO: 488951 - DNA, 194 bp, Homo sapiens
catgaccaggcaaacacgtcaatgctacttattcataaggcccagacacatagagttcctctccaaagcctttcctgaaaccctgacaactgactgctcactgacctcttctatagcgtgcatgtgtgctgggccttatgaattagtaggcatttacgtggttcggctgagtcagtggcggacccggcgctgat

SEQ ID NO: 488952 - DNA, 353 bp, Homo sapiens
ccttaagacagagggatagccgagagtgtcgagcagacagaggacaaaagagcagcgagtcaggctgatcggggcgatctacccaaagaggggacagcgatcaaagtgaagcgaagggcgggcagtcctggtggggctccagggtgcatcccagttgtgccacccatgccttcatcctgtgctaggcaggcggggagaggaaagcgcagactgcacggtcccgggcacgtcctcggcaggcagtggccttgcaattggccggccctactcaatgcactccatgacatgtatctgcagggtgtccatatcaggggcctgatactggcacttgggacagcagaagtcaggtggct

SEQ ID NO: 488953 - DNA, 105 bp, Homo sapiens
gctgactagaggatcccgggctagggcatttttaatcttagagcgaaagctataatcactgcgccgtcatacagggatggcatggtaggttatagatagttgggt

SEQ ID NO: 488954 - DNA, 588 bp, Homo sapiens
tcaatgtgaagacaacaaagatgaggaacttcatgactgtccactttcacttaatgaatagtaaatatatcttctctttcttacaatgttcttaatagcattttttctctagcttactttattgtaagaataaagtatataataatataacatacaaaaaaaaaaaaaaaaaaaaaaaaaaaaaaaaaaaaaaaaaaaaaaaaaaaaaaaaaaaaaaaaaaaaaaaaaaaaaaaaaaaaaaaaaaaaaaaaaaaaagaagaaaaaaaaaaaaaaaaaaggagaaaaaaaaaaaagggggggaaaaagaaaaacgaaggaaaaaaaagggaggaaaagggaaaaacaacggggaagagaccccccccaccgcccaggccacacagagaggcccaaccccccgccccgggcccccccaaaagccgcgaaaaccgagcaaagaccgcggcaacaaccccgccccacgccccacccgcacccaaacggcacgacacccccaaaaaccccccgaacacccacaaaacgccccgcaacagcggcacccccccgcccacccacggccacaacgggcccttacaacgccccccccc

SEQ ID NO: 488955 - DNA, 330 bp, Homo sapiens
  misc_feature (21)..(21): n is a, c, g, or t
  misc_feature (64)..(64): n is a, c, g, or t
  misc_feature (112)..(112): n is a, c, g, or t
tgtgggtatcatcagatacangaagggtcccagcgttggggagagccccaagttgagaacagtnagtgaacaattgttgtactgaaccacttgttacgatactgctgatcanaaacaacctgtgtgtaatatgttttcctcctacacacgtagcacccttcagcaggaccctataaaactttcctccagcccttgcctctttgcaggtagccccttctctgctgagctgcccactgcaacatattttcacaatttctctaataaatctgcccttctttacctacaactatcttggtaaatggctttaccacctgcaaaactgaccctagg

SEQ ID NO: 488956 - DNA, 578 bp, Homo sapiens
cgtaagccagtataatacgataaaacaaaaggtacttgtaataatagtcatataaaatcgctatggcttgcatttagaaaccaagacacaaataaagatataccagcagattgtgtcttttgagcagctgaaaccttcagcagcttccaaagattagtctcttcactgtagctgctttgggtggtagagttgccatcctttcagtattttattttacaatgtaaatagtatttcatgtatggaacagaagcctgctatgtttctttgctaaaaaaaatttaaatctaaactaatgatatagtgttacaggcaaattagtgatgtttcatactactacattactggattattttagaaacaaagataaaaaaaccttactgagcccacttcatgaacgtaaattatttaaagtacacgacttcatagagtgctttcgggcctgggagatgtaatgtggagtcaacgaataactttttaaacatttattttcagagacttatttgtgaggtccagctttggttataagtctgaattttagctctgcctggcagatcgtatgtaggttaatgaacccaatg

SEQ ID NO: 488957 - DNA, 116 bp, Homo sapiens
acggtaaacaggcaatgaatcatctgaggaaggatcagcacattgtatcttgcaggaagattggccacaggcaaaatataagaacacatctctaagccccttctgtcgtcttctcg

SEQ ID NO: 488958 - DNA, 355 bp, Homo sapiens
cgtgaatccattcagcttcctccagtccagcaacataaacacctctccacccatacatactgtacttgttgagggcaagaactgctgttttatttactaagtctattcacacgtgctttgtagtccattaatgctttacagaatgaattaatcaataaataaatgaatggatgaatactgagtaactgggccaggtacagtggctcacacctgtaatcccagcactttgagaggccgaggtgggcggataccttgaggtcaggatttcgagacaagcctggccaacatggtggaaccccatctccactaaaaatacaaaaattagccaggcatggtggcaggtgcctgcaatccc

SEQ ID NO: 488959 - DNA, 252 bp, Homo sapiens
ctgcagagggggtccatacggcgttgttctgggattcccgtcgtaacttaaaggggaatttcacaatgtccggagcccttgatgtcctgccaaatgaagggaggaggatgtccttaaggttccttgcaagcaaggaacccaactaaggtggcaccattcttgactcccagatggaccagtcacatctataaaagggaaaagtgatggcatctatatcatatatctcaagaggccctcggagacgcttctgct

SEQ ID NO: 488960 - DNA, 666 bp, Homo sapiens
  misc_feature (46)..(46): n is a, c, g, or t
  misc_feature (49)..(49): n is a, c, g, or t
  misc_feature (117)..(117): n is a, c, g, or t
  misc_feature (161)..(163): n is a, c, g, or t
  misc_feature (166)..(166): n is a, c, g, or t
  misc_feature (188)..(188): n is a, c, g, or t
  misc_feature (195)..(195): n is a, c, g, or t
  misc_feature (209)..(209): n is a, c, g, or t
  misc_feature (590)..(590): n is a, c, g, or t
  misc_feature (654)..(654): n is a, c, g, or t
  misc_feature (662)..(662): n is a, c, g, or t
cttcttctactgtcacatggtgcgcgctgttttctaatcacgtggntgncacccaggcctctctgctcctgtcttttgtttggatgccggcgctgctgcctgtggcctcccgccttnttgttgctaccccgagtcttgctgaccatggcctctggaagccnnnccngacccagccctacgccggcctncggattnccggctctggctangttccgggctcggtctctgcagcctttgttacgttgccccaacgagaaggtcgccaaggagatcgccaggccgtggtggagaagcgcctagcagcctgcgtcaacctcatccctcagattacatccatctatgagtggaaagggaagatcgaggaagacagtgaggtgctgatgatgattaaaacccaaagttccttggtcccagctttgacagattttgttcgttctgtgcacccttacgaagtggccgaggtaattgcattgcctgtggaacaggggaactttccgtacctgcagtgggtgcgccaggtcacagagtcagtttctgactctatcacagtcctgccatgatgagccctgttcctgctcatcatgaagatncccgcgatacttcaacgcctttgacttccaggtgatgactgggcccccaataaatcccgtcttnggggaatncata

SEQ ID NO: 488961 - DNA, 629 bp, Homo sapiens
aggaggagagcaggaggggagcaggagagagaggcggagccgaggacggatgggagcagacgggcagaagcgaaagggacggagagagagggagacggaaggaagggcggggagggcaggcggggatgggcggaggggaggggagacggggacggaagagagctgagagggagagagagcgaaggagagagacagagagagagagagagagacggagacagagagagagagagagagagagagagagagagagagagagagagagagagagagagagagagagagagagctcgtgccgaattcggcacgagggggagccgagattgggccactgcactccagcctgggcgacagaataagactctgttttggccaggtacgttggctcatgctttgggaggtcaacggaggaggattactcgaggccaggagtttgagaccagcctgggcaacatagtgagatcctgtctctacaaaaaaatttaaaaattagccaagcgtgcctgtggtcccaacttcttgggaggctgaggtggaggattgcttgagcctgggaggctaaggctgcagtgaaccgtgactgcgctactgtactccagcctgggtgacagagtgagatcttgtctcag

SEQ ID NO: 488962 - DNA, 102 bp, Homo sapiens
gccaggttttaggggttcggggggttgaataaaactggtttggggtttgacttttggttttgtttttccccttttaaaaatttgggcccttgggccccttta

SEQ ID NO: 488963 - DNA, 842 bp, Homo sapiens
  misc_feature (293)..(293): n is a, c, g, or t
  misc_feature (337)..(339): n is a, c, g, or t
  misc_feature (342)..(342): n is a, c, g, or t
  misc_feature (364)..(364): n is a, c, g, or t
  misc_feature (371)..(371): n is a, c, g, or t
  misc_feature (385)..(385): n is a, c, g, or t
  misc_feature (766)..(766): n is a, c, g, or t
  misc_feature (830)..(830): n is a, c, g, or t
  misc_feature (838)..(838): n is a, c, g, or t
ggccgctcttcctgggggtttgtttctcccgtgtgacgtgattggctctattgagaatcaactctcgctgtaccagcgtaggccgcatgagtggggaggacgggctcccgcggtcgctgactcggcggagtggatgagttgacacggcggccgccccgcccctgtccgggtccttcgaagcctcgaccgctactcgcacgcggtaaatcccagaggttggcctcagtgaggtgcctctctgctcctgtcttttgtttggatgccggcgctgctgcctgtggcctcccgccttnttgttgctaccccgagtcttgctgaccatggcctctggaagccnnnccngacccagccctacgccggcctncggattnccggctctggctangttccgggctcggtctctgcagcctttgttacgttgccccaacgagaaggtcgccaaggagatcgccaggccgtggtggagaagcgcctagcagcctgcgtcaacctcatccctcagattacatccatctatgagtggaaagggaagatcgaggaagacagtgaggtgctgatgatgattaaaacccaaagttccttggtcccagctttgacagattttgttcgttctgtgcacccttacgaagtggccgaggtaattgcattgcctgtggaacaggggaactttccgtacctgcagtgggtgcgccaggtcacagagtcagtttctgactctatcacagtcctgccatgatgagccctgttcctgctcatcatgaagatncccgcgatacttcaacgcctttgacttccaggtgatgactgggcccccaataaatcccgtcttnggggaatncata

SEQ ID NO: 488964 - DNA, 336 bp, Homo sapiens
tgagctcgtaccctttaggaggctgcagtgcattccagcctgggtacaagtgatgaccctgtctcaaaaggaaaaaaaaaaaaaagaaaaaaagagatttcctgaaagggagtttccttgggaccccttggtgattcaacactgttggaaaaggggaaggaagccgggatgattggagggagaagctggattggaatttaagcacaaaagggcttcattctgatttgtaaaaggagatctgaagctgagatagccctttaagattttttctcatattgggaaggaggggcacagcttgtcttacctcctgcacttgccagcctcccagggggactg

SEQ ID NO: 488965 - DNA, 103 bp, Homo sapiens
gtgcccccctgtgattggctgttccctgtcccctggcaaattccctctgtgcaaatgcaagcttgtgagatgatttattatctaacaggtacggggggtcaaa

SEQ ID NO: 488966 - DNA, 452 bp, Homo sapiens
  misc_feature (424)..(424): n is a, c, g, or t
gcgcttaaagcagtgaagaactctgtcaaggatggatattcagatatcaactatttagagtccagagggagccatggcactagaaatagttgataatgaaatgagattttatgaagtataccgctccacctaatgagcgtctgtctctgatgggcttggagatgttaacagagagccaaaagagagggaaagtgtgacaaaataacagtagatctgcagaaagttctgaggccaatcagagcttcgttaattcaaggagacaaaccaaagacgttgctgtcacactgtgcatgtgctctatctttaaggcacaatgagacccgcaattcctgagcaggtctacaaggaagtctcgttaatgctaactgaagcaatttaagaggtctttttacaggaagatgagagggcttgccaagatagaatngatgtacccatgaagattgcttgtgtgg

SEQ ID NO: 488967 - DNA, 172 bp, Homo sapiens
  misc_feature (5)..(5): n is a, c, g, or t
aggtnttgcggacagagtattgctcttgtctcacaaaaaaaaaaaaaaaaaaaagaaaatgcaaaaacaaaacccaagttcctaaggcttttgtgaaccagggaggctcacagggggcccaggaattttgccgggaaccaggctttccccgggtggggcccggggacaaagg

SEQ ID NO: 488968 - DNA, 94 bp, Homo sapiens
  misc_feature (75)..(75): n is a, c, g, or t
cccccccccccttttttttaaaaaaggggggggcaaggggatttcaacccccatgggggggaattaaattaattncccccctttttttttttta

SEQ ID NO: 488969 - DNA, 1116 bp, Homo sapiens
  misc_feature (47)..(47): n is a, c, g, or t
  misc_feature (56)..(56): n is a, c, g, or t
  misc_feature (131)..(131): n is a, c, g, or t
  misc_feature (193)..(193): n is a, c, g, or t
  misc_feature (264)..(264): n is a, c, g, or t
  misc_feature (298)..(298): n is a, c, g, or t
  misc_feature (516)..(516): n is a, c, g, or t
  misc_feature (541)..(541): n is a, c, g, or t
  misc_feature (553)..(553): n is a, c, g, or t
  misc_feature (608)..(608): n is a, c, g, or t
  misc_feature (644)..(644): n is a, c, g, or t
  misc_feature (649)..(649): n is a, c, g, or t
  misc_feature (666)..(666): n is a, c, g, or t
  misc_feature (690)..(690): n is a, c, g, or t
  misc_feature (698)..(698): n is a, c, g, or t
ggaccttcagcagggctgtggctaccatgttctctcgcgcgggtgtncgctgggcntgtcggcctggaccttgcagccgcaatgggattcaagttcgcaaatattggcaactttggaaagatatcaccagngagactaacagttccatcaaaaacatccaggaaaattaaccaagtctatgaacaatggtagncggcaggaaaaatatgccgcgagctgagagagagctgaaaaccagctcggaatattatggattggggatcntttaggctctgtatgaaaaagcgtgatatcaagngggcctggaagacaaagaagaaacacctccttatgtggtgtgtcctcagatcgaggacctgtgtggtgctattcattcctccatgtgctaaacagatgaaaagcgaggtttgctacactaacagcagctgggaaagaagttatgctgtgtgggaatgggtgacaaaatcagaggcatactttataggactcattctgaccagtttctggtggcattcnaagaagtgggaagaaagcccccccnttttggagatgngtcagtcattgcccttgaattactaaattctggatatgaatttgatgaaggctcntcatctttaataaattcaggtctgtcatctcctatnagacngaagaaagccatttttnccttatacgttgcagtgtgacagntgagtatntatgacgatattgatgctgacgtgctgccaaaattacccagaataccaatctggcccaacatcatctactactctctgaaggagtcccaccactagtgagcccgagtgcccggatgacagccctggaccatgcccagccagaatgcttctgagatgattgaccaattgacattgacattcaaccgtacccgcccagctgtcatcaccaaagagttgattgaaattatctctggtgctgcagctctggattaatgaaaatccagttccatcctcagaccagaggtaaagaaggaaaattcagcccgttgattttgtttttagcttactgctgcctttgtccgaagaaactgttcctcccttatttgaattactgaagacagcccagatatttgtaaattatcttaaaataaaccactta

SEQ ID NO: 488970 - DNA, 268 bp, Homo sapiens
tatttccctaggctgcaggcgtcatcacctacatctgcttagactgatgaggaaaaagatgtggaggaagtggacaacaaaagcagccttcgaactgcacactgggatgtcctgtgttattttgggttttttttttttttttttgggggggttttatttttccccatgaaagaatctgataaaccctaaccccacctcctctaaacacaagagagaaagttccatttgtgatgctcggggacacctcctttaggcgggtttagggtta

SEQ ID NO: 488971 - DNA, 246 bp, Homo sapiens
agctggcaggtaagataggcatcaggaagtatccgtggatgatagcgtcttcagtttaatgaggagcggtcggttttcatactccaggcaggcgcaggtgatggtgcagccatcgagggaggatccggcaccttggagaggggtcactctccgcaccccccgtcaagcgttgtagtacaccacgcgtgttctcgccgacaggatgaaccactcgctgccttccagattgtgagacatggcgcgtga

SEQ ID NO: 488972 - DNA, 824 bp, Homo sapiens
  misc_feature (553)..(553): n is a, c, g, or t
agcggagtggttggaggttgtaggaccggcgaggaataggaatcttggctggcgtgagctgtgcgttggctgttggcgattcgcgctgctgtggcgacccacgcgagcctccggggcttgcgctggctacatgtttttgcacttacgcgtgacaatgaccttgagactcgcaagactacgtccgtcatcatgactccatatggaagtgatcatgctgtccgacatgcagagatctacatggggcacacggcatggcctgataggaggagtggccgctgtggtgctgtaaggagggacgcagctggtctcgggactccagaaaatacccgtggagattgcataggctcggcactcacgaacggaagccgatttgcggggtaggagattaactactctgaccgttcttttccttccgccggagtccccgataggagatcacgtgcgctaacatattctcaagtttccccacgggacacttcccgaaataggttgaaggagcctagatgaataggtgtcaggtcgaagagatccaatcatcttcagagcagacggngcggaggaaccgggtccccatttgcacatggaggtccttggccagaggtttcaacgcatgggttccccggttgtcccaatccttgggtttcaccttggcaccttcgaagggggccctgggggtaaccaaattgaaattcaaaccttgggagctttaccttgtaccgtggtacccagaatgagctccgcttgcgattggttaaccccgggacattcgcggaaagaagggccagagaggattcttcgttgtcagcctcgcagcgattttcccc

SEQ ID NO: 488973 - DNA, 180 bp, Homo sapiens
cactcacacatgaaatacagattgtagtttattaaaaagttacgacacaaatttaccatcagaaaccagcacaattctactcctaggaacctacctcaagagaaatacaaacatatacacacagaaaaacgtatgtgactgtgcacagccagcatgattcctaaatggccaacaaattag

SEQ ID NO: 488974 - DNA, 323 bp, Homo sapiens
atatactttaagtggtggagacactgatttcatttgttctatttctcaaaagttatttcttaaactctgagtcagtgtttaattttgcgtttacttcttgcttgaagaaacaaactcaggatgcttcttgacgtcaagaagcatcctgagtttgtcctttcttttaaataatgtactgattacatgccatgtggttggtttttctaaaaaattatatttaaatgtcattttataaataggctggatgccgtggctcacacctgtactgccaccactttgggaggccacgaaggccgattgcttcaactcaggatgcttcttga

SEQ ID NO: 488975 - DNA, 370 bp, Homo sapiens
tatttatttgactcaggtaccagtggtacatatatacagtgtaattatgaccaggctggtaaaattggctgctcgcaaacaatccccttttttcctggcagtatttggaatttatcatttattaataactatacatttttaaaggcagaagaagaaaatctatctatcatctatctatctatctatctatctatctatctatctatctatctatctatctatctatctaaatgacctgacagaagaaaactgttaaaaatggatattattggaggggatttaaaacagtgggtgtgaattatcattctgatggaaagaaaatagcaaaacaatgtgttacaagtatttgctaataaacagtatactgcca

SEQ ID NO: 488976 - DNA, 120 bp, Homo sapiens
gcagaggttgcggtgagcgagatcgctccattgcacttgaacctgggcaacaagagcaagactccgtctcaaaaaagtaaataaaaataggaccaggcgcgggggctgaggcagtcgaat

SEQ ID NO: 488977 - DNA, 204 bp, Homo sapiens
cgtatatgctgtctcaaaaaaacattgttggtagctgttttaaaaagattacagttttcacttaacaactggcaaaaaaaaaaaaaaaaaaaaaaaaaattcctggtttggccccattggcattatggtgaaaacccggcattttttggtcccgccaaagttccggaaccctaggggttttttgtggtccccccagacccccac

SEQ ID NO: 488978 - DNA, 850 bp, Homo sapiens
gctgcgcggcgatgctgcagttcgtcctgggccggtggcgcgggcctggcttcggcctaccgtgcagccagtggcctgatgttctcctgtgctgtgaacgatgtgcatgctgctgtgctgacctgagaaccctggatgcagtgtgtgcgatgctgatgggtctccctgtgagccctgtgcttgctgcaaatgtctgatgctccctggtacccactcatctgacgcccagtgcaggcctgtggtcagagtccttgctggggcttcgagcaggagctgctgtgggcctggcctgacctgcaccccgatgttttcgccacctgcgcccaggctggacatacttgcaccagtgttgctatcgtgtgcacgcaagaacttcaagacgaattagctattgccaatgaccaagactgatgatgcctgaggtgcgtgggcgtgtggcctggaagccttggccgcagaaatgtgcacttgggctgtggcccggcatggcagcatcctgctctccgctctggcgaggacggaggtgttgcccatggcccccggtggccccacaaagttactactacatgctgcccatgaaggtgcgggcgctgggtctcaaagtggcactgacctgtcaagcttggcccaggacgagctgcacatcatggactccctagagctgccaccggagaccacagtacctgacagagctggtgcacttaccgccgctggggggactccgtactcctcgtggacttaacacacgagggagatgccaaagaagcatcgtggaggccactctagcgcttaagaccttcaagttgatccgggtggtggcctaatggtgcacggcattgtcaggcgcaga

SEQ ID NO: 488979 - DNA, 314 bp, Homo sapiens
agcacaggtaaccaggaggagcaggtcccccaaagccaggctggagatgaagagattgggcacgttgcgcatggacttcaccgtacagaagatcttgatcagagatgatgttgccaacgaggcctatcagaatgatgaccccataaatggcagggatgacatagaagaccccggggtggaaccagtcgtcgttcgtggggagatccacactgagattagagatgtggcagtgcacgaaacggtccgcttccaagtccagaggcaaacagtcattcagagccatcctccagattcggtctcacctaaaacgtgtc

SEQ ID NO: 488980 - DNA, 881 bp, Homo sapiens
gtctctcctgctctctgctctgccagcgcgatgccgcgaccggcccctcgcagctttccggagcatggcctgtctggatcgcaccttcatcgtgatgaagcttcggaggtgctggctgcagcggggtctggtgcgggagatcatcaattcgctccgatgagaatggattccgcctcgtgggtctgggagtttgcctcgcgtggccccgtcttgaaacgtagacaacctgaagacgaacagctactattgggaactggaaatgaaccgagccagttactttccccctgtgggctgagttgcagaggtcacatgacatctcatggcgcggatagtaggtccgagtggtctaggcggacgtgcgagctcgtaaactgtggctcggatacgtacagggccgcagatgtatcgctttggacgacgaatcaacttccagggatgaactagcaaaaagccgagggcaatcactattccccgggggcggtactttatttgcaatatctacgtgctctagtgcaagagtaccctagttccaatatcaactgagccaggctgaattccaaggtatataattgtggcctcgtataggaatagagaatctatgcctatcgagttgagcgccctgaatgaacgggttggctagaagtcttgttgctccaatgacttggggtctatgacataagcatggtcggcacaccaacatgctggctccctgcaggcattggcgctggattgttggtgcccgggggacgacacggcactgtcccattgcctatttgactgtggatgcaaccagtggattggatcatgctaaccataagaggccatagctgtgcactgaaagctctctgggcacgtccggcacaaaaatgccccattgggtg

SEQ ID NO: 488981 - DNA, 430 bp, Homo sapiens
ttccgtcaactcagcctaactttccccaagttataaaacttgagatcatgtaatccacaaagcaaagaagcaggctctaggattaacacaggtggcataagtggaataaaagaggggagggagattttacagacaatctgccagagaaaacatgacaacatgattatggctttgtagcatccttctggacttgagcagattaggagacctgagaggctgaggcagacaggggcaagcaagacctacaagatgacaaagcagggggagctcactctgggccaggtcactttcaagtagctggggctgcaacacagaacatcaccactggccctgagagcacatttagctgttttttgcaggaaccacgggattgagacagtggcagaaccctcactggagaaaaaggaagatgacagaaagccacactgac

SEQ ID NO: 488982 - DNA, 157 bp, Homo sapiens
gagatgtgcaataaatgagagtgacctgactgataaaagggacagaaaaaatgacttagacactctgagcctcggtgcctcaactagtagggttgtggctttcgtacaggagcccattggctgaaaagcagttagagggtggagaccgttgggctaa

SEQ ID NO: 488983 - DNA, 642 bp, Homo sapiens
cgccccgtgcagccacccctgtttgtcgccggggccttattttggggtgattcttccgttgtggccgcccacggttactgtgttgggacgggccgcgtggtccccggagtagtctcttatgttgtagccccccgggtgtagtcgccgcgtgggttccgctcggtggtgcctccggcagtggttctgcggccccgcctatgttctgttttggcgcccgggtggcctccgcccggatcggctatggtgctccctctgtctcacacataacagatatagagaaaataaatgggttccccccaaatgtctcggttttcctctcaaagaggggtgtcgccccctgggcgcggcgcccctactggggtttgatgcgtctccccccacggaatatttcaaaaagtgagaggaatttctcacaataagcgcgcatatctcgccgcggatacgtggctgagaagggggagtaattctaccaccccacttcccccggaaaatccaccagtttctttagacactttttttactcttttattgccccccctcttttgtaaccttgttgcgagaaaagggataaaattttttttgaaaacacacatccacagttccccggtgcggttcgaccccgaacatccattagtacgaaaa

SEQ ID NO: 488984 - DNA, 176 bp, Homo sapiens
ggcttcgtgaactcactgatgtatctttttgtagatgttagatgtggaatttctgggtcaaagataaacacatacataaacttttctagagcttgcccaattccctttcagagggattgtaccattttgtattctattaacacattagaatgcctctttcccagtctcacggagag

SEQ ID NO: 488985 - DNA, 375 bp, Homo sapiens
cacgagggccaaggtcatgggccgatcagcagcagggcagccgagggtggtgatcctgggcggcgggttcgccggcctggccgcagcccgcgcgctcaagggcgcgccctgccgggtgaccctggtggaccgccagaaccatcactgtttccagcccttgctctatcaggcggccacggcggcgctgaccgccaacgacgtggcctggcccatccgcgaaatcctgggacgccaggccaatctcgacatcctcatggacgaggtggagggcctcgatcccgaggcgcggcaggtgaggctgtcgggcgggacgctggactatgatcggctgatcgtcgccaccggcgccagccacgactatttcggccatgacga

SEQ ID NO: 488986 - DNA, 675 bp, Homo sapiens
  misc_feature (520)..(520): n is a, c, g, or t
  misc_feature (534)..(534): n is a, c, g, or t
  misc_feature (582)..(582): n is a, c, g, or t
  misc_feature (602)..(602): n is a, c, g, or t
agagtccaaacattagacctttgtcaaatgcataacctgcaaatattttttcccattctataggttgtctgtttactctggtgttagcttcctttgctgttcagaagctccttggtttaattagttcctgcttttcaatttttggttttgttgcaattgctttttggagtctttatcataaaatctttgccagggctgatgttcagcgtggtatttcctcttttcttctgtgtttttaacacttttacatcttacattcaagcctttcatccatcttgggttgaattttgtatatggtcaaaggaaggggtctagtttcaaaattttgcatattgctagccagttatccaagcactatctattgaatagggagtctttccccattgcttgcttttgtcagctttgtcaaagatcaggcagttgtagatatgtggctttatttctgggttatctaatgactgtgttgcattggtctatgtatctgctcttatgccagtatcatgctgttttcattactgtngccttgttgtgtantttgaaatcaggtagtgtgatgcctctcactctgttccttttgtttangattgaattggctatttganctccactggtgacatttaccccatgttaacaaaccctacatgttgtacccccaaacctaaaaatgaaaagttg

SEQ ID NO: 488987 - DNA, 377 bp, Homo sapiens
  misc_feature (22)..(22): n is a, c, g, or t
  misc_feature (26)..(26): n is a, c, g, or t
  misc_feature (30)..(31): n is a, c, g, or t
  misc_feature (33)..(35): n is a, c, g, or t
  misc_feature (38)..(38): n is a, c, g, or t
  misc_feature (55)..(55): n is a, c, g, or t
  misc_feature (78)..(78): n is a, c, g, or t
  misc_feature (82)..(82): n is a, c, g, or t
  misc_feature (88)..(89): n is a, c, g, or t
  misc_feature (92)..(93): n is a, c, g, or t
  misc_feature (102)..(102): n is a, c, g, or t
  misc_feature (238)..(238): n is a, c, g, or t
  misc_feature (257)..(257): n is a, c, g, or t
  misc_feature (264)..(264): n is a, c, g, or t
  misc_feature (286)..(286): n is a, c, g, or t
  misc_feature (358)..(358): n is a, c, g, or t
tccactcgcccacggtgattcnggtnatcnnannntangctgcaagtggccgagngcccccccgagtggatcttctantggnttgccnnatnntatgcctgntgcggctctgccaccagtcaaaacagcatcttgtggagattcattgggaggccagcatgttgaaggcggcacacacatgaggtggtgtaggacatcattgaaacacttgtcccttttaagcaccctacaggggcgnctctgaagtttgcaggacncaaaganctggcagaatggatagccaggngtcttagggtattgaggtctcagacagccgcgtataaagatggtgtcaccacacggtcccagtcccagctcncagagcacttgtctattct

SEQ ID NO: 488988 - DNA, 135 bp, Homo sapiens
ggcggtacctacagcttctgagccagcgacttctgaatgggccctgtcaaacgtatagggctcctgcctaagcctctccctccagccaataggcagctttcttaactatcctaacgagactttccgtatggatgc

SEQ ID NO: 488989 - DNA, 378 bp, Homo sapiens
  misc_feature (22)..(22): n is a, c, g, or t
  misc_feature (26)..(26): n is a, c, g, or t
  misc_feature (30)..(31): n is a, c, g, or t
  misc_feature (33)..(35): n is a, c, g, or t
  misc_feature (38)..(38): n is a, c, g, or t
  misc_feature (55)..(55): n is a, c, g, or t
  misc_feature (78)..(78): n is a, c, g, or t
  misc_feature (82)..(82): n is a, c, g, or t
  misc_feature (88)..(89): n is a, c, g, or t
  misc_feature (92)..(93): n is a, c, g, or t
  misc_feature (102)..(102): n is a, c, g, or t
  misc_feature (239)..(239): n is a, c, g, or t
  misc_feature (258)..(258): n is a, c, g, or t
  misc_feature (265)..(265): n is a, c, g, or t
  misc_feature (287)..(287): n is a, c, g, or t
  misc_feature (359)..(359): n is a, c, g, or t
tccactcgcccacggtgattcnggtnatcnnannntangctgcaagtggccgagngcccccccgagtggatcttctantggnttgccnnatnntatgcctgntgcggctcattgaccattaagttccgggatagggtttcgcctggagtgcacaaagcctcaaagtacttatgccaaaacagcttcttgtagagattcattgggaggacagcatgtctgaacagcccctacaggggcgnctctgaagtttgcaggacncaaaganctggcagaatggatagccaggngtcttagggtattgaggtctcagacagccgcgtataaagatggtgtcaccacacggtcccagtcccagctcncagagcacttgtctattct

SEQ ID NO: 488990 - DNA, 293 bp, Homo sapiens
gaactctgagctcggtacccattcgtgtcggagagtatattgtgaagaggagtagctattagaaggattatggatgcggttgctggtgtgaggtaacatacttgatgatcagcttctgtggcacaggtagggttaatgttattggttaaaactggaataaaagctagcatgtttatttctaggcctactcaggtaaaaaatcagtgcgagcttagcgctgtgatgagtgtgcctgcaaagatggtagagtagatgacgggttgggccaggggattaatggacacgaatgttca

SEQ ID NO: 488991 - DNA, 990 bp, Homo sapiens
  misc_feature (18)..(18): n is a, c, g, or t
  misc_feature (78)..(78): n is a, c, g, or t
  misc_feature (85)..(85): n is a, c, g, or t
  misc_feature (92)..(92): n is a, c, g, or t
  misc_feature (103)..(103): n is a, c, g, or t
  misc_feature (106)..(106): n is a, c, g, or t
  misc_feature (112)..(112): n is a, c, g, or t
  misc_feature (116)..(116): n is a, c, g, or t
  misc_feature (132)..(133): n is a, c, g, or t
  misc_feature (135)..(136): n is a, c, g, or t
  misc_feature (141)..(142): n is a, c, g, or t
  misc_feature (144)..(144): n is a, c, g, or t
  misc_feature (182)..(183): n is a, c, g, or t
  misc_feature (213)..(213): n is a, c, g, or t
  misc_feature (215)..(216): n is a, c, g, or t
  misc_feature (219)..(220): n is a, c, g, or t
  misc_feature (226)..(226): n is a, c, g, or t
  misc_feature (237)..(237): n is a, c, g, or t
  misc_feature (256)..(257): n is a, c, g, or t
  misc_feature (282)..(282): n is a, c, g, or t
  misc_feature (284)..(284): n is a, c, g, or t
  misc_feature (296)..(299): n is a, c, g, or t
  misc_feature (301)..(301): n is a, c, g, or t
  misc_feature (324)..(328): n is a, c, g, or t
  misc_feature (330)..(330): n is a, c, g, or t
  misc_feature (333)..(333): n is a, c, g, or t
  misc_feature (374)..(374): n is a, c, g, or t
  misc_feature (384)..(384): n is a, c, g, or t
  misc_feature (463)..(463): n is a, c, g, or t
  misc_feature (474)..(474): n is a, c, g, or t
  misc_feature (889)..(889): n is a, c, g, or t
  misc_feature (987)..(987): n is a, c, g, or t
ccccctcatgtctcctcnagtatcaaacaccatttcatatctctaacacgagagcagagtcggcattcagtataaganccaagtnaaaagcnttaaatttcangcntctgancccntcacatggcgaccagnnanngcctnnangtcattctcccacattatccaactctgcatctcacacnnatcctcatctcactcaagcccaacccctcncnntcnnattgtnaagtgcaggcngttgagagagataaaaatnnagtgaaaacacatcaatctcaattnanctcagttaaaannnngntaagttaatttttttttgttttnnnnngnggngggggggaaaggggtccatggggttaagagtcaaaactggncagggctggnaactatagatggcatgttgtagctctggaaagtatctgtcacatgatattttaaaataaagtggcttttgtggattttntcttttttggnattgtaaacatgtactgtttaatattacccgaatttaatttaaaacatgtttgcaaacaaaacaaaattaaaagcctttaaggcaaacctccccctaaggaaaaaagtcatttgttataaaattgtgaggacacccaagcaagaccccacttaagattcgtcagcatgaacttgagagcttttgtccactgctcctcagagttaaactgggttttgatggaataggagccgccactgcctcctgtgtcttcaatcttgcctttctccacatccatcctgtagggaagacaaaaacgtgtctcgcctttctcaacctcttctttgaactgctgcacacagtccaggaaagccacccattgcatggtcaaacttgttgtcccagaaaaaccgcaaccccccagaacagtataacggnagctcctaattagccgggcgtggtggtgcatgcctgtaatcccagatactcaggaggctgaggcaggggaattgcttgaacccgggaggcggaggttnagt

SEQ ID NO: 488992 - DNA, 405 bp, Homo sapiens
taacttttctaattaaagatgtaatcactgatatagactaacaacaacttctgtttaatccagtatgaaggaaaaatagaagaagtcttatttcctgaatgaatactttctatggagatttgttctattttgttgaagtaatgaagtgtcaataactggccagaatttgggttctacttttcttctttaggttttctgttcttcatgatcccatcaaagcaaataatctttgtactgtgcatttttctcttgtcgtttacgctttgatgttgtttgctgatatgtgcagagtaaagtgctgggacttggttgctctttataattatgtttaagaatactacacagatgttctgatataaagtgttattttattttgggttactatacattcttgtagaattttca

SEQ ID NO: 488993 - DNA, 690 bp, Homo sapiens
acaggcttggcaggtactaagccagatggaggcatgaccctgggagggggtggagtgcaaagaggtgcagagcaccccataaaataaggggttgggcatcaccatgccccctgcaggctttgccacccatcagcaccagcaagtcgccccacccagagctctgcaaagaacaccgccagctctttccttccgggtgctcttgctggggggtcaggctggtcccctctgactggcactgcccacgctgggacatgggaggagggccatctgggcactgcaggagcagatcctgggtgcacatggggagacaggtgtgctggcaggaacagcaggcggggctgagctcaggaggcgcctcacagcgggtgcctccagcctggtctgagcacgggatgaagaaccaggcaccgctcatcgtgcatctccacaaggcactgtgtgacttcatgcaagccgctcaacctctctggccccacgtccttgtccacaggggcagagtggactgaatggaggctgaggtccctctcagcttgggtggtgtggcagagggtgaggaggagcccatgggccctggatcaccagcctccctccacccagaatgccccgtccactccactgcccacatcctctgtgcaattgacaaacgtcctgggtgttaacgcctaagcataaagagtcggtttgcttgtt

SEQ ID NO: 488994 - DNA, 409 bp, Homo sapiens
  misc_feature (34)..(34): n is a, c, g, or t
  misc_feature (45)..(45): n is a, c, g, or t
  misc_feature (90)..(90): n is a, c, g, or t
  misc_feature (102)..(102): n is a, c, g, or t
cccccccccagaaaagaaaggaatgggcccaatnaaaaaattggnaaaaatttaaggggaaaaccaggatgccctaaggcaagccttggngtaggccaaagnccttaaaaccagagggcaaaatggaggacctgtttgaccctgaaggttcatgcctctttcccattatacacaacagctttcccttatttgacttagatctttttaatagaggcatttttgggctgattgctgtaacgttagagcaaatatactccagtttctaacttttctgttcaattttccaggttacattactgtgaaatgaagtgactggatattttgcttacacagctttgctcagcaatcagttgctttctgccatggccataaaatggaaaattctttccacaaatagaatctctggcaa

SEQ ID NO: 488995 - DNA, 235 bp, Homo sapiens
gaataaaattaatgactctattattggtgtgtatttatatttttaaaataatttgttttattattaaaatcaattgggataaatttcattaaaatttacctttaattaataatttgcctatgcacaaaatgtccattatattgctcattattttcataaactttatctgctgtcattttaatgtacatacgacatcaggcatggttttgtttttttcttttcctgcatatattgg

SEQ ID NO: 488996 - DNA, 664 bp, Homo sapiens
cttttgttgtagccatcaactgtcttttaatgctacatatactattctcaaggcacatctgatgatattttttataccacagtaggtgtcaaagcatgtttaacatatgatttcttcaggatccctgccctttatgaattccaaatggaggaactgaatagtgccatgtaaagactggcgagccatagtctatctttggcaagcttgtacaagcactattggaaatgtcatgctgaagaactgtcaactaggaacttcttcagttgatgaaacaccattcaggactgctgctacttgagcgattacttcttttaaggtcttaatcgttacttctcctggagtccgctgtagcttagaatggtcatcgtcagcagcactagatgctccggttattgccttttctgaaggaccatgctttttagttacatctttggccatttctttcgtgattctagccaaagtttcccttgcgaggatactttgcctgctgtgagactcagttctagtataatctgcaactgcgactagtgcattgtcattaactgaagctgtatcagattcagtcattccatccatcagcagcatcttcatcagacctacgtctaccagaccgcctactacggttagtactgcgatgagattcgctggcatcagtgttctgcgc

SEQ ID NO: 488997 - DNA, 180 bp, Homo sapiens
tcacgccatgtccacaaccaaaccaccacaaagccctcctactcttccaggagggaagctccgaccagcagagggtggaagcgttcagtcctgtaccccggagcttcccatccgcaaggcacttctcaccatgaatttcgtggatgcccagatccctgttccactaccattcctctcacc

SEQ ID NO: 488998 - DNA, 197 bp, Homo sapiens
tgggggaaaaaaaattttttttttttattccccccccaaaaaaaaaaaaaaaaaaacccagggggggggggggggggggggaaaaaaaaggggggggccccccaaaaggggggccccccccggaaaaaaaggggcacccgccaagggggggggggggggtgtggctataaagagaaagagggggggccttttctcta

SEQ ID NO: 488999 - DNA, 735 bp, Homo sapiens
tgcctccaaatcctgtccatctatcagttttcctgaatatcctagtaaaaatgctaactttattccaaaaatatgaacgaggcagtgtttttttttccagctgttctaaagagaaaggtaggggtgtgtgtgtgtgtgtgtgtgtgtgtgtatgtgacagagaaggaagggagaaaggggtagggagatatatatatgtgtttagagaaggcccaatttaggacacaacagattcttggaggaacttaaaagaataacatattctgctgacgcgtgaagagtgataatataggtttaatatcattctcttcacatggttagttccatggctcactcaaaagacgccaggcactgtattagacaccaaccataaaggtcacaaaatacagctaggaacaagaggaaacaaagccctgccctcgttgggccttagaattcaattgaactattacccaggagcagaacatcagccaaaaagattgatgtcttacacgaagagcaacacacaacaacaaacatcacaaacaaaccacaccatcgtctgtgcggccgcacctcctcggaccctcccaaaaacaacgctttcatagaacaaacaaaatcgcgttaggggaaagcgggcgccgccccgcacagctgcaaaacgcccacaacttggtcaacaaacgcgtgtacactagagaggaacacaccgcagggctacgacaaacgcaccgggaagggattcacacacca

SEQ ID NO: 489000 - DNA, 1025 bp, Homo sapiens
ggttcttctgtgtcctctgctgccttagagtgtccagtcatctgtggcctctggtagagcctgcgtgtgtattgtggtggattccaggagacgtaaagactgccagtgatcctcggcgcgcgcgtaaggccttagcaatactgcgtgcatccaatttgcaacattatgatgtgaattgttagtgctcgatacgcatatttactggttctcgtgacgcgagttgagtcaaatagccatggtagctactttgcatcagacatagactttactaatatagtgaaggtgctgactgcttatagatgatagctagcatgatacaccgggatcgttccctgggttaccttgcttgtcctcgtaacgccatgacccttgattcgaccgtgttccttggacgcaacgtaaaacagaagccttggtgaggccttatgacggagcacattgacaggatgggtagccaaaaccccccagttatagtgttctcaattttagcccaacgacttgtatgggcagagcagctatagtacacagatcctttcgcaaagaagcgacacgtgaggaagaatataaaaacctgtgcaacagtcacaagagtgtacattttacaggacagaccattcacacagtgctggatgacgtgtcacggtttgcacagaagggaggttcataactggggtttaaccgcaatggtttgccaggtacccagaagcaaaaattctgtgtctactgtgggagtaacatggttgtgcaaaagcccttttcattacgatttttacaagatttcaaaagcagcaccgttaaggactaaggccataagtggacatcacacaaaccttcttccaggctttgcacacacgacctggcggcgccaaacgtcattttctggcaattgccttccccaacagttcttaggcttccacctttccaacaattatcttcagtaaccccagaggtgcatatttcctgcaaacctgtggaacaccatggtgggaaccacgccttcacaactggcccctttcaaatcatca

SEQ ID NO: 489001 - DNA, 595 bp, Homo sapiens
  misc_feature (346)..(346): n is a, c, g, or t
gagaaaatgaaaatcttcaggccaatgagatcatgtggaataacttaccgccgaaagtttgccagtaatgttgaaaacgttagcggaagaacttatgccaaccccgccgatgcttttaaacacaggaggaggctgttttggagttagagaagagaattgaagaatcttctgaaacttgtgagaagaagtctgatattgtgcttctgctaagcccaaaaaccaggccacttgaagaactgaacaccagtccagtcccagccagctggagatgccactgaagccgaagttttccagccaccagaaggagatttacttagacgccaaaaagtcgccagcaaaactgatngggaaagagccccctcccgtagtaaattatgaagaagatgcaccgatcagttacatctatggaaagaaaggagaggctatcccaatttgaatctattcgtcacttccattgctggaataattaggtctcccaaatctgcactgggctcttcagcactttctgatatgatctccatcagtgagaagcctttggcagaaccggactggtaccctggtgccattccccagaatagaagctcaagaactgtta

SEQ ID NO: 489002 - DNA, 365 bp, Homo sapiens
ttctttggactaccagttaaattgtcaagagcacttatagggttctgtggacgaatttaaagttgaactaagattctatcttggataaccagctgctacatatacgggtgtgctctttcatctgttcgtaggtagctcgtctggtttcaggagtcttagcattggctctccttgcaaagttattcctagtttattcattatgcataaggtataggcgttagtccttgctatactatgcttagttataatttttcatctttcccatgcggtactatatctaatgagccaggtttcaatttctatcgcatacactttaatcgggtaaatggttaggctaaggttgtctggtagtaagatctagtagg

SEQ ID NO: 489003 - DNA, 611 bp, Homo sapiens
atgacccaccaatcacatgcctatcatatagtaaaacccagcccatgacccctaacaggagccctctcagccctcctaatgacctccggcctagccatgtgatttcacttccactccataacgctcctcatactaggcctactagccaacacactaaccatataccaatgatggctgcgatgtaacacgagaaagcacagtaccaaggccaccacacactcagcctgtccaaaaaggccttcgatacgggataatcctattctagttacctcagacagttcttttgcttcgcaggattctatctgagccttattaccagcctccagcctagcccgcttaaccccccaattaaggagggcacgtggtcccccaaggatggcatcgaccccgataaatccccgtagaagtccccactccattgtacagatccggattattcgcttccggagtatcaatgcaccctgaggctcagcagtagtcggaattatattaccctaactcgaaatgaaactaatttcagtgcactaggtaaattcgcaaggaattagctgggggtccctatttaaacccttccttacaaggcctccagtaggtacctgtcgaagtaccgc

SEQ ID NO: 489004 - DNA, 267 bp, Homo sapiens
ctccatggttaacaccgtctctagtacaaatagaaaactgagctgggcgtggcggcgggcacctataatcccagcgggggcaggaggctgaagcacaagaatcgcttgaacccaggaggcagaggttgcattgagccgagattgtgccactgcactccagcttgggtgatatagcgagactcagtctcaaaaacaaaacaaaacaatcttcatatgtacccagtgtctttctcaatcctgatttttttttaatgttacctttttccc

SEQ ID NO: 489005 - DNA, 675 bp, Homo sapiens
  misc_feature (46)..(46): n is a, c, g, or t
  misc_feature (100)..(100): n is a, c, g, or t
  misc_feature (102)..(102): n is a, c, g, or t
  misc_feature (109)..(111): n is a, c, g, or t
  misc_feature (129)..(129): n is a, c, g, or t
  misc_feature (131)..(133): n is a, c, g, or t
  misc_feature (135)..(135): n is a, c, g, or t
  misc_feature (137)..(137): n is a, c, g, or t
  misc_feature (144)..(144): n is a, c, g, or t
  misc_feature (153)..(153): n is a, c, g, or t
  misc_feature (179)..(179): n is a, c, g, or t
  misc_feature (181)..(181): n is a, c, g, or t
  misc_feature (187)..(187): n is a, c, g, or t
  misc_feature (208)..(208): n is a, c, g, or t
  misc_feature (226)..(226): n is a, c, g, or t
  misc_feature (231)..(231): n is a, c, g, or t
  misc_feature (234)..(235): n is a, c, g, or t
  misc_feature (238)..(238): n is a, c, g, or t
  misc_feature (253)..(253): n is a, c, g, or t
  misc_feature (268)..(268): n is a, c, g, or t
  misc_feature (270)..(270): n is a, c, g, or t
  misc_feature (273)..(273): n is a, c, g, or t
  misc_feature (341)..(341): n is a, c, g, or t
  misc_feature (351)..(351): n is a, c, g, or t
  misc_feature (353)..(353): n is a, c, g, or t
  misc_feature (363)..(363): n is a, c, g, or t
  misc_feature (370)..(370): n is a, c, g, or t
  misc_feature (382)..(382): n is a, c, g, or t
  misc_feature (388)..(388): n is a, c, g, or t
  misc_feature (411)..(412): n is a, c, g, or t
  misc_feature (432)..(432): n is a, c, g, or t
  misc_feature (456)..(456): n is a, c, g, or t
  misc_feature (464)..(464): n is a, c, g, or t
  misc_feature (468)..(468): n is a, c, g, or t
  misc_feature (477)..(477): n is a, c, g, or t
  misc_feature (479)..(479): n is a, c, g, or t
  misc_feature (515)..(516): n is a, c, g, or t
  misc_feature (524)..(524): n is a, c, g, or t
  misc_feature (538)..(538): n is a, c, g, or t
  misc_feature (562)..(562): n is a, c, g, or t
  misc_feature (564)..(564): n is a, c, g, or t
  misc_feature (579)..(579): n is a, c, g, or t
  misc_feature (584)..(584): n is a, c, g, or t
  misc_feature (595)..(595): n is a, c, g, or t
  misc_feature (608)..(608): n is a, c, g, or t
  misc_feature (662)..(662): n is a, c, g, or t
aataaactgtacataaaactaaaaaaaacgtttccttgatacaaantgtttgaaatataaataccagtgtacctttaaaaatgtaaacatcttcctcccncncccaccnnncggccccccagaatactncnnncncncccatcngtcaccccngccccccccccttgggcccccgccangngacagngattactcacagtcccttttnagacattgttaaatgggncgggnaannggngccaccccaccaaanaggaggctgaaatancngcntgggctcagggcatctcagactctagtctgccaccgcctccgcaggccctggggctgcacctgggggnggattattgnanagttagtcanacctcgnggaggggggccngagggntccttgttggggggtgtgtgttnngggagtggggtcccctgagnggggggggagcttcccagtgagtntgtcagcntttntcctgtagntnaaagcagctgtatccaaaaagctctggataaaaaannccacgcanaaaggccagctcangaatcccccagggctgggggccancngccctccctccaaanaaatngccacgggaangactcttccagancccaggcagaggacacagaaccagaaaatggtcttcatcaaagtcctgtggggntgatgtggccaga

SEQ ID NO: 489006 - DNA, 94 bp, Homo sapiens
  misc_feature (17)..(17): n is a, c, g, or t
cacaattataaaatgtnagcttttaaggaaataaaaagagatccaggcagatatttacatagttgtcctgaatctgtgaaaaaatggcttcgac

SEQ ID NO: 489007 - DNA, 201 bp, Homo sapiens
ctagaggatccccattcgccgacgtggatgactgtgtcgtcaaaactcggtatggtgtgtcacctgtgcatccggatccacggtttcaacggaatgtcagaagtctggcgaaatgcacctatgcaagcctttgagtgaagctccttcctgagtacaactggtgggcctttaatgtctagaatgtgtcctgtcatggatgtt

SEQ ID NO: 489008 - DNA, 133 bp, Homo sapiens
ttcattttagctcctccagaaagacttttccagtatctccatggcctcagctaaagcttcccttcctcccccaccccaccgagtacggaatcttgctctgtcatccaggctggagtgcaatggcatgatcata

SEQ ID NO: 489009 - DNA, 122 bp, Homo sapiens
  misc_feature (22)..(22): n is a, c, g, or t
  misc_feature (25)..(25): n is a, c, g, or t
  misc_feature (76)..(76): n is a, c, g, or t
attatgccaagggatgtggtgntgnggttatggtcgtagctaatttttttcctaagcatgtctgtcatctcccttncttgctgattagctttcatatgactatattaaatggaagtattttg

SEQ ID NO: 489010 - DNA, 117 bp, Homo sapiens
atgaggactggacagagaggtctgcatcaccgctggtacctatactgctcagactcggtgctgcagtcagcacgagtatgcttcgcttcatcaggtgcccagatgatatgccgacga

SEQ ID NO: 489011 - DNA, 262 bp, Homo sapiens
atgtaaaatgagatatagcaggataatgaagacaaagatgcatatgtgagcataatatatttgagtacaactaagaacatgtttcacgtaatgaagtatccacatagaggaacaatgagcaagatgaataggtgacaaataagaaatgacattggtaattgacggggaagcgtaacaatttctgagaagggtaataacacagtgacagccgtgtttaaagatgataaaatggccagacgcggtggctcacgccggttatccc

SEQ ID NO: 489012 - DNA, 296 bp, Homo sapiens
ctccaggccctaggagagaccattagggcagtgctgatcccaattagaaaggttctgaccccagaatgggacatctccattgcacacgttctggctgctcgagccgtcctgtcttgtctcgtcccagcctccagcgtggctgttcgcacagggacctggtgtgccatcaccaaggcgctcatgggccacgttccagaccgaggcggccgcacaaatcagtagaagcctcccatgcccacctgaagaagctggagacagtatggaggcccccagtgttggggtagcaaggagtcagt

SEQ ID NO: 489013 - DNA, 297 bp, Homo sapiens
tgtttccctggattttcccatcccagggccacgcagagtgcagttcccctacacggccacggcattttgtccctttgtggggtggccatgggtggctcagtcccgtgggagcctttccgtgtttaaggccaagggcagggtggtgccccattcgttttgtgcctcacagggggccctaatgttttgtgctccaaatttttgcaggactggatttcggccgggacaaaggagggtgtgcccccacccacgttgttcccagggcccacgccccttgtcaattggaataaatttggtttc

SEQ ID NO: 489014 - DNA, 266 bp, Homo sapiens
  misc_feature (108)..(108): n is a, c, g, or t
  misc_feature (117)..(117): n is a, c, g, or t
  misc_feature (144)..(144): n is a, c, g, or t
  misc_feature (150)..(150): n is a, c, g, or t
  misc_feature (164)..(164): n is a, c, g, or t
  misc_feature (198)..(198): n is a, c, g, or t
  misc_feature (206)..(206): n is a, c, g, or t
agcaagcaggcccccccctgcccttagtgatgtttggagtcgttttacccttttttattgaaatgccctgggatttccttttccctttccctgccccccctgtccccnacaatttgnggttttgagttgaggagccttcccctntgttgntgaggaaatggtanaatgctgcctatcccctccagcccaatcccagtnaaaaaggngtgaagccccccccatgtttttgaacaatcaggtttttaaataaacaactgggccctcca

SEQ ID NO: 489015 - DNA, 646 bp, Homo sapiens
tgggaatgggggaggtcctaaggtagtttggggaaaggaaacagagtgttacgttgaggggaggggaatgtgggcaaaaaaaaatttgagaggggtaaaagggggcaaaaaaggtgaaggaaaggttgaaagggtttttaggagttgaggagggttaatatagagaacgatgtattttggaaaaaacaggagcgtatgtgacagggtgaagagtgctggtgaattgggcaagggggagatgaggggggtttgtacctcctgaaaaaaggaaatggggagtgggattggggagagtgggttcttagggaggttaggaaagtgacggccaggcaggagacctagggggccatataactaaaaggcgtatttgttttaggaaaaaagtagaaaaaagcctcattagaagtcttgggaagaacacaaggaatctttgggaagcagaaggaggattgataggggcatccatgatttatcagatgttttgtggcaaccagggaacgttttatttcgggaatctgccagcgaaaccgggaaaagggaaaggtaattggtaataaatactcagattaagtagagggagtggacaggaattaaaagaacaaccccgcgcggggtgttctctctctctctctctactctctctctc

SEQ ID NO: 489016 - DNA, 105 bp, Homo sapiens
caaacattttagtcagagttctgatgtgataaaacatcaaagaatccacactggggagaaaccatataaatgtgatgtgtgcgggaaagcctttagaattcatgc

SEQ ID NO: 489017 - DNA, 346 bp, Homo sapiens
ttatctgccacggaaggatgatcccatcatactatctgctggaatcaacgcatggcctcctcttggctgcattctgtcgttggccccagatgcagccggtcctgggcttctagtctgcgactgctgaaaccgggcctacccagcaccacatagaaatccaggccgtagatagccaatgcttggggtcatgtttgataccccagatcgatgtgtgcctggtatcccaaagccatcgtttccagtatctgagacagtagtgttggcttagctcatactcccgcgcctttagacccttctccctgatttcttctgccttggcccctcgaactgtgctgtggaccgtagg

SEQ ID NO: 489018 - DNA, 322 bp, Homo sapiens
gtcccttgcttttttttcccctgaaacctagaggagcaaacccatcctcgggggggtatgtgaggctcccaggcagagccccgccaaaggttcccgtcattcccaaaaattaacccttcaaggttttccctatgaactccaaacaaagtttatattttagggcaaaaccccatggttaagcccctgacaacttttttagggtggttgggttccagcccccccctcccagtccccagccccagcaggggccttccccttggttaaggttttcccgcaggctattttttttcccgggaaaactcttttcccatgactttttcca

SEQ ID NO: 489019 - DNA, 282 bp, Homo sapiens
cgcaatctgtcatcccaggcgcacttgctgacctgggcgacagagtgagactccatctcaaaaaaacacaaaaaatgtaacccagcaacgatcattaattatactagggatgctattaagggaacagtttaacaattagggcccaccagtcaaacggcctgagaaaatacaatagcattagacatgatactagcggagaaaggtgtagtttgtgtcatgattggaacccagtgttgtactttcatccctaataatactgctcccgagaagtgcgcctgggtg

SEQ ID NO: 489020 - DNA, 449 bp, Homo sapiens
  misc_feature (27)..(27): n is a, c, g, or t
  misc_feature (32)..(32): n is a, c, g, or t
  misc_feature (56)..(56): n is a, c, g, or t
  misc_feature (185)..(185): n is a, c, g, or t
  misc_feature (260)..(260): n is a, c, g, or t
  misc_feature (270)..(270): n is a, c, g, or t
  misc_feature (287)..(287): n is a, c, g, or t
  misc_feature (322)..(322): n is a, c, g, or t
  misc_feature (346)..(347): n is a, c, g, or t
  misc_feature (404)..(404): n is a, c, g, or t
  misc_feature (406)..(406): n is a, c, g, or t
  misc_feature (446)..(446): n is a, c, g, or t
cgtcattaagggttgactatcctgttngcatntcatattcatgtaatatacgcacntgacactcttggtgatctttgtttacccgttccccatctgccccgtccatcagccgctgtttcgcacataccccttccgcttatccctgcgttcacccatatgtaccacaatgccatcatatattcttntcccttccgctcctgtgcctgtggggcgggggcatccccttttatttgccgtaccgtttttcggcgccaatccgnacgtctccanctgccccttcctcgcgnggggcgcccaatcaaaaccaaagtctccccggcancgctctgtcccctgtctattcctnntttcggcgggcatattcctcttttgccggcgcagaacagtttcgggctgtgggtgtncntatatagcgtggggccaaagggagtaatcctttgcttttnggg

SEQ ID NO: 489021 - DNA, 275 bp, Homo sapiens
agcctgagcacagagcagactccatctcaaaaaataaaataataaataagaggccaaaatgttaaaaataagcaaggattgggcacagtgctcatgcctgtaatcccggtactttcggaagccaaaattggaggatcctttaaggccaagagttcaagatcagcctgggcaacatagcgagatcccctgtctctacaaaataataaaaaaatagccactgttttagtcccttctcatgctactaataaagacctacctgagactgggtaatttat

SEQ ID NO: 489022 - DNA, 1011 bp, Homo sapiens
  misc_feature (1010)..(1010): n is a, c, g, or t
gtgtaggcaggctgcggcagacggcgacagtggcggcggcgccatggctgtgcttgcaggatccgctggtgcctttggtgatcccgggctgacagtcagattagcacaggggctcaactcctggagagtgagggttgaagaaagcggcgggcagccgctgcgtccccgctggctcccattagtcaggttcctgacagcggtgcccgggagccttgtgtgacgtgcccgtggcggccggcgagatactcatgtattgccgtccagtggctgcgtgcctcgtccgtcctcatcgcccaatgcccctcattcgccggcctgtggttcatccgactccatgttcatgggtttctactgctcatcttcctcctgtagcggaagctttgcctgtttgtgccttggtttcccctggcacgccctgttccttatctgctatagactgctggggaatacttgtttccatgtaccactgctccgatgtccccgtttcctggatcgttgcttgactcccgggcgttgtggtgctccctacctgcgtctgccctgatacgtctttcctaggacgcacgaacatcgtggctggggcatggcattgacttaggtctctaaatgtgttgcatcctttccaatgccgcctctcgctgggtgtcacgtttctgtcgtgggcttgtttggctggaatgttcctccttcctatgttgactattggctcgcccggtgctttatttgcactgggcctttctcgtggggaggctcgcaaggaagcggttgtctgccccagtaaccactgggttggttggatgcagccccaatggtgaaatgtgcctggctgggacactgggttcgtggcgtgccgcgggggtcccaaagctcgccttgccgtgtccctctcctctcttgtgtggttcccgctcggtcgatccttggcggtagtggagagagcgcttagccttgggttacgagcgttcctcttgaggggacctctgagttggcgctcgcaccatgtttcgccng

SEQ ID NO: 489023 - DNA, 190 bp, Homo sapiens
  misc_feature (18)..(18): n is a, c, g, or t
aaggtctgatgcaactgnaacggtctgtcgtcctgaacgcgcaggaattctccaaccgtgccggcgctttcctgcacagcgacacttccgatactcacatcaggatcaagggacggctcgacaaccgcgacggtacgctggccagcaacgccagccacattgtcgttgaagggcagtttgataaccgtcg

SEQ ID NO: 489024 - DNA, 266 bp, Homo sapiens
aagtcaactacaatcacgattggaacgttaaaatggactagacactagattaagagcggactgaagacacagctaataacttagagtcgaaagagcacacaattgatgatacaggaaaaaatgctgacgaactggtgaaagaactaactcaggaaaagaaccttaaagtctttaagaacacatgagatgcaaacttatacggacgaaaaaaaaactgggcccgcaatgcattgggtagtgctcaatgcacgatgatgaagactatt

SEQ ID NO: 489025 - DNA, 1270 bp, Homo sapiens
agcagccaaggggcccaatccctcatattctccaagtttgacggaaagaaaaccaacaagaagacccgcaagggttaccacagtgaagaaatcttcagtacgtctatccagggatcggatcaaagaagggctggatgtgcaatggcgcgatttctggctcactggcaaccttccaaccatatcagaggttcacagtgatatctcacatgccttcaagccttcccaaatagcttgcggattcaccacgatcatcggcacatgtggattcccaggccgttgtgccctctgtagcaccaactgctggcccatgcattcacccacaggtggcaggccacagcaacaatcattacgcactgcccacctcacacgtatcacgctagcaatcgatgccttggcagtcagcgacagattgaccttctcccttcaccctatcccatccaattcctaccatttggctctctgcatggtgtgcacaacaccacagcagtggcccttaacacgtcctacactaatccccagatatcatcaatcggcgactttctcgccatatcccaaacgccccgcacttgcatgactggtgacgcagagcactgggctaccctacgtgtcaccaccccacattcactgaccggcagcctaccaagctcgcagctacactgcgaccgatacgcctgcaccaccacacgaggacccctcacccgacaccacctgcgccgagcacacctgcgccgccacctggctgaacaccggacccacaccacggccccacaagacccacggtcgacaagtgcccatcatggagctgcaggcacaagggccgagcacgcgggcctgacaacggacacggccaccaccaccatatgacactaccagcgcacagcaacaagggaagcacaagcgccgcaacaaaggacaacgtacaggacgcaccaccaccctagcagccaagaaaaccggcgggtcactgcacaacagacatcagcacgaacactgcgagctacagacaaaacacccaccacgccccggcccacacagccacccctaaacgcaagaggacagcaacaaacagcaataagcaactaaaaagagaaaaaaggagacaaagaagcagcaaaagagacaaagcgaagacaacacaggcgtagccagccacacgagacaaccataagaatagaagagccaacacacatcagcccaacaacaccagcaaccaccaccccccacactccaccaccaacaaaccatagcaaagaagaaaaataggaataac

SEQ ID NO: 489026 - DNA, 267 bp, Homo sapiens
cctggtggataaagaaaaggaagaaacaaaaaataagggctctgttcaaataagatggtaatcacagaatcagaagtagaaagcccccaacaaatcacgtagtaaagaaggtgcatttcactataccaacagaagagggccctcttaaacttaaaaactaagcaaacctttttttcctggccccacggaatctacttgttacttgaggtctatgaaaatccaatatatcatcataaacaaaataatctgacatctatactgtgctcc

SEQ ID NO: 489027 - DNA, 1392 bp, Homo sapiens
taaaacaaacaatttttttttggaggcgcctatttttgtgccaggcatcggtttctaaaccccccccaaaaaaaaaaacaaaaaacaataatatagaggcgagcaaacacaatttctgtggagggcaaaggaaagaggggcagtgtgagttaaacacggctacggggacacgtgaaacaccctgtggaggttgagtgggggcctcttgctcttataggccctccttctttgggccctccttcacgcgaactctccctccttccttctttctgtggcgggggagacaatctcccgtggaatacgcggtggggagaatacctctcaagaaggaacagagggggtgtccgcatcacagtgtgtgtgtggctctctctcacgcctctcctgcggggagaaacctctcacatctctgctgcgtgtcacatgtggcccctgctcgcccgctgtgtgtgtttcccccagcgtgtgagagagagaggaggcgccttctccggcgggggagaacaccatgtgggggcaagtgtgaacactgtgtctctctcagagagagagtgcccgcttgtgagagagagaagctctccctgtgagagtagtggcgcgtgtgcgttcctctctttgtgccccaaattgttgaagaggcggtgacaactgttgccccacactctgtgtgagaggcgccccacagcagagggttgtgtgcgcatagttgtcttcacaacaccagaacagcggtgggcgtgtctcctatgtgcacaaccatcattgtgtgtgggcggagggatacttctccatattctcccgccacaccaccagagtcctacaccctggtcggcggctggagtctccgttgatggtgctcctctgctgcacacagccgcgtttataacgacacatacttgttgttgggccctccactattgaggaacaacacctctctcttttcttcagtgatggggcggacaacaatcttccgccgagacacccccaccgcggagagaagcacaacaagctgcaagcgccccaccggggggagagaaggagcggaatcctccgcgcgcccgtcgatgcgcagcggggggggggtgcttccacacaaggagcggcacgagcaccactctatcacagtggtctttcattgtgggtggcggcgactccttacgatagcgacgaccgcccttcgtgtcgttggtggagggtgatgaacagttctctccccggggcgcacacctctgttgctgatgaagacgagcgcgccctctccgagaacacatcacccgttggcgcaggtagggacctatctccccacacccgcgggtgcgatggttgtaggtgcagacaaaacgggggggggcggcaaaacacacgccacaggggcggcggcttttaccaagg

SEQ ID NO: 489028 - DNA, 138 bp, Homo sapiens
ctgaaaagatacacatgtaagcttgaaccacaagcaagctaaatacacctattttctcctgtattaatacagtctttattaggctagaacacagtggtgccaacctggctcactgcagccttcacctccttgcctctg

SEQ ID NO: 489029 - DNA, 204 bp, Homo sapiens
cgtcttagccaagcccttctctataataggatttcctacatctctgagagtgctactatcttattttaaaggaggaacttccagcctggccaacatgtgtgaaacctccatctctactaaaaatacaaaaattagccaggcattgtggcgcatgcccgtagtcccagttactcaggagactgaggcaggagaatcacttgaact

SEQ ID NO: 489030 - DNA, 371 bp, Homo sapiens
  misc_feature (19)..(19): n is a, c, g, or t
  misc_feature (69)..(69): n is a, c, g, or t
  misc_feature (160)..(160): n is a, c, g, or t
  misc_feature (289)..(289): n is a, c, g, or t
  misc_feature (295)..(295): n is a, c, g, or t
  misc_feature (368)..(370): n is a, c, g, or t
aatggttccccttaaaatnaaaagccttactggaagaaaaattcctaatgcttataacatcctaacctncccatcctcataaatttgaaagcttccttccccccacacagctgtgtatctgtcccctctggtcttcctcagaatgtctgtatcctgagcnaaacccatcttgcccaggtacagtgcctcacgcctgtaatcccaacactctgggaggccaaggtgggaggatcacttgaacccaggagttcgagatcagcctgggcaacatcacaggaccctattgctnccaaanatatatatatatatattttaattttttttcacgtgtctttttttttttaaatcattgccttcaaccaactcannnc

SEQ ID NO: 489031 - DNA, 151 bp, Homo sapiens
ccttggcttctgtagccagaagtatcctctctggctcctgtgtattgtccctgccttgttatttttattattttgtgagaccctaatgccctgcggctgtggaaatggggtacttaccaataactcctctttgggagtggaaacgggcctc

SEQ ID NO: 489032 - DNA, 401 bp, Homo sapiens
aatctcccaaatcccaccaaacttgtggtttttccctattcctggctccagaaggtcattttctaatatatcaatttcagagctcaacagaatgtgttcatgagttccagtgggaagtgtcaggaactgtctagtcacatccattaacaaatccattttactccagaaaaactagaggaccatgtagatgatggggaaaagagggaaaggtgctgtgtgaaaaaaattagaaatttttgctgtatttaaaattacctgtataaaagttcaatttccttctttgccttttacattttattaagttttgtgttttaccaaaatgaggatttcccagccatcagactgataatacctacaaaataggtgacaacaagaataaaccagctttggggaaaaaaaaa

SEQ ID NO: 489033 - DNA, 243 bp, Homo sapiens
ttttttttgagacaaggtctgcctgtgttgccaaggctgcagcgcggtagccattcacaggtgcgatcataacactacagcctcgagccctgggctcaagtgatcctcctgctcagctcctcagtagctgcaactacaactgtaccaccacatcttggctgatttcaggattttaaaatgtgaattaaagtgcatttaaatgatgaatattgaagtgacttgtgagtcagtggcacatacagg

SEQ ID NO: 489034 - DNA, 271 bp, Homo sapiens
gggacatagatagagcgggaacttcaggggcatcatccacttattctcggttcaagtcccagcacccggcatctagcttctcctcaatcactcgggtctgcatcactgactctgggtctagggaagtcctcttctttctggagctccttctccaaccatccccctgctctcctgggacttctgcacctcccctcggtacacatctgtcccctcaccaaataagtgtgttcagggttatccgagggcctgcctgggtgccgatgaatagcga

SEQ ID NO: 489035 - DNA, 543 bp, Homo sapiens
  misc_feature (45)..(45): n is a, c, g, or t
  misc_feature (65)..(65): n is a, c, g, or t
  misc_feature (122)..(122): n is a, c, g, or t
  misc_feature (125)..(125): n is a, c, g, or t
  misc_feature (142)..(142): n is a, c, g, or t
  misc_feature (164)..(164): n is a, c, g, or t
  misc_feature (170)..(170): n is a, c, g, or t
  misc_feature (172)..(172): n is a, c, g, or t
  misc_feature (189)..(190): n is a, c, g, or t
  misc_feature (209)..(209): n is a, c, g, or t
  misc_feature (238)..(238): n is a, c, g, or t
  misc_feature (268)..(268): n is a, c, g, or t
  misc_feature (288)..(288): n is a, c, g, or t
  misc_feature (323)..(323): n is a, c, g, or t
  misc_feature (459)..(460): n is a, c, g, or t
  misc_feature (473)..(473): n is a, c, g, or t
  misc_feature (477)..(477): n is a, c, g, or t
  misc_feature (482)..(482): n is a, c, g, or t
  misc_feature (542)..(542): n is a, c, g, or t
taatggatcaaacaactgtgggcagtgaaagggaacaaaactggnagtttgtccatttgaatatnagaccgtagtttcttcttaatttccacactatttctcccatattccttaaacttctnggnatccttcatgccttacngctacccagatgcaataaagtnattgtncngtatttcttacaatatnngtgatatgcgatgttcagnattttttttttcacggcactagggacccngtgaaatgaggggatatgggtggggatggnttattcacagatggggtccnggttcggtggttgggcacgggcaccacagtgggcncctttgcgaagtggcaaacataattttgctttctgccttcaaaaacatatatccatcgcgtttaggcttcatgatactgctcctgcaaaaatgcaagtcgaaagggactgcagggactctcgctgggggccctgtnngcttcgcgccggnctcnaaccnatggcggtgacaatgctggaggggtggtgtggtcaaaaggaaaggctggatggcgggtgnc

SEQ ID NO: 489036 - DNA, 326 bp, Homo sapiens
ttcccccgaaaataattcccaactgaggcccttgggaaagggcgggttttataaaggcttcaggggggggtgaaaccaatggatgggtttctccaaaggttgggtaggtcaagcaaagggggttaaaacccctctccccctttataaagggtggtctggggtctagcatttattgagaggggggggttaacccccccccccctgattagggattggtgaaaaattttgggccttcgggcgggttttaaatttagggataaccaaccaaaaatatgttttgaagcaatggaattaaaaatagaaacggcccttttttccctttccca

SEQ ID NO: 489037 - DNA, 553 bp, Homo sapiens
tcacggcacgcccccttcgatggcggttgagcgcagcaggttggtttgctcggcactgccgctgatggtcttgacgatgctgccgatcacctgggactgggcattcaacgcctcgatgccttcaccggcctgttgcatgtgctgggccaggtcgcgcatcacgtccacggcctgggtgaccacagtggtaccgcgctgggcgctgtcgtcggtttgcaacgaggtgctgtaggcaatattggcggcctcggccaccgcctgctcgcggttgacctggtcggtaatgaccgtggcgaacttgaccactttgtacaaccgctcattggcgtccagcaccgggttgtaggtggcctccaaccacaccaggcggccgtggttgtccacgcgtttgaagcgcgcggcgacgaactcaccggcgttcaggcgcttccagcactgttggtattcggcactgttgtattcctgtggttcacagaccatacggtgatgtttgccttcgatctgcgccagactgtcacccatgcaggaccccctcgggggcatcctctagagt

SEQ ID NO: 489038 - DNA, 727 bp, Homo sapiens
tgtaggcttctaatactggtggttatgaacacagcacaggagagaatctgtctcatgaagggttctctgcagaatgtctccagtgatgaaagtcgagatacttggctgactagacatacatttggcagtcttagagactgaagagcgggcttattgacacttttctcccttcctttcattccacccaaatgacttcagattatgtttcctataccatttactggggataaattgtcactgaccttgttgattttttattttagctgtaacaattctgcttttctaagttattgccctgccctgtggttatatttacctgtaattcaccacagtaatctaacccagagcggcagacctcagggatgttcgggtaggaggtagtaacctcttcatggtttctcacccatatagaatggtagtaatgttcagacagcatgattcatgatctaaagcctataatacacgggcagtggcgctgcaaaaggccatggttcctagaatacttggcaaaaagaagcatcacaacattacggcttgagaactagtaaatcgaccccaactcctgcaggcaatagggcatggacttcatgctagaccatcgaatgggggaaaggtcacatacagaacgcaagcagggaaattgcaaggaaccagaaacaccgagcatgcaacgaaaaacacaaggaggacaaattaacactaagtggtaaaacaaacaaacctcaca

SEQ ID NO: 489039 - DNA, 1454 bp, Homo sapiens
gctgagccggcgacagagcccgggaaggcagcgagacgtgggcgccggcccagccggctcccgtggtcctgtcagggcactcaagcagcctagagaccgcgcatctggacacctaaccgagagccgctccgctaccgagacgcgggcccggagtgcgtagcgagcgagcatacacacatggtagcgacatggcatacaaagggacaaagaagagcgacgagcgagacagagaagcggacaccggacacgcagagaggcgcatcacacgagcggccgaacctcaacaccaggcaaagacgagcacgcaaaacaacaacgaacaaatagcatagaaagaaccccgaggaaacgggaaagacacggacaaaacacagcaagccacaacacaacgacgaggcgcagcgaaacgacgcgcgcacagatactcacaaaccgcgacaacagagcaacaaaacagagacgcaccgcaagaaagccccccacacgaaggccaacgcagaacaagacgccggaacaaacagagacgcacgccacacgagccaaccccaacagacaaagacacggccaaaagaccaagccaccagatggacacacagaacagcgaagagaacacaagccgacaccacagcacccgcacccagaacgaacccgcaccagaacgacaacgaccagagccacaactccaacccaacgcaagcgcaaaaccaacaacaagcaaacacggaacgcacacacacacaagaggaaagagacactcacaggccaacacgacggcacacaactagaggacgaaacgggcacacaacgcgccaacgagccccaagccccagcccgccagcagaagacaagacaaagaaccaagacaccagaaggccgcaacatacgcgcaccgcaaacaggtaagacaaaagagcaaaagaagacgcccccgacaaaccaatcacaacaacaacaccgggaaccgcacacaggacaaacccccacaaaacacagaccaagcacaacgaggcggacaccaggcaacacacaacaagagaggcaagccccgacgcgcgccaaccaccacaccaggcagacgaagcaacctgaagcacaccaccaacacacgcaccgaacccagagcccgaagaggaacacaaaccacaaaacaccacaataaagacaaaaacaacaccagaacgaaagccacaacgaccaactccccaccacccccacgcacgcaccacaaaaacgaacaagaacaacggacacagacagcacaccgccaccgacacaccacacagcagaggcaacaacaacaacaaaaaacacccaccaaaaaaagaacagagacaacagcacaaaaacaacaacacaaaccacagacgaaagaccacaacagacacacgcaaaccccaaaaagaaaacaacgaatacaaacaaaccaccaccaaaacacacccaaaaaaaaagag

SEQ ID NO: 489040 - DNA, 1002 bp, Homo sapiens
gacgatgtcgacgggaacgttcagctggaaactggagataatatacactattgtaattgataacaatacacactactggtgctgtaacgtgctcgcatagattatgctgttgaaaccagacaccagcccgctgtcagggcagtcagtttgtgccatgaacaggcaggcgatttggctttcattcgcacaccgcaggtgcatgtctggtacacagagcagatcattctcttctactcatacgtgcacattctcacagaggctgcacttaagcaacacctgtcacagcactgcgccgcatgcaatgctggaattcacaaatccacaggcaccagaacactggctacagacgtctgccgacaggagtgtcacgactattgctctcacaggatacacgtcattctactgacacgcatatcagcacttgacaccattcttgcacggaaactgctacccaacagttactcccaaaacagtacccacgtaacacaaccacgaatgaccccattgccaggactgcatcaacagttgactttgtgatccctaacagcaacttccctttggcagacaaagcatacgcacatccaaggtgcaccctgctgcgaaggtgaccatagttaggtcttaatattttcaacagacccgacgtgacccacatctagagcgagcaaccaatatacgaagttcctggtccacactacatttcagttcacttacatgaacgcccgcaggaacatgggtgtgaattgctgccatgagcagatggtttcggcctccactccaacgttgtgctggcatcggtgactgtttccggacattggttcggttgacgccctttcacctggcaatttccagcgaatcgtagacacccaggcactcccatcattggcaccaattgaacgctaagcggtacacctgcgtcatctctgaatcacttgcccctccgctcccaagaaaatcactgccattcacgacttaccactcccttcccaacgggcccccggt

SEQ ID NO: 489041 - DNA, 177 bp, Homo sapiens
  misc_feature (127)..(127): n is a, c, g, or t
gtcagctcggtcccagtggttacagaggcccaggaatttgaggctataagtgtgtatgattgtgccagtgaatagccactgcactccagcctgggcaagcatggtgagatccgtgtcccttaaagangcgtatctgctgtcgtctgaagtttgcgtattttaatcaccaacttaact

SEQ ID NO: 489042 - DNA, 895 bp, Homo sapiens
  misc_feature (324)..(324): n is a, c, g, or t
cgttcctcgaccgcctcccccgtctctgccggcgacttttcccggccttcccatgcttttggccacttggccgttgcccagaaacggtgtccgtccgatcccgggatttttccaccacctccggctttttctcgcacgccgtgacttcgcccttttctccagctgcttccaggggagtttttccaaaccccactatcctctctgggactggacagatcgctcgctgttggtgaatcacccaggagctatgggggagaattaaactccgccatgactgttaactgtgccttaaataaagccaataaacagtggctcataaaatanaagtcgcattccatatctttggatggccttttagaaacctcattggccagctcataaatggaagccattgctcatgttggcccaacctggggcaccgagtgatttccatctctggtaaagggtacacttttatttcccgtatgttgtaccatccaaacaccactactacctcttaagtccccgtatacctcctttttcatactggaaaaaaaagcttgtggcccatgggaccgtaagacatcataagatttttataaatatagtttatttttgtgggagataaattttataggactgttctttgctgttgttggtcgcagctaaataagactggacctttaacttttctacccattctgccagttaggtatgtttgccggagaaaagtatccagacgtttaactgccgttgactttctccccgttcctttgagggtcttctaacttattctttgttctttaagtagaattgccgtctatgattgtactttgaatcgcttgcttgttgaaaatatttttttagtgtattatccctgtctgttctgcaccataaacataacagcctctgtgga

SEQ ID NO: 489043 - DNA, 369 bp, Homo sapiens
  misc_feature (29)..(29): n is a, c, g, or t
  misc_feature (208)..(208): n is a, c, g, or t
tgaactggagaggtgaaggttgcagtggnctgagatcgcgaaacagagcgagactccatctcaaaaaataaataaataataaaattggccgttcacggtggcttatgcctgtaatcccagcactttgggtggccgaggcgggtggatcacctgaggtcaggaattcgagaccagcctgaccaacatggagaaaaccccgtctctactnaaaatacaaaattaaccgggcgtggtggcgcatgcctgtagtcccagctacttgggaggctgaggcaggagaatcacttgaactcaggaggcagaggttgcagtgagctgagatcatgccattgcactccagcctgggcaacaagagtgaaactccgtctc

SEQ ID NO: 489044 - DNA, 843 bp, Homo sapiens
  misc_feature (102)..(102): n is a, c, g, or t
  misc_feature (139)..(139): n is a, c, g, or t
  misc_feature (149)..(149): n is a, c, g, or t
  misc_feature (200)..(200): n is a, c, g, or t
  misc_feature (212)..(212): n is a, c, g, or t
  misc_feature (224)..(224): n is a, c, g, or t
  misc_feature (243)..(244): n is a, c, g, or t
  misc_feature (257)..(257): n is a, c, g, or t
  misc_feature (264)..(264): n is a, c, g, or t
  misc_feature (274)..(274): n is a, c, g, or t
  misc_feature (276)..(276): n is a, c, g, or t
  misc_feature (368)..(368): n is a, c, g, or t
  misc_feature (375)..(375): n is a, c, g, or t
  misc_feature (391)..(391): n is a, c, g, or t
  misc_feature (393)..(393): n is a, c, g, or t
  misc_feature (412)..(412): n is a, c, g, or t
  misc_feature (417)..(417): n is a, c, g, or t
gggctgtcatggcgggtgtgctgaagaagaccactggccttgtgggatggctgtgtgcaatactcctcacgagataagaatatgtacacaaagattcttgangtcttgaggaaatccctaaaaatgcagcatatagaangtatacagancagattacaaatgagaagctggctatggttaaagcggaaccagatgttaanaaattagaagancaatttcaaggnggtcaattagaagaggtgnntcttcaggctgancatgacntaaatctggnangaaaaatgagggaatggaaactatgggagccattagtggaagagcctcctgccgatcagtggaaatggccaatataattattacgtgacttngggtgtncatgggaactgatgtnanttaaatatctgtatataangacgngtccttataactgacacttttgtaatcaagacaggtgatatagacaactatgtaggacgactgttaaacacttggggattatggtaatatggtcatgtgaataaattttgatttatacagtactcacacaagtgttccaagactgattttctgtggaccgaagaggccatggaagattggacacattatcaacgaaagtcctaagatttcaaggctgagaccatatcaaacgtaactttcttcatagtgtggtcatccttcattacttaagttacccggaccggacggccttatatgttggccaccacgtttgatctccggggcgatacaggggcttccacgtcacagccgcggtgggccagcactggtcgccggttcaggttagagccacctgtggcaaccggtaacaatgccgcccagcccaaa

SEQ ID NO: 489045 - DNA, 474 bp, Homo sapiens
aaggcccggaaaccggacaagcagaggcggacgtcaccctgagcaaactgcaaggcgacaaggcggcaactgggtgtccaggccgcaagaaccaccatttccctgggagtccgtgctctcttcgaccccaaccctgggtacaagaaaatgatttgtggccccttccggccctaaggatggccaactaccagctccaccctcttaactccagtcatattacatcacttgtggcggcattatgacggacaacctacctggatgacattaatcctggagccgcgaaaattaaaccagacccccccaatgaggatttgaaaatgcggggaagctttgggaatttctggaccaccggaatgaaataactggggggaggggaaagaaccaagttaaaaatgggagaattcctgtttttggcccaaattcccgcccgtggggttgcccaaaagtcccatggagaaaaggtttcatttagaa

SEQ ID NO: 489046 - DNA, 442 bp, Homo sapiens
  misc_feature (1)..(1): n is a, c, g, or t
  misc_feature (373)..(373): n is a, c, g, or t
  misc_feature (432)..(432): n is a, c, g, or t
  misc_feature (438)..(438): n is a, c, g, or t
ntttcggcacagctctaaattatatgaaattgttccacatgtgacttggatcactgtgaacctgatcccattggagaaattagttttactaaacacaaatacattgttagtcatagaaacgtaacttaatgctttgaattccatatatctcaatgcttttaattccatatatcttttttacccacacttgttacatgcctattttcatgggagaggaaaaattatatacagtcatgttgagggctattactaatcttgctgtgtactcttctcagtgttcccaggcgtgtgggctgggacttccactagtgagaggggtggaattgccccggggttaaggccctggacacttcatggaaaccaacctttttanttggacattcacagttaggtttcatggccaaggttctctttggaggggctgttaccccnttttantttc

SEQ ID NO: 489047 - DNA, 1055 bp, Homo sapiens
  misc_feature (314)..(314): n is a, c, g, or t
  misc_feature (351)..(351): n is a, c, g, or t
  misc_feature (361)..(361): n is a, c, g, or t
  misc_feature (412)..(412): n is a, c, g, or t
  misc_feature (424)..(424): n is a, c, g, or t
  misc_feature (436)..(436): n is a, c, g, or t
  misc_feature (455)..(456): n is a, c, g, or t
  misc_feature (469)..(469): n is a, c, g, or t
  misc_feature (476)..(476): n is a, c, g, or t
  misc_feature (486)..(486): n is a, c, g, or t
  misc_feature (488)..(488): n is a, c, g, or t
  misc_feature (580)..(580): n is a, c, g, or t
  misc_feature (587)..(587): n is a, c, g, or t
  misc_feature (603)..(603): n is a, c, g, or t
  misc_feature (605)..(605): n is a, c, g, or t
  misc_feature (624)..(624): n is a, c, g, or t
  misc_feature (629)..(629): n is a, c, g, or t
gggctgtcatggcgggtgtgctgaagaagaccactggccttgtgggatggctgtgtgcaatactcctcacgagaaattcaaataagaaaaattacaaaaaaaaattggcagtgcttcggacctcactttgaaaaatactgattcaggctgggtgggctcacgcctgtaatcccagcacttggggaggctgaggtgggcggatcacctgaagtcaggagtttgagaccatcctggccaacatggaaaaaccctgtctctactaaaattagaaaaaatagccagaggttaagaatatgtacacaaagattcttgangtcttgaggaaatccctaaaaatgcagcatatagaangtatacagancagattacaaatgagaagctggctatggttaaagcggaaccagatgttaanaaattagaagancaatttcaaggnggtcaattagaagaggtgnntcttcaggctgancatgacntaaatctggnangaaaaatgagggaatggaaactatgggagccattagtggaagagcctcctgccgatcagtggaaatggccaatataattattacgtgacttngggtgtncatgggaactgatgtnanttaaatatctgtatataangacgngtccttataactgacacttttgtaatcaagacaggtgatatagacaactatgtaggacgactgttaaacacttggggattatggtaatatggtcatgtgaataaattttgatttatacagtactcacacaagtgttccaagactgattttctgtggaccgaagaggccatggaagattggacacattatcaacgaaagtcctaagatttcaaggctgagaccatatcaaacgtaactttcttcatagtgtggtcatccttcattacttaagttacccggaccggacggccttatatgttggccaccacgtttgatctccggggcgatacaggggcttccacgtcacagccgcggtgggccagcactggtcgccggttcaggttagagccacctgtggcaaccggtaacaatgccgcccagcccaaa

SEQ ID NO: 489048 - DNA, 352 bp, Homo sapiens
agcggcccaggttgtgtgatatatcctcctacccaaattgctcaactaagacaagtcctcgctggacgctcaggatgccagacctcatccattccaaaatatgcccggtgcatatccgaccagctgctcctagaaccaccatttagtactactgagaccagacttcttcacagagttccacagagtcatgtcaacacagcgtagttgctaacacatcaaacacagacaactgggtccacgctcctgcacgctgcagccagctgcagactacatcctcgctgtaccgcaccagttccacacgtataaatactgctgcagagagttagcaatccatcaccacagaccctgggat

SEQ ID NO: 489049 - DNA, 205 bp, Homo sapiens
gacagatgagtttgctaaggaggaagtagcagatctctacgaacttgtacagtatgctggacacattatccaaggctttacctcttgatcacagttggagtgtatatgtcacgtcattccctcagtccagggaggatattttgaaggtttggtagaatgtcccgtgtgtcacatctgttgagggtctgttctcgaatacctctca

SEQ ID NO: 489050 - DNA, 323 bp, Homo sapiens
  misc_feature (23)..(23): n is a, c, g, or t
tgagagggtctcaagttggactnttagtttacagatagaagaaattaatcacttatatctttagatgaatgcacacttacacaaacacatatacctgagaaggtatatagctctggaaaacttaattttgagttggtctggcaatattttccaggcctcctctctgtacccaattacagaaatgaactccctcctttctcagttcatttgtgtctctttattgggctgtgagaataagcagcccaacacttagtttggtctggtaccaggatgcctggcatactcctaccaggtcttcagagggaggcactgagagtgcatgg

SEQ ID NO: 489051 - DNA, 276 bp, Homo sapiens
acatgcctcgcaccactggatcgtcatatcaccggtcaccattcctagaccagattgacattctgacactcgccaaccgatgcactaattattgcgtagctgcacccaccgcactcctttgtggcgggactgaatggcacagttaaggaaagagggtgatcaaaaaatacaagtgtggccctctcgctgctcccttgcccaggaccacttgcattccagcactcgctttatttgctctctcgattcccctttcctcctcactgcttcccaagccca

SEQ ID NO: 489052 - DNA, 1027 bp, Homo sapiens
agcggggtgagtgtggctgggggtgcagagagcgcacgggaactgcgggggtctggggccgaacacgtgaccgcagccgggctcgccgggagtttctaggaaggtggtcaacgaagtcattgcgagtggaacttacagcttccttgagtcggactcagcattcagatactcaaagcaccgactgcaataccgtgcgtgcgaaatagaagagcagaacaggtttcaagacgacagatgagttgtcgaaagagagcagctaaggggtaatcacggaacgcagggccgctggccctgacacatatggctcatgacttatgcttcggcccaagattttgctcccgccgttaggaacggtatccgcgcgcggaatactagcggcccctcatcacgcccgagtcgggcgccatgatgaacaacaacgcgtcgcgaggatcgcatcgagattgcaccgtacgcctaccatgatagacacagcctggtacgcgctacgcgcgaacacgcaggattgacgactaccgtatacgagtagacgcctgagcgtggaacaaccaaaagacgcgtcacgaaggcagtacgttcgtgggaatcccggcgaacagattgaacgtgcactggactgacaggacaatcaaagtgggataggtacaaaggggccacaaggattacaagaacccttcttgagaggaaccaggcagggttgacacccagggtcgtagaaggtcccaagagctgaggtagaggggttgttcctcccctaattatcggccacgttccaaggcttatcccgggaagatcgcagaggattcggtctaggaacgcagagttgtttcattggctccggaattttggtggtacacctagttccttatccacttggtcatcggagaaacttgagtggttatacacattgattccgaccggctcaaaagggggaaatcgggggaaaacggaaagttgtgcacgaaaaataggatggcgcgcatgtgtcgtgaaccaagcggccacggcgtgagaaaaacttgagacc

SEQ ID NO: 489053 - DNA, 210 bp, Homo sapiens
acgcgcactgattattattggtatatgagtagagcatgatcacattatgttcaaggcattgaaacactgtcatcttcttatcactcctgtcacgaatcctagatactgaggagactgcccctgtgaggtccttgtgggcggcccccttgggagggtgtccctggggctttccacgacgaaggtgggggaaggacctttgcttgatggccc

SEQ ID NO: 489054 - DNA, 379 bp, Homo sapiens
  misc_feature (263)..(263): n is a, c, g, or t
  misc_feature (285)..(285): n is a, c, g, or t
ccatgcacagttggtggatacccacgtgatataaaaacaagtgtctacacaaaaacttgtgcacagatgttctttgcagcattatttataatagcccaaaattgaaacagccctaatttctatcaactaacaagtgaataaacaaaacgtggcatatccatacaaggaatattattcagcaataaaaaaagagatgaagtactgatatgcaccacaacatggaaaaaccttgaaaacatatcaagtgaagaatgccagaaccnatgaaaggcccacatattatantgatttcatttatatgaaatgtccagaacaggcgaatatatatagagagaaggcagattagtggttgcttaggctgaagggttggggaggacaa

SEQ ID NO: 489055 - DNA, 423 bp, Homo sapiens
  misc_feature (275)..(276): n is a, c, g, or t
  misc_feature (292)..(292): n is a, c, g, or t
aggttgtagtaagccgagatcgtgccactgccctccagcctgggcaacagtgagacacgataccccaaacctttgcttctagggatctggtaacagctgccccacccacaagaaatggagatctgggaccatggacaaatttctagagacctattttcctggattctgtgaatctcgccgaggttttcttccggatctcggtttctgcattttttgtttgtttgcttgcttttttgaaacggagttttgctcctgttgcccaggctggaatgcanntgcgcgatctcggttnactgcataccttcagctcccggtttcagacgactctacggactaagtcttcctaggcgatggtattacttgcgcccgcctccacgaggtcagcttctccagaccatcctcgccatcactgttcgctctccg

SEQ ID NO: 489056 - DNA, 165 bp, Homo sapiens
gcctttactaaagccacttttatagtcaactatctcttcttatttgtgtgattagaacttagaaaaatatttactagttgaagttattatcactgttgactttagttcttaaactcatttcacttctaatactttctgctataactgtccagcattttaatgaaa

SEQ ID NO: 489057 - DNA, 101 bp, Homo sapiens
  misc_feature (48)..(48): n is a, c, g, or t
acagcgtctcagcgtgcgtatgacactctgattcacagagatcatgtnctcaaagcgacattggggaattgggtggaccccatagattcaacttatcagta

SEQ ID NO: 489058 - DNA, 716 bp, Homo sapiens
agttgttaaacactgcgctttattttcttaagcagttgtggtgtgagtatcagaattgaaacaccttttttgtgggttcaacatatttacctttacatggtccatgactttttactaagttcagtgaatatgcctgtaattcagtgtatttcagttccgtcagaaagtgtaaatgttagtttcttggtaaagtccttttcttgcttaccttgactgttgatgtactgattgcagaagttcacttgtctcgtttgtgattcttccagatgtgatgcttgatattttctatatgcgagttagccatccacacccaggcatagcctggatacagtataaaacatagatacaattaaacagatggttgccaagcacaggaaaaccttatttctatattattcccttccttattttacagcattgtgagtaaatcagatgttgaacttcttttgccaagggaattatagctgcaggttctctctcactgccatcaaactgtacaaagcattaaacactgcgaaggtcaagctcacacagattattttggccacgttttgtattcaagggatttagtaacatcatattgtttccacccaggcagggaacgtagggcttacgtgttttaaaacacctctgctttctgatgtagccttaatattctgctattgccgcaattaaaaattgtcttcatgtacattttggaactaaacacgtgatgt

SEQ ID NO: 489059 - DNA, 899 bp, Homo sapiens
ctcaccgtctctctggtgtgtccgccccgcagggttgcatacctggggtgttctcgccagaggtgtgtgccattgtgcgttatgggccgccgggggtttttaccaattaggacgctgtaggaagtgctggtgtgtttgtcccagaacagagtatagtattctatttgggggaagccgcctactttctacttgtcgtccaagtgtgtggccccccacagggttgcttatgctcgcctgactgtcctttggcgacgccacgtctcggttgcctctggtgcccgccacacacccgctaaacaattctgggcgcaaatttgttgctcccactcgggggccacttccgttggttgtcaatcaggccgctgtcctcagacaatccttaatcccgctggtttaccacgctccccactctttaaaattgtttccaagagccgctccacagggctcgccggtgttaccttcgtatcctcctcgctcccgctggatgggccgccactccgcctcaggagcgtcctcacacctcactcggggggacatcacacggaggggagaggtttattaaaaaccgcacaagcccttggtggagttcacgagtgcattcttttgggcccaacaattatgttatacgccctcttatcttattttgcctgttgaacgtgcccttgtgggcgcgagcacttgactcgaatcacaatagttcctccatggcgataaaacaggatgaagtaattaaccccacccgttcgcagaggcggtgaggcgactatgaaacaagaggctacaccgcggagactcgtggccaacaagcgtttatcaacaccccggcgccgcccgatctccaacaaagcggagtagttcaatcgccccctgaaaaaccccatttgggcaacacacataca

SEQ ID NO: 489060 - DNA, 219 bp, Homo sapiens
  misc_feature (31)..(31): n is a, c, g, or t
cttgatgatatctccattgggggcttacatnggggattgattctattcaactcccttactctccattatattctattccattcgggttgttccattccattccattctattccactccattccattgcactcgggtttattccattccattccattccattccattccattccattccggaagtttccattccattgcattccattccattccattccg

SEQ ID NO: 489061 - DNA, 171 bp, Homo sapiens
tgggtgactggcggaagactatggacggcatgtctggcatggaacggccggaagaagactgtttgatgccgccagtctccgacctcacaatagaggccagcttgctgtgctgcgctctgagctcctgcttcatgcttctcctcctcgcagctcttgcgaacctcaagtcta

SEQ ID NO: 489062 - DNA, 348 bp, Homo sapiens
tcttctcccaaaactttcccccttaagggatttctgggcaagaaacaaaagcaaaattgtcccctccccccgggggttcagatgaaacctggggggaaaatcaggggccccccccaaagggggccttggggaagaacccagctggggttataaggaattgcccctgagaggggccccctatttttggtgggtccaggtcccgggtctccttcggaaatcaagctggaaatggcccccccccctgggccgggggccctggttttctggggaaatttttttttggtttttgggaggccctggggtaggagggggggttccggaataaaaatggggaaggttttgtttcca

SEQ ID NO: 489063 - DNA, 503 bp, Homo sapiens
aatttattcctttaggttccccctccataacccctttgccccctggccaatatagaaaggtgttttcaaaagaatttggccgtagattttcccacccctcataaggggcgcattcaataaggaaaaagttctccctcccgtattaaattggacataaatccccaaggttcttaaagaccccccagggacatgtttgttgcctgggattggtaaagaaaggttggtttttgaaccttgaaatttccccctggggttttttcccatcatttcggcataccccgcaaaaggaatctcatgttgactcccggcagaagttcaaggggccccagccggtctatttgttttgaggggaaaattgtgttttggaccccgtaacccatttggcccctttaatcgaggttttccaaattcccaggggggttaataaaaaatgataatcagttttttttgctaaaagctaagcccaatttgtaataaagtgttttataatccttccaaagcca

SEQ ID NO: 489064 - DNA, 332 bp, Homo sapiens
agagcagacacagcagcaatggagtgtgcacccgcagggtgtggtgcctcacacacgtaatctcagcactttgggtggtcaaggcaggaagatactttgaggccaggagtttgaaaatagcctagacaacaaagcaagatttcatttgtactaaaaatttaaaaatttgccaggggcggtggcacatgcctgttgtcccagctgcttgggaggctgaggcaggaagctcgcttgagctcaggagttcaaggctgcagagagctaggatcacaccactgcactccagcctggacaacagagtgagaacctgtctttaaaataataataataat

SEQ ID NO: 489065 - DNA, 653 bp, Homo sapiens
gttgctactctgtgatcactctctcctgagacatggtgatcgaactccaacatggacagcagtgagcaggcactgcatacgtccgcaggaatggaatgagcctcagcatagcgcggatgaaggtagccgtagatctgtgatgagggaggcggggcccgggtaatccacatacacgacaggcacgtggcgcaggaacctgtgtgagaggggcttacttccagggtctgtggggggattacaagccccaacaaactggattctctccagcttcacccatgtttgatctgaggtacggtaaaagcctccgtgctccagcatctgtctgatgaaggatatgaccctctgggtcccatatttatccatatctggcaagttgatttcatcacagaacaacaccagccactttccaagttgaacaggagccaaaaacaccccattaggtgtgcgcctgtactcgcagtagtgatcaaaagtcttcagaagcagctctggagtagtagcactggagaagttgagacccaccaagctccatgtcaggcaaggaccggagggcgctgaagactgcatggtcttgccagaaccaggagggcaacaagacagggcttgtgtcggcagccaagtgtcagaggctcgtggcggatggtcaggtggca

SEQ ID NO: 489066 - DNA, 396 bp, Homo sapiens
atctccatggagatgtcctggacaaagcaggctgaactggacaaaaagaaggtagagggggcaattgttcttgtctgagtagctgtgcctcccagggcagcatgctgcagctctcgctcccttcggtccaactcctctgccttcctggttgagctcctcctgtttcttcagcagctcagctgtggctgctgcagctgaggcctgagtgctgtatgagccatagttcttaggttctgtggggctgagctttctcgagggcttgcaaaggagggagctgagggttgagggcaattggggccaaggggctggaggctcctaggcttggtgatggctcccgggtctcaaaagggtcgtacaccgtcacgcgtggaataatggctggatggtatagggatt

SEQ ID NO: 489067 - DNA, 308 bp, Homo sapiens
gattcagaccggtcttggcatgggtatcgggatgagtatcgggatagccacgccgggatatggatcgatatggtggccgggggcgctatatagaccgaggcagcagaacaggatcatagaggctatgattcccggataggcagtggcagaagagcatttaggcagtgggtatcgcaaggatgatgactacagaggaggcggggaccgctatgaagaccgatatgacagacgggatgatcggtcgtggagctccagagatgattactctcgagatgattataggcgtgatgatcgaggtcccccccaaa

SEQ ID NO: 489068 - DNA, 365 bp, Homo sapiens
  misc_feature (219)..(219): n is a, c, g, or t
  misc_feature (227)..(227): n is a, c, g, or t
  misc_feature (253)..(254): n is a, c, g, or t
  misc_feature (258)..(258): n is a, c, g, or t
  misc_feature (324)..(324): n is a, c, g, or t
  misc_feature (343)..(343): n is a, c, g, or t
caatggtcgtaaataaaggctaagcgctggatttttccatggccccctgactcctcaggagcgcaggcagaggaggtaaacaggaggccaggttacccatgagatgaccagaagctcatccagggccgggaccctggttcattcgtgaattcttggcagcggctccaggctgggcacattatatgctgtcatgtgactggcctggtggccacctcttgntctcttgnaaaatgtgccactcttgtgcttaagnnaaanaaaggttgccgcctgacctgtcaagcacccaggcccttcttcttgacttccttcactttgaacccngaagggcaatttgggaggnaaaccacaaaagctttggcccc

SEQ ID NO: 489069 - DNA, 870 bp, Homo sapiens
  misc_feature (482)..(482): n is a, c, g, or t
agcggactcactgttgcggcacggagactgtgaagctctcgaggatcctcccggtgtgggtcggcggctcgcccgtcgttctccatacgccgtacggcccgttgcctccgtgcccggaccgtgtacctctgccgagtgagccaatactggacctgagtgcagaagatcgaccaggctcgtgtccaagcgcgtgttgcggacagcggacggacggacactgggcagccatgacgagtgagaaggcgagcgacactgtagccgcgtgagcagcatgaaacatggtctcgagagcgtaatggagtcggcacaccgtgttcttgccgggcgccttgactagaggaaacctgccttgggggtcctgaaggatcccagcgatgcgtcccgagtgtcgtgcatcaatgtcagggctcgtagagtagcgagtggacctcacggaaatggaggaaattttgccaccatggttgtgaccgcgcacatagtanaggaccaatatacaatgatggtgccatcgattctctcgagatccagagtccctagggactcgggcgagttgcagtgtcaaagttggttgggagaggtgtaaacattgtttgaacttagttacacacctcgaaaactaaaatgctaaagcatcgaagcttcatggggccttttcgtgaatggtagcaatttctggaaccttgggcgtttgaatacaacgggaccccgttgggagcttttagactaggaacagattggacggtagatgagcaaggaatctccttggggcacaacacagaactttgggggcttcatgagtcttccactattggggaaggataggcctagcgaagggtttattgcgaccatatggccacatttgacttacct

SEQ ID NO: 489070 - DNA, 214 bp, Homo sapiens
ctcggcagataaagagttgaataaaatgtaccatcaggcaactctcgggttctacacttaggagccagatgagtaaacgggtcactgggtaatctagcacagtatctgtcacggaaaaagaaactgatgctgagtctacaactgagaaacagaagaaaaaacgtgtagtgacgctcgcattctgaagttttcgtgttttgtggggttaggtctg

SEQ ID NO: 489071 - DNA, 551 bp, Homo sapiens
tgacgcctggtgcagcggggtggttgcccggtggtgccctgtgtgttgccctgtggatgggtgaacctgctgtgtgtgctttcctgctgtgatgtgtttctgtgcaggtgtgcagtcctgtgtggcctggtggtctgctggcctgtgtgactgtggtgtgcctgtgtgtgcctgatgtgcctgctgtgagctctgctgggagtgcaatggtgccggagggataacgggacgttggattgcccctgtcaccaaggttggtgcctggcttggtcaagggacattgaatgatcaaggtcccgtggaggaagatctatctcgttctacccttgcccattaacggaatcagagatcattgactttcttcctggggggcctctctcaaggattgaggttcttgcaagcgattatgccagttgcaagaaggcaggacccgttgcctggccagctgcacccagggtttcaagggccatatggtttgctaatcggcggactaccaaatgggccacgtacggcgtctggggttgttcacggtgcttccaaggggagcgttg

SEQ ID NO: 489072 - DNA, 790 bp, Homo sapiens
  misc_feature (34)..(34): n is a, c, g, or t
  misc_feature (42)..(42): n is a, c, g, or t
  misc_feature (52)..(52): n is a, c, g, or t
  misc_feature (54)..(54): n is a, c, g, or t
  misc_feature (56)..(56): n is a, c, g, or t
  misc_feature (65)..(65): n is a, c, g, or t
  misc_feature (67)..(68): n is a, c, g, or t
  misc_feature (70)..(70): n is a, c, g, or t
  misc_feature (97)..(98): n is a, c, g, or t
  misc_feature (130)..(130): n is a, c, g, or t
  misc_feature (167)..(167): n is a, c, g, or t
  misc_feature (170)..(170): n is a, c, g, or t
  misc_feature (181)..(181): n is a, c, g, or t
  misc_feature (198)..(198): n is a, c, g, or t
  misc_feature (201)..(201): n is a, c, g, or t
  misc_feature (203)..(203): n is a, c, g, or t
  misc_feature (210)..(210): n is a, c, g, or t
  misc_feature (248)..(249): n is a, c, g, or t
  misc_feature (265)..(265): n is a, c, g, or t
  misc_feature (342)..(342): n is a, c, g, or t
  misc_feature (356)..(356): n is a, c, g, or t
  misc_feature (363)..(363): n is a, c, g, or t
  misc_feature (376)..(376): n is a, c, g, or t
  misc_feature (378)..(378): n is a, c, g, or t
  misc_feature (391)..(391): n is a, c, g, or t
  misc_feature (403)..(403): n is a, c, g, or t
  misc_feature (441)..(441): n is a, c, g, or t
  misc_feature (482)..(482): n is a, c, g, or t
  misc_feature (517)..(518): n is a, c, g, or t
  misc_feature (523)..(523): n is a, c, g, or t
  misc_feature (592)..(592): n is a, c, g, or t
  misc_feature (610)..(610): n is a, c, g, or t
  misc_feature (670)..(670): n is a, c, g, or t
  misc_feature (674)..(674): n is a, c, g, or t
  misc_feature (777)..(777): n is a, c, g, or t
tccgcggaccctgagcgcaagagccaagccgccngcgctgcnatgtgggccncncngccgccgcncnncnccggggcctggctcccgggagtccccnnctgcggtgccgccgaactgtccgtgaactccntagagaagtttcacttcaagtcatggatgtctaagcnccntaagacctacngctacggaggagtaccnccncnggctgcngacgtttgccagccactggaggaagataaacgcccccnncaatgggaaccacacntttaaaatggcactgaaccaattttcagacatgagctttgctgaaataaaacacaagtatctctggtcagagcctcngaattgctcagccnccccccngtaactaccttcncngtactggtccctncccccctcccgnggactggcggaaaaaaggaaattttgtctcacctgctncaaaatcagggtgcctgcggcagcttgctggactttctccncccctggggccctggagtctgcgatcgccatcgcnnccggnaagatgctgtccttggcggaacagcagctggtggactgcgccccggacttcaataatcacggctgccangggggtctccccagccangctttcgagtatatcctgtacaacaaggggatcatgggtgaagacacctacccctaccanggcnaggatggttattgcaagttccaacctggaaaggccatcggctttgtcaaggatgtagccaacatcacaatctatgacgaggaagcgatggtggaggctgtggncctctacaaccct

SEQ ID NO: 489073 - DNA, 104 bp, Homo sapiens
cacagcttaagctgtcagggttacaggcttgcccctctgaagccatggactgagctctaggttggcccctttcagccacagctgggtgcagctggtgtatagca

SEQ ID NO: 489074 - DNA, 234 bp, Homo sapiens
agtcaacaacagatggcagataagatagcagtcccataagattataagactgtattaaaactataccatttactatgttaagatacacagatacaaaccatggggtaacagtggcctacagtattcagggtagtacatgctgtacgggttaatagccggggagcaacgggttatctcatatagccaaggggtgtgtggtgggatatcccctccattggtataagtcacactagg

SEQ ID NO: 489075 - DNA, 387 bp, Homo sapiens
gttcccgtgtgcacacttccacgttactctgcatttcttccttcccaaaaaggtgggacccaccatgtccttcaacagtttgggctgacaaagcattattggcatggaaacaggagtaagcgcttacatcctaactcggtccgctctaaacaaccctgagatggtggagggccttgtcgttatcaacgtgaaccctttttgcgaaaggctggatggactgggccgcctccaagatctcaggatggacccaagctctggcggacattggttggtgtcccacctttttggggaaggaagaattgcagagtagcgtgaaattgatccacacctaccgccagtaacaattgtgaatgacatgaacccgggtaacctgtacctgttcatcaa

SEQ ID NO: 489076 - DNA, 128 bp, Homo sapiens
aatgcaggctgaacctgacctgggtactccctgcctctgccagcccctttctacaccctccgtggtccccatggcactgtgctctctcccctctgctagaatctcgctgagggattggtaggggaggg

SEQ ID NO: 489077 - DNA, 147 bp, Homo sapiens
  misc_feature (27)..(27): n is a, c, g, or t
  misc_feature (67)..(67): n is a, c, g, or t
  misc_feature (129)..(129): n is a, c, g, or t
  misc_feature (137)..(137): n is a, c, g, or t
cccatcaactctaaggagctgtttgtncatccactctggaaccgctcgtttgtggcctgtggcaatnacatcgccctcatcaagctctcacgcagcgcccagctggggagatgccgtccagctcgcctnactccctnccgctggtga

SEQ ID NO: 489078 - DNA, 220 bp, Homo sapiens
gtatcggccaacacgtttagtgctactaggagacaaacatactcacagtcatcactgcatagcgtcaaaaatgctatatttaaaattcctaacaatttgcatcatcacaatttaacgttgctcatataatttcttaggggaaaatgaagcagacagaagttcatttaaaagttataccctgagcattgaaaatctgcctaccatatatcagcttctttct

SEQ ID NO: 489079 - DNA, 101 bp, Homo sapiens
cctgggggacggctcctcttggcacctataccagccttcggccaggtcagctggctgagggagacacacactgagatggctggggttcccctgtgaacaag

SEQ ID NO: 489080 - DNA, 644 bp, Homo sapiens
ggtgtgctaacctggacgtgtgtcgccagtgcgagaggcgggagccggagaggtgaggcaggacccggtgctccactgtccgcctctccgagctcttgtgacgcggacctcagtgccaggattgctcggtggcgagctggctggcgcctgcgcagtgccggcagagggagttgcggacagcctgagagggctggctctggggaggcccctgggctgacggggacgtgccggggcggcgggccgctgtagcacggctggaggagtggctctggccgtcgtggtcctgtctttggccctgggtatgttcgggggcgctgtgttgcttggcgttggttaccgttgcgcggcgggcggtcaacgcttgcactccgcgcctcctgttgttgccttgccgacttccttccagccccgccgtgtccccggacctcttctggggaacctaccgccctcgacggtctacttcgggctaagacccgcagcccgaagcccctcctcaccggacttgatgtgggcgcagcagggcaccaccccggggactcctaagctcaggcacacgttttagcagggggacggtgtggtccctattgctgggagtccagcgacgggctctccttcgggcggccaacacatcaggatggggcctt

SEQ ID NO: 489081 - DNA, 157 bp, Homo sapiens
ctcgcccgattaccactcattgcagaaccagcgctccttgtagcaacatctcccctcggagcatggccacggtgtcaaagtccccgtcacatgatgttgggcccataggtggggtttttgacaccgtggccatgctccgaggggagatgtttgtctt

SEQ ID NO: 489082 - DNA, 412 bp, Homo sapiens
tcctctacccaagattcccctcatattggcctatgggctgcctttatggaggtcacctctgccaaacagtcctcttatagtggacactgtgatgtgccgccaaggttccacctcagggataaacaacttattctcttaaatgttggctgagctgccagaaggcatttggttgttagccctcttgggggattacttggtccaatgtcacatcttgccagggtggctccctcacctcaactcagggcagctctgtggggctttctcacctccagagcttccccttgggattgactgtgaccttggttgcagtttacgttactccctctgcataatcctgcttcctcacccactttccacagttgtcgatcccaagggccccctaacaaacttcctgcacactaatctctgcctc

SEQ ID NO: 489083 - DNA, 474 bp, Homo sapiens
  misc_feature (29)..(29): n is a, c, g, or t
  misc_feature (61)..(61): n is a, c, g, or t
  misc_feature (101)..(101): n is a, c, g, or t
  misc_feature (118)..(118): n is a, c, g, or t
  misc_feature (122)..(122): n is a, c, g, or t
  misc_feature (138)..(138): n is a, c, g, or t
  misc_feature (147)..(147): n is a, c, g, or t
  misc_feature (149)..(149): n is a, c, g, or t
  misc_feature (155)..(155): n is a, c, g, or t
gcgtccctgatggtcccaagacccaaggnctggtgggtacttctatttatgggcccttggntcttattcttcctctccgctgtttaattcaatcggggggncctttgatttctccatngaancgaagaattgaagacnggttgaacncnatcagngcccggtttcttgatatctaatactaatatactgatggagttaaacttccaggtacgaatgtgtccagaaacgaaccttaccctgggtttcctcagtgaaccagttaactctggcaaagatagcgatctagcctcaggggtttcagtcaagttgcgcttaaaagaatgccttaaaatctgtagttatggtgtcaaatataataaatcttcaccagctcatgcacgtacaagtctgaaatgtttcataaaaggtttagatgacctgataacatgtttctaaaacccagagagaaagagagagactgatacaaacgtcaag

SEQ ID NO: 489084 - DNA, 1134 bp, Homo sapiens
tgtcttcatagcgacgcgcgttgacatacgcgtcgtgcgtgtgttgagtatgtgaccgcggcgtcgcccctctttggggaacaaaaacatcgcgtggcgtccacgcagttgtgttgcgcaccactattttcccccgctgtctgggtgcaacacagagttttagctcttttcacaagggggctcgtctttctttttgaagagtcccctccgtggtgggggtttttatatgcgccttcccacacccccggttgccccacgttttggggttgaccccgtggaggggtaagagcccgcccctcattttttctaggcccttctgcgccaagagttcactgggcacagaccatttctccgggccctcatattgagcgaggcgtgggctctcgggaagtaacccgcggaggagccataagccccggtgccctggtcttccagccacgaatttgtatgggagagcccaccccccacggggtcaccccaacacaccacgtcttgcctgtagggtttggaagcttcttgtatgacgagcacgctctctccagtagccttgaagacaggatctccacgatctccacgtccctgtgtgtagagtctgccccctgtgacggtctccatcgtggaagatatttgtcaggagcccccctttggggagacacacacccttggagggaagagtggaggcccccgcttcagccccttccaggatgtggagccagacgtctcaaccgggggatctcttgctgcgcacccttggagtccagataactggcgcaccagaacaccggggccagaagaggacacagaccgccccaggccccaaggagtatgtaggcgacctgctgagccatctaaggtcacaagctggagggcgtgagatctgccacactactccgcctcgccctgctggagaagatggcgaggacctttatatctgttggtgatgcccttggaccagccagcacgacgtcccaatgccgaacccatccccaaagacccacccccccccggatagatggatggccaaatggtggtttgagagacccatagaccacccaagattttgaggcctttagccccccgaagccgggtaccccttggggaaccgggggccccattaaaaattcagaggttcca

SEQ ID NO: 489085 - DNA, 1208 bp, Homo sapiens
tcaccaagtaactctgctcggggtgaaccatatctccttatctactcaagtaaaccagtagtttatacttctgttcgacttactggttaaactcgtaataaagtactgttcccacactcataatataggcttactagtcatatcacacaacatgcgctagggtaggcatattcctccttcttcttcgtcaccgctagtcaccggcacttcttcgcctgcgtaacggcaagagcagcctatccctcctatatcctaggtactccacaacacaaaccaagttttatcaactcaggcccgattaatatcgggaccattatcccatatacaacctagttagaggcccaattactctcacactcggagacaaccctagatcacacaagcgcgtcattcactcgggttacttaactttatagcaactatctccaaactcagtttaccaccgtcaccaaggcaagcccttccccttcacttagcggaccaacaaggacaattatacgggcgacgttgtacgccatttccaccagcctatgtggacaggacattctcccaatccccaacttacttgcttgccccccgttgaatcaaccactctacatctacgccccacttgtcccgtcggcaccttacccacaggcctatacgaaggaaaaccatggtacaatgatttcgaacgaacacataccacagggccgcccattatccaaccacaccgtcacaaaccactaatacaacgtgcctaacagacctcacctccgtgggtcacgttccgttaattgtacacgcgcagccacctatatgcgcaacgcacttcaacgcaacatatcccagtacttgcacggaacgtgttatttcccctgttacagacacacacctccgccatcacttctcacacgtctgccaaccacccgcgcacgccccggtcactacagctaaccccctcaaactcaataccacaaccttgattaacgcctctgggacacctaccctggtcatatcaccccacattcattctacactcgtacccatcgcaacttcactttccaccccctttcgcctaccttaacatcataccacccataatcttacagggttaccaccccttgcatacaccccccaccacgccccactcattttcggcgcacatgcccacctctacactctcccccctcactcaattgcacgccaacttctatcctcacgccccg

SEQ ID NO: 489086 - DNA, 205 bp, Homo sapiens
gaaaatttttgggaaaaaaattttcccccgacttgctttcaaaaactgttagggaaagcggttgaggttggaccccaccattccaaaaaaaaaattgaggggggggttttcaaaaaaggaaaaacttccctaacttgtttccgggggggggttttaaaagcagggttttttttcaaaaaaaaaaattaaagggtttttttgccca

SEQ ID NO: 489087 - DNA, 354 bp, Homo sapiens
  misc_feature (280)..(280): n is a, c, g, or t
atagaagtctacactctgccaggcttgattgcagtggcacgatctggctcactgcaacctccacctctcaggttcaagcaattctcctcctcagcctccataatagctgggattacaggcgtgcaccaccactcccggctaatttttgtatttttagtagagatggggtttcgccatgttggccaagacggtctcgatctcctgaccttgtgatctgcctgcctcggtttcccaaagtgctgagattacaggcgtgagcctccgcacctggctggaagtntttttttaaaaaagggaaaactagattttctgaaagcttcgtttttgagagattttatacttacctctttattg

SEQ ID NO: 489088 - DNA, 446 bp, Homo sapiens
caatactataaaggaagtgactttgactgcgagttgaggctgttgattcactcagagtctagcaggaggaattagttggggtcaacaggtgctaagaatcaatagacacttcgagagaagcaactcaagaccaccatcaaggcttttccaggaactgctgtcctcagttccactggacagacgctgggttgctcctacttcgagacggaacaaatccccgaatacgggggtatgatacgaaaggtggcatctataaaccgatttcaagtacgctatgaaagtacctgataggtactttccttgacaacgtttacggttccccctaattccaacaaaacgcgggaacagtatgtactaaccaaggatccccgtgtcaatttggaattactgcacctaacatctattgtgttgtaccccggaaaattgggaagaggaaccccgttaac

SEQ ID NO: 489089 - DNA, 136 bp, Homo sapiens
agtgtgaacacgtaggcttggattaaggcgcaccgcgcatttctcaggcatcagtccagtcagcacattcagcacagttgtgcaagcatgcatccagatgtcgcagggcacaggttccattgtgttgcatcatttg

SEQ ID NO: 489090 - DNA, 991 bp, Homo sapiens
  misc_feature (442)..(442): n is a, c, g, or t
  misc_feature (894)..(894): n is a, c, g, or t
tggggtttaatttttttccttggcttttgtcccgaccccgggggggttgaaaaacggggcccctgggggaaaaccccctttggtggggggggaaaaaattttcttccttgtaatctaaggacaatttcctttccccgagctttaaaaaaaattattcccaaaaaattctctgtggggaagattatactcgtggcgagccagaattttgcgacaaaacaacggtgcttcattcctctggtgtgtgggggcgacagcgcttcagtgagcgtctacaccactaattaatttaaactgtggacatcttcttcgggagaagagaggcgcaacatactgggggcggcgaaaaacattcgtcagccctgtatatgcttctcatagagaattccccacttggaggggcgccttcagaggagatacgagcggccttttttttcaccccaancaaatttcttcacactttttgtggtgcaccctctttatttgtcagctagcggaggactatctattatagctagtcggtaatattcgggcgcccaaggaagacacttctttaacaacctcttactaactcactataaacccccgcgggggcggtcttctcacaatgttaacacgcactcctcttcttgtttcctacaagaggttagttcatatcattccacccgcctctggggggaacttctccggggaacacatctctccaaggcgtacaaaccacgaggatcaaccccaactaacgagagggcgccgaagaggcgataaatccctcctcgaggagggggacgcaaatagcacacatcatctacgaggggacactctaacgacggggggcgacgaagaaacacgatctttctctcccctatatattgtggcccccagaggggccacacttcnccctatacgggaacactgcgcacaggtaaaatggcggacacagctccagaggcccacagggtggggggcaccctccagtggggtccagatatgccgc

SEQ ID NO: 489091 - DNA, 409 bp, Homo sapiens
agttttatattcttcgatcaatatcttctcaattactgttccctacccccaacccctagtaaccattattttactctctgtttctatgtgtttaacttttttagatgccatatataagtgaaatcatgtggtattttcacctggcttatttcatttaacatgtcatctaggttaatccatgttgtcacaaatgacagaattttcttctattttaaggccaaatagtattccattgtgtatatataccacattttctttatctgtttatctgttgatggacacttaggttgattccacatcttggctattgtgaatagtgttgcagtgaacatgggagtgcagctatctctccagatcctaatttcaattactttgaataaataccctgtaatgggattcctggaccaaa

SEQ ID NO: 489092 - DNA, 297 bp, Homo sapiens
aaacgcagagaggacgggaggcagaggctaactcgacacggagcgcgcgcatgccgttgccatcgaggctgtcctacagacagaaccgggtgtcatggatgtgaaccgggcggcggaggctcaacttgaggcggagtgcgcggatgccgctcgcatcgaggccctcctgcaggcggaagcagacgtcttggacttgaaccgggcggcagaggctcaactcgacgcggagcgcgcagattgccattctcatggaggccctcctgcaaggcaggaactggacgtcctctctgcggtttg

SEQ ID NO: 489093 - DNA, 81 bp, Homo sapiens
gggcgtggtgcggagggcggtactgctaatagatatggagcttctctttgggaaacgaaaatgtcctaaaagtattatgga

SEQ ID NO: 489094 - DNA, 324 bp, Homo sapiens
ggctttgtgttcaccagggaggacctcactgagatcagggacatgttgctggccataggtgccagctgctgcccgtgctggtgccattgccccatgtgaagtcactgtgccagcccagaaccactgggctccgggcccgagaagacctgcttttttccaggttttagggtcaccattaaaatttccaggggcaaccattagaatccttgagtgagtgcagtgtcaagctcgagcaaagcggaccagcgacaccgtgctgacatgtcacactcccctctccttggctggtcatcagagtttcgcatgcagactcaccatgaggct

SEQ ID NO: 489095 - DNA, 206 bp, Homo sapiens
agttcacgcataataatctagtcatggggatcaggggtgtaggtgtgccttgtggtacagaagtgtgctagggcatttttaatcttagagcgcaaagcctaatatcactgcgcccgatcataaggggatggccatggctaaggttaatcagatacgtatgggtaggttaggtagtacatagcagataaggccaggcagtcctgcag

SEQ ID NO: 489096 - DNA, 468 bp, Homo sapiens
tcactatcacacaagcctaactctcttcactctatgaaagctgagagagtgtggaagctgcagaagaaaagtttgaagctagcagaggttggttcatgaggtttaaggaaagaagccatttccataacataaaagcacaaggtgaagcagcaagtgctgatgtagaagctgcagcaagttatccagaagctttagctaagatcattgacgaaggtggctacactaaacaacagattttcaatgtagatgaaacagccttctattggaagaagatgccatctagaactttcatagctagagaggagaagtcagtgcctggcttcaaagcttcaaaggacaggctgactctcttgtaaggggctaatgcagctggtgactttaagttgaagccaatgcttatttaccattctgaaaatcctagggccccttggggcttaagggacccttggggcttaagggacccttggg

SEQ ID NO: 489097 - DNA, 676 bp, Homo sapiens
cttggataattaatgggaggtttcagtcgatcaggacaaaatctgtttagtcccccaaattactgatcaatagcatagcgggctgctatgtttgctcggtacggtaactcagccactggcgaggaaagctccacatcgtagacagtcaaagtctctgcttctacaagaataggacttcttcctctccttaatccgagcatagcagactgtgatgtcattgtctgtgatttcaggaatgactgggccgcgagcatttataggaaagaggtctcgttacaagggactcttgacatacagagctcctgagtaacttcaacgatcataccacgtggactaagaaactttcaaaatttttaatgaacaggctgatgccttcatgaaattcaagacaaagaagaaaaatactcaatgttattggactaactaatcaaaaggataatgatttcataattttctatttgacaaatgtgctgattcttggaatgtttcattctccagatttatgaacatttctcttgagcaactggtaaagtatactttggtaaacaaacacttgacaacatttccttttgctctctatctgagtgccccagaattgggaatctattcattaagtattccatatgtctgatggtagttacacgctatttgcacaaagttcacaaaaaacaccgca

SEQ ID NO: 489098 - DNA, 762 bp, Homo sapiens
tggaaagggggttccactctgtgttgcccgggcgggactgtgcaagggagcgatcccagctcacctacaacctcgcgcctcccggggttcaagcaatttctccgtgcctcagcctccagagtagctaggatttacgggcttgagccaccacgcccagctaattgggtatttttaagctagcagagggggttccctccagtgctggggtcgaggcggggtcttgaactctcccgagcctcatagtttgatccacccaccttcggagcctcccaaaggtggcgggggcgataacagggctgtgacgccattggtggcccacgccccacgtggataaggaggtttcaagtgggcggtaccggggttgcgaatctaaatctcacttggggggttaatattaagctcctttttaggccatgtttttaatttttttgcacaaacaccagtacacgtatggggttggtagcgcctctatgggcttctaattccattctgggccccacggtgtctgcgctcaacatcctccagggttaacagacacgcctcgtgaccccttttaaaccggttatgtaatttccctacgaggatatttccctataaccatttaagagtttcctcacagaccatagggggagctggtggtttaacaaatcctcctttaaaaaggcgtggtcttctgtggtcacacactggttgttggaactttccccctaaactttggggggccgcaaacaccggattggggcaaactcccctgaattctgt

SEQ ID NO: 489099 - DNA, 145 bp, Homo sapiens
acaagatctcttggactcagtgctcagagcctggcctggttgtgagtgtgtgtcctgtgtgtgtgttgcgggaggggaggactggggctggaagtcagcacccaggaagatctgtcctcctgttcttgatggaagcgtcgcgcat

SEQ ID NO: 489100 - DNA, 476 bp, Homo sapiens
  misc_feature (41)..(41): n is a, c, g, or t
  misc_feature (76)..(76): n is a, c, g, or t
  misc_feature (222)..(222): n is a, c, g, or t
  misc_feature (276)..(276): n is a, c, g, or t
cgcacatttagtggagtcccattttggcttagctcattagngtggctaaccaagagataacggtaaatgtgacatngattggctcttactacagcttcagtgatggggggaggaaaagtcccaacccaaggggctcaaacttctaaggggtactcctctcatcccctttatccttctccctcgacattttctccctctttcttcccaggaccccaaagccangggcaacagatcagtaaagaagggggtcagagtagaaccccggaagtatttttnaatcctacctcaaaatttaacagttacctgagagatttaacattatctagttcatggaatcatggtatgtggtcagggataaatggcacacctgggaattcggctttctaaaggaaatcaattgatgggaggaactttccaaacaccactttactggtggttatatagccaatataactatctctactaaaggtgcggag

SEQ ID NO: 489101 - DNA, 236 bp, Homo sapiens
ccaatagtgctggagtattgcagtgtgtgagccacatgcactccagtcctgtattttgatcttcttaagaatagtatctttggtgctaatgatccgtgatggtttgcacctcagggagcattgtcttctgcttcgcttaggttcgtgccataatagaatatatgtgtccataacatttttagaggtttgatgttaaaggctagaggccgctcagcttcctgaataatgcctcggtt

SEQ ID NO: 489102 - DNA, 383 bp, Homo sapiens
  misc_feature (359)..(359): n is a, c, g, or t
  misc_feature (379)..(379): n is a, c, g, or t
ttattaattgcagtgtctttggaacaggtacatattttaatattattagagaaagaatttctggcctgcaaataattggatatgaaccagagaataaatatcttcttacattgcaggagaaagtaaaacataacatcctgtttctatccacagatacttaagagggaaagggagaaggaaaggaaagaatggaattgggaattacatggcataacttgggatacctgttttacagctaaatcatttgtgatctgatttccatgttggtgggacttggcctgtttctggcaggttcctcctgccttccctcattttccccagctttcttcattcatcacagggttcttttttctaccatncttctgtgggtaaaatctangggg

SEQ ID NO: 489103 - DNA, 163 bp, Homo sapiens
tcgtctttgataggagagtaggtcagtttggaattgtgtgtagtatatgtagactatatgtggcagcattagtcagcagtgaatacataagtctaaagtcaggaaatagagtagggctagagacatacatttgggagttatcagcaaatagatcattaaatat

SEQ ID NO: 489104 - DNA, 628 bp, Homo sapiens
  misc_feature (508)..(508): n is a, c, g, or t
  misc_feature (511)..(511): n is a, c, g, or t
  misc_feature (539)..(539): n is a, c, g, or t
  misc_feature (547)..(547): n is a, c, g, or t
  misc_feature (554)..(554): n is a, c, g, or t
  misc_feature (560)..(560): n is a, c, g, or t
  misc_feature (562)..(562): n is a, c, g, or t
  misc_feature (565)..(565): n is a, c, g, or t
  misc_feature (583)..(583): n is a, c, g, or t
tgtatgatgctaaagtacttcacaccaggtccgtccacaggtgggaactcaataatactaaaggtgctgataccagcacatttagtagagatagtatatgggctatataacacaagtaaaggggtgttgggaaagttcctccattcattggatttcctttagaaagcgaattccagggggtgcaatttatccatgaccacatacaaggattcaaggaactagataaggttaaatctctcaggtaacggtaaaatttggaggtaggattaaaaaatacttcaggggttctactctgaccacgtcctttacggatcggtggccctgggcttgggggtcaggggaagaaagagggagaaaatgtcgagggagaaggatagggggatgagaggagtaccccttagaagttggagcccatggggtggggacttttcctcccccaatcacggaagcggtagtaggagcaattcatggtcacatttacagttatctctgggttagccacactaanggngctaagcaaaaaggggaccatgccaaanggattttnattgganttggangngcntcaggtgaattttttttnctacagcagacacagggccctaataatacttaacccaggcaataa

SEQ ID NO: 489105 - DNA, 702 bp, Homo sapiens
  misc_feature (48)..(48): n is a, c, g, or t
  misc_feature (93)..(93): n is a, c, g, or t
  misc_feature (122)..(122): n is a, c, g, or t
  misc_feature (175)..(175): n is a, c, g, or t
  misc_feature (181)..(181): n is a, c, g, or t
  misc_feature (183)..(184): n is a, c, g, or t
  misc_feature (187)..(187): n is a, c, g, or t
  misc_feature (189)..(190): n is a, c, g, or t
  misc_feature (192)..(193): n is a, c, g, or t
  misc_feature (195)..(195): n is a, c, g, or t
  misc_feature (198)..(198): n is a, c, g, or t
  misc_feature (201)..(201): n is a, c, g, or t
  misc_feature (204)..(204): n is a, c, g, or t
  misc_feature (258)..(258): n is a, c, g, or t
  misc_feature (262)..(262): n is a, c, g, or t
  misc_feature (271)..(271): n is a, c, g, or t
  misc_feature (280)..(280): n is a, c, g, or t
  misc_feature (286)..(286): n is a, c, g, or t
  misc_feature (297)..(297): n is a, c, g, or t
  misc_feature (318)..(318): n is a, c, g, or t
  misc_feature (369)..(369): n is a, c, g, or t
  misc_feature (426)..(426): n is a, c, g, or t
  misc_feature (434)..(434): n is a, c, g, or t
taggtggggaggacgaggccataaatactgcaggagggggggaagggnggggtagggggaggggaaaggagggtgtggggagggagatgggtnggggggtttagacactggtgggttggggnggggggcgggaggtgggtgtgactggaggtgggaggaggttgagttggggggntggggntnngantnntnntngtngtnttngtacatttcggccttttcctcggccgtggggtggtggtagtggtggtagtgggngacnaggtggttnatgttggtntggggntgggtgaagtngatgtggtggatgggctcgcncgtgtaccagtgcaggaaggggttgggcgggaacatgggggtgaactgctnggagatgggcttgaacagctcctggatggccgtgctgttcccgatgaaggtggaggngattttgnggggggggggggggatgtgagagagggggaggttgaggttgttggggatggactcgaggaagtaggtggtgttgttggtctggatggccagcatctgctcgtccacctccttcatggacatgcggccccggaacacggtggccaccgtcagtagcggccgtggcgcgggtcgcaggcggccatcatgttcttggcatcgaacatctgctgggtgagctcgggcacggtcagggcccggtactgctggctgccccgggctgtgaggggg

SEQ ID NO: 489106 - DNA, 633 bp, Homo sapiens
tgtatgatgctaaagtacttcacaccaggtccgtccacaggtgggaactcaataatactaaaggtgctgataccagcacatttagtagagatagtatatgggctatataacacaagtaaaggggtgttgggaaagttcctccattcattggatttcctttagaaagcgaattccagggggtgcaatttatccatgaccacatacaaggattcaaggaactagataaggttaaatctctcaggtaacggtaaaatttggaggtaggattaaaaaatacttcaggggttctactctgaccacgtcctttacggatcggtggccctgggcttgggggtcaggggaagaaagagggagaaaatgtcgagggagaaggatagggggatgagaggagtaccccttagaagttggagcccatggggtggggacttttcctcctcctacctcaaaatttaacagttacctgagagatttaacattatctagttcatggaatcatggtatgtggtcagggataaatggcacacctgggaattcggctttctaaaggaaatcaattgatgggaggaactttccaaacaccactttactggtggttatatagccaatataactatctctactaaaggtgcggag

SEQ ID NO: 489107 - DNA, 314 bp, Homo sapiens
ttcgtcattactggtcacatcttgcagatgatgaggacaaataccgtctctggtttagcgatgttgtcgcacgtaccgcgtcgttaattgcccaatggcagacggtcggctttgctcatggggtgatgaataccgacaacatgtcgctgctggggctgacgcttgattacgggccgtttggttttcttgatgattacgaacccggttttatttgtaatcactcggatcatcaagggcgttacagctttgataatcaacctgccgtcgcgttgtggaatttacagcgtctggcgcagacattgtcgccatttgtt

SEQ ID NO: 489108 - DNA, 423 bp, Homo sapiens
gaggtccaggcagtgtctctgacggagctgctctttgcacacgaggagctgaatatggaaataggtcaggggtatggccaggtttcccctcccctggtgaacgggagaagacccacttttcatgatttgccatgtggtgcctcagtgattctcggtaacaacggcttcatctggatttacccaacacctgagcacaaagaagaggaagcagggggcttcatttgcaaacctggagcctgtctctcttgcttgttcgagaggtgatataccggcttcggaactgcatcatctcgctggtaactcagaggatgatgctgtatgataccagcatcctgtactgctatgaagcattcccttccacatcagatccacgacatcttacagccaagaaataatggaggagattgtgatggacacaagcca

SEQ ID NO: 489109 - DNA, 319 bp, Homo sapiens
accgtgttgagcggtctggtctctgtgaggttgcgggttcgatccctggtctcactcagtaggttaagatccagtgttgctgcaaggtgtggtgtagctcgcagatgtgcctcagaggtggtttcgctgtgactgaggtgtaggcctcaggtgtagctctgatttgacccctatcctgagaacttccatatgccgcgggtgcacatgtaaaaagaaaaaatttgcaaagtgcttaaatcgtgcttggcgcggtgtaagtgctataggtgagcgtgaactattttccttattattattcagactgtagagcctttggggg

SEQ ID NO: 489110 - DNA, 305 bp, Homo sapiens
acttgctacaccaaaataaaaaaaaaaattagccatgcacagtggcacgcacttatagtcccagctactcaggagactgtggtgggaggatggcttgagcccaacaggtggaggctgcagtgagccaagatcacttcactgcactccagtctgagtgacagagtaagaccctatctcaaaaaaataaataaaaataaaaacaatatggatagtagtgaaagtgacactattgttaaaatagttaaaattcatcagcttccttcataatggtacctcactttccaactcccttttctttctattaa

SEQ ID NO: 489111 - DNA, 477 bp, Homo sapiens
  misc_feature (32)..(32): n is a, c, g, or t
ctttctctttctcttttcttttcttttttctnttttcttttctcttttctttccctttccctttctctttctctttctcttttcttttctttcactttatttaagctgtcggttcttcacctgtaaaatggagaagaataatacctaaccttgcaggactgttgtaaaggattagagaaaataaatatttgcaaagtgttcaacacagggttcaggaactgatagatgctagtggtacccttctcatccccatcctcatccagttctgtggttctggttaattcttacaggttttgatgtgaaggaccatgctcagaagcaggagaccgctaacagcctgccagcccctcctcagatgccctgccggagatccctcagccctggctggtgagtcaaggtcccaccatctcagtggtcatcgctggaggcctgggggtacttacgggctccaggggcctgtgatggaagcccggtgtg

SEQ ID NO: 489112 - DNA, 131 bp, Homo sapiens
aggtactccccgatctttcctacgagcgcaaggtggcccgggatgttatcagaaggcgcagactaaagagctggcatgactttgccatcgcggccttgactaggcgacctatgagcggatgttccgctggc

SEQ ID NO: 489113 - DNA, 2304 bp, Homo sapiens
  misc_feature (799)..(799): n is a, c, g, or t
  misc_feature (1134)..(1134): n is a, c, g, or t
ggccggggcgcctgccgcggaacattcgcggagtccagtgcttaagtacgcaggcttggaccttttatctctcgccggccgcgggaaccctgttgtgagctcggtatactccataggtgcacacccgctgttgaacagcagagcggcgcccatgagttctgaactccccagtttcccagcgatacgagttcgaattggattcgcaggcagttaacaattggcgggctgttggacacaacggctgcgcaactgggcgcttatatcatagcgccgttaccaaaagcagcactcatttacgttgtcagccagcacttccctccgaacaaatacacccgcttagttgattagcaaccctttacacatttccaggaataagggacaccgcccaaaaggaattagttaccagattgcttttaggccacacttgggacgcgaatttcgggcagaacacatacacggcctgtgggttgtacacctgggccgcgcagagttagcggccggtgtaccccaaacacactgtgtccccaaattttccttggctttggattgggccagcgatctccaacacacaagagaacattctatcacacgggagcacgacgctttgggagacgacccaacgtggtgtgtgggcccccctactgagaattcaatctcaaagaggaaaagagcacgaggaaactttttcagcattgtgcgagcaccttatatgggagtggctagcaacattcagggtttcgtccgtcagacatgtacctgggacttggttgaaactataggaactggccttaacgcaacncatcgtgatcctggattacaaccattctggcatgggaactccaaaacagtgggtggaatatcttggccaaacgtggctagcttatcacatatttatcgcgcatttgtgcttgcgttggaacactctcgttgtggcccaatttgttatactcagaaaaacacaacacaaagcgcgaaccccatatacataaagacacgcaagcacaacaagctagcccaaacaaaagaaaagactacttgtgtgcgtcgcgctcataaatcataacacctgctgtggcggcagaaatagacacagtgttaatgcactgattggtgtgtccaaagccgcgcgcatantttatgatgatctctcatcttacgcccgccgcgacgacgatcagccagatgagtgaccagcgaactgcgtgacaaccacgcacgacaacgaagatgaagactcaatcaggatcatgacagacgaacaacgagcccgacacatcacacacaacacacgtcgatagaacgatcgacgccacacagatgacataacctgatagtactgaccatgacgagatactgagacagccactgacagactaatcaacgtcacactgagcgcaagccagcaacaaacagtgaagctcgaacgatcaagaggagaaggacgaggtgagcaggagacacaggagaagaaagagagagagatgaggaaccgaggcagcgagacgtagcacgggcgagcagcacggcgagccagaagagaccgcgagagcgagcgagcgcgcgcgagccggcagacagacgccgggcgcgcggcagccagcgaggcgtgaggagaggcgagcggagagagcaagagagaccaagagcagagagtggaagggaggtgaggcaggaagagaggaacagtgggagaagagaggagggacctagtaggcaggtagaacaaggagcaacgggccagagaacgagagaatagacacaagacagcagacataaaagcactaacgcagcaggacaagacggagaacagacaaacagagaagaacgagacaaccgacgaaacgagaaagaccaggaggcagagagggaaaaaagcggcagagaatcacgaacaggaagaagcagaaggaacaagatcagaaggaacagccgagatgaagcagacgctaggcagagggaaacacatgcgaccacggacgcaccaaccaagcgcagcacgagcagcacacagaaccacaccaatagaaatcacgaaccatgaagtcaagcaaaacaaaaccatcgaaaaacacaccaaagaacacacacaaacaacacgatagcacacaacacacaactagacagcagcaccaaaaaccacagaaaaacaaccgaaatacacacgacaaacaaacatccacacaaacacacataccacctaacacaacatacaatcaaacacatatacacacacacacaacaatagatacatacaccacaaacaacaaacacaaaacccaccccataacaacacaacccgaaacc

SEQ ID NO: 489114 - DNA, 878 bp, Homo sapiens
  misc_feature (27)..(27): n is a, c, g, or t
  misc_feature (34)..(36): n is a, c, g, or t
  misc_feature (40)..(40): n is a, c, g, or t
  misc_feature (69)..(69): n is a, c, g, or t
  misc_feature (90)..(90): n is a, c, g, or t
  misc_feature (93)..(93): n is a, c, g, or t
  misc_feature (95)..(97): n is a, c, g, or t
  misc_feature (116)..(116): n is a, c, g, or t
  misc_feature (140)..(140): n is a, c, g, or t
  misc_feature (153)..(153): n is a, c, g, or t
  misc_feature (155)..(156): n is a, c, g, or t
  misc_feature (207)..(207): n is a, c, g, or t
  misc_feature (235)..(235): n is a, c, g, or t
  misc_feature (248)..(248): n is a, c, g, or t
  misc_feature (253)..(253): n is a, c, g, or t
  misc_feature (255)..(255): n is a, c, g, or t
  misc_feature (264)..(264): n is a, c, g, or t
  misc_feature (273)..(273): n is a, c, g, or t
  misc_feature (276)..(276): n is a, c, g, or t
  misc_feature (302)..(302): n is a, c, g, or t
  misc_feature (304)..(304): n is a, c, g, or t
  misc_feature (323)..(323): n is a, c, g, or t
  misc_feature (339)..(339): n is a, c, g, or t
  misc_feature (369)..(369): n is a, c, g, or t
  misc_feature (383)..(383): n is a, c, g, or t
  misc_feature (400)..(400): n is a, c, g, or t
  misc_feature (404)..(404): n is a, c, g, or t
  misc_feature (436)..(438): n is a, c, g, or t
  misc_feature (455)..(455): n is a, c, g, or t
  misc_feature (475)..(475): n is a, c, g, or t
  misc_feature (623)..(623): n is a, c, g, or t
  misc_feature (665)..(665): n is a, c, g, or t
  misc_feature (680)..(680): n is a, c, g, or t
  misc_feature (779)..(779): n is a, c, g, or t
  misc_feature (811)..(811): n is a, c, g, or t
  misc_feature (846)..(846): n is a, c, g, or t
caggacctttttgtggaactataagtngcaaaannnaganaaagatgatgtatcccccccccagacatnccgtcgccgacgatgacaganatnannnacagctctatgaatcaganatttctggaggcttaatcaaaggngttggcaattttnanngtactttcttgacttcagagctacctctatgctgattttgatcgtcatganatccagatatatgagggggtagccaatntgcctcccttccngagananacattagtnttgataggngcncaaggtgtaggccgaagaagcttgananacaggttcatagtattgantcccactagatttggnactacggtgccatttacttcacggaaaccnagggaagatgaaanagatggccaggcatatnagtntgtgtcacgatctgagatggaagccgatattnnngctggacagtctttggnacatggggaatatgatggcnatctctatggcccccaattgattctcttcttgaggttgtccaaactggacggacttgcattctggatgtcaacccacaagcactgaaagtattgaggacatcagagtttatgccctatgtggtatttattgcggctccggagctaganacgttacgtgccatgcacaaggctgttgtggatgcaggaatnactaccaagcttctnaccgactctcacttgaagaaaacagtggatgaaagtgcacggattcagagagcatacaaccactattttgatttgatcatcataaatgataatctaganaaagccttttgaaaaactgcaaactgccatanagaaactgagaatggaaccacagtgggtcccaatnagctgggtttactgatgattcagtaaggttaa

SEQ ID NO: 489115 - DNA, 122 bp, Homo sapiens
gaccatggaaccaggtgaaacctgtttggccccttacccattgggtttttactccttcacaacggtcagcactcctctcccaacccccctgcccactgttttcaataaaatgtgagtggtta

SEQ ID NO: 489116 - DNA, 443 bp, Homo sapiens
aagctcccaaaggaaaactacaggttgagcatccctcattcaaaagcctgggacagaagtgttccagactctgtatatgtttggatttgagaatacttgcatatatataaaatgagatatgtgggggacgcgacccaagtctaaacacgaaattcacttatatttcatagacgccttctattcatagcctgaaggtcattttatgcaatattttaaataattttgtgcatacaacagtttggactcatcacatgaggtcaggtgtgggattttccacttggggcatcatactggtgctcaaaaagcttcaaattttggagcattttagatttaggattttcagattaggggtgctcaccagtaagtgttatgaaaatattccaaaatccggctgggcatggtggtgcccacctgtaatcccggcactttgggaggctgagagg

SEQ ID NO: 489117 - DNA, 739 bp, Homo sapiens
gattttaactctcctaagtgcctcatgtaagtggaatcatacagtattgtcatttgtgattgatgtattttacttagcataatgtcttaaaggttcatccaagttgtggcatgtatcaggattttcttccttttaaggttgataatattctgtagtacatatagaccacatttgtttacccattcattcatccatggacgcttgggttgcttccactgttttagctatgtgagtaatgctgctgtgaacatagtgtacaaatatctctttgagactctgcttttattttatttttttgcatatatacacagaagtggaatcgctggatcacatggtaattctgttttgattttttactgccatactgttttccacactagctataccactttatgtgcctacaaactgtgcacaagggttccaatttctccacatccttgccaacacttgctggtctattttttttttaatagtagccatcttaatggggttgatgtggtatctaattctggtattgattgcatttccctaactgattagtgatatcaagcatcttttcatatgttagtattgcctggttttacatcctacttgtaaaaacataatttggccacaccagtctgttactattctatttccttaaaaaaactccacactaggactgggggaattcctcggcccctagttaagggcctaatttccaagagtaaagaaccagggttacactataaagtagtat

SEQ ID NO: 489118 - DNA, 151 bp, Homo sapiens
  misc_feature (1)..(1): n is a, c, g, or t
nggctgtgttatagacgggagtatacctttggcagagctatagtaggagcttagatttctaggggcgagtcaggagccccagccagcccttcccaggccagcgaggcagtaggctgcctctgggtgagtggctgacagtagcaggtctgca

SEQ ID NO: 489119 - DNA, 265 bp, Homo sapiens
  misc_feature (112)..(112): n is a, c, g, or t
atccaaagaattcggcacgaggccaccttactaccagacaaccttagccaaaccatttacccaaataaagtataggcgatagaaatttgaaccttggcgaatagatattggncccgaagggaaaggttgaaaattatttcccaggataatttgggcagggcctcccccataccctctctgattattgattaaacctggatatccctttacgggagagacccacggttgagccccccgagcccagagcgtgctccctgaggaccgc

SEQ ID NO: 489120 - DNA, 898 bp, Homo sapiens
  misc_feature (206)..(206): n is a, c, g, or t
tggcagaccttttccccacggctgtgccagttgacctacgtgggccccctgcctcccatggcccaccctctggccacgaagggttcttctcaagtgtccgccgccactcattggggagcccgaaccgcccccccaccttggtttataatggggctcagacctccccacgcaatgggccgtgacaacccctatttggggaatcccanccttggaggcagggctgccacgggaagagggtacgtatcttgtgggtcccgccccttctttcaatgtggtgcgtgcaatatccgcccctttgcctgcctgatgtataggtccctggcaacctgggtcatatctgcgtttgctggctaccgtgtctgtgatgtccgcctgtcccggcctgtttggggttcccagcgactcttctggcaaccgggtgtgttctcgtggtataccccgtgagggggtgtgacccatagtaggttaatcaccgggtgtgtgtgtgtgtgtgtgtttgtgtgtgtttatgtgcacgcctgtatatgcatcaccacgtagcccggaggggcccttggggtttgagtcactgggatcttcctggtgagaggtaagagaagtcactgggcttaactgggcctctgaggcccgtatggcactcttggttgctgaggccaccctggacctgttgctaggagatagctggggaaggccccaggcccccccgggccgagagaggagacgaagatttgggaccatgggggaggagatgggaagggatgggatattctgggtccccgaacgggtgggataactcacgcaccagcttcttcactggtggggggtggggccaccaccttatttctccctggtcatgatttaccagaagaaaaattaaactgcttttggaacccaccca

SEQ ID NO: 489121 - DNA, 1016 bp, Homo sapiens
cgcttggtgttaaaaaaaatctctccctcggcgcccccatcgtttgttatctcttaagatatcatccacggcgttgctcctctaatataagggtaatatgtcacgagagcggcccctttcgtggggtggttggccgcgaagaatttattccctggcgccaacaccacgaagaggggccccccgaggaatagtagcgccgcaagaaagagggagaagagcctcctctcgggccccctctctctctcagagaaacgcttggagaaaggcccccacacgcgcgcacaagggcgctctttaaaataggggcgccccccacacagaaggggcccacgcagtggttgtggagaaaagaggggtggggtcccccaccccacggcgcctcccccacacagaagagaagaagaggagtattcccgcgcacacgctgtcaacacacccacacgctctttcacgcgcgcgcgcgcccgcagagagagcacacactcgggcgagcatctctctcgcgagagacacacagcgccctcacacattatatctctctctcgggagagagagaggcgctctctcccccacgcgagagaggatatcacacacgctgcttggagaccccacacatcatatgggcttatattcatcatctcacagaggttttctcgcgctcgagcccacctcgaggtcttcgcgccacatgtagaagagaagatatatagagaagacacacacaacacacaccacccttgtgtgtttcacattgtgtggagatgtttataatgacccacccacgcacaccacgaggtttaaccacgcggctcgttgataagagaagactgtatatgacacacttgaatgtggccccacaggtcacacacacaccctgagattctggcctgagtggagagaagaaagaaaggcacataatgtttcgaactggctccctgagatttcgagatgctttggagatgttgccccacccaaattgggatctattttaactgagtcccgctgccttattttga

SEQ ID NO: 489122 - DNA, 144 bp, Homo sapiens
gtcccacaggtgtgttgggccattgccttcgtccaagagggcaggcattgaatggtgtcgccaaactgtctggaacaggaaagctgggtgtggacacttcattgttctcgacccagatgcatgtccggggctcaggggtgtgcc

SEQ ID NO: 489123 - DNA, 982 bp, Homo sapiens
actgttcatagtaactcagggtgcctccagtcagtctttgcccgatacattcactggtcctgagacacttgtaatgtccgcgcaatgtcactgagaatgaggcactttctttctctggacacagcatgtactcttggccgtgtgtctgtctcccaacgaggtacctatggtgggtgcacgtcatttcgctactaactacgaagaccgacttcaggggcacgttcgtgtgatctgggcatggtctgcctgggcccgcctctgtgcagctcttgtctggttctgacgctgtccccttatgtggggtttgtgcctcttcttcggtgtcttgccatcctgcatgttatgttccttttctggcctagtaatttggccacccatgccgtgtcagaacggcatgccctggttaccaggcgggatgatcgggaggcttcgcgtagaatgtatgttgtgccaaacgtgtcatggcatgagtcgtgggcataacgccattgtgcctgcacggtctggccgggtgaccagtgcctccccagtgaggtggtggacatcgacgaaaatttgtctctacgtgcctgtcttcggtgctccacattgtacttcacgaacgcctagctgctactgccatatttttccctgccaagtctttgtcattgctggacggacggacgcaacgtgtgggtgtgaacaacacggctggggttgcttgcatttcgcactgattgagaacttcttctatgacttactactaacatgtgtgccgggactccttggtaggtggggtcaaaagcaattgggcctttaaaaaccaggggggtgtgtcattatccacatttgtagggccctagaaaggcgtctttaaagccaaagggttccacttcaacatcaagaacgcctggtgaaaaatcactccggtctcaaatacagaaacaatagaagggcaccgcagataagacacacaacctaacatctgggcatacaggtgatt

SEQ ID NO: 489124 - DNA, 635 bp, Homo sapiens
agtgagtcctgcttattccagaagatgaagttgcattagaaaaatcaagcctgattctaaaatggtcaggggttaaaactgctgccccaacttcatgggcatggatcttacccgtggcacaatgtggttccaggtctaaaaaatggcagacaatgatttaagctcacgttgatgtccagaccccccatgggtacctgcctcgtctgttctgtgttgggtttactaaaaaacgcccccatcagatacggaaggccttttatggtcagcccccacaggtccccccaatccggaaaaagatgatgggaatccttaccccaaaggggccgaccaattactttaaaaaagtgggccattaatttattcccgcccgccttgggaaaaacataaaaaaggcctgcccatctttttttcccccccctgatgttttcgttaaaaaagtaaaaaagctgaaaaagccccagttttaattggggaagcccctggagcttcctggggaaggccgtagttttggaaaaacccccgggggccagaccggggctaaaatttaaccagctgatggatattaaccccccggcccaaaatttgtttaaagttccgacttccaaaaggggccaataaaaagggccttttgtgga

SEQ ID NO: 489125 - DNA, 942 bp, Homo sapiens
gcaaccctgaagatatctagagatggtgaacaagcagtgtgcttatgatggagctaggactgctgatggaattgtcagccatcgttgaagcaaacaggcaggacagcttcagctgcctctcatcgactgagagaaaattgaagaaattcattatgataaagatgcctctatagtagcgttctttcgactagattcattcagtgaggctcactccgagattcctaaaagcagccagcaacttgagggataacataccgatttgcacatacgaagtgttgagtctctggtgaacgagtatgctgatcaagtggtgcacgggtatcgtcttattacgtcctctctgatctctagtatacaagtttgccgtgacaagactgtggcatatacagtagcagagacaccatgaccagtggctgaattcatcagtttatccagggactcatttgtggtatctgccctcacatgacagaagacaatcaagatgtgatacagggcaaggacttacttattgcttactatgatgtggactatgaaaagagcgctaaaggttcctgctactggagatacagggtaattgatggtggcaaaggaattcctgggatgctgggcacaaatcaactttgcttgtactagcgcaaaactttagcatgaactttctgatttggcttggagagcactgtggagagatccctggttgttgctatcagaactgatacgggagcagtttggcctgcacgaggaagttccggtaagggaggcccgggagaggtcccggcgggaaaattgagtggacccggaaagaatccctgaagtttgacatacccgagacattgatggtctgtacagttgtgccagaacttgcggacatggcgcgagaaacagtgtggggaaatcacgcgacgggaacgagaacgagacacaacacatcgagggacgcgacat

SEQ ID NO: 489126 - DNA, 271 bp, Homo sapiens
  misc_feature (1)..(1): n is a, c, g, or t
nagaggatcccgttcatttcgcccaggactgcgtgcttttgagatgagtgttggtgctccccccaccgccatgttgccactcttctgaagtaacagggagctgcgttacacagtgtgcagagtttggctaatgagtattcacgtgtgtggagtgtatgggtgaagagtattcagcgatgtgcacgtgtgtgtgaagattctcggcgcgtgctagtgtatggctgaagagtatttcactcgggtgcaaagtgtgccgtgaagagtattacac

SEQ ID NO: 489127 - DNA, 245 bp, Homo sapiens
aaggcaagaagatcgcttgagcttaagagtttcagaccagcttgggtaacattgggagaccctatctctatgaaaaatgaaaaattagccaagcttggtggtgtacacctatagtcccagttacttgaggagctgaggaggaaggattgcttgagcccagaagtttgaggtaatgagcgatattaacgccattgcactccagcctgggcaacacagtgagaccctgtctcaaaaaaaaaagaaaa

SEQ ID NO: 489128 - DNA, 385 bp, Homo sapiens
  misc_feature (208)..(208): n is a, c, g, or t
  misc_feature (385)..(385): n is a, c, g, or t
gatgcctgcctgctgtgcgctatgcggctgccgactgccgccgcggaagggatgcgagcgaggcgcgctggctctcgcttatgacgggccgggaggcgcgggggagccgccgggcggatggctgactgggcggcgcttaagctttaccaaagatacagggaatattgattaaaaagtgtatcccgctaataggcgagggcttgatttntttgccgcacggagggactattgaggcttttgccgcgatggaggggtcttctcaagaatcttattattattatttttctataagaggcccggcggatgggctcttggagagcggccgcactctctcagatctcggagattgacgagaggccgccgaccaaaaagggatcccggcttn

SEQ ID NO: 489129 - DNA, 323 bp, Homo sapiens
atgtaaccattgtggtaaagcctttactgtgatattcaaaggtgtggtaatttaaatatacttgcccatggcaagtggcagtgttaggaggtatggcctttctggggtagatgtggcctttgaggaagtatgtcactgtgggcggtgggctttgagatcctatgcttaggctcttcccagggtggaagagtcttctggctgccttctgaccaagatgtagaactctccagcaccatgtctgcttggacactgcccttctttctgccttgataatagactgaacctctgaatctgtataccacccccaattaaacatcctttat

SEQ ID NO: 489130 - DNA, 272 bp, Homo sapiens
aggcggactctgtgtgaacttgtgagctcagagtctgttcttgtgacttggactggggtgcacaggacaggacagaacacttggacgagtgactctctgtctgtctgtctgtctgtctgtctgtctcattggttggttgatatccattttcttaaggggcacatacctcagaccgcacacacacaaacacacacacgcacacacacaggggcacgcacacacacgcacacaacactccagtaccacctgccgtgtgggggtcccgaagctcg

SEQ ID NO: 489131 - DNA, 106 bp, Homo sapiens
atcggctatctgggaatacacagccaagtgggaactgaccttgagctagagcctcacccccctgggcctgtctctcctcagctgtagaatcatcacctctgagctg

SEQ ID NO: 489132 - DNA, 516 bp, Homo sapiens
  misc_feature (12)..(12): n is a, c, g, or t
  misc_feature (67)..(67): n is a, c, g, or t
  misc_feature (121)..(121): n is a, c, g, or t
  misc_feature (150)..(150): n is a, c, g, or t
  misc_feature (164)..(164): n is a, c, g, or t
  misc_feature (212)..(212): n is a, c, g, or t
  misc_feature (218)..(219): n is a, c, g, or t
  misc_feature (221)..(222): n is a, c, g, or t
  misc_feature (226)..(227): n is a, c, g, or t
  misc_feature (229)..(233): n is a, c, g, or t
  misc_feature (235)..(236): n is a, c, g, or t
  misc_feature (243)..(243): n is a, c, g, or t
  misc_feature (246)..(246): n is a, c, g, or t
  misc_feature (260)..(260): n is a, c, g, or t
  misc_feature (268)..(268): n is a, c, g, or t
  misc_feature (302)..(302): n is a, c, g, or t
  misc_feature (309)..(310): n is a, c, g, or t
  misc_feature (386)..(386): n is a, c, g, or t
  misc_feature (391)..(391): n is a, c, g, or t
  misc_feature (393)..(393): n is a, c, g, or t
  misc_feature (401)..(401): n is a, c, g, or t
  misc_feature (411)..(411): n is a, c, g, or t
  misc_feature (442)..(442): n is a, c, g, or t
  misc_feature (452)..(452): n is a, c, g, or t
  misc_feature (456)..(456): n is a, c, g, or t
  misc_feature (500)..(500): n is a, c, g, or t
  misc_feature (502)..(503): n is a, c, g, or t
tgacagcccagnctttactaactccataggttttctggatatttcaagcacacattaaaacaattanggagaggacatacatttatgatttatgcaaattaaggcacatcaattacaatcnatttttttaagttagtcagtttaaaaatnttcacttacaaaanttcaaaatatgtccaagctcaactttttagtaggaatgttagtttgtngggttnngnnattnncnnnnngnnccttagnggncaaacatgagacantgaggaangtggggctttgtgaaacacataaatacctgtgangttttgnntcatttggcccttaaaaatattgcttaacaagttaaacccagcttaattgtaggtaaatgcaagtatacccaaggnggggngngggggggnggcggggggnggcagattgtacttctgtggctggaaaaaangggcttcaanagcnctggccagttcattcagttccttcttcagcggcccaggatcacngnncccagggggggca

SEQ ID NO: 489133 - DNA, 685 bp, Homo sapiens
ccccggagttagaaaaatcctctttcacccccatacagccttaccgggaaaaagcacccccaattcttccatttatccctaatcccgtgccttgtttaggtcccgggtaagctgaaaaatggcccccttttcagccccattttcctcccgttctcccagggcccaaatcgaacattaaaggttcttgccaattgcgcctgccagccaccaaagaaagaggtgctccccacccgggatatcaagcctctgtctgcgtgtgaggagccaaaaaatatgtctcggaaggagctcaccatccagaatgggcataacaaagccagctgtgagagagctgcgcaatatgcctcagcctatgacagagtcatgtgcatctcagaggtggtcacccctcggctcctttgcactgaaggagtgagtccttatgatcactccaatacttggagacatgattctgtccaccccttagtagctcacaatacaagtcgtttcattcaagttggtgtaatcacctgggcagcagtggatgtctgccataaccgtaagcggcaaaacctggtacttgctcacgcccgagactttctcatcaacctcttccaagtccggcctgcccttaagaaaatgcccaggatcagtcttggggtcctctccaagggattccagccaaccaggggcccaataaaaaata

SEQ ID NO: 489134 - DNA, 888 bp, Homo sapiens
gtgctggtcggacaccgagctgctgtcaatgttgtagactttgatgacaagtacatgtttctgcatctggggatagaactataaaggtatggaacacaagtacttgtgaatttgtaaggaccttaaatggacacaaacgaggcattgcctgtttgcagtacagggacaggctggtagtgagtggctcatctgacaacactatcagattatgggacatagaatgtggtgcatgtttacgagtgttagaaggccatgaggaattggtgcgttgtattcgatttgataacaagaggatagtcagtggggcctatgatggaaaaattaaagtgtgggatcttgtggctgctttggacccccgtgctcctgcagggacactctgtctacggacccttgtggagcattccggaagagtttttcgactacagtttgatgaattccagattgtcagtagttcacatgatgacacaatcctcatctgggacttcctaaatgatccagctgcccaagctgaacccccccgttccccttctcgaacatacacctacatctccagataaataaccatacactgacctcatacttgcccaggtatcgaaatcgattatgtacataacactgtgggtaggagacgggatattagctgtaaggtgttgctagttcatggaactttctcctgccgtttgggtcaccaactcctgtaaagccgaggaagcagacaatgtgagacagggctgaagctgccacagtgtggacagtgcctttcaccaaggtagccagcctcagttctagatgattctagggtcctacttgtgtggtaagcctagtcattcctgccctagttatctagtagtactgttatgaaaataaaatgagatttgaatcagtttg

SEQ ID NO: 489135 - DNA, 954 bp, Homo sapiens
cccacgcgtcggcatggataccacatattaaaccatgtatatctgtggaatactcaatgtgtacacctttgactacagctgcagaagtgttcctttagacaaagttgtgacccattttactctggataagggcagaaacggttcacattccattatttgtaaagttacctgctgttagctttcattattttgctacactcattttatttgtatttaaatgttttaggcaacctaagaacaaatgtaaaagtaaagatgcaggaaaaatgaattgcttggtattcattacttcatgtatatcaagcacagcagtaaaacaaaaacccatgtatttaacttttttttaggatttttgcttttgtgatttttttttttttttttggatactggcctaacattgcttgtgctgtaaaaatagttaacagggaaataacttgagatgatggctagcttgggttaaaggtcttatgaaattttcatgaacaatccaagcataattggttaagaacccggtgttttaaatccagtgtaaggtggaaataaaagtttttatgaatgggacttttcaactactttctctacagctttccatgtaaattagtctgggttctggaaacttctctaagggaaatggtacattttttggaaatttattccttattccctctgggcagctaagtgggctcttaccaagtttaaacacaaaatttatcataacaaaaatactactaatataactacgtgtttccatgtcccatgatcccctcttttcctccccacccttgaaaaaaatgagtcctatttttccggggaaagggggggattgattacgaaaaacatgtagtgtgtcccatttaaaatttgggcatatggcattttctaacttaggaagccacaatgtcctgggcccatcatgcacatggggtagcattactgtaagttaggtgctcccaa

SEQ ID NO: 489136 - DNA, 392 bp, Homo sapiens
agctcccaacaagacagccataagaaggagaatagcttgaacttgggaggcagagtctgagcgagctgagatcgtccactgcactccagcctgggtaacacagtgtgactctgtctcaaaaaaaaaaaaaaaaaaaatttggccatatcccctatggggataggtgttccaggagggggctaaaggtgttaaaacggaaaggaaaacccaggtttacttggaatccacgggaacctttttaaggcctaggccttttccttaaaaaaaatccaaaccctttatttttcggttatccacacccattgggaggagggaaaatttcctaaaacccaatatctttgatttgttggggggggaccccaaaatggggaaaggatgtaaacatttggggg

SEQ ID NO: 489137 - DNA, 537 bp, Homo sapiens
  misc_feature (401)..(401): n is a, c, g, or t
  misc_feature (512)..(512): n is a, c, g, or t
  misc_feature (524)..(524): n is a, c, g, or t
gtgctggtcggacaccgagctgctgtcaatgttgtagactttgatgacaagtacatgtttctgcatctggggatagaactataaaggtatggaacacaagtacttgtgaatttgtaaggaccttaaatggacacaaacgaggcattgcctgtttgcagtacagggacaggctggtagtgagtggctcatctgacaacactatcagattatgggacatagaatgtggtgcatgtttacgagtgttagaaggccatgaggaattggtgcgttgtattcgatttgataacaagaggatagtcagtggggcctatgatgggtgagtgtgctaacagagtgtaaaaaagagaaaatctacgtcttaatccttccttatgtttatggtgttaaacataaccattccntgtttctaaaagcttatagattttacacaaaatatctgataccatatttctttaatccgtgtatttacctctccttggtttagtgtcctgaaatattcttccattcatttnattatacttgtntgctatggttgtc

SEQ ID NO: 489138 - DNA, 203 bp, Homo sapiens
agtgagtatgggagcagcggaacaggaatgccagacacaggctcgctgctgctggaaggagtggtgggacttccttcctctgaccggagaggcacaggttttcaccagattccagccaagaggctcctcacaggcgactgtaaattttggtacaagtcttgtaattatcgaattcaacaacttgttccaatttattaaaaatg

SEQ ID NO: 489139 - DNA, 4765 bp, Homo sapiens
gtgctggtcggacaccgagctgctgtcaatgttgtagactttgatgacaagtacatgtttctgcatctggggatagaactataaaggtatggaacacaagtacttgtgaatttgtaaggaccttaaatggacacaaacgaggcattgcctgtttgcagtacagggacaggctggtagtgagtggctcatctgacaacactatcagattatgggacatagaatgtggtgcatgtttacgagtgttagaaggccatgaggaattggtgcgttgtattcgatttgataacaagaggatagtcagtggggcctatgatggaaaaattaaagtgtgggatcttgtggctgctttggacccccgtgctcctgcagggacactctgtctacggacccttgtggagcattccggaagagtttttcgactacagtttgatgaattccagattgtcagtagttcacatgatgacacaatcctcatctgggacttcctaaatgatccagctgcccaagctgaacccccccgttccccttctcgaacatacacctacatctccagataaataaccatacactgacctcatacttgcccaggacccattaaagttgcggtatttaacgtatctgccaataccaggatgagcaacaacagtaacaatcaaactactgcccagtttccctggactagccgaggagcagggctttgagactcctgttgggacacagttggtctgcagtcggcccaggacggtctactcagcacaactgactgcttcagtgctgctatcagaagatgtcttctatcttttgtgaatgattggaacttttaaacctcccctcctctcctcctttcacctctgcacctagttttttcccattggttccagacaaaggtgacttataaatatatttagtgttttgccagaatctctcttgctttgccattaagcagaagaactagtttccctgtatagcctgctgggagagacccacttctagggtatgggggatgcagcttcaagcccagtgcccagtgtctccctgttaactgcaggaatgccaagcacctggccagagcagcccagccccaatatgcttaggaggagacagagttccctctgtatagcctctgggacaagaaaaagaaaacacaagaatgtatacactggaagatttgggcctcctgcctgccttctctttgtttctgttcctcttcccatctactcccctacgccccttcaaccttttttctctgtctgcttcacctgagaagaaagtgtatgaagagagtgtcctcctctcgcatgagccagatcagccagaaaatgcaacacttggaagagttaaatgctgttcagtgaagatttcagccccaggcctttgctgcaagtgaccctgtggcaacagtggattctcagacatgatactctcatcatatttgcaactcttctctctctttcttccccacacccaagaggaggattggtggtagggggcaggcagagggggtggggagaagtttcctgggctccatcaatggctgcatcttttctggactcagcagtctccttgattccatgtagagtgtggaaaggagttgctgattgcatttcctctcattaacaattgggtgtgtaataaaaagcattgtacttcatcttaaatcactggtaaggctcagcctacagaaagatttgaaatggccagagccaatcgcttggtgcattctgcgtaatggtttccatctccgatttcctcatcagggcctgtgaatacccaggtgcctgtatctttgccaagaccgtgatcaaggtagcttaagagagatggtcaggagaaaacactgtttttgttttttttgttgttttgttttgttttggccagttaaatatcatctctcaaatattgatctcaccgtgtcaaccttgcactgcacaaccttccttctgcttctcccacacccagtatttgcagaagggcaaagctgcttaagagagaggatcagggtgaagtttggcacacagggtttattaatggggcaaaaactgccttttcttcctcctcctgaccttattttgctcttcactctccccagccaataaagcgtctgtggcgattggtgaacagcataaacagctggacctcagcaagggtcaggcaaacccagtcactcggaaggcagctgtgtgagctgccaagctagtgggcttcaggtgcaagggtacctgtgccacaccaacctgggagcacacagaatactattaatgtgcacccagctggtctccccaggcaagaaggtatcctcttcccaaggtgtacccactgaatgttgttactacatattgagagtcattttatgcatatgcattctacctttcctgctttatgagtatttttaagcttttagttcaaggttatattcagaaaatatttcccagtataatgatacatcgtagcctaagaaatattttctcaatgtaattcccttcccagctacccaaatgctacagagaaatgttttctacttggccactatcagggttcgtcatctattgtgttgactattaatggctttttgattgggtaaggattttgctatagatgaaggtagagggctgtcagccctgaaaaacacacaggtcagacatttaaaaggcatgggtttcgagctgtctcaaaatattgcccaatagccataattttaccagcctttctgtcatatgctgctattacaaagtggaagctgttgaatgtttattggtgcccagggttttgctctccaatctaggttcagttgaaggaatattgtttctaagactgttttgagacatgtccagtacatcacaaaggagatcggggcgacccctgcagatgtggagccattagcccagttgaggatattctccaagttgtcctctctcctgctgatggaaatgggaatgaagttaagtggtctgaaaaacttgaatcgttcacatttctcagctctgggggtcatttaccagtttgttgtagaagaaataatcaggtaagttaaaagttcatttccagagaaggtaaaccccacttaccatctctgcatgatttcagtgggaattgattatcactaatccccaactgggctagaataaatgtaaagtttgacctttttaaaacgaaaagagagacaaagtctcagcacattccaaggagtggtagaaacagagctgaaggtgtccccattgtagattagtctcttctcactaaaatttactttccaacgtagggcctaaaggaaacctttcttaaagacaggctgaaaccccttcaaaggcagatgaggaggtacagacacgtgaccttttggtgcacactggagctacttggacaagaccagcatgccttgctgcacgtgtgtgtatttcactgctgagaacatcctttaacttggtgtgcaatttgaaaggatgtgaatcatggatggaaggccatttgtacatgtcctttggcaaaattctttctggtgtctcctaacttcagagacagggactctttttggatctctattgacaagtaataaaagtctggccctcataacttgtttccgaactagaaaagtctgtgagacccctacatcattctggtttttttgcttgagtaagaacaatccttttttatttttcttctgtacagtctaaagctacagagaaaaaaaaatgcactcttcccttgccggctcctggtaccattggtctgaacagctgtagttggtctactccttacttagcacttgattgtgtggggaaacaaaggtgggaggggtggggaatactggaaataatcagggcaatttttttctttcccataattggactagataccttggtactgttgaccttctcagcatctcccttttgccttagatggcaacaccctccagtctgtagcagagcagtccaacccagattagtgcagcccggaggcttagggtgcagcctccctggtcttcctccacacagttgttcaccaacagaccagacctcctttaaccacagtgtcaacatagtatcggaaagagagccatttcttaggggaataaaacagtttcgcttctttagctcatctgtggtgtcagaatccttggagctgaagagagaaatcaaaagagcatgatgatggctgcctggtttcaggtggaacttaatgcattgatctttagaagctccttctgttggaagttgagtacctgtgatctaaaatgtcctggaggcagatgacatctaaaatatgtgctttccaaccagcacagctggcgctcttagctcctgattggttgtgtgttttattaaggatcagtgcagttaagtcgtattttaaagtgttacctcccctcctaacccttccccttcttggacactgaaggaaaaggccaactagggtgttagccctctgggcaccaaggaaactaacagctttctcaaagcggtgaccactcaggccagcccagacaaatctgagggatggccagtgcactccaatgatgggacaggcctaacaacacatgtaagcttccccgagagctttcagctggttcacctctttgttctctagactcttaagtactgactgctttgacttttgtgattatgttatggtgatgtgtagtcagtgtaccaatatgttcacaacctaggatcatgataatggagtgtgttttgggttttttttaactgttcagaaaaaaagtaaattacaaatataagattaaagtgaaaaaaaaaaaatataaaaa

SEQ ID NO: 489140 - DNA, 400 bp, Homo sapiens
  misc_feature (156)..(156): n is a, c, g, or t
  misc_feature (180)..(180): n is a, c, g, or t
  misc_feature (185)..(185): n is a, c, g, or t
  misc_feature (202)..(202): n is a, c, g, or t
  misc_feature (206)..(206): n is a, c, g, or t
  misc_feature (210)..(210): n is a, c, g, or t
  misc_feature (212)..(212): n is a, c, g, or t
  misc_feature (234)..(234): n is a, c, g, or t
  misc_feature (249)..(249): n is a, c, g, or t
  misc_feature (264)..(264): n is a, c, g, or t
gcagcgatggaattacctggaacagttttttgtttttgtttttgttttggtttttgtgggggggggcaactaaacaaacacaaagtattttgtgtcaggaattgggctggacagggcagttgtgggttggggtggtttttttctccaattttttgnttgtttcttgttttttaataatgnttacnatctgcctcaatcactntgtntttnanaaagattccacctccagtcctntttcctcccccctantcaggcccttgaggntattaggagatgcttgaagaactcaacaaaatcccaatccaagtcaaactttgcacatatttatatttatattcagaaaagaaacatttcagtaatttataataaagagccctattttttaatgaaaaacctatcc

SEQ ID NO: 489141 - DNA, 534 bp, Homo sapiens
cggaggctcaggtggtggtgtagcaggctcccagacgactgccatgtcagctgtatctctgagtgcatgctgcactgcggagggacaggctggctcggggctcaggaaagatgctcacatgtgcctagaaatgtaggcgtcaagggaaggctgtgtgtgcgggcacctgagcggctgcgcttcccaggcatctgagttcttacggagccctaataggcacatccccaaatggttgtatgaggatgagcacaaaaatagcagatggggtcaccctcaccctccactgacaatggactgggatccgactcatgcaacattccttctcggccgtaggttccacatccatgggttaggtgtgctggcctggagcccgccggccccggtccccaccgcacaaggaccccatcacaagtgggtgtcatactcttcctccagaaacggattaagcaaccagcatgtgaaccttacgctctgtttacaggctgagtccccacagctcttccagcttcagccaggccagggtcaccttcagat

SEQ ID NO: 489142 - DNA, 4366 bp, Homo sapiens
cgcatcttactcccatcaggccaggtcacctttgacagaagctcctgcatggcataggcagagagcaggcattaggaaggacccctaagccttttccccattggcagctaagtgaatgttcttttctcttcaagcaagtaagaaatatcaaaaaaggggctaatgactatttgctctgttttcacacaggacccattaaagttgcggtatttaacgtatctgccaataccaggatgagcaacaacagtaacaatcaaactactgcccagtttccctggactagccgaggagcagggctttgagactcctgttgggacacagttggtctgcagtcggcccaggacggtctactcagcacaactgactgcttcagtgctgctatcagaagatgtcttctatcttttgtgaatgattggaacttttaaacctcccctcctctcctcctttcacctctgcacctagttttttcccattggttccagacaaaggtgacttataaatatatttagtgttttgccagaatctctcttgctttgccattaagcagaagaactagtttccctgtatagcctgctgggagagacccacttctagggtatgggggatgcagcttcaagcccagtgcccagtgtctccctgttaactgcaggaatgccaagcacctggccagagcagcccagccccaatatgcttaggaggagacagagttccctctgtatagcctctgggacaagaaaaagaaaacacaagaatgtatacactggaagatttgggcctcctgcctgccttctctttgtttctgttcctcttcccatctactcccctacgccccttcaaccttttttctctgtctgcttcacctgagaagaaagtgtatgaagagagtgtcctcctctcgcatgagccagatcagccagaaaatgcaacacttggaagagttaaatgctgttcagtgaagatttcagccccaggcctttgctgcaagtgaccctgtggcaacagtggattctcagacatgatactctcatcatatttgcaactcttctctctctttcttccccacacccaagaggaggattggtggtagggggcaggcagagggggtggggagaagtttcctgggctccatcaatggctgcatcttttctggactcagcagtctccttgattccatgtagagtgtggaaaggagttgctgattgcatttcctctcattaacaattgggtgtgtaataaaaagcattgtacttcatcttaaatcactggtaaggctcagcctacagaaagatttgaaatggccagagccaatcgcttggtgcattctgcgtaatggtttccatctccgatttcctcatcagggcctgtgaatacccaggtgcctgtatctttgccaagaccgtgatcaaggtagcttaagagagatggtcaggagaaaacactgtttttgttttttttgttgttttgttttgttttggccagttaaatatcatctctcaaatattgatctcaccgtgtcaaccttgcactgcacaaccttccttctgcttctcccacacccagtatttgcagaagggcaaagctgcttaagagagaggatcagggtgaagtttggcacacagggtttattaatggggcaaaaactgccttttcttcctcctcctgaccttattttgctcttcactctccccagccaataaagcgtctgtggcgattggtgaacagcataaacagctggacctcagcaagggtcaggcaaacccagtcactcggaaggcagctgtgtgagctgccaagctagtgggcttcaggtgcaagggtacctgtgccacaccaacctgggagcacacagaatactattaatgtgcacccagctggtctccccaggcaagaaggtatcctcttcccaaggtgtacccactgaatgttgttactacatattgagagtcattttatgcatatgcattctacctttcctgctttatgagtatttttaagcttttagttcaaggttatattcagaaaatatttcccagtataatgatacatcgtagcctaagaaatattttctcaatgtaattcccttcccagctacccaaatgctacagagaaatgttttctacttggccactatcagggttcgtcatctattgtgttgactattaatggctttttgattgggtaaggattttgctatagatgaaggtagagggctgtcagccctgaaaaacacacaggtcagacatttaaaaggcatgggtttcgagctgtctcaaaatattgcccaatagccataattttaccagcctttctgtcatatgctgctattacaaagtggaagctgttgaatgtttattggtgcccagggttttgctctccaatctaggttcagttgaaggaatattgtttctaagactgttttgagacatgtccagtacatcacaaaggagatcggggcgacccctgcagatgtggagccattagcccagttgaggatattctccaagttgtcctctctcctgctgatggaaatgggaatgaagttaagtggtctgaaaaacttgaatcgttcacatttctcagctctgggggtcatttaccagtttgttgtagaagaaataatcaggtaagttaaaagttcatttccagagaaggtaaaccccacttaccatctctgcatgatttcagtgggaattgattatcactaatccccaactgggctagaataaatgtaaagtttgacctttttaaaacgaaaagagagacaaagtctcagcacattccaaggagtggtagaaacagagctgaaggtgtccccattgtagattagtctcttctcactaaaatttactttccaacgtagggcctaaaggaaacctttcttaaagacaggctgaaaccccttcaaaggcagatgaggaggtacagacacgtgaccttttggtgcacactggagctacttggacaagaccagcatgccttgctgcacgtgtgtgtatttcactgctgagaacatcctttaacttggtgtgcaatttgaaaggatgtgaatcatggatggaaggccatttgtacatgtcctttggcaaaattctttctggtgtctcctaacttcagagacagggactctttttggatctctattgacaagtaataaaagtctggccctcataacttgtttccgaactagaaaagtctgtgagacccctacatcattctggtttttttgcttgagtaagaacaatccttttttatttttcttctgtacagtctaaagctacagagaaaaaaaaatgcactcttcccttgccggctcctggtaccattggtctgaacagctgtagttggtctactccttacttagcacttgattgtgtggggaaacaaaggtgggaggggtggggaatactggaaataatcagggcaatttttttctttcccataattggactagataccttggtactgttgaccttctcagcatctcccttttgccttagatggcaacaccctccagtctgtagcagagcagtccaacccagattagtgcagcccggaggcttagggtgcagcctccctggtcttcctccacacagttgttcaccaacagaccagacctcctttaaccacagtgtcaacatagtatcggaaagagagccatttcttaggggaataaaacagtttcgcttctttagctcatctgtggtgtcagaatccttggagctgaagagagaaatcaaaagagcatgatgatggctgcctggtttcaggtggaacttaatgcattgatctttagaagctccttctgttggaagttgagtacctgtgatctaaaatgtcctggaggcagatgacatctaaaatatgtgctttccaaccagcacagctggcgctcttagctcctgattggttgtgtgttttattaaggatcagtgcagttaagtcgtattttaaagtgttacctcccctcctaacccttccccttcttggacactgaaggaaaaggccaactagggtgttagccctctgggcaccaaggaaactaacagctttctcaaagcggtgaccactcaggccagcccagacaaatctgagggatggccagtgcactccaatgatgggacaggcctaacaacacatgtaagcttccccgagagctttcagctggttcacctctttgttctctagactcttaagtactgactgctttgacttttgtgattatgttatggtgatgtgtagtcagtgtaccaatatgttcacaacctaggatcatgataatggagtgtgttttgggttttttttaactgttcagaaaaaaagtaaattacaaatataagattaaagtgaaaaaaaaaaaatataaaaa

SEQ ID NO: 489143 - DNA, 4680 bp, Homo sapiens
gtgctggtcggacaccgagctgctgtcaatgttgtagactttgatgacaagtacatgtttctgcatctggggatagaactataaaggtatggaacacaagtacttgtgaatttgtaaggaccttaaatggacacaaacgaggcattgcctgtttgcagtacagggacaggctggtagtgagtggctcatctgacaacactatcagattatgggacatagaatgtggtgcatgtttacgagtgttagaaggccatgaggaattggtgcgttgtattcgatttgataacaagaggatagtcagtggggcctatgatggaaaaattaaagtgtgggatcttgtggctgctttggacccccgtgctcctgcagggacactctgtctacggacccttgtggagcattccggaagagtttttcgactacagtttgatgaattccagattgtcagtagttcacatgatgacacaatcctcatctgggacttcctaaatgatccagctgcccaagctgaacccccccgttccccttctcgaacatacacctacatctccagataaataaccatacactgacctcatacttgcccaggacccattaaagttgcggtatttaacgtatctgccaataccaggatgagcaacaacagtaacaatcaaactactgcccagtttccctggactagccgaggagcagggctttgagactcctgttgggacacagttggtctgcagtcggcccaggacggtctactcagcacaactgactgcttcagtgctgctatcagaagatgtcttctatcttttgtgaatgattggaacttttaaacctcccctcctctcctcctttcacctctgcacctagttttttcccattggttccagacaaaggtgacttataaatatatttagtgttttgccagaatctctcttgctttgccattaagcagaagaactagtttccctgtatagcctgctgggagagacccacttctagggtatgggggatgcagcttcaagcccagtgcccagtgtctccctgttaactgcaggaatgccaagcacctggccagagcagcccagccccaatatgcttaggaggagacagagttccctctgtatagcctctgggacaagaaaaagaaaacacaagaatgtatacactggaagatttgggcctcctgcctgccttctctttgtttctgttcctcttcccatctactcccctacgccccttcaaccttttttctctgtctgcttcacctgagaagagaagatttcagccccaggcctttgctgcaagtgaccctgtggcaacagtggattctcagacatgatactctcatcatatttgcaactcttctctctctttcttccccacacccaagaggaggattggtggtagggggcaggcagagggggtggggagaagtttcctgggctccatcaatggctgcatcttttctggactcagcagtctccttgattccatgtagagtgtggaaaggagttgctgattgcatttcctctcattaacaattgggtgtgtaataaaaagcattgtacttcatcttaaatcactggtaaggctcagcctacagaaagatttgaaatggccagagccaatcgcttggtgcattctgcgtaatggtttccatctccgatttcctcatcagggcctgtgaatacccaggtgcctgtatctttgccaagaccgtgatcaaggtagcttaagagagatggtcaggagaaaacactgtttttgttttttttgttgttttgttttgttttggccagttaaatatcatctctcaaatattgatctcaccgtgtcaaccttgcactgcacaaccttccttctgcttctcccacacccagtatttgcagaagggcaaagctgcttaagagagaggatcagggtgaagtttggcacacagggtttattaatggggcaaaaactgccttttcttcctcctcctgaccttattttgctcttcactctccccagccaataaagcgtctgtggcgattggtgaacagcataaacagctggacctcagcaagggtcaggcaaacccagtcactcggaaggcagctgtgtgagctgccaagctagtgggcttcaggtgcaagggtacctgtgccacaccaacctgggagcacacagaatactattaatgtgcacccagctggtctccccaggcaagaaggtatcctcttcccaaggtgtacccactgaatgttgttactacatattgagagtcattttatgcatatgcattctacctttcctgctttatgagtatttttaagcttttagttcaaggttatattcagaaaatatttcccagtataatgatacatcgtagcctaagaaatattttctcaatgtaattcccttcccagctacccaaatgctacagagaaatgttttctacttggccactatcagggttcgtcatctattgtgttgactattaatggctttttgattgggtaaggattttgctatagatgaaggtagagggctgtcagccctgaaaaacacacaggtcagacatttaaaaggcatgggtttcgagctgtctcaaaatattgcccaatagccataattttaccagcctttctgtcatatgctgctattacaaagtggaagctgttgaatgtttattggtgcccagggttttgctctccaatctaggttcagttgaaggaatattgtttctaagactgttttgagacatgtccagtacatcacaaaggagatcggggcgacccctgcagatgtggagccattagcccagttgaggatattctccaagttgtcctctctcctgctgatggaaatgggaatgaagttaagtggtctgaaaaacttgaatcgttcacatttctcagctctgggggtcatttaccagtttgttgtagaagaaataatcaggtaagttaaaagttcatttccagagaaggtaaaccccacttaccatctctgcatgatttcagtgggaattgattatcactaatccccaactgggctagaataaatgtaaagtttgacctttttaaaacgaaaagagagacaaagtctcagcacattccaaggagtggtagaaacagagctgaaggtgtccccattgtagattagtctcttctcactaaaatttactttccaacgtagggcctaaaggaaacctttcttaaagacaggctgaaaccccttcaaaggcagatgaggaggtacagacacgtgaccttttggtgcacactggagctacttggacaagaccagcatgccttgctgcacgtgtgtgtatttcactgctgagaacatcctttaacttggtgtgcaatttgaaaggatgtgaatcatggatggaaggccatttgtacatgtcctttggcaaaattctttctggtgtctcctaacttcagagacagggactctttttggatctctattgacaagtaataaaagtctggccctcataacttgtttccgaactagaaaagtctgtgagacccctacatcattctggtttttttgcttgagtaagaacaatccttttttatttttcttctgtacagtctaaagctacagagaaaaaaaaatgcactcttcccttgccggctcctggtaccattggtctgaacagctgtagttggtctactccttacttagcacttgattgtgtggggaaacaaaggtgggaggggtggggaatactggaaataatcagggcaatttttttctttcccataattggactagataccttggtactgttgaccttctcagcatctcccttttgccttagatggcaacaccctccagtctgtagcagagcagtccaacccagattagtgcagcccggaggcttagggtgcagcctccctggtcttcctccacacagttgttcaccaacagaccagacctcctttaaccacagtgtcaacatagtatcggaaagagagccatttcttaggggaataaaacagtttcgcttctttagctcatctgtggtgtcagaatccttggagctgaagagagaaatcaaaagagcatgatgatggctgcctggtttcaggtggaacttaatgcattgatctttagaagctccttctgttggaagttgagtacctgtgatctaaaatgtcctggaggcagatgacatctaaaatatgtgctttccaaccagcacagctggcgctcttagctcctgattggttgtgtgttttattaaggatcagtgcagttaagtcgtattttaaagtgttacctcccctcctaacccttccccttcttggacactgaaggaaaaggccaactagggtgttagccctctgggcaccaaggaaactaacagctttctcaaagcggtgaccactcaggccagcccagacaaatctgagggatggccagtgcactccaatgatgggacaggcctaacaacacatgtaagcttccccgagagctttcagctggttcacctctttgttctctagactcttaagtactgactgctttgacttttgtgattatgttatggtgatgtgtagtcagtgtaccaatatgttcacaacctaggatcatgataatggagtgtgttttgggttttttttaactgttcagaaaaaaagtaaattacaaatataagattaaagtgaaaaaaaaaaaatataaaaa

SEQ ID NO: 489144 - DNA, 399 bp, Homo sapiens
catgtcatccacaagctgcttcggccagcgcttattcaagtgagccccccgccgtggacacggaagtcgtttggtggcggtgaaaaagactgccccactgcaactccgcgcacagaatgctacaagaccgctcctccctccataagtccaagaacgcctcatcaccactgtactggttacagatcctgccccacgcgagggcatagtgatattaaaggaccacccataatgtatctcgtggtgagggagtaatattaaacttttcatgtcttcttagaccaattttctctcacaagaagggtaataatccggggaaatttttaccacaagaggaggggggaacgaaattttttcccgaaggctttgtaaaattagatctataaaacctcttcaacatac

SEQ ID NO: 489145 - DNA, 4710 bp, Homo sapiens
gtgctggtcggacaccgagctgctgtcaatgttgtagactttgatgacaagtacatgtttctgcatctggggatagaactataaaggtatggaacacaagtacttgtgaatttgtaaggaccttaaatggacacaaacgaggcattgcctgtttgcagtacagggacaggctggtagtgagtggctcatctgacaacactatcagattatgggacatagaatgtggtgcatgtttacgagtgttagaaggccatgaggaattggtgcgttgtattcgatttgataacaagaggatagtcagtggggcctatgatggaaaaattaaagtgtgggatcttgtggctgctttggacccccgtgctcctgcagggacactctgtctacggacccttgtggagcattccggaagagtttttcgactacagtttgatgaattccagattgtcagtagttcacatgatgacacaatcctcatctgggacttcctaaatgatccagctgcccaagctgaacccccccgttccccttctcgaacatacacctacatctccagataaataaccatacactgacctcatacttgcccaggacccattaaagttgcggtatttaacgtatctgccaataccaggatgagcaacaacagtaacaatcaaactactgcccagtttccctggactagccgaggagcagggctttgagactcctgttgggacacagttggtctgcagtcggcccaggacggtctactcagcacaactgactgcttcagtgctgctatcagaagatgtcttctatcttttgtgaatgattggaacttttaaacctcccctcctctcctcctttcacctctgcacctagttttttcccattggttccagacaaaggtgacttataaatatatttagtgttttgccagaatctctcttgctttgccattaagcagaagaactagtttccctgtatagcctgctgggagagacccacttctagggtatgggggatgcagcttcaagcccagtgcccagtgtctccctgttaactgcaggaatgccaagcacctggccagagcagcccagccccaatatgcttaggaggagacagagttccctctgtatagcctctgggacaagaaaaagaaaacacaagaatgtatacactggaagatttgggcctcctgcctgccttctctttgtttctgttcctcttcccatctactcccctacgccccttcaaccttttttctctgtctgcttcacctgagaagaaagtgtatgaagagagtgtcctcctctcgcatgagccagatcagccagaaaatgcaacacttggaagagttaaatgctgttcagtgaagatttcagccccaggcctttgctgcaagtgaccctgtggcaacagtggattctcagacatgatactctcatcatatttgcaactcttctctctctttcttccccacacccaagaggaggattggtggtagggggcaggcagagggggtggggagaagtttcctgggctccatcaatggctgcatcttttctggactcagcagtctccttgattccatgtagagtgtggaaaggagttgctgattgcatttcctctcattaacaattgggtgtgtaataaaaagcattgtacttcatcttaaatcactggtaaggctcagcctacagaaagatttgaaatggccagagccaatcgcttggtgcattctgcgtaatggtttccatctccgatttcctcatcagggcctgtgaatacccaggtgcctgtatctttgccaagaccgtgatcaaggtagcttaagagagatggtcaggagaaaacactgtttttgttttttttgttgttttgttttgttttggccagttaaatatcatctctcaaatattgatctcaccgtgtcaaccttgcactgcacaaccttccttctgcttctcccacacccagtatttgcagaagggcaaagctgcttaagagagaggatcagggtgaagtttggcacacagggtttattaatggggcaaaaactgccttttcttcctcctcctgaccttattttgctcttcactctccccagccaataaagcgtctgtggcgattggtgaacagcataaacagctggacctcagcaagggtcaggcaaacccagtcactcggaaggcagctgtgtgagctgccaagctagtgggcttcaggtgcaagggtacctgtgccacaccaacctgggagcacacagaatactattaatgtgcacccagctggtctccccaggcaagaaggtatcctcttcccaaggtgtacccactgaatgttgttactacatattgagagtcattttatgcatatgcattctacctttcctgctttatgagtatttttaagcttttagttcaaggttatattcagaaaatatttcccagtataatgatacatcgtagcctaagaaatattttctcaatgtaattcccttcccagctacccaaatgctacagagaaatgttttctacttggccactatcagggttcgtcatctattgtgttgactattaatggctttttgattgggtaaggattttgctatagatgaaggtagagggctgtcagccctgaaaaacacacaggtcagacatttaaaaggcatgggtttcgagctgtctcaaaatattgcccaatagccataattttaccagcctttctgtcatatgctgctattacaaagtggaagctgttgaatgtttattggtgcccagggttttgctctccaatctaggttcagttgaaggaatattgtttctaagactgttttgagacatgtccagtacatcacaaaggagatcggggcgacccctgcagatgtggagccattagcccagttgaggatattctccaagttgtcctctctcctgctgatggaaatgggaatgaagttaagtggtctgaaaaacttgaatcgttcacatttctcagctctgggggtcatttaccagtttgttgtagaagaaataatcaggtaagttaaaagttcatttccagagaaggtaaaccccacttaccatctctgcatgatttcagtgggaattgattatcactaatccccaactgggctagaataaatgtaaagtttgacctttttaaaacgaaaagagagacaaagtctcagcacattccaaggagtggtagaaacagagctgaaggtgtccccattgtagattagtctcttctcactaaaatttactttccaacgtagggcctaaaggaaacctttcttaaagacaggctgaaaccccttcaaaggcagatgaggaggtacagacacgtgaccttttggtgcacactggagctacttggacaagaccagcatgccttgctgcacgtgtgtgtatttcactgctgagaacatcctttaacttggtgtgcaatttgaaaggatgtgaatcatggatggaaggccatttgtacatgtcctttggcaaaattctttctggtgtctcctaacttcagagacagggactctttttggatctctattgacaagtaataaaagtctggccctcataacttgtttccgaactagaaaagtctgtgagacccctacatcattctggtttttttgcttgagtaagaacaatccttttttatttttcttctgtacagtctaaagctacagagaaaaaaaaatgcactcttcccttgccggctcctggtaccattggtctgaacagctgtagttggtctactccttacttagcacttgattgtgtggggaaacaaaggtgggaggggtggggaatactggaaataatcagggcaatttttttctttcccataattggactagataccttggtactgttgaccttctcagcatctcccttttgccttagatggcaacaccctccagtctgtagcagagcagtccaacccagattagtgcagcccggaggcttagggtgcagcctccctggtcttcctccacacagttgttcaccaacagaccagacctcctttaaccacagtgtcaacatagtatcggaaagagagccatttcttaggggaataaaacagtttcgcttctttagctcatctgtggtgtcagaatccttggagctgaagagagaaatcaaaagagcatgatgatggctgcctggtttcaggtggaacttaatgcattgatctttagaagctccttctgttggaagttgagtacctgtgatctaaaatgtcctggaggcagatgacatctgtgttttattaaggatcagtgcagttaagtcgtattttaaagtgttacctcccctcctaacccttccccttcttggacactgaaggaaaaggccaactagggtgttagccctctgggcaccaaggaaactaacagctttctcaaagcggtgaccactcaggccagcccagacaaatctgagggatggccagtgcactccaatgatgggacaggcctaacaacacatgtaagcttccccgagagctttcagctggttcacctctttgttctctagactcttaagtactgactgctttgacttttgtgattatgttatggtgatgtgtagtcagtgtaccaatatgttcacaacctaggatcatgataatggagtgtgttttgggttttttttaactgttcagaaaaaaagtaaattacaaatataagattaaagtgaaaaaaaaaaaatataaaaa

SEQ ID NO: 489146 - DNA, 501 bp, Homo sapiens
atcaatatttatgacattcagaagttggaatggaagaatactattggtaagcttttcagcatgtggcgaaataacattaaaattgacttattcagtaagtatacataaaaagttatatcactctcagcatgtgttaattcagctaaataaatcatgcttgttcagagtgggcaactgtagactctgtttgtatagcaaggcctttatctgaactactgtgtactcacaagattttaagaaaaatggaacataaaattccatgatcctatgagtcactgaatttgcccaatctgactgaataacaaaggaagagaactaccctcctcctgagtataaatgattgaattgattgaatgaatgaaagtgcttttgtgtgtgtgtgtaaacctcagatattttaatacaattatataattttacagggcttaatgcagctatcttgtcaattgcaactaaatgcatatgcaaacttctaaataaaagagagagtatgtaaagaga

SEQ ID NO: 489147 - DNA, 1196 bp, Homo sapiens
gtgctggtcggacaccgagctgctgtcaatgttgtagactttgatgacaagtacatgtttctgcatctggggatagaactataaaggtatggaacacaagtacttgtgaatttgtaaggaccttaaatggacacaaacgaggcattgcctgtttgcagtacagggacaggctggtagtgagtggctcatctgacaacactatcagattatgggacatagaatgtggtgcatgtttacgagtgttagaaggccatgaggaattggtgcgttgtattcgatttgataacaagaggatagtcagtggggcctatgatggaaaaattaaagtgtgggatcttgtggctgctttggacccccgtgctcctgcagggacactctgtctacggacccttgtggagcattccggaagagtttttcgactacagtttgatgaattccagattgtcagtagttcacatgatgacacaatcctcatctgggacttcctaaatgatccagctgcccaagctgaacccccccgttccccttctcgaacatacacctacatctccagataaataaccatacactgacctcatacttgcccaggacccattaaagttgcggtatttaacgtatctgccaataccaggatgagcaacaacagtaacaatcaaactactgcccagtttccctggactagccgaggagcagggctttgagactcctgttgggacacagttggtctgcagtcggcccaggacggtctactcagcacaactgactgcttcagtgctgctatcagaagatgtcttctatcttttgtgaatgattggaacttttaaacctcccctcctctcctcctttcacctctgcacctagttttttcccattggttccagacaaaggtgacttataaatatatttagtgttttgccagaatctctcttgctttgccattaagcagaagaactagtttccctgtatagcctgctgggagagacccacttctagggtatgggggatgcagcttcaagcccagtgcccagtgtctccctgttaactgcaggaatgccaagcacctggccagagcagcccagccccaatatgcttaggaggagacagagttccctctgtatagcctctgggacaagaaaaattaacttggcgtcgtttacaacgttgtgacttggccctgccgtacccactttcggctt

SEQ ID NO: 489148 - DNA, 120 bp, Homo sapiens
gcaaccgtctctactaagtgcaagatagcgcgtgtgtgcgcctgtgtccgctactcggagctaggcggagatccttgacccagagggcagagtgcggtgagcgagatatgcactgactca

SEQ ID NO: 489149 - DNA, 173 bp, Homo sapiens
catgctcgtgctgtctccaggcagcctgatcagtcttgaaggccacgatgttagtgatactttagctgtgactgtgagagttcagagggattccttcctaagagatattttagcggggtagtagaggttccagtcggtggtacctgagcgtgcgaattctgtaagtcatggtc

SEQ ID NO: 489150 - DNA, 168 bp, Homo sapiens
ctatcgatctgtctatacactttgaacacggaaaattcgtttatgtaattgtaacccccaaaaaattatgaagacatagaaattatacacacttttacaatgtataatttatgtcggccacacactagatatgttaacaacacgttccagatatactttcagagttcc

SEQ ID NO: 489151 - DNA, 243 bp, Homo sapiens
ccgggagcccttaaccctggaaacagggagtccagtttaggaggctgattttacagttataattatagagaagagacgacatagtgacttggattgggggcttgaggcaaagatgatgagaagtagtgtattctggatatgttttaaagtatggaccaacgagatagagagacgaggagtcaagaatgacactggcgtagggtcagcgactcactgcgtgaagccgagccctttgggaggcct

SEQ ID NO: 489152 - DNA, 670 bp, Homo sapiens
  misc_feature (670)..(670): n is a, c, g, or t
tgaggaccccggatggcgacatatcaagatgacatctgactgcattgttctgttggtccgaacttctaaacaaacactcataaagtaagtttaaacaatttggagatgtatgaggaaaaagtcttgttctgtgcagttcagactttgttaaaaaaaaaaaaaaaaaaaaaattgcccattccccatgtccatgatcttccatggtttttgttcatgcttatctgatttggattaggggacaaaaaagaagaggcggcaagttctcctatctcttgggagtgtaccgctcaggaaatctggctcatcaaagtccagctaacatacacagcggacacatcaaaggcaaacgggggtgctccgagaatgcagaggggaatagatcggaagggagttggcactgggcaccaccctctggtggcacgggcctcatatccctagtggcaatggtcaccaccatgatggctcaaggacttaggaaacatgcacagcatcttcaattcatcttctgccttagggcaggacgggcaaccaaacagtttcataaagaggctgcagagagaggggtaggttgcctgtgtcaggctgccaaatcttttgtcttttccctactctggagtcctatgccccagtctgagtattggccgtgaattgtcgccattcgagtacgacn

SEQ ID NO: 489153 - DNA, 831 bp, Homo sapiens
  misc_feature (41)..(42): n is a, c, g, or t
  misc_feature (47)..(47): n is a, c, g, or t
  misc_feature (49)..(49): n is a, c, g, or t
  misc_feature (68)..(69): n is a, c, g, or t
  misc_feature (142)..(142): n is a, c, g, or t
  misc_feature (166)..(166): n is a, c, g, or t
  misc_feature (220)..(220): n is a, c, g, or t
  misc_feature (371)..(371): n is a, c, g, or t
cgaaaccccgtgaaagcacacccccctgcgaacaaagtcannctgcntntcgatgaaaaaccgccgtnngcgatcaccctgcgtggcgagttgaaagagcaggcgctcaagaaggtcgatttctctgttgcgaccgaactgntcaccgagcctggcagtgtggtgntcgccctcaacgacacgctgaccaacaatggcgattatccgaaggaataccagnccctgtatcacagtaacttcagcacgccgttcctggagcagggcgcgcgtttcgttgcgccagtgaagcaggtgtcgccgttcaacgacaaggccaagggcgaactggccgactggcaaacctaccgtgcgccgaccaaggactatgacgnaacggtttacaacgtggtgccgtatgccgatgccaagggcgataccttgaccgtgctgcataacaaggccggcagcctgggggtttcggttggcttcaatacgcagacactgccggtgttttccctgtggaagaacactgatacccaagggcagggctatgtcacggggttggagccggggacgagtttttcgtacaaccgtcgttatcagcggccattgaacctggtgcctacgatcggggcgaaggaacataagcagctccgtatcagctacagcttgttggcggataaggcggctgttgaaaaggccttgaagcaggtcagcgagattcagggtgggcgggagactgaggtgcggcagacgcctttggtggatctgaccaaggggtgacattggctggagccttcacgcggggcccggcgttcttcatcgacgccggaatcgccctgcaactgtagg

SEQ ID NO: 489154 - DNA, 483 bp, Homo sapiens
cacgaggaaatgcggtggtgatcgccggttaccaggctgaaggcacgcgtggcgatgcactgctcaagggcaagcgcagcctgcgcatcttcggtcgtgatgtgccgatagcctgcgaggtggcgcaggtcgaaggtctgtcggcgcatgccgactggaaggagatactggactggctgcgtccggtcgatcgcgccccgcagcgcgtgttcgtcacgcacggcgagccggtcgccgccgacagcttgcggcagaagctcgagcacgagctcgcgtggtcggcgcaggtgccggagcaggacgaggagttcgaccttgactgaaccgatgcccgtcgaccgcgacgacagcttcgctgcggtgctcagagcagaggcggcggctcgttgatcagcgcccagaacacgcccatctgcgtcaccgtgcgcgagaactggtcgaaatcgacgggtttcacaacgtatgcgttgatgcccaggccgt

SEQ ID NO: 489155 - DNA, 386 bp, Homo sapiens
tttaggcctggctcactctgtcagccttattctaaagcgctagatataagctcatgtgactgctgctccaataaaaccaaatttatattcgataaagtgtggtcctcttattaattcactgtggtggtggggttggctaattccacacattggtaacacagttacacccatttacccagtagggccgccagggaaggattggattacgcagaaccagaagttacttgtccaatgcgcttcctgctggctctagagtgcatttgtttggaatttgctgctgtcgcgcataggttctgggattgagttaaatattgtgttagtgtcccgcaacaccttttaatttagtctcctgaaagaccgcctttagagtctcttctcatttttct

SEQ ID NO: 489156 - DNA, 223 bp, Homo sapiens
  misc_feature (51)..(51): n is a, c, g, or t
gtgtggcacctcccccctggcttgctctctctctctcctgctgccacgtanaacgtgctttgcttcccctttgtcttccgccatgattgcaagtttcctgaggcctccccaagccatgcagaactgtgagtcagttaaacctctttcctttataagttacccagtctcaagtagttctttatagcagcatgagaacggactaatacacacttgaacttgttct

SEQ ID NO: 489157 - DNA, 284 bp, Homo sapiens
acagtggcgtgtccatgaaatttcaattcatgacccatctcttccacatgcggtgagttgagagatccagtatagtcatatcatatctctggagcagatgatacttaatgggtgcggagcactaagctaatgttagtaaagcatatactttagggagtagggaatcccaaaacatcaaggcaagaaaagtgttatgcaagaactgcattgagctattactagcctggcactgtggatgatgcctagtcacctttgtcaagacgaggcatacgccaaggtacgca

SEQ ID NO: 489158 - DNA, 195 bp, Homo sapiens
ccaaaattggggtttttttttttccccaaaaaattttttttttgggggggggggggacgggcccccccttaaggggggcaaaaaacccccatttttttgccttttttaaccctttccctttttttttttttttaaaaaaaacccggggcccctttttttgggggggggggaaaaaaaaaaccccttttcccccca

SEQ ID NO: 489159 - DNA, 168 bp, Homo sapiens
ccaccacacccaaccaagaaatttcaacattaaatctgaacatgaagacctttcccttcttccaaatggaagataaggatatatttttaagaggactattcgcataaacacccatgtagttacaatctgtgacctaggcaggaaatgccaggtcgacgcggccgcgaa

SEQ ID NO: 489160 - DNA, 170 bp, Homo sapiens
ccccccgtttggtcccccaggaggacattttagcaagggggcctgcaagggagtgtgggactgggcctcatcctcgccggcgttggaaaccaaggccttgtatgcccccccttatgaagccctgtttcccagttactttcccttcccgaataaaggttcccaggtaatta

SEQ ID NO: 489161 - DNA, 297 bp, Homo sapiens
taagccaaatttagcagtgagaaaaaatattttaaggggtagagagagatgggtaaaaatggtggggtgtgtttttttttggaaagggagtctcgctctatcgcccaggtggggcttgaaggggcgtgatctgggttccccgacaacctcggcctccaagggtcaaggtgactctccggcctcagcctcccgagatagcggcaattattagccattgcaccaccatgtgccgggcataatatggatattcacagatacaaaccggggtttccccccaggggggccaaggcgggcgcg

SEQ ID NO: 489162 - DNA, 307 bp, Homo sapiens
ccccgtacttcatcggctccgccgggcggcggtgcgctgcgatgccctgctgtcctcagtctactcccggaggctgagcgtgggaggactcgcttgagcccatgagttctgggctgtagtgcgctatgccgatcgggtgtacgccctaagttcggcatccatatggtcacctcccgtcgcaccggggcgtacccaccacgggtgctgactgagatacgcgaggtgccgcagtcaactaggcgcccgtgccgattcggtaccgatgctcgatcttcgttaaatctctagctctgtagctcttttcctg

SEQ ID NO: 489163 - DNA, 774 bp, Homo sapiens
gtttcccagaccctcgtgtggaggcttggtcaaaaggcgaagacctgaagaaatactttagacgcaggatgaaggaggaagtggcagaacgggtagaaccaacccctgtcgaaacttcaccaacgtggactctagccccgcgactacagtctgccatccatcatcctagctcttacttgggagcccaagcaagaaggactaaggtgactgggacctgggcagatgggagaactgggcagtgggagaagagatcatgtaggaagtcagcaaggggctttgtttcggtccagggaaccaaatccagcactataaccgcgcaccagatcctgggagtcactggcagatagcaaatctaggaactaggtaatgcaaaggtgctgcgtcgtgccttctagctgagcagcccctccccatctcataagtcctcattcttagtattctataaaatggggattatgacatccatcctgtgtgtcctgttgacctgtttgtaaaggtagaataaggtaagtgagtatgaaagccactttaaacatgtaaagcactatattacaggcttcttctcactcaactgaccctagatcattaggatgggtagacatgacaagaaggaacgaagaatgcagatgcacgggggagcagagcactgtgaactctccattttggctacagaactatggtgctgggtctatggaacagtatgtcccggttccctttgacaggaagctaaggccaaagagggaatgaacgtcctggcaaatgttcgaggaaccg

SEQ ID NO: 489164 - DNA, 198 bp, Homo sapiens
tatcgttttctggtgatgttgtgctaccaatagggagtacacggccctccattggggcctgagaatcagtggacctccccgcgaggtgggcccggcgcgctcgctgggtgtttggcatgttcccacggggagtgccgggccgttttatggggtgattggatgtttccttctttattttataaaaaagggtagccatgc

SEQ ID NO: 489165 - DNA, 219 bp, Homo sapiens
cccaattttccccaactggacggggtcaggaaatgttccttttcccccagaaccttttttttttaggaaattatttaatggtggcaggtccccagggatttcccctttttttgtattgggcagggtagttgatgtaaaacccttttgtggatggaaaaaattttttttttattgctcttttagtttgggagggtaaaaaaaggtttttggttattttta

SEQ ID NO: 489166 - DNA, 104 bp, Homo sapiens
tggggctgtgggtccttgtgtcctgctgctgaacacactggggctgctctgacggacaaccgctgtctgctgccttcatacagatgctgaatcagctccaacgt

SEQ ID NO: 489167 - DNA, 256 bp, Homo sapiens
catgcggttacttctgctggccttctctccttaatgacattacactattctcaccagcacctcctaggtgacccagacaaattataccctagaccaaccccttaaaacacccctccccacatctaagcccgaagtgatatttcctactacgacctacacaaattctccagatccgatcccgagatatgcagggagatccatcatagacgtcagaacctgcaggacaatgcaaagcattggacaactaggaccgatc

SEQ ID NO: 489168 - DNA, 327 bp, Homo sapiens
tttagcgggacttgccaaaggtgctggaccatcgagacttgttatatgagcagctttccaaataccttcaggtgagaaatgtcatggagcgactccaggaagctaagcactcggagttatatatgcagggggatttgggctgtaacttcttcgttgacacagtgggcccagatacttcacgcatctatgtggccctgggatatgggtttttcctggaggtgacactggcagaagctctcaaggtcattgatcgaaagagctctttccttacagagctcagcaacaagctcaccaaggactccattgatatcaaagcccatatccaca

SEQ ID NO: 489169 - DNA, 1181 bp, Homo sapiens
ttcgcgcctggctgcccctcctcccgtctgtgtgttgtggcggcggcagtgtgtctcccgccgcgcctctggcttctggtctggtggtcttccttgtctctcctatttttcgcacatccggctgggtgtctttccgtcgggtactctctgtgtgtggttgatctcgccgccgtactcccccggtcagtcgggcttctttgctggtgttgttcgtcctacctgttttgtggtcgctgtcttctgtctgtcccctctcctctccttggttattgtctcgtcgtagtttgtggtatatttgttgtgttcggtgctccgtgtggtctgtgttcttttatctttggtcttgtgtcgtttcagtacgagtgttttatttttgttgtgtctgctgttttgtgttgcttcttctttctctttgtctgtctttttctgtgtctgcttctgttagtctttgctcgtgttagttcccctgtttgctctttgagctgtgttggtcccttgcgctgccctcttgcggtcctgttttgggtgcgtgccgttccttttttctccgccgcgtgcgcgtctccttccttgcttgtcgttctccctcctcttttcgcgttgcttttgctcgctgtctctctgtccttctctttcttttcttcgcttcgcgctctgtcgtccccgcgccctccttccgccctccctctcttctctcttccctccttcctcctcccgctgctcctctccgctcctccgcccctttcgtcgcgctcgttggctgtgtgttcttctgagccccgttcttcgcttgctcgcgccccctccctcgccccctcctctctccctcttctccctctcccctctccctctctctctctgtgcggctccgccggcgcgcgccctctcctccgcgccgctctgccggctcctctcttttcttcttctgctctcttcctttctcctctccccctccccccctctctctcctcctcctctcccccctccctccctcttccttctctctctctcctctctctcgctctctctctctctctctctctctctctctctgtgtctgtcgctgcgcccgcttcttctctcgtgttctgttgttttttttttttttgtgccaccacacacacacacacacacacacgcacacccacctcccccacccacctcaccacacacacaacaca

SEQ ID NO: 489170 - DNA, 352 bp, Homo sapiens
acagaggctgaatgggtgtgtgtgtgtgtgtgtgtgtgtgtgtgtgtgtgtgtgtgtgtttttaaagagctccttagtgtgtatattactctttatgtctttcttgctcttacaaagaggtgtcagaaatatagaacgctcttggtgtcggtgtgggaggaaaagacagatgacatgtggtaaaaagttatccacacaatactctcctttcggatatgctctgtatcgtctccagccagccctgtttatccgggttacagtggattcgtgggactcgtacccgtatgtgagaggagagggagagagagtgttctctctccactctgttctccttgatctgattcagtctcca

SEQ ID NO: 489171 - DNA, 1000 bp, Homo sapiens
agcccaggtgagagctctcttctcctttgagacctagttggaaaggcagagatagggtctctgaaaggaatagtgaatgacacctgtattttttggggaaacttcattgaacaagagttccattataatcattttctcttcacaagtaacctcttccataacagcaggaattttacatgagtttagatcattcctctatgggagggatttgcttcagaagtgcacttgattggaagtactcataagtgagtttcttgacgtttcgtaaagagtttccttatttgataaatacattctagcaatctgaacctttgactctttgcagctatgaatgtatacatactaggaggatttttctaactgatgtaatattttatcatacctagtatctctctgtcctagactcttcatatattatacatactcataacctctcatcaactgtactatactccacatttatttctcttcataccttatctcatgtaacaatctattaactactcactctattctcatactctgctatcatcctagacacactgtgaccttatccctctagcgtacttcacctaccattctttaccatctatcatactcactacattgctcacctgaaccacacttctttgctcacatgcctacggtaccattaattttctaccatcacctatccctgtcctaatctactcacttcctatcatctcacacttccttcttttccatttcgatcactctatattcattccactcacttttcgtcctcatctctcttcctctactcgatctattcgcattctgtacttccgatttctgctctctcttattctacctcattctattcctctcttgtacctctattctatatcttcatcattatacttcctcctctcatctctcattcactactcctgactcctccatcttctctcctctttccttactcctttatctctctattaccatcctctctcttctattctacctttatctctctcct

SEQ ID NO: 489172 - DNA, 872 bp, Homo sapiens
ctgtaatcccagctactcgggaggctgaggcaggacaattgtttgaacctgggaggtggaggttgcagtgatcgcgcaattgcactccagcctgggcaacaagagcaaaattccatctcaaaaaaaaaaaaaaagtgattgcaggcctttctgcagtaatgggtggatatgtcttagcctaaatgctgctccagtttatggctttggtccacgttgtatttactttggcgtgaaaaacccaacattgtgcattgacggggaaagtggctccaagttgctgggttgcttgctccgggcttggagcttgttcgaaagcagaaccaggcagaaccttcccttctttccatttccttagaaggcagttatagctgctggattctcgtctccttcttcccattctttgcagaagcagccaggcttgacacttgtgtgtctctcctgtgccaggattgacttatcctccctccagtggagaagctgaaaacggtgctgcagaaaggtgaaagactttccacattcaactttcctggagaagttacgcgttgaggacgccttgagccccagggggagacctgtcctttggctctttccttcccaattgcccgtcaggcttgaacttcgccttcccccgtgactctgcctcgggcctcgcagaggccggtggtcactttcggtcactcatttggcccctggagacgtctttcttggtgccttgatgttgaaagcgcctctctttggagcaaacaagcattctattgtgcaaccagagtagcaggggacctgctcagcaggttgtgacccaggtctctgaatctgtcatggcttggcttctgcaaaggtccattggggggtttaccaaccaactaggatgt

SEQ ID NO: 489173 - DNA, 149 bp, Homo sapiens
gtgtcccagaggcgcttcaaagacagtctagcatagtggtggatggcatcagggatagatgaaactccatggtgagaactcagtgaaattcgtccttggcctgttctgtttctgctgctctgtccttgactctgcacttcccctccgcc

SEQ ID NO: 489174 - DNA, 582 bp, Homo sapiens
  misc_feature (200)..(200): n is a, c, g, or t
  misc_feature (208)..(209): n is a, c, g, or t
  misc_feature (214)..(215): n is a, c, g, or t
  misc_feature (217)..(217): n is a, c, g, or t
  misc_feature (415)..(415): n is a, c, g, or t
  misc_feature (495)..(496): n is a, c, g, or t
  misc_feature (569)..(569): n is a, c, g, or t
tagcggaaccggaatttcaaggagagatctgaataaggagtactccaatagaacatagacaaaaggtcaataagcacatgaggaggttctcaagatcactagccatcaggaaaatgcatatgagatctacaatgagatatcacttaacactcactgggatagatatataatcaaagtgataatatcaagtgttgtggaangctgcaannaaganntnccggcagtgcagcaatgggcgctgtgtgtccaacatgctgtggtgcaacggggccgacgactgtggggatggctctgacgagatcccttgcaacaagacagcctgtggtgtgggcgagttccgctgccgggacgggacctgcatcgggaactccagccgctgcaaccagtttgtggattgtgaggacgcctcagatgngatgaactgcagtgccaccgactgcagcagctacttccgcctgggcgtgaagggcgtgctcttccagccctgcgagcggnnctcactctgctacgcacccagctgggtgtgtgatggcgccaatgactgtggggactacagtgatgagcgcgantgcccaggtgtga

SEQ ID NO: 489175 - DNA, 1128 bp, Homo sapiens
  misc_feature (114)..(114): n is a, c, g, or t
  misc_feature (266)..(266): n is a, c, g, or t
  misc_feature (268)..(268): n is a, c, g, or t
  misc_feature (281)..(281): n is a, c, g, or t
  misc_feature (313)..(313): n is a, c, g, or t
  misc_feature (323)..(323): n is a, c, g, or t
  misc_feature (327)..(327): n is a, c, g, or t
  misc_feature (348)..(349): n is a, c, g, or t
  misc_feature (365)..(365): n is a, c, g, or t
  misc_feature (387)..(387): n is a, c, g, or t
  misc_feature (392)..(392): n is a, c, g, or t
  misc_feature (417)..(417): n is a, c, g, or t
  misc_feature (465)..(465): n is a, c, g, or t
  misc_feature (625)..(626): n is a, c, g, or t
  misc_feature (634)..(634): n is a, c, g, or t
  misc_feature (637)..(637): n is a, c, g, or t
  misc_feature (640)..(640): n is a, c, g, or t
  misc_feature (643)..(643): n is a, c, g, or t
  misc_feature (649)..(649): n is a, c, g, or t
  misc_feature (652)..(653): n is a, c, g, or t
  misc_feature (657)..(657): n is a, c, g, or t
  misc_feature (660)..(660): n is a, c, g, or t
  misc_feature (670)..(670): n is a, c, g, or t
  misc_feature (673)..(673): n is a, c, g, or t
  misc_feature (688)..(689): n is a, c, g, or t
  misc_feature (696)..(696): n is a, c, g, or t
  misc_feature (715)..(715): n is a, c, g, or t
agcggtctcctgccaagcagcaggccccacctgtccggaacctgcaccagtctggattcagtttgtctggtgctcagattgatgacaacattccccgccgcaccacccagcgtntcgtggcgccccccggtggccgtgccaacatcaccagcctgggctagagctcctgggctgtgccgtccactggggactggggatgggacacctgaggacattctgagacttctttcttccttccttttttttttttggttttttttttaaanancctgtgatagttnctgtggagcagccagttcatggggtccccctnggggccccanaccncgtctctcaccaagagttacnngatttggctcatccanttccctacacttctagtgggtntcacncccaagattacccaccaagctcatncggggaaccacacccaacatttagacttgcgaacaagcagcccccagncgagggtctccttcgccttcaacctcctagggtctgtagcatctccctttccagggggggagggaagataacgtgcattggcccagagctgcctttactttccttttaaaaattttaagaagtttccttggagggggctggggaggggccggggtcacgnngagtcttntanttnttntttttnaanntatnacnttgggacacnttnattcccatattaacnnacagggnggtttagaagggacattcntaagtgaattgcacattaaaggttgtattcaccacacaggtgataacccccgggggtggtgttggcgacaaaaccacatatggggaggacatgcccctggagaaagcgccccaaaaatgtgcccccacccggtagttcgcccaattcgttgtatagctctacagagagaccaccatgtgtgggtaaaacaagggggggcacacacgtctatggccttaattgggggcccccaaaaattgctgggacgggcggaaattataacctccccttgggagcaagaataccctgcctcatctcttgtacaccccaaatcttcgacgagcgagagccccacaacacagcgtcatttgatcccttatccagacgttttgaaatcccgcgaaaaattcgggcggtgaggtgcacccactacg

SEQ ID NO: 489176 - DNA, 832 bp, Homo sapiens
  misc_feature (223)..(224): n is a, c, g, or t
  misc_feature (640)..(640): n is a, c, g, or t
tcccccgcttgatatttgtcgccccccacatttgtgaacgcaacccaccacacagagggataaagagagaggagatagggcccacccccgcatatataataggtgttcttcttagagcccgctctgtgttagaaaaaacacactgtgggagatttgtgttgctcctctgtgggcgcgcacacactatattatagtgcgcgatatcttatatatagaagaaagnnggtggagatatatttgtgatagacacacatacacacaggggagaaattgtgaggtattcctggtgtcccacagatatgagagatatgtccccccacacacacgggtgtgtgtacacacacgtgcgcccacaatacctgtgagcaagagagtgtcttacccacacagtgtggtataccccacgcgcacatgggctcgtgtgtggcgcacatgtgtgtgtgtgtaagacacacacaccccacggtttataggggccccaagagattttctctgccccacagaaagaaattataatgtttggcgctatattgaggccaccacatgttagccacactcttataagaggctccgcggatatgctttcctgagaaacgctgtgagaaggagaaatgtagtcacgagaaaagagaaaagaagncccacaagagataaaggtacacctcgggtgtcacaactaaagcgcccacaccctcgctccacccccagagagaaagcacaccctcttgggaggaaacccatgggaaggagcctgagctgctggaacctattccctatgaattcctggccataataggtgtttaaaaaaaaaatataaggacctctgggctac

SEQ ID NO: 489177 - DNA, 154 bp, Homo sapiens
ccatgtagcgctaaaaaccccatattggccccataacacacattttcaacaaccacgggactcgaggaaaggagcactcttcacagaaaggttcctcacagaagttcccaacagacacgcgggtggacacaaacagggcgcacgagcatacaga

SEQ ID NO: 489178 - DNA, 368 bp, Homo sapiens
gagttgagacctgctgcatgagctggctgagctgcggctagggatccgactgaggatgacagacggtggacgggtagacggaggaggcagagagcccgtgagcagctacagactcagaagagtggccgggcacaaaacaagggctgccccatcgacctcgtgtacaagaagggtgggggctgtcgcctcttgaatcgctccaccaagttccagcagatcgtccgtggcatgaacccaggtgctggatgtgccgctgactgtgaagatcctgcacaggcgtccagggagcgtgtgaacctggcgcaccgcttgctgaccgagctgggggactggggcgtgcactcgtcacgcttccatggccgttctcg

SEQ ID NO: 489179 - DNA, 255 bp, Homo sapiens
agcaagcaaaatcatgtttgttttgcaaattgggagcatgtcgcagaggaccagctgccaacagtgacctgagtggcccccacgctgtgacaaggcagtcttctcaatacagcgtcaacaacgggatcactgcatgtcatcgccagcacagcaaagacttacacagctcagaggtgtcttacatgtcccctgagcacggatgaagagtctactcgctgtgcacacgcacaatgacaggcatactatgctttgcca

SEQ ID NO: 489180 - DNA, 337 bp, Homo sapiens
  misc_feature (40)..(40): n is a, c, g, or t
  misc_feature (42)..(42): n is a, c, g, or t
  misc_feature (310)..(310): n is a, c, g, or t
  misc_feature (320)..(320): n is a, c, g, or t
tcacacttatttcagtgtttaatattagaagcatttgcgnanttttaatttttaaatttcatgatgtttttgtgaccagtaacaagccatatgaactcaactctcatttatatccattagccaatggtaaaattggtttgttatacattgtttcacataaaatcacagtttccaagaacctatggatgactttaggtgaggacttactgtatttttgatttagggcactactggggggagagagagagagagagagagagacagacagaaagagagagagagagaaacgtggaatgaggggcagcgattngaggattaantatattttgtttattgg

SEQ ID NO: 489181 - DNA, 473 bp, Homo sapiens
tacttcagtgaagcgtcgagaccgttccagaagtagagagacgagaccagaagccgagagcgaagaagatctcgaagtagagacaggagacgctcaaggagtagcagccggggccggcgatcccgatcctccagtcctggaaataaaagcaagaaaactgagaatagatctaggtccaaagagaaaactgatggtggggaaagttctaaagcagaagcaaaaaagcacaaagcatgacaaggcaggcatgaaacaagcacacacagcatgctggcaactttgaccagaataagctggaagcaagcaacatgcagcaaagcgaacagcaccagcagtagcaaaaatggcgagcaagcagcacgtaaaaaggctcatggaaaacataggagcaactgcacacggcacatcgaagagatgcaaacaagggcaaaaagtggagtttagaggcacgcaagatgatgcaccaacatgca

SEQ ID NO: 489182 - DNA, 566 bp, Homo sapiens
caagagcgaaactctgtctcaaaaaaaaaaaaagaggggggtgggattacttgaggtcagggattggagaatcagcctgaccaacatggtgaaaccctatctctactaaaaatatagaattagccaggcatggtagcgcacgcctgtaatcccatcttctggggaggctgaggcaggagaatcgctagaacctgggaggtggaggttacagtagccgagatcgcgccacttgcatttccagccggggcaacaaaagcgaaactctgtctcaaaaaagcaaaaaaaagaaaaaaaagcacgtgaccttatgaggctctcgctgatatggttatttaaaggactataaagagtttggatattacaattatgcaggggcccctatgtggggattataataaaaaaagcacaactgggtggtgtatacctacatgtaggttctgaacaagcaccagcctacacagcacatatgggtaaaacccactgctctataactggtctacgctaagcacaagatgataaatcggttaggttaaacttttgtatactgggtaagtaaaaaaagagtg

SEQ ID NO: 489183 - DNA, 1019 bp, Homo sapiens
gataccaactaaagcaggaataatcgagttcatccataactaatataaggacaaaattctgctggtagacctgcattagaggctctttcgatccgtatgcatgattgctgggaagaacaacacactgtctatgcaagcatagttaatgtgcaattcagtcttctcaatcgtggccacacactgtcattcacagtctcaaagtctctgcatattgtctccacgtcttcatccatcggcatcagtgtcattttaccaaccgtgcatcagtcctattcatagcctatatccaagtctcgtgcatgcagggttgcatgttaattgcaatacccttgacataatctatccacaagccactggtctcttcccaaactttacactagccaagctaaaactatcagcccatatacccctccttctaaaccgaattaagcgcaacgattatttatacctcttattcacgtctctgcccataattgtgcgggcacttccctagtcaccacgggccccacgctttaaccccggtcttgattaccctcagaaacaactatcggtcattctacgcggaggaacttcactccctaactctagaagaaccttaatataccaattgtccctgccccattaacacttgacaactatgcccaatatgctaagaactggtgccttgaacccacgagacatacttaacccacgtcaccatcacttcatgggaccctgtgactgactttcacggatccctcactacacagcattgcttacctgatttactgatcatcatcgtgtccatacctggtattgaccaagtgaagcaataccactgccacccgggatttcaatttcaaactgccgacttcacaattacccatgcttcacagataaatatagagaatgtaacctgtggattacctactacacttctgaacacacttcgacccataggcattaacacatctgacatctcgccaatccacccagtttggacatattttcatcacatgcaattggtttaaacctaatct

SEQ ID NO: 489184 - DNA, 217 bp, Homo sapiens
  misc_feature (19)..(19): n is a, c, g, or t
  misc_feature (33)..(33): n is a, c, g, or t
  misc_feature (75)..(75): n is a, c, g, or t
  misc_feature (80)..(80): n is a, c, g, or t
  misc_feature (164)..(166): n is a, c, g, or t
  misc_feature (170)..(170): n is a, c, g, or t
  misc_feature (187)..(187): n is a, c, g, or t
  misc_feature (196)..(196): n is a, c, g, or t
cgatggcatgatgagcagntccatctctcttgnaggtgtgtagtctttctctaggatcaggaacttgcagtcctngtgcnaaaggtcatcgctctgcacacttgtggtgcaggcggcggaggtggaaacgccagttttacaggcgcagaactctgtggcatgtnnngctncaccccatatgctgtgnaagtggtgntggtgccattgggccagcggg

SEQ ID NO: 489185 - DNA, 341 bp, Homo sapiens
ctcaaagccaacaaaaacaacatatactctggtagtatgtgccatgcccagatcaagtcgcagcccaatagcaagtctatgcagcatacttccattaaaaccaatgtatggcaagagtgatctgagactctggaaactatttgtcgtatgtggaacgggccagcagtgagtgtacagttctttatctcttctgtgccatggaccatttggaaatctggtaaagcctgactacattctaaaaatggtctcatggccaggcacggttcatgcctgtaatcctagcactttgggatgccgagtcaggcggacatgaggttaggagatcgagaccatcctggtca

SEQ ID NO: 489186 - DNA, 232 bp, Homo sapiens
ccactccgagagtcatgtataggccacctgatttctagtacacaaggtctggcagggaaatttcccatcttggttattataatatttacgcgtgtcccaatactctcacaaggcagctggtgtagatggcatgatcacacgctcactgcaacaatccgcctcccaagactcaagtagatcctcccacctacagcctacctagagtagctaaggactatcaggtatagcgcca

SEQ ID NO: 489187 - DNA, 448 bp, Homo sapiens
  misc_feature (4)..(4): n is a, c, g, or t
  misc_feature (17)..(17): n is a, c, g, or t
  misc_feature (50)..(50): n is a, c, g, or t
  misc_feature (154)..(154): n is a, c, g, or t
  misc_feature (191)..(191): n is a, c, g, or t
  misc_feature (205)..(205): n is a, c, g, or t
  misc_feature (268)..(268): n is a, c, g, or t
  misc_feature (278)..(278): n is a, c, g, or t
  misc_feature (280)..(280): n is a, c, g, or t
  misc_feature (356)..(356): n is a, c, g, or t
gggnaaaattttttccnatagtgaactctgtgggcgtctccccagtattnacccggatgataggaattgactccggctgcacacacgtacacacccacacacatctatctatacataaatgctgaagccaaacttgtcttgcagatgtagaaantgttgctttgtttctctgataaaactggttttagacnaaaaatagggatgntcactcttagaccatgcctaatgttactagagaagaagccttctttacggtcttctatgtgtncatctgaatncngaggggccttaacagcgatgatgaagttgttggtcttcggctgccatggacccaggataagacatctactttctcnacgtggtgacccctggcttccaggaactcaatctcttcctctgtgaactcactgtccacctgcaggaggttggactgcaggtccgggtgtag

SEQ ID NO: 489188 - DNA, 850 bp, Homo sapiens
ggcggtgtcagtgtggcggtcttgagtgctatcagatcggtatggcattggcgtcctggtgcccgcaaggcgggcgctatgctggctcctggtgcagctcgtgccttggagggcttcgtgggccccgagacgctggggcgtatgagtggggctgtgctgctccacgcggaagtcggagcctcctcccctggatagggtgtacgagatccctgtgactgtgatgcccatcaccttttgctgtgggaagatgcacattctgtgcccatgtgcttggcgctggccgatctttcctgacctgggacctgctggctacaatggacccaagtgttctacctgctcgcaccccgtcttcactgatgcatcctgctgtacaaagaccgaggcctgcatatatctttcaccacctgttgcctgccttctcgagggtgtcaagcaggccctctggctcaccaagaccaacgttaatatgaatgtgccttccctgagaaagtgcttagccttgttgatgatccaaggaaccacgatagagaaccaagacgagtgcgtactgagtgtgatcgtctcacgcccgtactctggcagaccactgcggaaatccccgaagagagagagctactgcccggtcatcgtggacaacctaatccatgctgtgtaaatctcagattctcaagcatcctacatctggccaggaggatctgtgtccaaaaactccagcgtttctaggcaacctggacaccgacgaggtcccttcaacgtacagagtccgcaggaacatggtggagcccggcgtgcagcctcacggagccacggcccaccacggctccagcgaggaccggaagcgcaaagaccc

SEQ ID NO: 489189 - DNA, 333 bp, Homo sapiens
gcccggtttccattttaaagcccgattttcaaaccaacccccatttttttttcccccttttaaagccaaaccaaacctttggattataggggttttggttctggggtttaggcccaaatttccccccaaaattttcggggatttgttttgaaacccgccttccggggggccccaaggggcgcctttagaaaaaaaaattattatttttccgggagagggattttgaatgaaattccccttgccgcccggttcccaaccaaccaaagggacgaggggggcttaggttaagttttagggcctggcccaacccccgctggtgggggtttcccggga

SEQ ID NO: 489190 - DNA, 296 bp, Homo sapiens
cgagttcccgtcagcattgcagcactgtcacattttgccagccgcagcagtgtcccgagacggtatttgccttcgcctaccagaggacggaccaataccggaactctgcctcagcactgctgtctgccttatctggccgcctgacgacggtgatttcgggcctattgaagactgcctgctcagtatgccgcttctcagactaagagcttccatgaaggggctgagaaccgacaaggaccctctcgattaagatcatctgtcccagaaccaaccaggctgcgatggaaatgctgaca

SEQ ID NO: 489191 - DNA, 350 bp, Homo sapiens
tcatgtcggtccaacgatggtcctcagtcgtacatgggaggtgaggcagaagaatgcttgaagctgggaggcgggggttgcagtgagccgagattacaccactgcactccagcctgggcaacaaagcgagactccgtctcaaaaaaaaagaaaaaaaaaaagaccaagcgtggtggctcacgtctgtaatcccagcacttgggaggctgaggcaggtggatcacaagctcaggagttggagaccagccgggccaatatggtgaaacctcatctctactaaaaataaaaaaaattagcccaccaggcccggctaatttttttatttttagtagagctgaggaccatcgtgg

SEQ ID NO: 489192 - DNA, 336 bp, Homo sapiens
gctcgacccaggctctggggcccagagggagataggccaagggacgagaagacaggagtttggggggccaagtgcagtggctcgcacctgtaatcccagcacttcgagaggcccagacaggtgggtcacttgaggtcaggagttcgagaccagcctggccaacatggtgaaaacccatctctactaaaaacacaaaaattagccgggtgtggtggcacacacctgtaatctcagctactcgggacgctgagacaggagaattgcttgaatctgggaggtggaggttgcagtgagccgagatcgtgccactgcactccagcctgggggacagagcga

SEQ ID NO: 489193 - DNA, 1138 bp, Homo sapiens
  misc_feature (1138)..(1138): n is a, c, g, or t
ctctaataaacggagcctaccttttgtaaattaatttcatcttatgtgagtttattgccgggtggaagggaggaaaatgttttagatcacacagaaactaggaagtgaatattgtaggtagagaagttggttatgtgtttggcatgttactgttttaccaaactgttcttttggttttcaatatggaaaggtgtccattggcaaaacaaccttttcttgaggattcatgtgatttctacaggaaatgaaaataagaatccatggagaaaaaatagctaagaaaattggatgcttaatctgaactaaaagagtagagtgtgtagtcactatcttaaaatacattaatagtaagatggagctctttgccactttggttcggggaggcagaattaagatctgtgggttaaagattaaagaggtttccccaaaacttcagaaaattcttaggtgctatctgtaactcgaggatagagccttgagttatactgaggtctgccagtggctcaatttaagcaaagactagatggcatttcccagaggccttgtaggctagagtacttgcctgtgtaacttcagacatccatttcctctggtatcctggagttcccctcgccattgggtgtcttagaaataagtcattattccagacctccaggaattatccgttgggggtgaacagggtgacggtgaagggcacgggggggacatcccacaagaggccgggacaccacaaatacggagaactggtgatgaccccatggggacacagtaatcaaaacagccacagagaatgatgccaaacacacaaaggacaccagagagaatagggaccaccgagacaaagaaagagaggaaacaaccgtggggaaacaaaccacaggtataaagacgcacccaggacgcgtctaacaacgaagaagggagagaacaggagcgaaaaagaaggaaaaacaagggagaagcgcggaggaaacgcagcaagaaaagaggagaccaagagtgatgagaaacaaaaccaagcagcaaacacagctacagacaccaagaagacgagaaagcaagaagaacagagcaaactcagagaacagaacagaaacgacaagaagatgacactacctcccatcccactctcataacn

SEQ ID NO: 489194 - DNA, 330 bp, Homo sapiens
ctgtcgtgcgttggatgacttgcaggagtttgtgagttacgttcattatttgctcggcagggcatgtatgtgctgggggccaggcatgtccaacatcgcagctccatcttcccttttctttgtcaaccacgtgtacagcaaggaacatacaacatggcccggtcagacagggactccatttcttgtgtgtccacgtccttgattcccttggcgtgagacaacgaacctcaggtatttaccccagacaatgatgcagcttcaccatcattttgcaaggctgaagcaagacgatcacttgagctccggagttcaagaccagcctgggcaata

SEQ ID NO: 489195 - DNA, 1063 bp, Homo sapiens
  misc_feature (691)..(691): n is a, c, g, or t
  misc_feature (753)..(753): n is a, c, g, or t
  misc_feature (762)..(762): n is a, c, g, or t
  misc_feature (780)..(780): n is a, c, g, or t
  misc_feature (797)..(797): n is a, c, g, or t
  misc_feature (799)..(799): n is a, c, g, or t
  misc_feature (811)..(811): n is a, c, g, or t
  misc_feature (816)..(816): n is a, c, g, or t
  misc_feature (831)..(833): n is a, c, g, or t
  misc_feature (835)..(835): n is a, c, g, or t
  misc_feature (850)..(850): n is a, c, g, or t
  misc_feature (853)..(853): n is a, c, g, or t
  misc_feature (855)..(855): n is a, c, g, or t
  misc_feature (859)..(859): n is a, c, g, or t
  misc_feature (861)..(861): n is a, c, g, or t
  misc_feature (863)..(863): n is a, c, g, or t
  misc_feature (872)..(872): n is a, c, g, or t
  misc_feature (874)..(875): n is a, c, g, or t
  misc_feature (877)..(877): n is a, c, g, or t
  misc_feature (881)..(881): n is a, c, g, or t
  misc_feature (883)..(883): n is a, c, g, or t
  misc_feature (885)..(885): n is a, c, g, or t
  misc_feature (888)..(888): n is a, c, g, or t
  misc_feature (890)..(890): n is a, c, g, or t
  misc_feature (893)..(893): n is a, c, g, or t
  misc_feature (900)..(900): n is a, c, g, or t
  misc_feature (903)..(903): n is a, c, g, or t
  misc_feature (907)..(907): n is a, c, g, or t
  misc_feature (911)..(911): n is a, c, g, or t
  misc_feature (974)..(974): n is a, c, g, or t
  misc_feature (998)..(998): n is a, c, g, or t
  misc_feature (1010)..(1010): n is a, c, g, or t
  misc_feature (1024)..(1024): n is a, c, g, or t
  misc_feature (1029)..(1029): n is a, c, g, or t
  misc_feature (1034)..(1034): n is a, c, g, or t
  misc_feature (1036)..(1036): n is a, c, g, or t
  misc_feature (1038)..(1038): n is a, c, g, or t
  misc_feature (1048)..(1048): n is a, c, g, or t
  misc_feature (1052)..(1054): n is a, c, g, or t
ccccggccgaggggggaaacaagcggcacgtacccgttcgctcaacaaaggattgggaccaagacagcggcgtcgcgcaagatcaatgccttacaaactggggtgaacatggaaaaacgccaaagtaccgcgcggaagaggttctcgaactccacaaggggggaaggtagcaggcctgaggggagcaaactggtgaggcaggacgcaaaacccgcaggctgtgacccactggaagcatgggaggagcgatgcgcccatccagcttcgaggcgtccatacacggaaccggacgtagcgccaaaggcacagaggctcgggaccgcagcccaaaggtaagcacagggcactcgggatgccacaggacacagctcagatttccagtctccaccaggaacctcttcagaaagtgtgctttatcgcatgatacagcatactgttgaaaggaagcctcagaggggggaagatcaggtcaaactccatctactctcctcatctctaacagctcaggatctcttagcatcttaattagatgtaattgtttgtctataactgtcaaaaagcttggttctgtgtctgtgtcttaataagacgagaggacgagcgattgagatgtatggagagaaaacagacctaatgctcctagttcctagagtagacatggagcggaggctggcctaagagttgagctctnggaactgcatgctgctggacagtatcactgtctttcctagatggcagtcactgaattccatnttttcaagntaatttcttgtgcctctnatagcccaagaatggangnttgatcagatcngacangattccttcctgttnnnanctgtggggtgtgccnatntntgcntnantcaggtttnannanaggntnanagncngtngggtganacnaccnaaantcttatcatggtctcagtcataatcattagggggaactctagccaaatggtttaacttctgcntgtgaactggggattggtggcagnaaaggtgatatnattctttctgatanctaantgcgngnanctttgataantatnnngctaaatga

SEQ ID NO: 489196 - DNA, 807 bp, Homo sapiens
agcggggtgacaggagcagcggtcgggagcccttagggaggcagacatgagcctgtagccaagtgccccagtgagccctcggttccagagccaactgatgcccctgtgcccactggacccaggccatgtaggcccgagtgcgttctagcagcagcgggcttacttccatcgcgctactagctttcgggccgtggcagacagtcgaccacctatcacttcgaatgcatcctaacctgcgatctacctccatctttgtcgacggcatgttcctgatgacttacatggctattcgaccaaggcgctcgccaaggagggtgagccagggttactggctgttgaaagacgtgcctggtacaagcacgatgtctcgaatgcaccttggatgcgcaatgcacgggcacttaacgcttggtgtcgtattgactcgtgtggcggtctcccgaggcatgagatttccccaaaggaccgagtcggggttcccgcgaggctgacgtccggaggagctctcccgagcttatttggaggccaatccgagtctgatcgagggcatgacccttccctgaatgctcgctgcgtgggcttgtggactgtctgcgctggtgtccgtacaaccttccgcatggttcactgccggggctcttgacgtgatgactgggggcattcccgggctggcgtgagagcccgcctgggcgatggtctgacggtgggccattcggtggttttgtcctggcacggactgtcatgggtggtagcccccctgtccggaccttgctggcctgggacgcgtgggagccggttccctcgggc

SEQ ID NO: 489197 - DNA, 329 bp, Homo sapiens
ttcccgaaacagagtctcactctgttgccaggctggagtgcagtggcagatctcagctcactgcaacctccacctcctgggttcaaacgcttctcctgcctcagactcccaagcagctgggactataggtgcatgccacaacgcccagctaatttttgtatttttagtagagaaggggtttcaccatgttggcctgaatggtcttgatctcttgacctcatgatccgcccacctcggcctcccaaaatgctgggattacaggtgtgagacaccacacccggcctgcacacttttacgtatattaaatagttcaagcacttactttaaat

SEQ ID NO: 489198 - DNA, 861 bp, Homo sapiens
atttctttcccctcctctcgcggtggttctctggtgccattcctcgtgggggccacaccatttcctctgcgctcccgcggggggggtgggtcttccccagatcggcgtgcctcggcccagcttttctccgcccgtagttcttgcgcgctgttgtgccaacgtttttgcagcggtcccacactacacatcgcgctgcggtttgcatacccgaccactgacttcttggttgttttgcactgtcggttggtgccactatcgcctgcgccggtgcgtgagttgtcgtccctggggcaacgcggctcccccgggggagaccggtcttctctttttgcggagcccgtctcgtcttgttggggcccgtcgcccccttctgttttctcttcgcgcagctgttgtcttcaaccctctcgtcgtttccaatcagtggttggcccacgtgatgcctcttcttggccgccctcacactccacccgcgggccctgttggggcacgtttctatccaggtggtctcaccgcccgcgccgcggagggacctccttgcgcgcgtgcgtggcccatcggcgcgcgcgcggcgtgtttgcgcgcgcatgtatgtggattcgcgccccgcacgcgcactcctccccatcgcgctgtgcgaacagtgtgggcctcccactcccgcggtcgcgcccctcgcttcccatgaggcccacacctggctccgcgccgcggaatcgcgcgtgctccggggcgcccagtcgggccacgataaagagacactccgcccctccaagaggagcgtccgcgcgagcccacagaggcgcgcaaatcaaaccaagacgacccctctggccacaacagaataacaaacacaacaaa

SEQ ID NO: 489199 - DNA, 861 bp, Homo sapiens
gggatggtcatgatctcctgacctcatgatccacccgccttggcctttcaaagtgctggtattacaggcatgagccaccgccacccagctgaggtttgtaattttttaaaaaagaactgctgggcccagcactttagggaggctgaggtgggtggatcacttgagcctaggagtttgagaccagcttgggcagcttaaggagaccccatctctacccaccccaaagaaaattagcccagtatggtggcatgggactgtggtcctggctactcggaaggctgaggtgggagtatgcttgagcccgggaggttgaggctgccgtgagccgtgattgcaccactgaactccagcctgggtgacagagcaagactccatctcaaataaataaataaacaacaaaattaaaaaatacaatacaaccattcacgaacattgaactttagataatgatacgcatgctaaagtgtaaatgggtcagggatactgaggtctggcaatcaattagaaatgcatcacaaagtcaggacggaaggatgtgagagatagatggtccggatagataagggataagcagattactacagtggaatgtttacaaatggtgtaattagaagatgggggattatgcattgggtgatgtattattcttcacctgtactgttgtttttgaaatttcatagtagaggtggaaaagagttaacaatgggtgagctgggaggaaaatgaagagcgagtttgggaaagagagaccagataatgcaacaggtggctttggagcatagagagatcagatggtgtaccaaaattgagagttaagatgcaagaacatacgactagataggaaagaataaacacaagcag

SEQ ID NO: 489200 - DNA, 232 bp, Homo sapiens
  misc_feature (2)..(2): n is a, c, g, or t
  misc_feature (8)..(8): n is a, c, g, or t
gnggagtntcctgacattttatttcaagagtcttgattttatttctagtctgtggcccagctctggcgcctgctttggctcatctgcacatcctctagagttctgagttcttccacatagcaggctttcctcacacgcggtgttttggggtgacattacgtaaggtgacttgcgtgctgattgttttgtaacacttgtcagaacaaagcaacgtttagagccaggaaacagt

SEQ ID NO: 489201 - DNA, 285 bp, Homo sapiens
cccggagaacgaccttgtgttaagtgcttagaacaatgcctgtatatatacgtgctcaagtcattttcctctttggcacagtgaggttcatatgaggtctcccagagaagcataggtacagaggataaagcaaagtatcacttcattattatctttgcagagtgctagtggggtaagctgaatctcacagaaagctcctttacctaagctaaatttaagcaataaaacttgtagagcctaaaacgtattctctgtgtattttcttttcttttcttttcttttttt

SEQ ID NO: 489202 - DNA, 128 bp, Homo sapiens
  misc_feature (43)..(43): n is a, c, g, or t
  misc_feature (54)..(54): n is a, c, g, or t
  misc_feature (111)..(111): n is a, c, g, or t
caaacaacaaataacttggaaaataggcttgtcaaatgatgtnaattcatcctntccaggggaagcagaaggtagaccagtgcaggttatcctcaagggcacatacatccngcttcactgctgcttgg

SEQ ID NO: 489203 - DNA, 1477 bp, Homo sapiens
  misc_feature (654)..(654): n is a, c, g, or t
  misc_feature (690)..(690): n is a, c, g, or t
  misc_feature (1046)..(1046): n is a, c, g, or t
tcacaaaccccggtcctggggggggggggggtataatactaagtggaaatgattaccatttaggggggaagaggcgctttgggtgaaagttaggccttttattctctctctgtggtctcctttctcgttcacgaggggaggaaattggaaagttaaatagaaacaccgacaccgggatattccctcgcggtctcgtgcacacctcgagaactccacgttaggaactttataccctgcggtgagaaacaaacacaaaaccctttataatatagcgcgggtgtgcccccactcgcgggagagtgtctcgcgtgtatctcacaccacatctgcgaggggtctgcgtataaccccccccatatgtgtgtgtgtgatatgatgtgggaccccctctatagaaacatatgagggaagtgtgccgcgcgtgtgtatatctccactgatgaggggtataaacctgtggtgtcccccgtgtgtggccctccacacgtgctatatgtgtggggatctccacatgtgtggggaggtatatttagtgatgagttctgcgccgtgtgtggagcgtggggtaacaaggtctctttatagcgcgtgtgtgctcagcgtgtgctctgcgagagaaggtgtgtgggggtctctctgtggctctcgcgaganggtgctgcggcccacccaaaagcgcggaaacatttntcttatagtgtgggccggaggtgtgtggggggatagttttatagagaggaccaccgccggtggtgggggggtatgtgtgtgtaagaggtatcaccgtgtgtgtggcgccattatacatataacatttataagagcgctctcccagaggaggggtctcttctcgcgcgactctttggcgcgtggggttctccaagtgccccgcgggcctctctatccccggggggcgcggagggtgctccaaatctctctccagccgtggggtcgtctaacaaacgtctatagacagaccacgtgtggtgtggtaaaccccctctgttgggtggggtgaggccccatctctcaatatacggggggcntcccccttataaatctataggggggcacaccaagggtgtgttattcttatgttgctataaccctgtgtgggccccgcggggtctagagcgggctaccccggcggggggccccgggtataaacaccgtttgtgctggcttcgcgctggggggacagaggcgggggagacgccccctactataaaaaacgcgggggggaaaggcccaaacacagggcggcaacacgcctcttgcggggcataccaccagggggcgggggggggccacaacaacatatggtggcccgggaaagactccccctatttacaacccctttcttataaaacccccttttcccataatagagaccacatccccgggtaacagaggggctgtccacccgagaagcgggggcaaccaaaggagaacccacgcgtcgggacacacacctcac

SEQ ID NO: 489204 - DNA, 1188 bp, Homo sapiens
ccagttgcttggagaagcccgttcaccgcctccagcgggggctctcctcgacatggacgcctgagacctgtcccctgcgctttctggtgagccgctccgctcccgcgcttcgcgatccgtgcagcactgcggcgcccgttgtacgctgcgaagaaacgctcagcgcgcgcatgcgctcattctgctcgaaggatcactgtgtggggagagggctcccgtgagttccctagttctgacaccctcggtgagagggctggtgcatgccttagtgatctgcggatgaacagtggagactctggataagccgcagtctccgtcagtgacacgtgcgtgggggtgagcccagagggtactgtctcgaaatataaaccactatcccttgttgtggcgtcgagccctcatcgtgaggatgggcctccatgacaacgcttggcgtcgggacttgccgtgcaatgctgtctgagcggatagcaaaagtagcgaccttccgtggcaaggactgacgctgacgttgccgggggagcccctttacgcccgtccatggccgcgcctgagcccccgtcgtggacgtcttggcagtgacgttccaggtggatactgcacacgcagccagaggcatgttgggacgaggaacaggcgcaagtggccccgcggataccgcggtgggtttcctggagctcctctgccgtggaaattcggaagcacgaccccgggggccgacgcattgaatcacatccatgatggccccccttggcacccgacgagccccagggacacttggactggccttgatcggtcggttgaagaccgcaagcagtgtccagtgataagcgttccccccagaggaaacaggacctccccaaatctggtgccacgggatggggcgacatgcgcgggaacccgcgccaaccaggctggggatcccacaacgcatatcagcaccgaaccccagagcccccgccaccgagaaaaaagtcccgccaagaacccctggagaggaaaaagccacgaagatgagcgggcagcccagaatccaagcagcacgggaacgtccgccggggtccccgtgggggctccatcgcccggccccctcacggagatcactctcaaggagaggagccgcagaagacgacaccaagttcacgggccgatggacgctcgcaaagggacaaaagaggggcgacggag

SEQ ID NO: 489205 - DNA, 969 bp, Homo sapiens
tggggggaaaaaaggggggccccggggggtaagggggccctctcgcggggggggcccccccccccccccggcgggcgacacgcgtggggatggttcttggcgccaaccggcaacaacactacgcaccgggggggggcgacgaaacaagtccggcggtgcgtgccacaaaaagagaaacaaaagagggtggtggggagaaaaccaagcagcaaggctgggcgacgaaaccaactacgacagccatgactactcaccaccaaccacacggcggggagggggcgcccccctgcgtatgtatctcagaaaagaggaggagcgcgcgagaggggggccgctgctcaacacctccgcccagaaaaaaaactatctcgggaggccggggaggggggggggggacacccctcgattattagatgatgacccccgccgcacgcggtgaaagatggtggacgaagggagaggacatcaagtgggggcgacacacagcggcggacaagcgtccggccataagaggacgacaaacaagagagggggagactgcggagcagagcacccacaaagaaaagggcccacgctgaaataacatacgacacaagcgagcatagcagcgagcgccaccggagccccgctcgccatccggcaggggcgcgagtaggcgacactatatactaccaccacaatgaatacagagagagtagtgagcctgaccacatcggagaagggcgccacttatcttccgagagcaaccgtcaatatagaggagacaccaggacagaagtgggtggggtccaaacacaagaacaacgtaatactggcagaccgattggaagagcaacaacgaaaaacagcacgaccacgtcggagaaaacaagtaattacacagaaagaaggaggactcctcattgatgtatggaaagcaaccacatacagatgtggggatcgacgagcaccaacccgaccagggaggag

SEQ ID NO: 489206 - DNA, 343 bp, Homo sapiens
gaagctagatttagttgatagcagatgaatatcatggatagaatttagttagaaaaatggttgattctagcttattatattaggtatgtgagctggggcaaatcgtttaatcttgagtctagttttctctaaaatgagacattaggctaaatgatttccgagttccagctagtcctagagttctatatctctacatagttgaattattttatcatgctgttgctggggaatatgactaacccttttgaagctactaattttatgtcgagctttaaagtccataattgttatcttcagaaaatattatttgacctacagtatgtccaaatcaatttaataaaat

SEQ ID NO: 489207 - DNA, 285 bp, Homo sapiens
ccgctgcgcggtcgctctagacggatcccagttccgggtccccactcttaggtatgtatgatgctaatctggtccctaagtaagtttcttccggctcctttggtatcttcctttctggtctttcctcctacctttggtctctgggggtttggggactttttttttttttttttttttttttttttttttttttttttttttttttttttttttttttttttttttttttttttttttttttttttttttttttttttttctatcaaaacagcaaggggggggggg

SEQ ID NO: 489208 - DNA, 342 bp, Homo sapiens
cggtatgacgagcttcggtatacgagcttctgggtgtaatcaataggacgaattcctgggaactgcggatatagcttgccacagtatcttatcagttaattgcattctatggatgtgctgggagtcagcttgcacaagttaagtccttgaggaagcggctgccagtgaaagagccaagatggagtccatctggcgctcttagctaagggagagtcaattcaggtggaaacaaggctgagtgattaaaggaaagggagagtctaaaaacagggttagtaaaaaccaggttggacactacattccccacattgtgtaaaaaggaggaatcaaaatcatttgatt

SEQ ID NO: 489209 - DNA, 150 bp, Homo sapiens
agtgtctggatttttttctcatctttttaaaatgcaatactgtttctatcagtctctcatgcatctatagctgcttcagacttttttcagctgtacctgagcatctgaaactgcaagaaagaaactcattaaatgtgattcttctcacta

SEQ ID NO: 489210 - DNA, 227 bp, Homo sapiens
agttctactaaaaatacaaaaaattagctggcatagtggtgggcacctgtaatcccagctactcaggaggctgaggcaggaagatcacttcagttcaggagtttgagatcagcttgggcaacaagagcgaaactctgtctcaaaaacaaacaaacgaaaaatactacttggaggcagagggacacgggtaaggacactaggctgagagactgaggctgatgtctagg

SEQ ID NO: 489211 - DNA, 1061 bp, Homo sapiens
  misc_feature (243)..(243): n is a, c, g, or t
  misc_feature (379)..(379): n is a, c, g, or t
tggagctaagttttttttataatttttctcacaaagagctccagaaaggcaaatagttatatcacttccccactctgaaatagcacgcaagacagatgatgcaggggaacggggtgtccacttcttttcgtgtgttctcagagcttccgtgcagcaggcctgaagtgacccgcaagcgggggcccagtgcagcggtgttcctcgtgcaaaggtgcagggtgtctcagtccacacacagcgagncacccagcactgtgggcttgaagtgtctcaccgggtgtgttctgtgctcacagaaagaactccacagcgtttagaactccccgaagaagaataattcccagaaaacgaggggttttatagccctctcacagagagngcccagaagacaggcgggtgtcgccagtgcccccaagaatgtgccaagaggcacctctatatatacgcgtgcacgcccctctcacacattgaccaaccgcttgtcacagagggttacaaaatgtgtgtcaacaagggtcctacaaaatgtgtgtcttgggggcatataaggggaacatcatttaacgggggacacgccaacacctattggcgggcacccaacacaattaacatgtgacgaggcgtctcccagacgggaaacaaccccttctcctgtgcgcacaattgttggcccgctgaccacaagaagacgaatgatgccacttttgttacagaccagcaacacacaagcacgcgtcctccacacactctgctgtgcggcggtcctcctcccacacgagtgttgttcttctcccaacgaccgaagaaaaagtagaaagaaaaaacacccgcagctggtggcactgttaggtgacgagatatattcttctataaagaacacgctgttgaaagcacacaaggggtggcaacagtactatcacacatacacaacaaggcggcggctgcgcgcccgcgggactcttcctatctagagaacgtgtttatattcccccctttctgaaagggggggggcgcccccaaaaaggggctcttatgcacgggggctggtgtttcacccccag

SEQ ID NO: 489212 - DNA, 810 bp, Homo sapiens
taaaaataagaaattagccgggtgtggtggcacgcacctgtagtcccagctacttgggagcctgagtgcaggagaatcgcttgaacctgggaagtggaggttgagtgagccgggacctgtgccattgtactccagcctgggtgacagagcgagattccgtctcaaaaaaaaaaaaaaaaagcccaccttgaaagcccgtgtccttctttctccactttgtgttgtggccctttccagtgtgggattatattcgagccatgtgttgtgtttttctccattaggtgccctttttctcctttatttctccagggcgttgtcgcttctcgtgaagtgtggtgtgtttttttttttcttatcttacattgtgtggttgtgagtttttcaaaaaattagccgtttacaagaacaggcccccgaggagcctttttccggccccaattgtgtgctctctccttactctcgtgcgtgctaacattattttttccccctctccgggccgccgcgggggacaccccgatggtgtttaagatcaagtagatgtcagaacatagtcgcgtagggctgtttgccgcagcggtgtgcaggcaggtccctccagtggcgtgtgtacaccaaaagcccgaggagaggctttaagaagctctcccgagccattcaaggcggggttgtttgaacgcccccctttgtggggcgtctccgaggggacaacttggtttgtccccccaggtgctttgcagctgttgttcgtgtttgaggtgcgcccaccggggtccccagcagggtcatgtgtttccccgccccgaggttccc

SEQ ID NO: 489213 - DNA, 131 bp, Homo sapiens
ccccccgggggtttttttaaaaaaaattttttttccccaaaaaagccccaaaaaccccccccccgggctttcctccccaatttttttttggggggttttttccccccaaaatttttttttttcccctttta

SEQ ID NO: 489214 - DNA, 428 bp, Homo sapiens
  misc_feature (1)..(1): n is a, c, g, or t
  misc_feature (37)..(38): n is a, c, g, or t
  misc_feature (75)..(77): n is a, c, g, or t
  misc_feature (370)..(370): n is a, c, g, or t
  misc_feature (389)..(389): n is a, c, g, or t
  misc_feature (398)..(398): n is a, c, g, or t
  misc_feature (421)..(421): n is a, c, g, or t
ntcctccaaaatccaaggaggtcctatgtattagggnnaactcacactgctaatgaagatatacctgagaaaaannnaatttataaagaaaagagatttaattgactcccagttccacatggctggggaggcctcacaatcacagtgaaaggagaatgaggagcaaagtcacatcttacatagtggcaggcaagagagcttctgcaggagaactcccattgataaaaccatcagatctcgtgagacttatttgctaccacagaacagtatgggggaaactgcccccattgattcagttagctccaccttagccccatcctttacacgtggggatggattacaatttcaaagtggaggtttggatgggggncacagcccaaaccatgttnaccctactnggtgtttgtgcctcatttttttngttttta

SEQ ID NO: 489215 - DNA, 216 bp, Homo sapiens
acaaattgaagttttgtggcaactctgtattgagcaagtcagagaaagtattttaggcccttggtgagtaagaaagtataaatcatcatcttgttgatatttgtgtattgactaaatgaacttgttgaaatgattttaagcttagggatagttctaaatatgaatatagatcacattcaaacaggtagtatgcacgaatgttgcatgaaatagaga

SEQ ID NO: 489216 - DNA, 636 bp, Homo sapiens
gatatacgagtagctttctaatcttgttaaattgcttattctaggtctgtaatttactgtaactggctactgggaaattacttatagaactaggagtacgtcatcagtaatttacatataaactacaaattattatactaccggctacatcgaaagtcagtccttgagatgtccattaggatgaccatctgtgtgagaatatgatcatgtagatgattatctccttatatagcctgtaaccagattaaggacatacaggctcttaacagcatcgaagaagcttcctgagttatcagcatataaccatggtgacaaagacctgctaacgtgataaagtgtgatccaaattaaggatgcgatcagaacttctattgtacagtaatagaattctattatgctgcttaccatcacttagacgatagattacaactcctgtatcgtacataaccaggtactaccagtcatatattgagctaaactgatctatcgaacaggtcaaacctctgcatcatgtagcctgacctgagagaggattggtgtacacataaaaaaaaaggtgggaaacactagcccagacatatcaagacacaaataccggaaataaaagtgtgaaacataaaaacagacaccaagaac

SEQ ID NO: 489217 - DNA, 181 bp, Homo sapiens
tgacctgaggatcccaggaatcgtgctggtgctataagctgcttcagatataacatggtttatctataatgttgttcatttaatagcttctaaaaggcctctttgttatacagtgctttttttctagttttatggacttgattactgtaataatgtcttgtttttagccatgtccttgtcc

SEQ ID NO: 489218 - DNA, 207 bp, Homo sapiens
tgagtcagctcccgccaagatgagctgcagcccccagagagagctctgcacgtaaccaagtaaccaggcccagctccaggccccaaatccgcaagcctctccccgctctggatcctgcactctaaaactcgactctgctgctcatgggaagcacagaattgctcctgattgaacccatcacggggtaccgaagctcgaaaatcggta

SEQ ID NO: 489219 - DNA, 796 bp, Homo sapiens
  misc_feature (451)..(451): n is a, c, g, or t
  misc_feature (649)..(649): n is a, c, g, or t
ccaattactctacaccgtgggccaggaactcgctcacggtatgtctggaagaagatgatcctaaacaaggctgtcgtgttgggggccctcaccctgaccagcgagacacagcccttgtggaggatacgacattgtggctgtccacatggcctcttacagtgcaaacttgtgccactactgacgggacgtatggccaatgaacacatgaatctggtggatacgacgagttctatatgtacctggaaaggaccgacactgtctgaaaaacgtctatgtcccacatacttagatactgacccggactgcgccctgacaagatgcgtgtgttcaaacatatctctgaccatactgactaaacgctagaactctaccgacattaccaatgaggatcctgaggtcacagagtctttcaagtcttgaatgtcctggagcacgccacaccctgatctgncttgaggacaacatgcttcctactgttgcaacataacctggctgagcaatgggcactcatgcacagacagtgcatctgagacttgatcactatgaaagagacatcattcttttttgaagatgaggcacctcaccttgctcccttattatgctcagattcatgactgcaaggtggagcactgtggcctggatgagcctntttctgaaacgctgggcgcctgagattcccctcctaatatagagctacagagaccgcggtctgggccccgggggtattgtgggcctggtgggcctttaggacccggttggaatccaaggctgggttcagtgcttcagacccgtgctt

SEQ ID NO: 489220 - DNA, 180 bp, Homo sapiens
aggctccagcttaacagatattatggaggtcagcacggtgctcacgtatcgacgtgaacttgtacatgggaggcatgcaccgcagtggtgaatacacgtacgaccaggatccatctttacgtatatttggtaggtcagcacgtgttctcactgtatctgacggaagcttgtcctagggag

SEQ ID NO: 489221 - DNA, 105 bp, Homo sapiens
gtacccaagaaatcagatatctggacgggattcagacttagaagtagaatgctcgcagagaggaaagtctgcgtctcattcgcaatttggtcccgtggcgcttct

SEQ ID NO: 489222 - DNA, 1308 bp, Homo sapiens
attgagctgctacggaagatccgcgagcaggttctccatcacccccagctgggagagaggcttaagctctgccagccaagcttggaatctgccagagctggctgggagctgtggacggcaatgaccgacgacttgcctggcttggctgctgctacaacacggtggtcagatcggacggcattatcacactcctcaactgaccctgagcttatcctatcttgcgatgcacataaacaacttctgctcaaaacagagcgggcaggctacatacgatcttccgttgcaaccccactggcagctctggacttctgtccagaacgtccgtccagctcactcctcagtcctgcctcactacttcacagacctgagcagcggctacctgggaaaccaacgcccgacacggcaacaagctgcgcagcggagccctgcacacaaccccagcatggcccaaagggcacgaacactgctgcacggcgccaatacgacacgcacgggcacagcaacacgcacacacccgcactggcccagacaggggcacacgcgacgcacgcccaacgccacggcacactgctgaagccgccaagcaacgggcccaaggccttcctggttgccacacaaccatgcacaccttggacacacgagctggactccgaaacgggctcccgcggccggcccaagaaaacagaccctagccgcgactcccccacaaaatctcctgactcgtatcccacagcaacgccacaccacgcgctatccccggaaaagccacgccggccctgcgcaccacgcaacgcggcacacacagggacccttggcggcagcgcccattgcaaccggcaagctacagagcttcccgccgcacgccggaaagggtaccgtaaccccgcaagggccccgccggcaacagccccacacggcggcacggaccccgatagacactcccttcccccttaccgcccaaagggggggcaacaggggcaaagggatcatctccgggacaaccttgcaacacaccgaacacaaagcggcccacacaccatgccgccataagacacgccaacactagcgaacgcgccccatcctctaggcgccgcctatgggaacaggcaacattgggcaacagcaacccccccacgggcagcgagcaaatcggggcgcaagcattaccgcgataaacccagaacgttggcgcaacaaggagggcgaaacccccgcaggccaataggcaaactttcccaccgtatttccccacgctaactgacgcagccgcctgtacgagcagcaagcccaacccccccgagtggtacc

SEQ ID NO: 489223 - DNA, 175 bp, Homo sapiens
actcaaagttatagctcatcatccccaccatcatagccaccatcaccctccttacctcatacttctacctacgcctattttacaccaaccccagtagaggcaaccggcagtagaggcaaccggcagtagaggcaaccggcagtagaggcaaccggcagtagaggcaacggcagta

SEQ ID NO: 489224 - DNA, 465 bp, Homo sapiens
gcataaacgcaaggtcgacgccaaaatcgacggacacatttttttccggatggaacagattaaaaaaacaaaaagctatacagtcaaaggtctggggttgaagagcgtgaagttcacagctcctccacacacgcccaactgagcatgtccatccggtgagggggaaccagagccttcctgtaaaccatgagagcttaccaaggtctggtatacagaatagtgctggcccagtaaactcaaccggtgggggagggggtaggggattttccatctggtacgtaaagaaagaaggtctgggtatccttcaggatagaaaggcattctgtaagaagtagtgtccagagttacaaatcagtacgggtaagagaaaagcaattcttcctctgggggaccaggaggacaagaccgacgaaaagagaacacagaagggggggggaacaaagaacgcctcgtggggtaggaggt

SEQ ID NO: 489225 - DNA, 542 bp, Homo sapiens
  misc_feature (463)..(463): n is a, c, g, or t
gtccccaagtacccacttcctgcctctctcattaacccttccgtagctgctcaccatgaccccatcagaatccagttaaaagactcttccaaatttcccagcgttcctcaataccccatctctctaacccaccaaaagggcctacagcccatcgtaaacaagctctgctcatgcagtcttcttagaccaacacactctccatataacacccctatcctccctgttaaaaagtctgatggctcataccgactcgttcacaacctccaagccatcagtcaagctgtcctccctattcatcccatagtccataacccctatccacttctctctctcgtcgctaccaacaccaccctctacactgcaattgacctgaaggatgccttctttaccatttccctacaccctgattcccaaaacctatttgctttcacctggactgaccctgacaccctccatgtcacancaactcacatggactgtcctccctcagggcttcagggataggcctcatttctttggaaaagctctagcccgaaacctca

SEQ ID NO: 489226 - DNA, 994 bp, Homo sapiens
  misc_feature (40)..(40): n is a, c, g, or t
  misc_feature (73)..(73): n is a, c, g, or t
  misc_feature (310)..(310): n is a, c, g, or t
  misc_feature (579)..(579): n is a, c, g, or t
  misc_feature (604)..(604): n is a, c, g, or t
  misc_feature (608)..(608): n is a, c, g, or t
  misc_feature (634)..(634): n is a, c, g, or t
  misc_feature (644)..(644): n is a, c, g, or t
  misc_feature (652)..(653): n is a, c, g, or t
  misc_feature (667)..(667): n is a, c, g, or t
  misc_feature (676)..(677): n is a, c, g, or t
tttctgcttccagaggccgggatacggagtcgcccgaagncggtgccgcagccccctgcgcccccggtgcccncgacatgtccttccgcaaagtggtccggcagagcaaattccggcgatgtgttcgggcagccggtcaagaacgaccagtgctatgaggacattcgcgtgtcccgtgttacctgggacagcaccttctgcgccgtcaaccccaagttcctggcggtgattgtggaggccagtggagggggtgcctttctggtgctccccctaagctaagacgggccgcattgacaaggcctacccgacnggtgtgtgggcacactggtgacctgtcctggacatcgactggtgtcctcacaacgacgaagtcatagccagcggctcggaggactgcactggtcatggtgtggcagatcccagagaacgggctgacctccccgctgacagagccggtggtggtactggatggggcacaccaagcgagtgggcatcatcgcctggcaccccacggcccgaaacgtgctgctcagtgcaggctgcgacaacgtggtactcatctggaatgtgggcacagcnggaggagctgtaccggctggacagnctgnaccctgacctcatctacaatgtcagntggaaccacnatggcagnntgttttgctcagcntgcatgacnngagcgtgcgcatcatcgaaccccgtgcggtgcgacctggtggcagagcgggagaaggctcatgaggggcccggccatgcgggcatcttcctggagatggcaagtgttcaccacaggctttcagcgatgatcgagcgatagtggggctctggggaccagaaaacctcgaggaaacatgggctgaggaatggatcagaagggcctgttgcctttatagacccaccacagtgtggcacgtctgggaggtgatccagttcgttttggatcaagactctcaatcattctgaagtacacaggccacggttggatgcaagcata

SEQ ID NO: 489227 - DNA, 458 bp, Homo sapiens
agacgctgcattccctttgagaaatcaacatttggtagtttgttttaatgccggaacagtagtacttggatggaattttccatccactgaaggaacaaagtacattcttttctctcgcaacatagccttgaatcttgaaaagggatcaaactttcacaggaagttgtttgcataaaacatatactattgtctcttggtatccatggggaattggttccagaatactctataaattaacagatgctgaagtccctcatataaaatggcatggtatttgcatataacttgtacatatacccccatatattttaaatcatctctagattacttataacaccagctgggcacggtggctcacacctataatcccagcactttgggaggctgaagcgggaggattgcttgagtgcaggcgttcaagaccagcctgggcaacatagtgagaccctctctctatc

SEQ ID NO: 489228 - DNA, 238 bp, Homo sapiens
tatgctcggtacccaggatgcagccataattaaatcatttgaacaaaaaaaaaatgggcactctgattaaactggcattacagcctgcaggacacctttgggccagctgggttttactctagaatttcactggtcgtacccacccgcacttctttccaccctcacttctctccttcacgcaacagtgcaagattctattcctctcccgtggagggattccttcttagaagttcagacc

SEQ ID NO: 489229 - DNA, 322 bp, Homo sapiens
aagactgtgttataatcaagaacgaaagtcggagtcgaagacatcagatacgtcgtatcgacataaacgatgcgacgggatcgggggtatcccataccgcggctctccggaaacaagtttgggtccggggagtatgtgcaagtgaacttaaggaatgcggaggcaccacagagtgtagcgcggtaatttgaccaacaggggaacctacccggccggcacggacaggattgacagattgatagctcttctcgatccgtggtggtggtcatggcgttcttagttggggagcatttgctggttatccgataacgaatgaatgagc

SEQ ID NO: 489230 - DNA, 161 bp, Homo sapiens
ctggcgcacaggcagcccaattagggctccatccctgactcctttcagccatagaaggccccaccccagtctcagttttacttcactcaagcagtaggggtgttgcaggagctggacgacctgctggtggacctggaccaccagcgccagagcgcgtgcaa

SEQ ID NO: 489231 - DNA, 247 bp, Homo sapiens
gggggggcccccccccaattagcctgcctggtgttggccttagttccccggaactgtttgggggccctggggatggccccttgggttggggcccccatggccagcccaggcggggtttgttttttgtcctgttcccccccacccctcccctgggggcctgattccccctccctgggggccccctccccccgttcctcccgaaatggttttttcttttgtgggtttaataaaaacttcccccgttcca

SEQ ID NO: 489232 - DNA, 1011 bp, Homo sapiens
cggagggaaggcagccagcaccctcatgtcacacgatgaggacagacgctccaggaaggaagggggattccccgggaccacatggcccgacatgagcagatcccaagtcgaccagaagccacaaggtctgcccctccagatcccgtgcgtcgagcccaacatcgtaggatgcagtccagcatcatgtagagagatgggaagcgccccgggatgccgtgctggagccccggatgccaccacgcaaggggcgcagcaccactggagccacccgcggggacatcacacgcgatacattgcggtcatggccacacgtcgcggacgacacacggcacgtggacacaacagtgagaaccactagagaagaacgcgactcctggtttgaccgcaaagccaaggatgcaacacacagttcccggcgagacactgattcccatgggccatcttagaacgtaacctgagagacacaaaggcgagcgtagcactaaactcggaacccactgtagtacgaacacgtagcaggctcaagcagggcaaaagaggcacgtgaaatagtagagcactgtacaatttcattcgattacacatactatacgagagcacatacagggggatgcccatggaggcaagtcgcttccgactccacacgaggggagaaaaattccgaaacactatacactggggtaattgtcctatgtaggtcacggcaataatcccgaggtcgtcaagtataaaggaaacaatacataggcagcgcgactattgaccgttagcgactgaggaaacaggactctgagagactggggctccgcggtaaacaacaaagtggtacccaatggcgatgtcctggaaacagccgtggggctcggcgtcgtcccccacccctttggtggatccgcacacaaacccaataacttgggtaaccacattagggcggactccacgtaccagttggtctggacatgtcaagagcctttctcgggaatcagggcgcggtagattaggccttttaca

SEQ ID NO: 489233 - DNA, 150 bp, Homo sapiens
gtggaaagtcgagttaccgagctcgcctctgcattcagaaactgctatacctcttcagccttgcagaggtatgcagcagatgccaggaaagccaagtacatccaatacccaatcttttacctcagatttgccatctccagagcatgccct

SEQ ID NO: 489234 - DNA, 151 bp, Homo sapiens
cggcactatgctatactacgtaccgtctgctagctctgactttgactggcttgtgtgtggcaagtagttaacaaaggaggagaaatgatgaaccgtcgtgtgtggtctcttgggaaatcttttcataccaggtgattctattcaaaaaccc

SEQ ID NO: 489235 - DNA, 712 bp, Homo sapiens
cgtttgagacagagcaagcatcagaactagaatcagatatgatgtgttgggattatcaaattgggaatttaaaacaactaaaataaatgtgttaagggttctaactgaaaaaacgtagagaacattcaagacctgatgtgtaatataaacagagaaatggaaattctaaaaactaaaaggaaatgctggaaatcaaatccgctataactaaaatgaggatggcctttggtggctcatcagtagactgggcacagctggggaaagaagcagtgagcttgaagacaggttgaaagaaacttcccaaagtgaaatgcaaagagaaaaaagaaatgaggaaataaaacgagatcatccaagaatgaggaagaatttcaaaggctgtaacataagtgtaattgaactaccggaagacaaaggagaatggcagcagacagaaatatttgaagtaataatgcctgagaattctacaaaattaatgacagctaccaaactagagatctaggaagcttggggaacaccaagcaggataaatatcccaacaacaaaaaactacacctaggcatgtcatattcaaactgtagaattctacaaccgaacactctgaaaaaagccagagggaaaaatcagcttatctatggaggcataggaataaacacatagtaggctacttaccagaaaccatgaagcagaagagtacatgaaaactttacag

SEQ ID NO: 489236 - DNA, 248 bp, Homo sapiens
ctgtacgaatattgcacgagacgtgattgagggccatacgctcatctcactctatacagagagagtgcgatataccaacagacaacattattgccatgagtatctattgaaagatccgcttatactgaatgtcccgccaggcttctagttctgtgcatatggccaacacgcggctctaaagcatcgatgggcaccctggttcacccacaggatgtataggcacacctgctccttaagctctgatgctg

SEQ ID NO: 489237 - DNA, 114 bp, Homo sapiens
ggcattatcatctacttggaggtgaggcagagatcgctgaactgggaggtagagcttgcagtgagctgagatcgtgtcactgcactctagcctggagagcaagactctgtctcc

SEQ ID NO: 489238 - DNA, 223 bp, Homo sapiens
gagtatctctgagtagctgaacgtgagactggacatgcgagttgtgtatcatgtactgtgcatccagcgagcttctccgaacttgtctttgacacactacacataaacttctaaggtcggcatcagtctttcagagatatactcccctttcctgttgtctgaccatataaaccaaacatctctcgcaagctctcttcactgatggcttcaggccgggaccgag

SEQ ID NO: 489239 - DNA, 285 bp, Homo sapiens
aagccttttgaaaataaaactgactgggggggaaggggcttaatgaaaaacagctggaaaaacagtggatcaacagggtaggcccagatcccaaaaggcctggccaggcagggaatgtgtctttaccaaatggaacaattttgaacttccaagatcaagcctttttgttgctgaggggaaaaaaggagctctgtaaagagggtcccgcttacttccattcgccaggggccctggaaagccttcgggggggaaggaaaaacaattaaaccaaacttggggtctgga

SEQ ID NO: 489240 - DNA, 167 bp, Homo sapiens
  misc_feature (66)..(66): n is a, c, g, or t
  misc_feature (117)..(117): n is a, c, g, or t
ccaccaccctccccaccccctgggggccagagcttgcacaaagtcccccccataatacaggggganccacttggtcaggagacagggaggggttcattccccctggtgggactggtngggatctgtagtttcccacaacctctcccacctctttctcttcaaaaaaa

SEQ ID NO: 489241 - DNA, 99 bp, Homo sapiens
atctggtctggaagcccgagaagggcacagcagagatcctatgtgggtcacggcaccagtgctcactgaagagttctcctttcgtcccccgggttaccg

SEQ ID NO: 489242 - DNA, 360 bp, Homo sapiens
ttccggtacggggtcatgtggtatttttggtggtttgggtggttttcttaaaaaacaagttaaaacctgacgatttctggcaggcggtgtaagcatgttacctgtgggtggcttggtgtgtctgttaaatgattgtcatatgtaaatgctaaaataaatcgacagtgtctcagaactgaataactgcagtgactggatgctctaaaacagggtaggacttaagaatagatggttttaaatccgggaaatggtgatggtgacccatgagtggaggaccttccagtcctaaagctgataaagtgtgtagccagaagagtacttttttttggtaaccacggtctcgaggggtgtcagggtacc

SEQ ID NO: 489243 - DNA, 209 bp, Homo sapiens
gagctggcaccaagttatcacaacagttatcaatataaaaccccctggcataacccagtaccagacgcccctcttcgtctgatccgtcctagatcagcagcagtcctactgtctccgcatctcggtctcttctgctcgatctcgtactgttctcgtgatagagggatccgtctagatgtcgacgctgcagggacatgcaatgcatgggc

SEQ ID NO: 489244 - DNA, 367 bp, Homo sapiens
gactttgctggatcccagtgaaaatcttaattacacaataatctggaataccagttataatatttattaattatttcttcccagctatatggtagcagctaaagtttgttgttaccaaaaaatatgccatcttggaaaaatgtcttatattagttgtgtgtcttatagaataagttggatagaatgttcaagaaagtttatgttggaaacagcaagaagaagaagaagagaagaagaagaagacgaaaaccaacttttcctctcacgtactactgctcgcctttcgtcctatgattaatatatggaatcaaactggctattccaacagtagtagtagcagcatctcctcccttactcttgtcgacgc

SEQ ID NO: 489245 - DNA, 1118 bp, Homo sapiens
gactgcatggaaagcagctcctcctatggagcagggtatatgccgaacaggtcgatggtcgaccaagatcgagtatacgtaggttctcactcctagatcagacaccacgcctgaacccacgtactcctcatgtccttcgaattgttgtctggggaatgggtggtgtgtggtggattgggtaccataactgctttgtatagatcgcaagttatggagtctaaggtagtatagtgtggtgcgtgaagagttactacttttgcaatgtgaccatgagaaaattgtatgctcttagggagtgcactatgataaggagtgcactggtggatgtgcgagacgtaggaaatgatgcataggactagggaagcgtagtgatttcgatgggtgtatgcctagaaggtacgtgaagaatcttccacgtgatgactaggagaacccatgaatctgcatgttctccgtgtgctctcccatatcctcgcgaatcctctgtatgtgtcgcgtgttataaatcgctggaactatgatcgttggtaggactggagatagctagccgtggagcgtgtgagagaaggacgtcacatggcaggctctctgggaggaccttgcacgtaatccgtacttatgatcttgtggtcgatgagacagacgatggccgtgcatttgtggtaataatctgaaaacgtagtcagcatttaaaacgtcatcgtggctaatgcgagtggccgtcacccttgcacctgcatctcacatcttctgtgatcagcatggcagtggtgagtatagtcagcatcaccagactaatctagtcctgcctgcaacagtaaccctttctggaaagctagatattgtccgcaacaagaactcagtccatcagaggaatataaagctatggtattggccaggactggcgacaagagatcgtgtatggacattagctcccgagcgctggcccttctgggaccatatcagggctagatcttcttacctccaggggttcaaagccattctcccgctcagcctcctgataagccctgtgcttcactttggtacatcaggaacgctctatcaagaataacattttcaggcaaggttgagggaccatttgaaccagatgggagaaa

SEQ ID NO: 489246 - DNA, 351 bp, Homo sapiens
tctgagctcttcatccatggcttgcttcatttgtcagaacttgaacggttctgtagaagggagtctacgaagtaaaaggtccttaaccttagaaattaagaattaattatttacccttttttttgagacagggtctcactctgttgcccaggttggaatgcagtggcgtgaacatggctctcactgcaacctcaacctcctgggctcaagcgatgctcctgccttagcaccccaagtctctgggactacaggtgcacgccaccacacctggctaattttggtgttttttttgtagagacagagtttcattatcttgctcaggctggtcttgaactcctgagctcaagcagt

SEQ ID NO: 489247 - DNA, 262 bp, Homo sapiens
cgatgccagcaccgccgccatgaaccccgaatatgactacctgtttatgctgcttttgatttggcgactcaggcgtgggcaatgtcatgcctgctcctgcggtttgctgatgacatgtacagcagagagtcatacctcagcaccatcgtggatggatctctcaatgatccgaatcactcgagctgggttcgtcataactgttctacctgtcgaggattctcgagaccaccgaagtgcggccaagtgcaatcgggttcctcag

SEQ ID NO: 489248 - DNA, 157 bp, Homo sapiens
gctgttctcatgatagtgtcacgagatctgatggctttatttattttaatttttttctgagacggagccggcatcctgtccgtcccagactgggagttgcagtggcacgcgttcttcagccttcatctggcaggcccttcccgtccttccctggagt

SEQ ID NO: 489249 - DNA, 112 bp, Homo sapiens
gtactaacttagattacttttcttaggaaaaggtgttagaacttttaactactgaaaataaatggtcctattcagttgggcagaccatgatttacattcgagagtacctagt

SEQ ID NO: 489250 - DNA, 166 bp, Homo sapiens
agatgtttggatcggggcagtcagaggggggtgcagcccgggggcggcccaactccaggggaaggtcaccttcccagttcatccatccccacccttccagctccccatccatcctggtgaaagccatttccaccactcaataaaacctggcattcatccttcaaaa

SEQ ID NO: 489251 - DNA, 353 bp, Homo sapiens
agggatttttgaaacaccttttgggggcttgggaacaccagtggggccaagggttttttttcccggtgtcaaacagggatttggctttcccgggttttttctgggaaacccctttttggggttttttgggtttggggggaaaaagggccctttcccttaatgtaacccgttagctttccaaaggccctcggggcctggctttttttagggtttggacaatgggggcccccctttgcctgctttttttgcccaaaagtccccgggtgtttagggggtgttttaacccgcccccccccctttttttaaaaagggcccttttgccccttttaaaaaaaaatggggggggggcccca

SEQ ID NO: 489252 - DNA, 516 bp, Homo sapiens
ggtaatctatataaagaagagttctaggccaggcgtggtggctcacgcctataatcccagagacttgggaggccaaggtggacagatcgctatgaggtcaggagtatgagaccagcctgaccaacaaggtgaaagccgtctctactagaaatataaaaattagccgggcatggtggtgcccacccataatcccagctactcgggaggctgtggcaggtgaattgctggaatctgggaggcggaggttgcagtgagctgagatcgcaccactgcactccagcctgggcgacataacaagactgcgactgcgtctcaagagaaaaaaaaaagaaaagttataaaatggagagctcatggaaagtgccaataacttgtccttggcattaagtctccctggtgtcagagggtgtgataggagtctagttcttgtaggtagctctgcaggacgcggtatagaggtataagtaaggactgacagtcataatatgatgtccaaagccaagaaggttacagata

SEQ ID NO: 489253 - DNA, 113 bp, Homo sapiens
atgtgatgtttgaaaccagcgcgcagttgaatcagatcaaagtaattgcatcctattttatatgatgggattttgtttaagatttcatttggtaaaaagaattttgtggttta

SEQ ID NO: 489254 - DNA, 336 bp, Homo sapiens
ttatcaacgctacagacagatttccggggtccagtgtgctgctttgctctctgggatggggagctgctgacccattacagaggcttgaggtgtgcgggggccatctagtatgtccattacctggagtccctcaatcacgcctttggacagcctccttttgaaagtgtccgaagcctttttacttagcctcaagcaaactctagctcccacaattcagtgttgggtcctctgtgcaatatcatagtggttatcccagttataagcttgaccaaaggggaagagagacacttgggggatctctaggggatgagtgctagaaactatttatatattttt

SEQ ID NO: 489255 - DNA, 206 bp, Homo sapiens
cagatatcctggaaacagcccagtacaatgccataggattcattctaatctctccgttttcatatttgcgatacccttaagcagggagaaacctcacagtcccttaccttcagctgttgtagcttttgctgcattaacacaaactcttattggctttatcccatgttgtcttacgtggccccatcataataaaggttctctgtgcc

SEQ ID NO: 489256 - DNA, 150 bp, Homo sapiens
tccccaaataaaagctaacaactcaccatgtccgttgtaaccaacactccagattgacacaaaatagactacgaaagtggctttaacactactctgatcacacaactacgctaacgaccacaaaactgggacttacgatacccccaccta

SEQ ID NO: 489257 - DNA, 722 bp, Homo sapiens
cagcgggcgggaaggaggcgttcgtctcaatttgtcggcttgcggggagacttcagtgagtcgctgtctctgaacttccagcctcagagcactgccgcccttgtccccgatggccatgggccgggtctcatgacttgtgccctctcgcttcctgacgctcctggcgcatctggtggtcgtcatcaccttattctggtcccgggacagcaacatagaggcctgcctgcctctcacgttcacccccgaggagtatgacaagcaggacattcatccaattcctctctgcaggctggtggccgcgctctctgtcacccctgggcctcttttgctagaggagctggccggtttcctctcagggagtctccatgttcaacaaggaccaagggctcatttccgttgggggtcactgtaggcattcgtgggcctgtcccttcttcatattcgagcgttgagagtgcactacgtataggtacatattagtcttctgcagtgcccttccagctgtcactgaactggctttattcgtcaccgtctatgggctgaaaaagaaacccttctgattaccttcatgacgggaacctaaggacgaagcctacaggggcaagggccgcttcggattcctgaagaaggaaggataggttcgggttcccctcggaaatgcttctgtggaggtctttgtgaactatagttaagactggatatccgattggttatgctttatt

SEQ ID NO: 489258 - DNA, 630 bp, Homo sapiens
  misc_feature (5)..(5): n is a, c, g, or t
  misc_feature (90)..(90): n is a, c, g, or t
  misc_feature (95)..(95): n is a, c, g, or t
  misc_feature (111)..(111): n is a, c, g, or t
  misc_feature (113)..(113): n is a, c, g, or t
  misc_feature (116)..(116): n is a, c, g, or t
  misc_feature (119)..(119): n is a, c, g, or t
  misc_feature (154)..(154): n is a, c, g, or t
  misc_feature (174)..(174): n is a, c, g, or t
  misc_feature (230)..(230): n is a, c, g, or t
  misc_feature (244)..(244): n is a, c, g, or t
  misc_feature (283)..(283): n is a, c, g, or t
  misc_feature (302)..(302): n is a, c, g, or t
  misc_feature (376)..(376): n is a, c, g, or t
  misc_feature (393)..(393): n is a, c, g, or t
  misc_feature (418)..(418): n is a, c, g, or t
  misc_feature (422)..(422): n is a, c, g, or t
  misc_feature (432)..(432): n is a, c, g, or t
  misc_feature (437)..(437): n is a, c, g, or t
  misc_feature (454)..(454): n is a, c, g, or t
  misc_feature (466)..(466): n is a, c, g, or t
  misc_feature (536)..(536): n is a, c, g, or t
  misc_feature (563)..(563): n is a, c, g, or t
  misc_feature (592)..(592): n is a, c, g, or t
ctggncctccttcaatgggctttttccgccaacgaggacagttgactcggcccacatccatgtcctatcccccagcccgcttctcccctncttancccagggaggagacantngangtnatgggggcagccgggagggaggggccaaggcagtnatgctttcgggtaagaagtngggctgaggctgggggcacagggaggagctgcccaggtgcagttaccattgctcanttacagaccctcanagcttggccagggctgaaggtaccacacgggtgttggtnaggcaggctaagcgcgganggctgcccccaacgagctgggggagcggccgcggctcagggctagccctctccgctctcactcatgacctgccnaggtcgtccgtagcctnctcattccggcctgggaggcccctntttngcagcccatnttaangccaattaaatgctttncctcctgcagcntgctctcttttaattccctctaatgccccttcgctttcttcataaaccagttgggatctccacggtagtncccatcattctaggtcactgccaagcngcccaaagccatcaaggtcctctgctctnctgcgatgtcttttccttcaaagaggtcaacagtttgg

SEQ ID NO: 489259 - DNA, 132 bp, Homo sapiens
gcgagtatgtgttcggcgatgcatggtcaaaagaaggaaggatacttcaggctagagtagctttttgttggaattttcacaacttcagaaaaacttcatctcacggtttagaagcatcggttttattgactt

SEQ ID NO: 489260 - DNA, 788 bp, Homo sapiens
aagtgcacacatcttttagtttcccagtgcatataaaagttgattatactaagctgtagttatattaagtgtgaaaatggcagtatgtctagaaaaacaatgtacatgtcaatttaaaaatgcgttattgctaaagaatggtaacaatcatctgagccttcagcaagttaaaatctttttgctgatggaaagtcttgcctacaagttcatggctttggacggatcagtagctactgaaggttggggtggctgtggcaattccttaaaataagacgatgataaagtttgccacgtcagttgactccttcatgaaagacttctctgtagcatgtgatggtgtttaatagcattttatccacggtagaacttttttcaaaatcggaattagtcctttcaaaccctcttgctgctttattacatttacacaattacatttgtgtaactttctttttttttttttttggaaacaaagtctggcccgtggtccctaaggcgggagtgtgtgggcatgattccagctcatgggaacctcggcccccggggttgaagcgatctccggcctaagcctcccaagtagcggggatcacagggcgcttggcacaaaccgggatagtggggaatccaagtaagagacagggttaccccggtgtgggccaggtaagtcgggaactccgtgaacctcagggtgaatcaatccgactaagcctcccaagtgcggaatcaccggcttgagccaacaagcccgacacaattggtggaattcaaaaacacaggggagatcgcacaca

SEQ ID NO: 489261 - DNA, 248 bp, Homo sapiens
cttctcttccccaaggaggttcttgctgaacaggtgttgtcaggtgcacattcgaggagcccgcgcgtaggtgtcgctgccagagtgcccctgggtgcgtgcactcctgtgctggccctctgtttccaagagctgtgggtgggaggggaccctgaaccttgggcactagagggatggcatagaggagcttctagaaggactccatactgtgtagtactctaggttctagcacctgtggtccgagcgga

SEQ ID NO: 489262 - DNA, 139 bp, Homo sapiens
attggtggcccgattttcttttttggggccccctggcttttcccccaaggggttgcctttgggggtcccctttttttttttttagctggggaacccgtttttgtgggcctttttttaaagacaaaagagaagaccttta

SEQ ID NO: 489263 - DNA, 354 bp, Homo sapiens
tgggaggcatgggtgggggaaaaggacccggggttcaaagcccggcgggggccaggcaaagtgtgtgttttctcccttccccccccttagccccaaaatgccgcaaaagggtcaaacaaaggcctggttgcccctcttgcatgttttttggggtttttcctggagtatgaaaacccccaaggactccctttccctcccttttgatgccaaagcagaccaagctgtccccctccagtttcatggtgaagtttccagcttttcaagcttaaaaaagtttttggaaaagtccctttcagctcatgcagctttcccaagtgtgaaaggagtgggttgggggggttttccctgccccca

SEQ ID NO: 489264 - DNA, 321 bp, Homo sapiens
acatgcagagaaccctcaaagttcattaagaaaacagtcaacccagcgaaaaattaggcaaaaagattcgatgcctgtagtcccagctacttgggaggctgaggcaggaggattacttgagcctgggaggcagaggttgcagtgagccaagatccactgcactcaagcctgggtgacagagcgagcctccttcaaaaaaaaaaaaaaaaaaaaaaaatcccccccggggggggattcccccctttttttaattttttaggggggggggggggggggaaaaccctgtccccggggggggggggctcaaaaggggtttttttt

SEQ ID NO: 489265 - DNA, 2630 bp, Homo sapiens
  misc_feature (1)..(1): n is a, c, g, or t
nagcaggctggtaccggccccaagtcttatgatcacccccgctcctggagcacgaagatgcagacgatacttttcccggaggcaagagggcgtcttcacgcaggcaccgagaagctcccactagtgtatgccttaatggtgccgctcttgtccgcgtctacgcttgggaccttggcttctgacttggagagtgtacagctctgcccgacggcaacccagcttgggaagagaagccccagcgtgggctggggctcaaggcgcaggaaggccgagcccggcgcggacgcaggcggctccgggcgggctcagcacccccaggcaccgtctcctagtgaccgcggcgctcgcgggcctggcggccgttgtccgggcgactgcgcacgcgggcacccccgcggcccctcccctgggcgcgcgcgcgacctgggtgccatggcggcagcggcggtgacaggccagcggctgagaccgcggcggccgaggaggcctcgaggccgcagtgggcgccgccagaccactgccaggctcaggcggcggccgggctgggcgacggcgaggacgcaccggtgcgtccgctgtgcaagccccgcggcatctgctcgcgcgcctacttcctggtgctgatggtgttcgtgcacctgtacctgggtaacgtgctggcgctgctgctcttcgtgcactacagcaacggcgacgaaagcagcgatcccgggccccaacaccgtgcccagggccccgggcccgagcccaccttaggtcccctcacccggctggagggcatcaaggtggggcacgagcgtaaggtccagctggtcaccgacagggatcacttcatccgaaccctcagcctcaagccgctgctcttcgaaatccccggcttcctgactgatgaagagtgtcggctcatcatccatctggcgcagatgaaggggttacagcgcagccagatcctgcctactgaagagtatgaagaggcaatgagcactatgcaggtcagccagctggacctcttccggctgctggaccagaaccgtgatgggcaccttcagctccgtgaggttctggcccagactcgcctgggaaatggatggtggatgactccagagagcattcaggagatgtacgccgcgatcaaggctgaccctgatggtgacggagtgctgagtctgcaggagttctccaacatggaccttcgggacttccacaagtacatgaggagccacaaggcagagtccagtgagctggtgcggaacagccaccatacctggctctaccagggtgagggtgcccaccacatcatgcgtgccatccgccagagggtgctgcgcctcactcgcctgtcgcctgagatcgtggagctcagcgagccgctgcaggttgttcgatatggtgaggggggccactaccatgcccacgtggacagtgggcctgtgtacccagagaccatctgctcccataccaagctggtagccaacgagtctgtacccttcgagacctcctgccgctacatgacagtgctgttttatttgaacaacgtcactggtgggggcgagactgttttccctgtagcagataacagaacctacgatgaaatgagtctgattcaggatgacgtggacctccgtgacacacggaggcactgtgacaagggaaacctgcgtgtcaagccccaacagggcacagcagtcttctggtacaactacctgcctgatgggcaaggttgggtgggtgacgtagacgactactcgctgcacgggggctgcctggtcacgcgcggcaccaagtggattgccaacaactggattaatgtggaccccagccgagcgcggcaagcgctgttccaacaggagatggcccgccttgcccgagaagggggcaccgactcacagcccgagtgggctctggaccgggcctaccgcgatgcgcgcgtggaactctgagggaagagttagccccggttcccagccgcgggtcgccagttgcccaagatcaggggtccggctgtccttctgtcctgctgcagactaaaggtctggccaatgtcttgccccaccccgccagccgcgatacggcgcagttcctatattcatgttatttattgtgtactgactccatctgccccgtcaaataaaaaaccacaaggttcgagccgccgggcccgacaaaaaaaaaaaaaaaaaaaaaaaaaaaaaaaaaaaaaaaaaaaaaaaaaaaaaaaaaaaaaaaaaaaaaagaaagcaacaaaaaaaaaaaaaaaaaaaaagaagagggggggcggcgccggcgccaaacccccccggggggcggcgcctccccccccccccttaaaaggggggccgccccggggggtatccacactatatactagagcaagcagcacgccgcggcggttctaacacaacacgcggcggggcagaggaacaccaaacacttctagtcggggcgtgccatgcgagcagaaggcccccccccccccggggcgggagataaaacgacgcgaggcgccaacacccaacaagaattgcggccccggggggaaaaacaccctactccgcggggcggtgactgataacaacagcccactcactgtctcgaacaaaaactctccggcaacatagacacaaatattg

SEQ ID NO: 489266 - DNA, 442 bp, Homo sapiens
gccgtgtacggtttcgtgccgattccgcgcagctcgtgcaggcaaggccgaggataaggagtggatgcccgtcaccaagttgtcccgcttggtcaaggacatgaagatcaagtccctgtaggagatctatctcttctccctggccattaaggaatcagagatcattgattccttcctgcgggcctctctcaaggatgaggttttgaagatcatgccagtgcttctctagacccgtgcctgccagcgcactagttttaagggatctgttgctattgtcgactaccctgctcaccgttgctctgtttcctaaccgctctcaaggagtctcccaccgctatctctgcctccctcatcttcgccccttctccatactcctcacctcctacacgttactcgcctctcacccttgctccgccccccctactccccttccatcgctccc

SEQ ID NO: 489267 - DNA, 2369 bp, Homo sapiens
  misc_feature (1)..(1): n is a, c, g, or t
  misc_feature (872)..(872): n is a, c, g, or t
  misc_feature (941)..(941): n is a, c, g, or t
nagcaggctggtaccggccccaagtcttatgatcacccccgctcctggagcacgaagatgcagacgatacttttcccggaggcaagagggcgtcttcacgcaggcaccgagaagctcccactagtgtatgccttaatggtgccgctcttgtccgcgtctacgcttgggaccttggcttctgacttggagagtgtacagctctgcccgacggcaacccagcttgggaagagaagccccagcgtgggctggggctcaaggcgcaggaaggccgagcccggcgcggacgcaggcggctccgggcgggctcagcacccccaggcaccgtctcctagtgaccgcggcgctcgcgggcctggcggccgttgtccgggcgactgcgcacgcgggcacccccgcggcccctcccctgggcgcgcgcgcgacctgggtgccatggcggcagcggcggtgacaggccagcggctgagaccgcggcggccgaggaggcctcgaggccgcagtgggcgccgccagaccactgccaggctcaggcggcggccgggctgggcgacggcgaggacgcaccggtgcgtccgctgtgcaagccccgcggcatctgctcgcgcgcctacttcctggtgctgatggtgttcgtgcacctgtacctgggtaacgtgctggcgctgctgctcttcgtgcactacagcaacggcgacgaaagcagcgatcccgggccccaacaccgtgcccagggccccgggcccgagcccaccttaggtcccctcacccggctggagggcatcaaggtgaggacctccctgccccgccgcgctccaggccctgcacggctgagcccgagaggaccggcgctcagcccgggtccccacgctgcncccggcgctgctctgcgtcggtcccgcgcgctcccactcactcgcctgctgtcgctctccgggccgggncgacttggcccttcttggcagcgcggtctggcgccccagctgcccgctgtgcgccttttccttaggtggggcacgagcgtaaggtccagctggtcaccgacagggatcacttcatccgaaccctcagcctcaagccgctgctcttcgaaatccccggcttcctgactgatgaagagtgtcggctcatcatccatctggcgcagatgaaggggttacagcgcagccagatcctgcctactgaagagtatgaagaggcaatgagcactatgcaggtcagccagctggacctcttccggctgctggaccagaaccgtgatgggcaccttcagctccgtgaggttctggcccagactcgcctgggaaatggatggtggatgactccagagagcattcaggagatgtacgccgcgatcaaggctgaccctgatggtgacggagtgctgagtctgcaggagttctccaacatggaccttcgggacttccacaagtacatgaggagccacaaggcagagtccagtgagctggtgcggaacagccaccatacctggctctaccagggtgagggtgcccaccacatcatgcgtgccatccgccagagggtgctgcgcctcactcgcctgtcgcctgagatcgtggagctcagcgagccgctgcaggttgttcgatatggtgaggggggccactaccatgcccacgtggacagtgggcctgtgtacccagagaccatctgctcccataccaagctggtagccaacgagtctgtacccttcgagacctcctgccgctacatgacagtgctgttttatttgaacaacgtcactggtgggggcgagactgttttccctgtagcagataacagaacctacgatgaaatgagtctgattcaggatgacgtggacctccgtgacacacggaggcactgtgacaagggaaacctgcgtgtcaagccccaacagggcacagcagtcttctggtacaactacctgcctgatgggcaaggttgggtgggtgacgtagacgactactcgctgcacgggggctgcctggtcacgcgcggcaccaagtggattgccaacaactggattaatgtggaccccagccgagcgcggcaagcgctgttccaacaggagatggcccgccttgcccgagaagggggcaccgactcacagcccgagtgggctctggaccgggcctaccgcgatgcgcgcgtggaactctgagggaagagttagccccggttcccagccgcgggtcgccagttgcccaagatcaggggtccggctgtccttctgtcctgctgcagactaaaggtctggccaatgtcttgccccaccccgccagccgcgatacggcgcagttcctatattcatgttatttattgtgtactgactccatctgccccgtcaaataaaaaaccacaaggttcga

SEQ ID NO: 489268 - DNA, 394 bp, Homo sapiens
cagtcctcgcagccggggtaacagaaggggaccctggtcttaaaaaaaaaaaagaaaattacctggataattaaggggaagctttaagttccatacctatctgaaatgatgccaaaggtgtaataataattaagcttggacagggagtaggtgacaataatactttgggtagggaatacggctaggggcctaaaaaatagtgggcatctggaatttctatacataagtgggaggcgggaagggggcggatccatttggtggtatcaccgggtactttatagatctccacctaaacaagtaacactagaaactgggcccttctcgggtacccaccagtaggtccactctcggaattatgcccggaaaaattaggatcctagggcggaattggcat

SEQ ID NO: 489269 - DNA, 2066 bp, Homo sapiens
  misc_feature (1)..(1): n is a, c, g, or t
nagcaggctggtaccggccccaagtcttatgatcacccccgctcctggagcacgaagatgcagacgatacttttcccggaggcaagagggcgtcttcacgcaggcaccgagaagctcccactagtgtatgccttaatggtgccgctcttgtccgcgtctacgcttgggaccttggcttctgacttggagagtgtacagctctgcccgacggcaacccagcttgggaagagaagccccagcgtgggctggggctcaaggcgcaggaaggccgagcccggcgcggacgcaggcggctccgggcgggctcagcacccccaggcaccgtctcctagtgaccgcggcgctcgcgggcctggcggccgttgtccgggcgactgcgcacgcgggcacccccgcggcccctcccctgggcgcgcgcgcgacctgggtgccatggcggcagcggcggtgacaggccagcggctgagaccgcggcggccgaggaggcctcgaggccgcagtgggcgccgccagaccactgccaggctcaggcggcggccgggctgggcgacggcgaggacgcaccggtgcgtccgctgtgcaagccccgcggcatctgctcgcgcgcctacttcctggtgctgatggtgttcgtgcacctgtacctgggtaacgtgctggcgctgctgctcttcgtgcactacagcaacggcgacgaaagcagcgatcccgggccccaacaccgtgcccagggccccgggcccgagcccaccttaggtcccctcacccggctggagggcatcaagaaatccccggcttcctgactgatgaagagtgtcggctcatcatccatctggcgcagatgaaggggttacagcgcagccagatcctgcctactgaagagtatgaagaggcaatgagcactatgcaggtcagccagctggacctcttccggctgctggaccagaaccgtgatgggcaccttcagctccgtgaggttctggcccagactcgcctgggaaatggatggtggatgactccagagagcattcaggagatgtacgccgcgatcaaggctgaccctgatggtgacggagtgctgagtctgcaggagttctccaacatggaccttcgggacttccacaagtacatgaggagccacaaggcagagtccagtgagctggtgcggaacagccaccatacctggctctaccagggtgagggtgcccaccacatcatgcgtgccatccgccagagggtgctgcgcctcactcgcctgtcgcctgagatcgtggagctcagcgagccgctgcaggttgttcgatatggtgaggggggccactaccatgcccacgtggacagtgggcctgtgtacccagagaccatctgctcccataccaagctggtagccaacgagtctgtacccttcgagacctcctgccgctacatgacagtgctgttttatttgaacaacgtcactggtgggggcgagactgttttccctgtagcagataacagaacctacgatgaaatgagtctgattcaggatgacgtggacctccgtgacacacggaggcactgtgacaagggaaacctgcgtgtcaagccccaacagggcacagcagtcttctggtacaactacctgcctgatgggcaaggttgggtgggtgacgtagacgactactcgctgcacgggggctgcctggtcacgcgcggcaccaagtggattgccaacaactggattaatgtggaccccagccgagcgcggcaagcgctgttccaacaggagatggcccgccttgcccgagaagggggcaccgactcacagcccgagtgggctctggaccgggcctaccgcgatgcgcgcgtggaactctgagggaagagttagccccggttcccagccgcgggtcgccagttgcccaagatcaggggtccggctgtccttctgtcctgctgcagactaaaggtctggccaatgtcttgccccaccccgccagccgcgatacggcgcagttcctatattcatgttatttattgtgtactgactccatctgccccgtcaaataaaaaaccacaaggttcga

SEQ ID NO: 489270 - DNA, 97 bp, Homo sapiens
atttgacaagacccataaatctgaaactgatacgagagaagtgaattctggctttttttacaagagtgcagaaagagaaaaactcataaaagctgaa

SEQ ID NO: 489271 - DNA, 2755 bp, Homo sapiens
  misc_feature (1)..(1): n is a, c, g, or t
nagcaggctggtaccggccccaagtcttatgatcacccccgctcctggagcacgaagatgcagacgatacttttcccggaggcaagagggcgtcttcacgcaggcaccgagaagctcccactagtgtatgccttaatggtgccgctcttgtccgcgtctacgcttgggaccttggcttctgacttggagagtgtacagctctgcccgacggcaacccagcttgggaagagaagccccagcgtgggctggggctcaaggcgcaggaaggccgagcccggcgcggacgcaggcggctccgggcgggctcagcacccccaggcaccgtctcctagtgaccgcggcgctcgcgggcctggcggccgttgtccgggcgactgcgcacgcgggcacccccgcggcccctcccctgggcgcgcgcgcgacctgggtgccatggcggcagcggcggtgacaggccagcggctgagaccgcggcggccgaggaggcctcgaggccgcagtgggcgccgccagaccactgccaggctcaggcggcggccgggctgggcgacggcgaggacgcaccggtgcgtccgctgtgcaagccccgcggcatctgctcgcgcgcctacttcctggtgctgatggtgttcgtgcacctgtacctgggtaacgtgctggcgctgctgctcttcgtgcactacagcaacggcgacgaaagcagcgatcccgggccccaacaccgtgcccagggccccgggcccgagcccaccttaggtcccctcacccggctggagggcatcaaggtggggcacgagcgtaaggtccagctggtcaccgacagggatcacttcatccgaaccctcagcctcaagccgctgctcttcgaaatccccggcttcctgactgatgaagagtgtcggctcatcatccatctggcgcagatgaaggggttacagcgcagccagatcctgcctactgaagagtatgaagaggcaatgagcactatgcaggtcagccagctggacctcttccggctgctggaccagaaccgtgatgggcaccttcagctccgtgaggttctggcccagactcgcctgggaaatggatggtggatgactccagagagcattcaggagatgtacgccgcgatcaaggctgaccctgatggtgacggagtgctgagtctgcaggagttctccaacatggaccttcgggacttccacaagtacatgaggagccacaaggcagagtccagtgagctggtgcggaacagccaccatacctggctctaccagggtgagggtgcccaccacatcatgcgtgccatccgccagagggtgctgcgcctcactcgcctgtcgcctgagatcgtggagctcagcgagccgctgcaggttgttcgatatggtgaggggggccactaccatgcccacgtggacagtgggcctgtgtacccagagaccatctgctcccataccaagctggtagccaacgagtctgtacccttcgagacctcctgccggcaagtatctcccaactgggggctgccttcaatcctcagaccaggaacacccatgacacaggcacagccctgcactgtgggcgtgccccttggcatggggccaggagatcactgggttatcccggttagtgatgccctcacctctccccacaagttgtttacccaatggctggaaaggggtggctactggtcatcgtgaccactggagtcaacacagactgatgtacccacagacaccaaaacttgccccctgagttctgaagcaaggggcaaggctgggcccctagcttgtcctgcccattcctccaggtgttgatcttgattccacttagagaagctgaagctgtgcctccctcccctgtcaagccagttctttcctcttcaggtggctgttctggcccagccccttcccatccccaaggagcccttcagcgcgccctgttgcttctgctagcctacctttccctgccaggcccttgctcagggccatggcatttaactaagtgcacctgtgatcttggccaaaaaaccattgcaactcacagtaagagactgggtttcggggaaggaggggctagggacattttggcactggcctgccctattgtctcccatcctagtctgtcctggtccctggcaacaggaacctgggcagcttatcctgcccacaggtaagcccctgggagcatccacaactggggacctgctcagtgccccccctgccttacagctacatgacagtgctgttttatttgaacaacgtcactggtgggggcgagactgttttccctgtagcagataacagaacctacgatgaaataggttgggtgggtgacgtagacgactactcgctgcacgggggctgcctggtcacgcgcggcaccaagtggattgccaacaactggattaatgtggaccccagccgagcgcggcaagcgctgttccaacaggagatggcccgccttgcccgagaagggggcaccgactcacagcccgagtgggctctggaccgggcctaccgcgatgcgcgcgtggaactctgagggaagagttagccccggttcccagccgcgggtcgccagttgcccaagatcaggggtccggctgtccttctgtcctgctgcagactaaaggtctggccaatgtcttgccccaccccgccagccgcgatacggcgcagttcctatattcatgttatttattgtgtactgactccatctgccccgtcaaataaaaaaccacaaggttcga

SEQ ID NO: 489272 - DNA, 2010 bp, Homo sapiens
  misc_feature (1)..(1): n is a, c, g, or t
nagcaggctggtaccggccccaagtcttatgatcacccccgctcctggagcacgaagatgcagacgatacttttcccggaggcaagagggcgtcttcacgcaggcaccgagaagctcccactagtgtatgccttaatggtgccgctcttgtccgcgtctacgcttgggaccttggcttctgacttggagagtgtacagctctgcccgacggcaacccagcttgggaagagaagccccagcgtgggctggggctcaaggcgcaggaaggccgagcccggcgcggacgcaggcggctccgggcgggctcagcacccccaggcaccgtctcctagtgaccgcggcgctcgcgggcctggcggccgttgtccgggcgactgcgcacgcgggcacccccgcggcccctcccctgggcgcgcgcgcgacctgggtgccatggcggcagcggcggtgacaggccagcggctgagaccgcggcggccgaggaggcctcgaggccgcagtgggcgccgccagaccactgccaggctcaggcggcggccgggctgggcgacggcgaggacgcaccggtgcgtccgctgtgcaagccccgcggcatctgctcgcgcgcctacttcctggtgctgatggtgttcgtgcacctgtacctgggtaacgtgctggcgctgctgctcttcgtgcactacagcaacggcgacgaaagcagcgatcccgggccccaacaccgtgcccagggccccgggcccgagcccaccttaggtcccctcacccggctggagggcatcaaggtggggcacgagcgtaaggtccagctggtcaccgacagggatcacttcatccgaaccctcagcctcaagccgctgctcttcgaaatccccggcttcctgactgatgaagagtgtcggctcatcatccatctggcgcagatgaaggggttacagcgcagccagatcctgcctactgaagagtatgaagaggcaatgagcactatgcaggtcagccagctggacctcttccggctgctggaccagaaccgtgatgggcaccttcagctccgtgaggttctggcccagactcgcctgggaaatggatggtggatgactccagagagcattcaggagatgtacgccgcgatcaaggctgaccctgatggtgacggagtgctgagtctgcaggagttctccaacatggaccttcgggacttccacaagtacatgaggagccacaaggcagagtccagtgagctggtgcggaacagccaccatacctggctctaccagggtgagggtgcccaccacatcatgcgtgccatccgccagagggtgctgcgcctcactcgcctgtcgcctgagatcgtggagctcagcgagccgctgcaggttgttcgatatggtgaggggggccactaccatgcccacgtggacagtgggcctgtgtacccagagaccatctgctcccataccaagctggtagccaacgagtctgtacccttcgagacctcctgccgctacatgacagtgctgttttatttgaacaacgtcactggtgggggcgagactgttttccctgtagcagataacagaacctacgatgaaatgagtctgattcaggatgacgtggacctccgtgacacacggaggcactgtgacaagggaaacctgcgtgtcaagccccaacagggcacagcagtcttctggtacaactacctgcctgatgggcaaggttgggtgggtgacgtagacgactactcacagcccgagtgggctctggaccgggcctaccgcgatgcgcgcgtggaactctgagggaagagttagccccggttcccagccgcgggtcgccagttgcccaagatcaggggtccggctgtccttctgtcctgctgcagactaaaggtctggccaatgtcttgccccaccccgccagccgcgatacggcgcagttcctatattcatgttatttattgtgtactgactccatctgccccgtcaaataaaaaaccacaaggttcga

SEQ ID NO: 489273 - DNA, 105 bp, Homo sapiens
tgaactacagacaaacactattttatttaaataaggagacagcaacaagtgatggtgcacatggcccagaccagtacaccttgcactggcacagcctgatggcat

SEQ ID NO: 489274 - DNA, 2873 bp, Homo sapiens
  misc_feature (1)..(1): n is a, c, g, or t
nagcaggctggtaccggccccaagtcttatgatcacccccgctcctggagcacgaagatgcagacgatacttttcccggaggcaagagggcgtcttcacgcaggcaccgagaagctcccactagtgtatgccttaatggtgccgctcttgtccgcgtctacgcttgggaccttggcttctgacttggagagtgtacagctctgcccgacggcaacccagcttgggaagagaagccccagcgtgggctggggctcaaggcgcaggaaggccgagcccggcgcggacgcaggcggctccgggcgggctcagcacccccaggcaccgtctcctagtgaccgcggcgctcgcgggcctggcggccgttgtccgggcgactgcgcacgcgggcacccccgcggcccctcccctgggcgcgcgcgcgacctgggtgccatggcggcagcggcggtgacaggccagcggctgagaccgcggcggccgaggaggcctcgaggccgcagtgggcgccgccagaccactgccaggctcaggcggcggccgggctgggcgacggcgaggacgcaccggtgcgtccgctgtgcaagccccgcggcatctgctcgcgcgcctacttcctggtgctgatggtgttcgtgcacctgtacctgggtaacgtgctggcgctgctgctcttcgtgcactacagcaacggcgacgaaagcagcgatcccgggccccaacaccgtgcccagggccccgggcccgagcccaccttaggtcccctcacccggctggagggcatcaaggtggggcacgagcgtaaggtccagctggtcaccgacagggatcacttcatccgaaccctcagcctcaagccgctgctcttcgaaatccccggcttcctgactgatgaagagtgtcggctcatcatccatctggcgcagatgaaggggttacagcgcagccagatcctgcctactgaagagtatgaagaggcaatgagcactatgcaggtcagccagctggacctcttccggctgctggaccagaaccgtgatgggcaccttcagctccgtgaggttctggcccagactcgcctgggaaatggatggtggatgactccagagagcattcaggagatgtacgccgcgatcaaggctgaccctgatggtgacggagtgctgagtctgcaggagttctccaacatggaccttcgggacttccacaagtacatgaggagccacaaggcagagtccagtgagctggtgcggaacagccaccatacctggctctaccagggtgagggtgcccaccacatcatgcgtgccatccgccagagggtgctgcgcctcactcgcctgtcgcctgagatcgtggagctcagcgagccgctgcaggttgttcgatatggtgaggggggccactaccatgcccacgtggacagtgggcctgtgtacccagagaccatctgctcccataccaagctggtagccaacgagtctgtacccttcgagacctcctgccggcaagtatctcccaactgggggctgccttcaatcctcagaccaggaacacccatgacacaggcacagccctgcactgtgggcgtgccccttggcatggggccaggagatcactgggttatcccggttagtgatgccctcacctctccccacaagttgtttacccaatggctggaaaggggtggctactggtcatcgtgaccactggagtcaacacagactgatgtacccacagacaccaaaacttgccccctgagttctgaagcaaggggcaaggctgggcccctagcttgtcctgcccattcctccaggtgttgatcttgattccacttagagaagctgaagctgtgcctccctcccctgtcaagccagttctttcctcttcaggtggctgttctggcccagccccttcccatccccaaggagcccttcagcgcgccctgttgcttctgctagcctacctttccctgccaggcccttgctcagggccatggcatttaactaagtgcacctgtgatcttggccaaaaaaccattgcaactcacagtaagagactgggtttcggggaaggaggggctagggacattttggcactggcctgccctattgtctcccatcctagtctgtcctggtccctggcaacaggaacctgggcagcttatcctgcccacaggtaagcccctgggagcatccacaactggggacctgctcagtgccccccctgccttacagctacatgacagtgctgttttatttgaacaacgtcactggtgggggcgagactgttttccctgtagcagataacagaacctacgatgaaatggtaagggtcaactgggctattactcttgtgggctggcaggggcttagacaagtgaagtacacacctctccaggtctaaggatgtgggcccaaattattccttgggcatatctggttggtttccctttggtcacccttggctggcctggccatagagtggggacaggttgaacaccccaccaccctgctgcccacagagtctgattcaggatgacgtggacctccgtgacacacggaggcactgtgacaagggaaacctgcgtgtcaagccccaacagggcacagcagtcttctggtacaactacctgcctgatgggcaaggtgagggcctatggccaggcctggggggggtgccctgaggtacaagcttccctttacccagccccgtctgcacaatggaggctgttcctggctgcttttccaaatagtttctgcttcctggtgctcccaaaggcatccttaagtgactttagcagactgccccaggacctgtactgtttattgggttatatccatccctattattcctgatgcccagcttctactccg

SEQ ID NO: 489275 - DNA, 1371 bp, Homo sapiens
cgatgttacctcctcaggccggagagtggccaccactctatatgccaggctggaagccaggtcctggccatatggctcaagcttcctttggagaaccttctctggccactctaatagggggtgggcctctttcttcttagggccaaattagggcttaaactgagaaaaggaactgctctgggtcttcctgtaaggcctgatgtgacagaaaccaggttcatctgacccaaaagtccaggtgggggacaagtgtacaaggcccctcagtgcctgaggtcagggctgctgctgcctttggggtaggtagggaagtgcagcctgccactgttgcctcccaatatgggcttggtgggcattgatggtgggtgccctgtgcaggagtgctgagtctgcaggagttctccaacatggaccttcgggacttccacaagtacatgaggagccacaaggcagagtccagtgagctggtgcggaacagccaccatacctggctctaccagggtgagggtgcccaccacatcatgcgtgccatccgccagagggtgctgcgcctcactcgcctgtcgcctgagatcgtggagctcagcgagccgctgcaggttgttcgatatggtgaggggggccactaccatgcccacgtggacagtgggcctgtgtacccagagaccatctgctcccataccaagctggtagccaacgagtctgtacccttcgagacctcctgccgctacatgacagtgctgttttatttgaacaacgtcactggtgggggcgagactgttttccctgtagcagataacagaacctacgatgaaatgagtctgattcaggatgacgtggacctccgtgacacacggaggcactgtgacaagggaaacctgcgtgtcaagccccaacagggcacagcagtcttctggtacaactacctgcctgatgggcaaggttgggtgggtgacgtagacgactactcgctgcacgggggctgcctggtcacgcgcggcaccaagtggattgccaacaactggattaatgtggaccccagccgagcgcggcaagcgctgttccaacaggagatggcccgccttgcccgagaagggggcaccgactcacagcccgagtgggctctggaccgggcctaccgcgatgcgcgcgtggaactctgagggaagagttagccccggttcccagccgcgggtcgccagttgcccaagatcaggggtccggctgtccttctgtcctgctgcagactaaaggtctggccaatgtcttgccccaccccgccagccgcgatacggcgcagttcctatattcatgttatttattgtgtactgactccatctgccccgtcaaataaaaaaccacaaggttcga

SEQ ID NO: 489276 - DNA, 380 bp, Homo sapiens
cccccccatgcccagctaaccacagaaactttcatctcttcattttttctttgggccccattaatacctaagacaggtagaaagggtcccaaaaaaaccccattggtaatggccgattgccggctgcagtcatcgcccccagatcagggtggtacaggatcccttaaggtaataaaaggtgagggggcatgaagaataatgagcccagggaaaaaagaagcaggccaaagtagcagataaaatgccggcaaagcccaaatgaatgttttcaaaaagctcttgtatttttttgcccagtgtaaaaatccttgctatttcaggatggcgggtggcctgctcagtaacaaacatgttccaaataaagattttgcatgaaagta

SEQ ID NO: 489277 - DNA, 1674 bp, Homo sapiens
  misc_feature (1)..(1): n is a, c, g, or t
nagcaggctggtaccggccccaagtcttatgatcacccccgctcctggagcacgaagatgcagacgatacttttcccggaggcaagagggcgtcttcacgcaggcaccgagaagctcccactagtgtatgccttaatggtgccgctcttgtccgcgtctacgcttgggaccttggcttctgacttggagagtgtacagctctgcccgacggcaacccagcttgggaagagaagccccagcgtgggctggggctcaaggcgcaggaaggccgagcccggcgcggacgcaggcggctccgggcgggctcagcacccccaggcaccgtctcctagtgaccgcggcgctcgcgggcctggcggccgttgtccgggcgactgcgcacgcgggcacccccgcggcccctcccctgggcgcgcgcgcgacctgggtgccatggcggcagcggcggtgacaggccagcggctgagaccgcggcggccgaggaggcctcgaggccgcagtgggcgccgccagaccactgccaggctcaggcggcggccgggctgggcgacggcgaggacgcaccggtgcgtccgctgtgcaagccccgcggcatctgctcgcgcgcctacttcctggtgctgatggtgttcgtgcacctgtacctgggtaacgtgctggcgctgctgctcttcgtgcactacagcaacggcgacgaaagcagcgatcccgggccccaacaccgtgcccagggccccgggcccgagcccaccttaggtcccctcacccggctggagggcatcaaggtggggcacgagcgtaaggtccagctggtcaccgacagggatcacttcatccgaaccctcagcctcaagccgctgctcttcgaaatccccggcttcctgactgatgaagagtgtcggctcatcatccatctggcgcagatgaaggggttacagcgcagccagatcctgcctactgaagagtatgaagaggcaatgagcactatgcaggtcagccagctggacctcttccggctgctggaccagaaccgtgatgggcaccttcagctccgtgaggttctggcccagactcgcctgggaaatggatggtggatgactccagagagcattcaggagatgtacgccgcgatcaaggctgaccctgatggtgacggagtgctgagtctgcaggagttctccaacatggaccttcgggacttccacaagtacatgaggagccacaaggcagagtccagtgagctggtgcggaacagccaccatacctggctctaccagggtgagggtgcccaccacatcatgcgtgccatccgccagaggtgagcacctgaagctgttctcactggagcagggggagaagactgggcagggcctccacagaagtccttgtctggggccaagaggacagaatggattaacccatttgggattaagttccatttgttagaccaggattgggacccactgaaagacaggcaattaacaaaggcaaattagccctccttgcaggcacacaatgggcaactggggttagatagagattgagcacttctttctgattagataaatgacctcttatctttgaccccttatctgaccccgtcacagcaggaaaagggtttttaaataaacaactttcttccagggaggaggacctcacgactccccgacccct

SEQ ID NO: 489278 - DNA, 1762 bp, Homo sapiens
  misc_feature (1)..(1): n is a, c, g, or t
  misc_feature (872)..(872): n is a, c, g, or t
  misc_feature (941)..(941): n is a, c, g, or t
  misc_feature (1123)..(1123): n is a, c, g, or t
  misc_feature (1128)..(1128): n is a, c, g, or t
  misc_feature (1178)..(1178): n is a, c, g, or t
  misc_feature (1184)..(1184): n is a, c, g, or t
  misc_feature (1196)..(1196): n is a, c, g, or t
nagcaggctggtaccggccccaagtcttatgatcacccccgctcctggagcacgaagatgcagacgatacttttcccggaggcaagagggcgtcttcacgcaggcaccgagaagctcccactagtgtatgccttaatggtgccgctcttgtccgcgtctacgcttgggaccttggcttctgacttggagagtgtacagctctgcccgacggcaacccagcttgggaagagaagccccagcgtgggctggggctcaaggcgcaggaaggccgagcccggcgcggacgcaggcggctccgggcgggctcagcacccccaggcaccgtctcctagtgaccgcggcgctcgcgggcctggcggccgttgtccgggcgactgcgcacgcgggcacccccgcggcccctcccctgggcgcgcgcgcgacctgggtgccatggcggcagcggcggtgacaggccagcggctgagaccgcggcggccgaggaggcctcgaggccgcagtgggcgccgccagaccactgccaggctcaggcggcggccgggctgggcgacggcgaggacgcaccggtgcgtccgctgtgcaagccccgcggcatctgctcgcgcgcctacttcctggtgctgatggtgttcgtgcacctgtacctgggtaacgtgctggcgctgctgctcttcgtgcactacagcaacggcgacgaaagcagcgatcccgggccccaacaccgtgcccagggccccgggcccgagcccaccttaggtcccctcacccggctggagggcatcaaggtgaggacctccctgccccgccgcgctccaggccctgcacggctgagcccgagaggaccggcgctcagcccgggtccccacgctgcncccggcgctgctctgcgtcggtcccgcgcgctcccactcactcgcctgctgtcgctctccgggccgggncgacttggcccttcttggcagcgcggtctggcgccccagctgcccgctgtgcgccttttccttaggtggggcacgagcgtaaggtccagctggtcaccgacagggatcacttcatccgaaccctcagcctcaagccgctgctcttcggtaagtccgcagatactcctgggaagggccagggntgcgnttggtggccacttgaggctcgttggaccacgtgactctatttgaaatggntgcttnagagcagccttncagaggattaccaaagtgaaggaccttccccgtcctcgaaatagggtaacactccctcttatcccaactccctgcagtccattcttccatcacagggctggcagggtgagcctgaggctggtgtctaaacgtttcattgcacctgtcttccgtgccacctggcctccgtgacaaacatatttgcaaacccagggccattcctgcctgccgggggatggaatgggttaggagctggggccaaagtagaacatctgagcacaagtcattacctccaaggcagagggtcctggttggggattatgccaagccctgtcagaatgatgtcatatgcatgctgtttgtagggaaatagattatgctgtcagtcctgttgtgggagaggcacccaaagctggttgttgttattattactattactattgagtaacgttgaagtctgtgccaggcactattttaggtgccaggaacacagcattgaactaaatataaacaatgaaacaaaaccctgaagctgacattcaaatgaagaggaaacagacaataaacaaacaaataaatataaaaaa

SEQ ID NO: 489279 - DNA, 1174 bp, Homo sapiens
  misc_feature (1)..(1): n is a, c, g, or t
nagcaggctggtaccggccccaagtcttatgatcacccccgctcctggagcacgaagatgcagacgatacttttcccggaggcaagagggcgtcttcacgcaggcaccgagaagctcccactagtgtatgccttaatggtgccgctcttgtccgcgtctacgcttgggaccttggcttctgacttggagagtgtacagctctgcccgacggcaacccagcttgggaagagaagccccagcgtgggctggggctcaaggcgcaggaaggccgagcccggcgcggacgcaggcggctccgggcgggctcagcacccccaggcaccgtctcctagtgaccgcggcgctcgcgggcctggcggccgttgtccgggcgactgcgcacgcgggcacccccgcggcccctcccctgggcgcgcgcgcgacctgggtgccatggcggcagcggcggtgacaggccagcggctgagaccgcggcggccgaggaggcctcgaggccgcagtgggcgccgccagaccactgccaggctcaggcggcggccgggctgggcgacggcgaggacgcaccggtgcgtccgctgtgcaagccccgcggcatctgctcgcgcgcctacttcctggtgctgatggtgttcgtgcacctgtacctgggtaacgtgctggcgctgctgctcttcgtgcactacagcaacggcgacgaaagcagcgatcccgggccccaacaccgtgcccagggccccgggcccgagcccaccttaggtcccctcacccggctggagggcatcaaggtggggcacgagcgtaaggtccagctggtcaccgacagggatcacttcatccgaaccctcagcctcaagccgctgctcttcgcatcaccagtgtcaccagcagccacagcccctgctccatcactgccttctgtgccttggccttaatgaactgaggttgagggttttatagggctgttcctgcacccagggagccaacagaggagatcctgcaggggtttgcacagctccgaggtgcccggacccacctggtgaggccccaacatgctgactgggctgtttgtttttgattagcacacagcaggggactgtagaggctggaggcacctccactgggcttgcagattactggcacctaataaactgaagaaacctggaaaaaagaacaa

SEQ ID NO: 489280 - DNA, 409 bp, Homo sapiens
ctggttgctcaggtctcccattacagtcttcttggtcttatgaggcagtttgtgctcctgtaaactccttagcacactaccagcacacccaactgagctttttttggtaaagacagggtcttgctatgttgcccagtctggtcttggcctcaagcaagcctcccacctcagcctcgcaaagcaccgggatcaaggcattagccaccacacctgtcctaaactgtatcatttaatggcttcagacagcatatttaagagttatgcctagattttcttcttttttgatcactacttttaaaacgggcttcaagccgagcgcagtggctcacacctgtaattccaacactttgggaggccaaggtgggtggatcacctgagatcaggagagttcgagaccaggctaaccaac

SEQ ID NO: 489281 - DNA, 415 bp, Homo sapiens
acaaggaagtgccattgctgtctagctagctactgttgtggtcgaagcagatataattaacaaaaacaactggttacaatagccagctatcgatataacatgatcgaaggggatgtccaagttcgctggtaaactagcccttcatcatgactatcagttctattacacatacaagtaattggacgaaggcgtattctgtggggtggggagatttgttaagagccacgtcgcttgtggtacgggtttggaagcataaggaccttatctttcatataggccaaaaacaaaaggtgaaattgatacacccattttatagtgttcccacacagacatattgacaatgttacatagcttgtttatggaagccagagttgacgtcgacgcggccgcgaatttagtagtagtaggcggccgc

SEQ ID NO: 489282 - DNA, 127 bp, Homo sapiens
gtactgtgccggatcaggcggatgtcataggcttcctgtgtacactgagactcagaagtgaaagggggctattcctagttttattgctatagccattatgattattaatgatgagtattgattggta

SEQ ID NO: 489283 - DNA, 110 bp, Homo sapiens
aaaactagtggtcggatatagagcaccatcggcgcagctctacaaggtttcaagccggcttcctgggccgcatgaagacgatcgcctactacccgctgcccgacgaggtg

SEQ ID NO: 489284 - DNA, 1355 bp, Homo sapiens
caagtctcgtggcgatgaccagtcattcaatcgaaacatccgaaaactgcagttgtgatcatatgcggacggaaaggtacaaggcgaccccaggattatatcacaggatgaccggacctaggccccagtggcaaggaacctttactgaggagctgtacatcaaagaaaaagggttctttaggtcacccaccacgggccccatggctgccgtgcagcatggatcctgagctagccaagcgcctcttcttatgagaaggggccactgtaggtacatacctagaacatggcccaaggcgaagcagagttatgggatatagactaataaactacctgggagcgtacgggtcccaagatgccgggagcgtgaagcatgataccctaccagagcagtaccactgtccatccgactacagactgctgctggacgaccggctagatacctgacaggaagtgaggcccatcagtcatagggttaactatcgcttcagccttgcaccaagcggaagggctggacagtggctagcaggctagggaggcaccactacaagggaaggaggtaagaccctgtactcccaggcaccctagagtgctggaaggtaggagagccactagagggcacaaacgctaccagcgacgctggacagagttacctaggcagcacgataaccgcaatattgcccatgccctagacacagaaggtgggatctgcaacatacaaccaaagcttccagtcaatgcgaaaaggccaaacaggtcagggagcaaaggcgaagaaggacccgacgtacatcggacaggaatcctgggagcgcatagaaaccggagtgtgcctaccctgggggcagactgcccatgggcagggcaacagccacgagaaccgccgtagagcgtgcacgcaatcgaaccccccgtaggagggacaacaggagggggaacaagcgttgacccaagcaggggacatgggccccggcgtgaccaacagaaaggacgcccaggagacccggacaagaaactaccagacgaaacaaaaagacagacacagcgaaataagatcccccaaggggcgggcacagcccggccagagaacaacaagcacaacaggaggggcccgagacaagccctggaagacagtgagcacaaggaagaaaccgcagacgccccaggagagtacgagcacacaaagaaccaggcgacccaagagaaagcgcggaaaaagacggaaagacaaaacagacacagacacatagacacacaaaacaaaaaaagaaaaagcacgtaagagagcagaaagaaagaaggacacaagaaaaaacaagagaaggaaggtaacgaagaaacaggaaacaacaaacaaa

SEQ ID NO: 489285 - DNA, 92 bp, Homo sapiens
actttgactccggttttggaaccttacctctcctccttagccccaaatgctgtttcgggtcctattcaaaaaaagttatttctcctggtcta

SEQ ID NO: 489286 - DNA, 191 bp, Homo sapiens
ggcacgagggccagtggtgcttaatgctgtgaccatggcatcttagcccgcacacacaggttcagatcctggctttcagatgtgcttctctgttagttagggatagatatgtaacctctccagccctttgttttggatgaaaggtgcgttattcacctcaggggattcatccattagtcctgtgagagcct

SEQ ID NO: 489287 - DNA, 393 bp, Homo sapiens
gactctagagtgatcccgtagccacctgcaggtgcttcatcctcaccctcccacacttcctctccgagccctaccagtacaccttggccagcactggtgagtggcctccaacccctgcctcaaggggtaaggaatgggtgaacatctcacaaagttagtggggatactcctagggcagtggataccactccaggaagagggcatatgaagctcacactataccgaagtatgtagagctatggagcaactgaactctggtttgttcaggaaagtgtgcagtgcatggctcacctcctgctgtgattccctgtgcttcatgccaggaatgacccaagctccacctccctggggacactgtgagcagtttctgcaggtgggtacttgggtaccgag

SEQ ID NO: 489288 - DNA, 484 bp, Homo sapiens
ttcgagaccagcttggccaacatggtgaaaccctgtctttaccaaaaatacaaaaactagccgggcataggtggtgcacacctagcaatcccagtctactcagagaggctagaagcagagagaatcactatgaacccggagaggcagaggctgcagcgagccgagatcacaccatggcactccagcctggtgatagagctagactccatctcaaacaaacaaacaaaaaaactcaagggagtggctggggcatgaaatcttgcagtgcttaagaagttaatgcatcacgacaacgaagatcattgcagaaatgtgggagctttcagctgctgggtcttaaaaaaccaacacccccaaagtacggtgctttgtcctgctgaactgaagaagcctcaagatctctctaacttccccctcctgcttcctctgtgtctcccgatgcacaggatgcagttgtactctgaagtttcctgaagtctggaca

SEQ ID NO: 489289 - DNA, 419 bp, Homo sapiens
caggtgttcatttatatctcgggcatggtgtctagtgatatatcgacttaagcggtaacaaagaagcatatgtaaagaaatacaacgatgcaaataaatgggcgtgcccaaggctaaaagatgctttcttctttcacagactttaaagttttataagtcatatcgtcagttgttgtgtaacaaatgcccttttcaagaatagagaaagggtttccttcagccctctaaaccatctcaaattccaaattaagtaaagatactgcatttggttggtaaattaactcaatgtcttatacttgttaaaaatacttgattcaaattctagaatcaatattctcaaggtaggatttataaatggtggagagaaacttaggtgctaccagtgagaaaccccactctagccagcaaaagtcttcatt

SEQ ID NO: 489290 - DNA, 652 bp, Homo sapiens
tttcctgggtgggaccttaggaatccagtgccctgagactatgtctttattatttatgcctagtatctcagtcttcccacactggcaaagagtatagcaactggtggttagtgataattgacaaggttctgtccaggctgcttttttgaggtctttgttttagtaagctatgaatggagctgtctcttgcatgatgaataaacactctaccattgtctccactgcccctagctgtagtactggctgataggattatggtggaaattgtgttattggtaatctttgagccttgagagaggtagaaattgttcagaaactgtgtcctctggtttctaaatctattccccacgtgcctccaattttcttgtgctgtgcattttaaattaatcatgttttttcttaattaaatactctttcacagcaatgatttccaactctggctgacgtaagaattgctggggaagtttgaaggggggaaaaagaaagctctggggtggagtccaggctttgatagttttttttgtttgtttgtttgtttgttttttttttttgaggaaacctattgatatatgtatttgattgactctaaaaagttgttgtattggaacatgaagaaaacatttaaataaaacaagattctgaaacaagcaaa

SEQ ID NO: 489291 - DNA, 427 bp, Homo sapiens
  misc_feature (169)..(169): n is a, c, g, or t
ataccacgggctgtacgaatttgggacgagggcagccaagcaaaccacacactcttgatcaccagatgtgtgtatcacagagagcggtgagtatgtgagtctcctctattgtgctgatggactaccacactgtgaaggccagagggtgggtgtgcctgaataaccttcncttcactggacagtgtcccccagttgtgggaccaagtctattttgagcttgaggtgcacaatcttaaggtgggggcctcaagagagggcacagacccttaatctcttgttctttccctggctgtaacaagctgtctgtcccgccttgctcaacaacttggttcatatgattgagcgcgggaactgtgaacaagcccctgtccgtggtgggccccttaaggaatagcaccgttgggcccctggccttttagcacgggtg

SEQ ID NO: 489292 - DNA, 432 bp, Homo sapiens
cattccgacatacactcatgtgtcaatgccagtatatataattgcaggaatactataggtatttatatcataagtaaattattttctttactctcaatagattattagccacagacttaatctgcttgaaataaacagtaattccaaaacaaaatgtagcagtacataaggattttatgataattagccaattacacagcatcctgaaatgtttcttttagggtaaaatttaatagattgagtagaatatgaaacgaaaatgttctcaagatgttatttatgactatacaaaattgctaatgatttataattcacttagaattcacttagaattgtactttacctgagctattgcatatgaagaatttagtaaaatatgtaatatatagtaactgctcagtaaactttgatacttttattgtctccttccat

SEQ ID NO: 489293 - DNA, 691 bp, Homo sapiens
  misc_feature (233)..(233): n is a, c, g, or t
  misc_feature (367)..(367): n is a, c, g, or t
cctgaacagagacatgcttcaacagacactgaacgaggtgtgctgatatgtgtgttcctggtgcacttcactccctggattgtatcccacatacactagctctctcgacacaaggactaatctcgttgcgcaagcaggtgcttgatggactcttgacatggccagctcgtaagatccgacgagattgggtaggctcctaggtcgttgatggttgtctagatcgatagccttgntttagttgaacttgcgctgaaggttggagccgtcggcagaccgcttacgaggacgcgcgagagcacacgagccaaaacgggcttttccgaaagcgttccaattgggactttcggaggtccctccaacttgttgncgggtggcactctctcttagcgttgagaagggggcacggaactaggaaacggataataaggttaaaacacttaaggaacctttaaattttttccgaacctttggaggcatagttggttccctctaactgcatttttgtaggggttgggataaaacatacctgtacatcttttgtgcggttggccaaaaagttccaggggaccttgttctctccctcccaagaggggcaagtggggtatttcaacccagcgagaggtagcttgagttgccgaattaacgaatgggcggaaaactgtggggcgccacattgaaggaactggttggg

SEQ ID NO: 489294 - DNA, 116 bp, Homo sapiens
gtcacatgacatctgccctcacccacccgaggctctgcccaccgcctggaccactatgtaggttttcagcctttcaaaggcttttattattaacatcatcattacttcagcaggag

SEQ ID NO: 489295 - DNA, 1491 bp, Homo sapiens
  misc_feature (161)..(161): n is a, c, g, or t
  misc_feature (231)..(231): n is a, c, g, or t
  misc_feature (276)..(276): n is a, c, g, or t
  misc_feature (294)..(294): n is a, c, g, or t
  misc_feature (441)..(441): n is a, c, g, or t
  misc_feature (643)..(643): n is a, c, g, or t
  misc_feature (804)..(804): n is a, c, g, or t
  misc_feature (930)..(930): n is a, c, g, or t
ggcgcggccgctccgcagcttagcaggccgggtactcatcgcagatccacgccggggcacaaacacagcacagcagtaacctgacaagtggggagacttctgcaccgagtcgggcaggacctgcattcaggggtagacaatacacaggacaccagagttgnctcgtgtcccgacgcggaggtaggccgcgtggaggccgaggacctcgtgacgtacgatcagatcggatantctcagggcagggggaccctcagtttgcgcgggacgtgtcttaancgtcctcttccatcccgntctttaagaagatcacgtatgacctatgcgagaggcgtccgatgcgatgcgcgcgagctccggccaggctgagactcattcgtcttctgcagggggagcattatggtatgtgggtgggatagaggatcgtatgtgtggtgcagatcnctggcagcgactcatgtgtacacactattcccaggagagggtttgtaactcgctcacattcatcaaatgtatggcgtggcatctacgtggcggaagaagtcgcgcggaaaccaagaacatggcgcgagagaacatttgcgcatggacacgactagggggggactccatacaaggaggggtcccggggcgaagtctcctgggnccgacgaagtgtttgcacgcaactcgaatacacctgggggggggtgcacacgaaaggcacggggacccgagaagcgtccagaaccgatggaatcagcacattggcggatgacgctggggactcgggagagagaatagcatgtagatggctggggacacgcntcggagggggggggggaacacaagaggattttggcgtgagagccggggaggccaattgttgggcacaggggcgggggaaacaacggggaggacctgtgggcttgtacggcacaaaggggaaggcangaggggaaagtgcgacagtttggggcgtgaaccaccgagggcgggaaatttcggcgctgagtgggggatcccacggttcgggttttttttgggcctttggtcatggggtccaaatgaagtatacaaacactttacgacagcacaaagatcaccgagcggggagagatcacatccctgggggggaggaaagacccccaaaagcggcccatggggcggttaccatgaggcagccacgacaagctaatggggggaagacacttggacatgaaccctttccgtgagcccggggaaccctgtggcaacagaaaagattgcaagaaaacgggacaacgaacggggcatggccccgagactggcgtccctacacccacggattggcgcctccgggacaccgctgggccccacgtagtccccatagtaccgggggcgcccggaggtggaggcgggggcaactcacaccccggcgcgcaaaatgactccgagagggccgaacaaaataggccggcggctaacacaggggacacgcggggagaaaacaccaccaactggggggggacagag

SEQ ID NO: 489296 - DNA, 164 bp, Homo sapiens
ttttaaaaaaaaataaaataaaataaaagccgggggggggggggggggtcctggggcccccgctatgggggggggttgtttgggccccggggtttgggggggcggggggccaggtttaggccaaggccccccggggggggggacagggccgggtcctttttcca

SEQ ID NO: 489297 - DNA, 693 bp, Homo sapiens
gaccaggactagggcatgcgatgatccaaccttgctcactgacggctttcagtgcccggcatggagctctgcgcatccatagactgcctatgagtgtgcatgtgcacaggtctcaacagcagaggaacacgagtatgtgcacattgctacattgcattctagatcaggatggatgtcctattgtcggcatattccttggcaaccctagcagtgggtatcaagattggctcttgacccatcgtaagggctgtaggatggatcctctacggtcttgtcaggttctgttgcactgattgtcggactgtgcatgcctgcttgagtatcaataccatcatgcgtagtagggctgagcttggtgatgagactatgctaagctattgcataggctgaaatgatgcggacacctaagaggactatgcatgaaggcctgattactgtgtcctggtgtacatagactagcgaggcatattgggccatgtggagactctctgtgacgttggagactcttactaaggcgttgagagtctgactcccgatgctggatcccatgccgttcgggcctcagaggtcaatgaatctcagctgtctcttatggaggatctacgtgagccaactctctcatcgccttgcttgatccatgccctgtgaattattaccatgatcacaggaacagttttgtaaccggctgactcc

SEQ ID NO: 489298 - DNA, 1089 bp, Homo sapiens
  misc_feature (370)..(370): n is a, c, g, or t
acaatgactccgaagctccaggctctgatcttttttcgcgtgttctcggcttccactgcagccatgtcagctccctcttgctggtgagtctcagacccattcacaatcctgcattcttattagctgctttgtctgtggccagctttggaccatgtccttggtggagtttctccctgggaaaagacgtccctgacagtctcatggttacagaactcgctactgttgcggaactaatctgacaacacataaaaacagtgggtcgctgcacgtttaatagtacacgctgcatggacattggacttgcgctcgagagagccgagttggcatgggtctctctattgagtgtcgtctccgcttgctatgtcttctngcgtagtcgtcgtgccgttcaatccttgtgttcgattgtctcctatgcctcatacgactcgattagcagagctgagggcaggcgtcttcatatcataattgcgcatccagagacgtcgtttgccgagctttttggcgacgcgagtcggtggaccgggtgtctttacgtggccgtccgttgtatctttatgctcatctcattgctcgagtgagattccgtggtagaatgctagcccgcgtaggtggcggctggctttcggtggattctgcttgtcgcgcactgggccttgtgcgtgggctcctatcgctcgcgcattcggtcactgcgttccagcggagcgattcgatcttgataattccaggactacgggtaagctggtagttttgggcggaccccaggctgcggatcttgggttagacaccttgcgatttcacatggacacacgttggggacgcaacatgaggaccaggcatgggtacccaccaagaaaaagaacattaaatatccgtatagaaaatgcagtgcgcaacaacctgcggacaaaacacaattattgagagacaaaggcgtacattgtctaattgacaccttcccatattgtccacgaaagtaggatcagataacaacaaacgggaaaagtaaaaccccgcttgtgtcggatccccaaaggaacaacagagaacacagatttgacgaatatcactataagaacatcacta

SEQ ID NO: 489299 - DNA, 506 bp, Homo sapiens
tactacccccttcttcctatgtcctggtccctgtagacctctattctgcttcctccatgacttagactattccagatatctcatgtaactagtcatatagcactggatttggtgtgcgtatggttgtgtcattttacagctcaacataatgtctccaaggttaattcatgtgatatagcatgtgtggaatgtcattgtgataggctgtgtactagttacatcgactgtctacacatttcgttaatccattgatctattcacggacacttggatggcttctacctttgggcgtgctgtgactagtgctgcctgtgaacctgtctgtaccaatatctgtctgagtgcctgcctgcacgactatcgactgtagacccagaactgcattcgctcagtcatacggtaattctatctcgcactcttcagaggaatcatcatggcatttgccatggcagccgcatagtactacatttccaccagttatgcgcaactggtgcgccactcggggc

SEQ ID NO: 489300 - DNA, 192 bp, Homo sapiens
gccttacactgggttcgagttctgtaaccggaatgaatctggttctcattctgggaaattaatgagactactaatagtctcccaatgtctatttgctactcttaccttgggagcacatccctgctttttttttttttgggaaatggattttccccttttgccagggtttggggccaatgtggcccacctttg

SEQ ID NO: 489301 - DNA, 300 bp, Homo sapiens
aaaaaaaaaaaaaaaaagggaaaaaaaatgaaaaaaaggaaattctcaaattctcataaagagagggggaaagggctggatgggtgtgggattttataattggtttccagaattttttaccatctgggtggaggcatatttctggaatagtttttccgggtctaaatttcctctcataaagggacaggattggatatccgggagtcatcattctcgggaaatctcagtttaactcagacgggtgctatatagagtattatgttcatgcccatgtttgttgtggggggagagacccagacg

SEQ ID NO: 489302 - DNA, 529 bp, Homo sapiens
  misc_feature (242)..(242): n is a, c, g, or t
  misc_feature (460)..(460): n is a, c, g, or t
aaaaaaaaaaaggattagtgaaagttacatgcatagtaggtagagatgatgacagaagaaaatgtgacagataaactgacgtggtacctccaagagttatgagggttaatactgatggttctgtatatttaaaaggggaggaatttaagtgtcagtaaggaaaaggagactatcaaaaataaccaagagaatttggatagtccaaatagaagttgtagaaatcacaggattgataaaatagnagattagacatagctgaaaaattagtaaacaagagaaaaaattttccagaacataccacggagagatgaaaagatggaaaatgtgaatgcaagtttatgtaacatgaagaatgatgttaacccatttttaacagaaactcaagaagaatataataaaaaagaatggagaagaggaggagataattccaagagataatggttgagaatattttataatnaatgaatgacatgagcctttaaatacaggattaacataaaatccaaatagagtaaataaaattaaattg

SEQ ID NO: 489303 - DNA, 174 bp, Homo sapiens
actctagaggatcacctctatactaaaaatacataaaattatgctgagcgcattgttggcacactcgcctgtttatccctatgtctactcagtgagtgctgaggcactagaatcacttcaacccaggaggcggaggctgcagtgagctgagatcacgccactgcattccagggg

SEQ ID NO: 489304 - DNA, 911 bp, Homo sapiens
gagtaacgaaaaggcggttctctggaagctgaatgccgtttgcggtgccctaagaggccgtgactctgtatgcttcgacactccagatgcgatcaataccttggcttcattagtcctcaagaaatttcttttcacggacgcagaccataatcgcctaggaatctaggatagtcgagagatgcaagcgacagtagcttcctttgctcatcctgagcctcgcatatcttaggcctccaaatgcgcatagtagatctcatccatgatggaattaatacgaagatgaggtatgtcagatgttattgatctatgagagctctgatatccttggtatgcttagtttaaactcctttagatctgaagactgcgaactattccctggtgctgacagtggcctcagctcttcatggtcagctgcaggtcgccttgtgacgaatgtttgctgtaaatgacctcatgtttcatgggagatgccttgtcacgaaaacgctgccaagtgacatggtatttcgggcagcttatccagcatttgaagcctttgtctggttatttgtagtctattttcaaacttatcaccgatgtgggcactcttgcaaaagctgttggtcatgctgtggcaagctcttgaccttattctgacttcagtcacttcttgatatgactttgatgttggccatctttgcctctggctttcgtcatgcccattgacagtctcaacaatatcgtgaaagactatatcggactcaagtcccactgggtggtacatgccctttcttcttcttcttcacatagccattatttttcgatgaattttagatctttgcaggaagaaggtttgaacgaggagttatatctaagttgtgagacctgagtctctatgttctgggcggaggttcctggggtgtttggcttcc

SEQ ID NO: 489305 - DNA, 438 bp, Homo sapiens
ctgcagcctgcccgtttatggctgaagtgagccacctgtccaagagacactagctactttgtcattgcagtcctcagatgatgaggacagtgacagatccaatcaatcacagctttctgctgagtgctctagaaggaagacctctggccacgtatacactccaaggaccgtgagatcaactgtgatgctctctctagaaagatgcggacaatcaattggccatcaggcttgacaacagggaagtcatatgtgctcttgttaagaatagacaggtgtcgggagggcccggtggctcacccctgtaatcctagcactttgggaggccaaggtgggtggatcacctgaggtcaggagttcaagaccagcctggacaacgtggtgaaaccccatctctactaaaaatacaaaacttagccaggcgttgatgccaggtgcctg

SEQ ID NO: 489306 - DNA, 860 bp, Homo sapiens
ggtctggagttttggggtgctgctgtgggaactgctgaccggggaggtgccataccgtggcattgactgccttgctgtggctatggcgtagctgttaacaatgctcacactgcccatcccaatccacctgccccgagcccttcgcacagcttatggcgactgctgggcgcaggacccccaccgcaggcccgacttcgcctccatcctgcagagttggaggcgcctgaggcacaggtcctacgggaaatgccggggactccttcctattccgtgcaggaaggctggaagcgcgagatccaggtctcttcgacgagctgcgagccaaggaaaaggaactactgagccgcgaggaggagctgacgcgagcggcgcgcgagcagctggtcacaggcggagcagctgcggggcgcgagcacctgctttggccagtgggagctagaggtgtccgagcgcgagctgacgctgctgctgcagcaggtgggaccgggagcgacgcacgttgcgccgcgccgccgggacaatccaagcgcagcaagctccgggcgcgcgacggcggcgagcgtatcaggcatgccacatcgacttcaagtcacgcatcaccgtgcaggcgtcaccccggcttgaccgggaggagaaaccgtcttcgaggtcgggcctggggattccggccactttccccggttccgagccatcacaagttggagccctgcagagccaggccaggcattgtggggcgccatttcccccgacgtctggaggactccagcaatgagacgggggaaagcatgctgggatgtggtcccagtcccccagcctgcggaagcccgaatggacgcgaaggtccgcattgcgagccacat

SEQ ID NO: 489307 - DNA, 387 bp, Homo sapiens
tatatgcggatcgcagacaaattagttggggaacacctgcagggcgtatgcgtagatggcatcgtgtcatcacttccagggtcatcgtgggctacactactgtcagcatcctccatccaggtatgcttccgatcttcctcctcaatcccaatcccaatcacggcacgcatgacggcctggcaggtggccacactcccagccctgtcacattcctcggcatcctggatccactgctcacggttgatctccacaccgttggcccgcagcgaggtgatggctcggtcgatgatcttctccaccatctgcgtgttcccattggcttcctccagcttagcagccgtgatccagatatgtcggtctgtaggaatgttctcccgcgccttgttc

SEQ ID NO: 489308 - DNA, 435 bp, Homo sapiens
tgctccggctcctgcttgcttgggagtcccggatccgctgtcgccactcggggcccttccgcagaggcgccctcctttccggcgtgggagtcttcagccaacctcccacaatcaagttccccccttctcaggaatggaaatagccatcccccaatttcctagattcccgccgtctccccgtcccttcttccccagggtggaagtcttgaaaccaccgtcccctcctctcttccaactgcctccctccttactgagaatggaaatccactactccctccctctctcccgggtggattccctcggccctgctatctggtctattacggccctcttgggttccgaagaccaagctctgtaaacactcccatttctaggccaccttgttctgtttatgtcccttgtgcaatatcttccctactgctaaaaatcctttgg

SEQ ID NO: 489309 - DNA, 129 bp, Homo sapiens
caaagtctggtcctggggagggaatcccagtgactgccatttacagagcagctcatcttgggacaagagcattacagccatcgtgccatgatatcacagctagcccagctgagaagcgggcttgatggc

SEQ ID NO: 489310 - DNA, 450 bp, Homo sapiens
accccggacgcattcagagtctgtgtgtgattcaccatgtaatatagaataagtgaggaaatgtgtgcaggtcatttcaacagatagaaaaaggcactcgataaaattcagcactcaaggaggctaaaaaactcttggcaaactaggaatagataggagtgcctttaatctgccagaaggtatcttcaaaaaccctacagttaacgttaggcttactgagggatgttaaagtcttttctcctaagatagaagataaaactagggcatctagtactgtggtttctgttccccattgtgccagaagttgtatccaacgcagtatggcatgaaaaaaaagagtaggattgagaagaaactgtgtttcatagacagtgtgattatgtccatggaaaatccgaacgcacctgtagcgtgctgtcagaattcatcagtgaatgcgtccgtcgaagt

SEQ ID NO: 489311 - DNA, 127 bp, Homo sapiens
gatctggtaccagcggtaagaagagcgagcaggttccatctggagatctcataccccgagactggtgtggcgagacaagggaggcaagacgagcactcgttcccgaggctcgtagatgcttgttgta

SEQ ID NO: 489312 - DNA, 616 bp, Homo sapiens
  misc_feature (51)..(51): n is a, c, g, or t
  misc_feature (62)..(62): n is a, c, g, or t
  misc_feature (67)..(67): n is a, c, g, or t
  misc_feature (71)..(71): n is a, c, g, or t
  misc_feature (75)..(76): n is a, c, g, or t
  misc_feature (85)..(85): n is a, c, g, or t
  misc_feature (97)..(97): n is a, c, g, or t
  misc_feature (106)..(106): n is a, c, g, or t
  misc_feature (109)..(109): n is a, c, g, or t
  misc_feature (130)..(130): n is a, c, g, or t
  misc_feature (139)..(139): n is a, c, g, or t
  misc_feature (142)..(142): n is a, c, g, or t
  misc_feature (144)..(144): n is a, c, g, or t
  misc_feature (147)..(147): n is a, c, g, or t
  misc_feature (157)..(157): n is a, c, g, or t
  misc_feature (170)..(170): n is a, c, g, or t
  misc_feature (184)..(184): n is a, c, g, or t
  misc_feature (189)..(189): n is a, c, g, or t
  misc_feature (198)..(198): n is a, c, g, or t
  misc_feature (200)..(200): n is a, c, g, or t
  misc_feature (224)..(224): n is a, c, g, or t
  misc_feature (226)..(226): n is a, c, g, or t
  misc_feature (244)..(244): n is a, c, g, or t
  misc_feature (292)..(292): n is a, c, g, or t
  misc_feature (297)..(297): n is a, c, g, or t
  misc_feature (306)..(306): n is a, c, g, or t
  misc_feature (340)..(340): n is a, c, g, or t
  misc_feature (354)..(354): n is a, c, g, or t
tcgtttttttgtgaattttcttcttgcgtattcatatagtgcttggttggnctcctgcaggntctcntgcngggnncaggaaganttggaaaatgtnaggggggtnggntgaggggtcaccgggccaganttgggaaanttngnggnagaggctgtnggtagggactganttcccttggtgatnttttnaggtatgananttacggccccctcaagcagattantnatagttaagtttacacanccagttttggtcaggtttttttggatgatacccaatggcacatggggnaaaanttccttgantctctgagccagagttgccagttgcacatggggngaaggaccgggggngggagggaaagaagactgggctgactgggggcgcaatctggggtgtctttgtcgcttcatgtgctctgctttgtcagctggagtgagccgtgtccctgtctggcccaattccttggccaccagctgttgtacacggagtcaaactcctcattcgcttcccctagttggcgatgaacaggacgaagccaccttacttgatacaccgtgaaagggacgaaaagtgaccacagcagttctgagacccaggaggcatctgacaccg

SEQ ID NO: 489313 - DNA, 189 bp, Homo sapiens
gatggctcatgatggagacatcagaaatagtcaaaccacatctaccaaatgccagtatcaggcggcggcttcgaagcctaacagtgactgtttggatgtaaagtgtatatattagattgtgctggatgaagcagatgatgcaggataagttgagccaataatgacgtgaagtccatcttgagcctgtgt

SEQ ID NO: 489314 - DNA, 378 bp, Homo sapiens
  misc_feature (64)..(64): n is a, c, g, or t
  misc_feature (69)..(69): n is a, c, g, or t
gttgttaaaggtttttcccccaagaatatttcctttgggtggggaaaaaagggggagcgggggnaaaanttaaaaccccccccttccatggtgggatccggggggtttttttttttttaaaaaaagtttcccgtggaaaaaaaaaggggggaacaggggaaatttttttttttttccgttagggatgggggtttggccaaccgttttacgaaaaaaagccttttccttttttcgggtaaattaatgggagggccggcaagcccccctttcccgggtttttggggttgggggagaatttttgggaggtaccccgtgtaaatttttttcggggccccgggatggaaattaagcccccagggttgccttggggcccttgga

SEQ ID NO: 489315 - DNA, 316 bp, Homo sapiens
ggggttcccaaaaattcccccccaaaaagttttttttttgggttttcgggggggggcccccccggggccccccccctttttttttgcacccaattttggggggggcccccagggatttaaaaaggggggcccctttttttttgtgggggggcccgggggcccccccgggggtttttcccaaaaaaccccttcccccttgggggggggacccccccccttttttttttttttttttttggggggggggggggggccccttttttttgcccccccccctttccccccccctttttttttcctttttccccccccccca

SEQ ID NO: 489316 - DNA, 748 bp, Homo sapiens
ggcccctttgggggtgccctccaggtttttttttggaggcgcgccgggtgtccacgcatcatatggttcaccccccccgacgtcctctgttcacgccacggttgagcctattttagcgcgctgaaagtggcgtctgactagctttcgggtgcccaccagtgcctgcagggcccctctcctgggcttcacgaggcactctttttgctcaaggttgcctttcctctccctggcctccaggtctccgcctgtgttgtcccccaggttagtagctcgcgcgtcatcgcgcatgctttatgtgcgcctcaacattcttctgtttctctcctcctcatcacccattctgggcaaccccttgcgtccacccatccagatctaacacttctgatttgtcaccataccatgatgtgtgatcaacccctgggagcttcaccgctcacataaagtatttatttcttgcctccagtgttctatctctcgaggctgacgccttatatagaacaatgacctctgctccttttcatggccagaaaattgccacggggcttatgtgcaggaccacttccacgttacatttcctcatggctctccgaactctctaacttataagtgttgtgtacccccacccaggcagtatccatgaagccccagggactagtcctatgatgttcttagcctgttatttttgtgatgatttctgtgctcttcaccgtttgcaaattgtaaataaaacagaaattataaaacaata

SEQ ID NO: 489317 - DNA, 659 bp, Homo sapiens
  misc_feature (177)..(177): n is a, c, g, or t
  misc_feature (347)..(347): n is a, c, g, or t
  misc_feature (371)..(371): n is a, c, g, or t
  misc_feature (390)..(390): n is a, c, g, or t
  misc_feature (469)..(469): n is a, c, g, or t
  misc_feature (543)..(543): n is a, c, g, or t
  misc_feature (554)..(554): n is a, c, g, or t
  misc_feature (592)..(592): n is a, c, g, or t
tttttttgtgtatgagaatgatttatttccgtaccaaggttatcaggcttccagggggcagggctgggaatgaacgtagatatccggggcaaaagacatgatcatcctggctctatccctaggcattccttacagacgtggctacctgctttatgggccccctggttgcggaaagancagttttatgtgagtattcaaaatttctcttaacttggcaaaacgaagcctttgtggaaacactaggctgatagggttggaaggggaaatgaatctggggatcggggaccaggataaacatgaaacgtgtggaacatcagggtgttgaggttaaaatccaggcctctganacacatgtcccccaggcggttgangaaaattactgggcctgangaaacatttcccaggttgcctgctacctccctgccaccccatgctcccatagcacacccctggcttggggaacttggancacagcatcctgcctgctgacctcccccgactcccacctcctcctgaatgaaccgactccaccaccctgctgancctttgccccnccaccaaaaccctggtacccctgaagatttttgaaatncctgctttccccccatccccaaaacttggcttgttgaaaattaatttaagggttttccttgaagaat

SEQ ID NO: 489318 - DNA, 280 bp, Homo sapiens
ggaggtcaaggctgcagtgagccatgatcatgccactgcactccagcctgggcaacagagtgagacactgtctcaaaaataaaaataaaaaaaaaaagacaaacaaatggccaacagatagatgaaagaatgctgaacatctctaatcataagagaaatgcaaattaaagccacaataaggtatcacctcacacctgttagacgggctattatcaaaaaggtgaaagataagtgttagcaaggtcacagagaaatggaacacttatacacggctggtgaa

SEQ ID NO: 489319 - DNA, 832 bp, Homo sapiens
agcagtggctcacgtctgtaattccagcaccttgggaggccgaggcaggcagatcacgaggtcaaaagatcgagaccatcccggccaacatggtaaaaccctgtctttactaaaaaaaaaaaaacaaagcaaaaattagccaggcgtggtgggtgcacgccggtagtcccagataactcgggaggctgaggcaggagaaccattggaacccgggaggcggaggctgcagtgagccgagatcgcgcacgggactcaagccggggcgacaagagcgaaactcggtctcaaacaacaggaaagaacattccctaacttaggaacagaaacgaagacacattaccggaaaaactaccgggtatgacgtctcaagttctccttggtgggcactgggactggactatctggggcacatccccagcagggaatctatcttggtccagaagcctggggagcaaaagagggtagaaggtgtgtcactacccgtcttggctcacaggccagaagcagcgcccgggcacgtgccaaatggctctgggcaaacaagtggaatgcgcggcggaacggggggacacaccgggcggagacaaaacagtgacactcggccctaaagagctgagggacaagggtccacagcaggcacgcgatatccagcccagacctggagcactacggagggctggacgaataggcgaaacaggggacagccgcccaccaccacaaggggcccagcgaaacgggctgaagccagtgcccaaaaggaggacaatggcaaagcacgcaatgccgaacgataaccggaggcccgctagaagaccaggacaggtgcacggac

SEQ ID NO: 489320 - DNA, 105 bp, Homo sapiens
agatcggtcgatcaggttggaagcctctgacaaggtgggccagaacctttggatttggtttgggggctaagaatcacgctaatggctcagagtaacatacaaagc

SEQ ID NO: 489321 - DNA, 167 bp, Homo sapiens
gagcgttgtgacccccagaggagggaaggcaagcgctgcgagccgctccctcaggtctccaggagtctctaagacactcttcccctggggatagtagagaaagttgtcccgatggcacctgatcctgctacagacggacgatcaggttggactttctttgcgcctac

SEQ ID NO: 489322 - DNA, 749 bp, Homo sapiens
ggattacaggggcaccaccacgactggctaatttttgtgtttttagtggagacggggtttcgcagtgttggccgggctggtttttgggctcctgacctcaggtgatccacctgccctggccttccaaagtgctgggattacagtcgtaagcctctgcgccctgctgggtgggcttttttataagtaaaaataaaagttatagaattggctgggcgtggtgcctcatgtctataatcctagcactttgggtggctgaggcacgtggatcacctgaggtcaggagctcaggagcggactggccaacatggtggggccccgtctttgctaaaaatacaaaaattagacatggtggcaggcacctgtaatcccagctactcgggaggctggggcaggataattgcttgaacccaggaggtggaagttgtagtgagctgagatagtgccactgctctccagcctggatgaaagagtgagacaatgtctcaaaaaataataatattaaattaaagtaatagaaattcacggatgacccttttctgttactttctttgaagtgcttccttattccacttatcttcttaactaggcccaaaacttattaacccgacttacaaatccgagattcacattgtcttattgcgttaaactaaagcattatagaccacttcctaattcagttctcggttaacgcgctaacgtcaacggcacacctcttaaatgcacctgggccgactttttttgcgaaccag

SEQ ID NO: 489323 - DNA, 889 bp, Homo sapiens
gagacgttcttcgccgagagtcgtcggggttacatgcttcaacagtgcttggacggaacccggcgctcgttccaacaccccgggaacgggccgaacaccatagacagaccctaccagaaactctacaccgaaacactcggaactggaccaccaaggaccccgacacgaacgatccagagacacggacagacaaacgacgaagaccggaccgaacaatataccataaatacgacgacaagaaagaccgacgatacaacatcgacaggacgagaccagaagataacaagacagagaaacaagaaggcggcaataagagaagagatcaaccgggagagaatataacgacatcaatacagatacaccagacgagagaatgacaaccaagaaacagcgaacagatacagaagtaggaaagacaccaacgacaagaaaaacaaccaataaaccacaacaaactgaagcggagagaggaaacaagaacacgaagaacacacagaacaaagcaagacgaaaccaaaacgagagacgggacaaacataaagacgaaagggaaaataaaagcaaaaccagacacagaagaagacaagaagcgagaggaaaagaaagaacaagacaaggaataacaaggcacacaacagtagcgaacacacgtcaaatacgtggcaagacgaggaacatggcaaaagaaaaagatggacaacgcaacagagcgacaaaaagcaaagaatacggcggagcgaggaagacgcaaacaaagcaacggtagagagaggaacctagagaagaaggaaggccaaagaaggcgaggaaacacgaagcaacaacccaggcacagacacagagacacaagaaaacaaccgaggacacagcaacagagaggggcaccagg

SEQ ID NO: 489324 - DNA, 319 bp, Homo sapiens
acatgtacatacgtcaaggaaaagagcaggcatgtagagaggtagaaataagaccgtattagccagtcaccctagtcgagtgaaagtacaagtgtctcgattggagttaggggaggtaggcaggagaagccagatcactcaagccacaccgaggctttatttctctctaactgtcactggaaaaccattgaaacagaatcaatcacttcatttatccattccacaaatctttactgagtatctactatgtgccagacaatgtttatagaccctcggagatacagcagtgcaccaaaacaaagttccttaccataggcag

SEQ ID NO: 489325 - DNA, 352 bp, Homo sapiens
tacatcctgagatgttggcttacggctgctggtgagggcaagcctgaaaaggcctgggcccctagacgcatctgggcatgaggggcaggtggcaattgctgtgatcgcctgggaccaccgaagaggggcaacacagcatcacacgtgagtatggcttctgcgcggacccaaatgtagaatcagtcgggaagcttttaccattttgctttgccatgttagagttcttctagggtggttcaaaagggaccaaacaaaccatcgatacaaactcgaaggttctaaggagtagcagtgccaccggacaggaaggcctgtaatggaaagcatgtgaacctggagctcttggaaaggt

SEQ ID NO: 489326 - DNA, 142 bp, Homo sapiens
cagtggaggtaggtatgtagtaagaggccactatactgcccataccgccctaacccaaatagtatggcagggaaaattttttatgacatacacgaagtgtctaaaaaggaaaaaaagtagttgagtagggggagaataacct

SEQ ID NO: 489327 - DNA, 239 bp, Homo sapiens
gacattgatggctgctgactgcttagggtgggggttgctgaaggtggggtgacagtggtaatttcagtgatttttggtttggtttggtttctttaagagacagggtctcattctgtcactcaggttggagtgcagtggtacgatcatagttcactgcagccttgatttcccgggctcaagcaatccttctgcctcagtcttcccagtagctaggaatatcaagaatcggcccgggtacc

SEQ ID NO: 489328 - DNA, 127 bp, Homo sapiens
agtaatatattttattatttttgagacaggtcttcctctgtcacccaggctggagtgcagtggcaacatctcagctcactgcagactcgactctaatgttcccttggatattacttagtaaaggcca

SEQ ID NO: 489329 - DNA, 264 bp, Homo sapiens
ttttctatcccagtaatttcatatcccgccttactaagattcataagataaggagaaataaacaactagtttacagactagcaaatgctgagagattttgtcaccaccaggcctgccctataagagctcctgaaggaagcactaaacattgaaaggaacaactggtaccagccaccggtaccaacatgccacactgtaggaggaagaaactaacaccaaaacacaagccggtagttctggggaaatgctggcagaccaagggcg

SEQ ID NO: 489330 - DNA, 116 bp, Homo sapiens
tacagcactcaggtatggactatgtacataacaatacaagaggcgtttgtttccacggtggtcactatataaattgttctgtgtataaataaaacaagcctgtttttgatcttcca

SEQ ID NO: 489331 - DNA, 146 bp, Homo sapiens
cctttttttccggaaaaaaaacaagttttctttcaaaaagggaaaaaatgggggcccccccaccttttctgttaaaggggggtttctttatatggccaaccgggtggaccccggaatgagaaaaaaccgccccaagttttttttta

SEQ ID NO: 489332 - DNA, 898 bp, Homo sapiens
ttacaggcgtgagccaccgcgcccggcctagatttctaagggagggtattatccattcatgaaggtccaaacccatgaactaacacctcccagtaagccccacctgcaacgttggggatcaaattttaacaagagattggtaggggcaagcattcaaaccatagtaagagttaaatttcctttttaaaaaaatcactgatatgattccatttcgccatagataagaactagtatttcagcctaccatcgagtgtgcttatagctcaccgaaagggcactctgtctcgggaatacagatttgcctagaggtatcctagtgcagtcaaaggaagcgcaatgagggatagagaaggttagtgatggagacaccagcgctgcattttgcaaccaacaatgtaaaaattttacggtttggttctgctaacttactacagtttacattcctctcagctgggagaattgttgagttttttcttaagatagaaaagcaattcagacaatctgaaatctccacaagaaggataagaagcacagcagaagctattctaggcaggaagtcaatccattcaactgtctgtgctccaaacaattgtctgcactgggagtcgtacgaggtacagacaacagccagacctctgatcctctcattagtgatttcagaagaaattaccagtcagctgagtaattcactgagtaaacatttggcactgacagaggttagacggataactatttgtatcaccatattcatgaagctggaatattttccattacttgtatcatatatgaatggaagatgttaaaaggcctctcatcttgtaagatggatatgaaagaacactttctgagaaatgaaattattcacacaccagcgaggtggatggaagagaaaaaaaaa

SEQ ID NO: 489333 - DNA, 186 bp, Homo sapiens
cccgactagcccgacagtggccgcgcccgcctacagccgcgcgctcagcctggcaactcagcagcggggtctcggagatcctggcacactgcgtgaccgctggctgcgtgtccctgtgatgtcaaccactatcgccccgtgacgagctgactggtcaatgaccaatggatggctgtggtgtgagat

SEQ ID NO: 489334 - DNA, 1020 bp, Homo sapiens
gcacatttgctgagtggcaggaatctaatagccactggcatatcagagatcaagaaggtttacacaagatgctgggaacatttggtagaaaatgagaaaggactcaaggagaacttaccagcagatgtatgtggtaaacataccagtgctaacagttcagatcaagagcgaggagacaattagaccactgagtcagggaacctcctggaacactagcatggagagccctgatagttcccaagacaatgacatcaacaactcagatttatctgaagatgaaattgctaaccagagatatggattattgtaccaagacatagaggctgataaagatgaggtacttaccctagaatgtagcttagactagccagatttccttaggctctgcttttccttatgtctctcaccaacttcattttccatcattgatctccttgacagatgtacctcttgatacctatgtaagccaaacacaaacaggttgacaaaaaaaaaaaattctaaataactgattgtgctggtaatcagtaaagtccttcttaccattcccattaccgagtctctctctctctctctctctctactctctcctcatcacttattccatgtaacacactaaaatgtgcatacaccacttgacgcaacgaagagattcaacgttccgtggtcacctacagtgtggactccccatccaaataaaaaaacccgagaaaaatgatcaggacacaggcatcacgaaaacggggaaaatcctcggggcaggcagcgcactacagcgatcgatagcgcggagtggaaatggcaggatagcagccccaaagcctagtatcaagagtggcccgtaaaatggagaacgccagggggaagagacgaaacgagcggaacacacccccaatattggagccaagacaaacgacagggatcaggtaagcccatattaagcagacagggtataccacgggagaaaagcgacacacaaaagcaaaaggcgaaatcaagacgacacaagacagacaagaa

SEQ ID NO: 489335 - DNA, 1037 bp, Homo sapiens
  misc_feature (844)..(844): n is a, c, g, or t
  misc_feature (846)..(846): n is a, c, g, or t
  misc_feature (855)..(855): n is a, c, g, or t
  misc_feature (861)..(861): n is a, c, g, or t
  misc_feature (877)..(877): n is a, c, g, or t
  misc_feature (879)..(879): n is a, c, g, or t
  misc_feature (882)..(882): n is a, c, g, or t
  misc_feature (892)..(893): n is a, c, g, or t
  misc_feature (900)..(901): n is a, c, g, or t
  misc_feature (903)..(904): n is a, c, g, or t
  misc_feature (921)..(922): n is a, c, g, or t
  misc_feature (925)..(926): n is a, c, g, or t
  misc_feature (929)..(929): n is a, c, g, or t
  misc_feature (936)..(936): n is a, c, g, or t
  misc_feature (990)..(990): n is a, c, g, or t
agcggggcggctccgcgcctcgcgcccagtccgcgggccgcgccgccgctcccgccgctcccgccgctcccgcagccgccccgccgcccgcccggagccccgcgtccctaggcctggctcccgcctgcccgagacccgcccagcctgccccgctcagccgccagagaagatgcggctgctcccggaatggttcctcttgctctttggcccgtggctccttaggaaggccgtcagtgcccagataccagagtccggaaggccgcagtacctggggctgcgccccgccgcggccggagcgggtgcccccggccagcagctcccagagccaaggtcttcggacggcctaggcgtgggccgcgcctggagctgggcctggccgaccaaccacacgggggcgctggcccgggcaggggcagccggggcgttgcccgcgcagcgcaccaagaggaagccgtccatcaaggcggcgcgcgccaaaaagatcttcggctggggggacttctactttcgggtgcataccctcaagttttcgctgctggtgaccggcaagatcgtggaccatgtgaacggtaccttcagtgtgtatttccgccacaactcgtccagcctgggcaacctcagtgtcagcatcgtgccgccctccaagcgtgtcgagttcggaggagtctggctgcccgggcctgtcccccaccctctgcagtctacgctcgccctggagggggtgcttcctgggctggggcccccgctggggatggcagcagcagcggcggggccggggcttgggggctccctcgggggcgcactggcggggccgcttgggggcgcgttgggcatactaaggccncncgtccgcgnttcccnaacccgtagcgtctananaancccccgagcnngaccccnncnngtgctgtacgccccacnncgnntanttcaagnaccccgcgcaaacaaaaaataatctttgcccgccttcccctccttgtctttggntttttgtgcggttgctcccctggtgcccgggtgggcgctctccttgc

SEQ ID NO: 489336 - DNA, 119 bp, Homo sapiens
gcggccgcctactactactactactgctcgaattcaagcttctaacgatgtacggggacatgttcataaagaggattatttttgtaaaactattaaaagttttgcttttctcgaaaaaa

SEQ ID NO: 489337 - DNA, 1801 bp, Homo sapiens
agcggggcggctccgcgcctcgcgcccagtccgcgggccgcgccgccgctcccgccgctcccgccgctcccgcagccgccccgccgcccgcccggagccccgcgtccctaggcctggctcccgcctgcccgagacccgcccagcctgccccgctcagccgccagagaagatgcggctgctcccggaatggttcctcttgctctttggcccgtggctccttaggaaggccgtcagtgcccagataccagagtccggaaggccgcagtacctggggctgcgccccgccgcggccggagcgggtgcccccggccagcagctcccagagccaaggtcttcggacggcctaggcgtgggccgcgcctggagctgggcctggccgaccaaccacacgggggcgctggcccgggcaggggcagccggggcgttgcccgcgcagcgcaccaagaggaagccgtccatcaaggcggcgcgcgccaaaaagatcttcggctggggggacttctactttcgggtgcataccctcaagttttcgctgctggtgaccggcaagatcgtggaccatgtgaacggtaccttcagtgtgtatttccgccacaactcgtccagcctgggcaacctcagtgtcagcatcgtgccgccctccaagcgtgtcgagttcggaggagtctggctgcccgggcctgtcccccaccctctgcagtctacgctcgccctggagggggtgcttcctgggctggggcccccgctggggatggcagcagcagcggcggggccggggcttgggggctccctcgggggcgcactggcggggccgcttgggggcgcgttgggagtgcctggggccaaagagtcacgcgctttcaattgccacgtggagtatgagaagacaaaccgcgcgcgcaagcaccgaccgtgcctgtacgacccatcgcaggtgtgcttcaccgagcacacgcagagccaggccgcctggctctgtgccaagcccttcaaagtcatctgtatcttcgtctctttcctcagctttgactacaaactggtgcagaaggtgtgcccagactataacttccagagtgagcacccctacttcggatagcgcccctccccagccagtcctgagcctcccgccaaatcccagcctcactaggtgggacccccttcccagtgttctgccgctcctgtggccatgtcgcccactccttccactctgggggcggaggggaatggcttctcgggaccctcagctagcgtgggtgcccttttccttatgcggagtgcccgcaaggctggggtagccccctccagtacaccccaaagtgaaagggataagagtgcagccccagaataggcggggcttggaggcggtcccaatgtcccctgggtccacagtgggtccccttttcacccttggcgctaggctgcgcactccctttccccgcagctttaataactcctggcctggcaccctcaccccaccctgactttcccatcccccagcgcttgtcctgcttcaccctaccccgcctaagactgtaaaggcctaaaaacctcggcctgtcctcccaccattctgcctgccatatgcctgtccccttttcctccaaaccctattagggtaccggaagcagaacccctgggctgaggccctggccctgcccccggcccctgcccctgcccgcccccctccagtccaggcagtcgagctccacctgccctctcctgctgcttcctctcggtgatattttttctacgccaaaacagacgggaaagggaacaaaataaagtgaaatccaatacaaaa

SEQ ID NO: 489338 - DNA, 1683 bp, Homo sapiens
agcggggtgactggcgaagaggtgaggtaataaggacagaagcaaggcaaagaggggtcaggacgaggtaattggatgagagacaacacaaacgtctaaagaaaacaggccgtcagtgcccagataccagagtccggaaggccgcagtacctggggctgcgccccgccgcggccggagcgggtgcccccggccagcagctcccagagccaaggtcttcggacggcctaggcgtgggccgcgcctggagctgggcctggccgaccaaccacacgggggcgctggcccgggcaggggcagccggggcgttgcccgcgcagcgcaccaagaggaagccgtccatcaaggcggcgcgcgccaaaaagatcttcggctggggggacttctactttcgggtgcataccctcaagttttcgctgctggtgaccggcaagatcgtggaccatgtgaacggtaccttcagtgtgtatttccgccacaactcgtccagcctgggcaacctcagtgtcagcatcgtgccgccctccaagcgtgtcgagttcggaggagtctggctgcccgggcctgtcccccaccctctgcagtctacgctcgccctggagggggtgcttcctgggctggggcccccgctggggatggcagcagcagcggcggggccggggcttgggggctccctcgggggcgcactggcggggccgcttgggggcgcgttgggagtgcctggggccaaagagtcacgcgctttcaattgccacgtggagtatgagaagacaaaccgcgcgcgcaagcaccgaccgtgcctgtacgacccatcgcaggtgtgcttcaccgagcacacgcagagccaggccgcctggctctgtgccaagcccttcaaagtcatctgtatcttcgtctctttcctcagctttgactacaaactggtgcagaaggtgtgcccagactataacttccagagtgagcacccctacttcggatagcgcccctccccagccagtcctgagcctcccgccaaatcccagcctcactaggtgggacccccttcccagtgttctgccgctcctgtggccatgtcgcccactccttccactctgggggcggaggggaatggcttctcgggaccctcagctagcgtgggtgcccttttccttatgcggagtgcccgcaaggctggggtagccccctccagtacaccccaaagtgaaagggataagagtgcagccccagaataggcggggcttggaggcggtcccaatgtcccctgggtccacagtgggtccccttttcacccttggcgctaggctgcgcactccctttccccgcagctttaataactcctggcctggcaccctcaccccaccctgactttcccatcccccagcgcttgtcctgcttcaccctaccccgcctaagactgtaaaggcctaaaaacctcggcctgtcctcccaccattctgcctgccatatgcctgtccccttttcctccaaaccctattagggtaccggaagcagaacccctgggctgaggccctggccctgcccccggcccctgcccctgcccgcccccctccagtccaggcagtcgagctccacctgccctctcctgctgcttcctctcggtgatattttttctacgccaaaacagacgggaaagggaacaaaataaagtgaaatccaatacaaaa

SEQ ID NO: 489339 - DNA, 174 bp, Homo sapiens
atcagagcataccctcatccaggcatatttgctgctccatttgagatgctgccatcataagatacacgtcttaactcttagcattaggagccccagtgaactattctctgaatatcacaacagaatctctcttatttttaattgtgaatgactactataggtagagctcgcgaa

SEQ ID NO: 489340 - DNA, 1802 bp, Homo sapiens
  misc_feature (1783)..(1783): n is a, c, g, or t
agcggggcggctccgcgcctcgcgcccagtccgcgggccgcgccgccgctcccgccgctcccgccgctcccgcagccgccccgccgcccgcccggagccccgcgtccctaggcctggctcccgcctgcccgagacccgcccagcctgccccgctcagccgccagagaagatgcggctgctcccggaatggttcctcttgctctttggcccgtggctccttaggaaggccgtcagtgcccagataccagagtccggaaggccgcagtacctggggctgcgccccgccgcggccggagcgggtgcccccggccagcagctcccagagccaaggtcttcggacggcctaggcgtgggccgcgcctggagctgggcctggccgaccaaccacacgggggcgctggcccgggcaggggcagccggggcgttgcccgcgcagcgcaccaagaggaagccgtccatcaaggcggcgcgcgccaaaaagatcttcggctggggggacttctactttcgggtgcataccctcaagttttcgctgctggtgaccggcaagatcgtggaccatgtgaacggtaccttcagtgtgtatttccgccacaactcgtccagcctgggcaacctcagtgtcagcatcgtgccgccctccaagcgtgtcgagttcggaggagtctggctgcccgggcctgtcccccaccctctgcagtctacgctcgccctggagggggtgcttcctgggctggggcccccgctggggatggcagcagcagcggcggggccggggcttgggggctccctcgggggcgcactggcggggccgcttgggggcgcgttgggagtgcctggggccaaagagtcacgcgctttcaattgccacgtggagtatgagaagacaaaccgcgcgcgcaagcaccgaccgtgcctgtacgacccatcgcaggtgtgcttcaccgagcacacgcagagccaggccgcctggctctgtgccaagcccttcaaagtcatctgtatcttcgtctctttcctcagctttgactacaaactggtgcagaaggtgtgcccagactataacttccagagtgagcacccctacttcggatagcgcccctccccagccagtcctgagcctcccgccaaatcccagcctcactaggtgggacccccttcccagtgttctgccgctcctgtggccatgtcgcccactccttccactctgggggcggaggggaatggcttctcgggaccctcagctagcgtgggtgcccttttccttatgcggagtgcccgcaaggctggggtagccccctccagtacaccccaaagtgaaagggataagagtgcagccccagaataggcggggcttggaggcggtcccaatgtcccctgggtccacagtgggtccccttttcacccttggcgctaggctgcgcactccctttccccgcagctttaataactcctggcctggcaccctcaccccaccctgactttcccatcccccagcgcttgtcctgcttcaccctaccccgcctaagactgtaaaggcctaaaaacctcggcctgtcctcccaccattctgcctgccatatgcctgtccccttttcctccaaaccctattagggtaccggaagcagaacccctgggctgaggccctggccctgcccccggcccctgcccctgcccgcccccctccagtccaggcagtcgagctccacctgccctctcctgctgcttcctttaacggtgatagtttttctactgcccaaaacatattaaagggcaaggggancacaaatttagtatccact

SEQ ID NO: 489341 - DNA, 134 bp, Homo sapiens
cacgcgcatatgggagtggaggttacggaaaaactgcgcggcccaggcttgtctctatgtcaaccatgtctccgctcgggcctgcctccatggcatcatcatctcagctctggctgagtgttgccaggtaggaa

SEQ ID NO: 489342 - DNA, 1566 bp, Homo sapiens
agcggggcggctccgcgcctcgcgcccagtccgcgggccgcgccgccgctcccgccgctcccgccgctcccgcagccgccccgccgcccgcccggagccccgcgtccctaggcctggctcccgcctgcccgagacccgcccagcctgccccgctcagccgccagagaagatgcggctgctcccggaatggttcctcttgctctttggcccgtggctccttaggaaggccgtcagtgcccagataccagagtccggaaggccgcagtacctggggctgcgccccgccgcggccggagcgggtgcccccggccagcagctcccagagccaaggtcttcggacggcctaggcgtgggccgcgcctggagctgggcctggccgaccaaccacacgggggcgctggcccgggcaggggcagccggggcgttgcccgcgcagcgcaccaagaggaagccgtccatcaaggcggcgcgcgccaaaaagatcttcggctggggggacttctactttcgggtgcataccctcaagttttcgctgctggtgaccggcaagatcgtggaccatgtgaacggtaccttcagtgtgtatttccgccacaactcgtccagcctgggcaacctcagtgtcagcatcgtgccgccctccaagcgtgtcgagttcggaggagtctggctgcccgggcctgtcccccaccctctgcagtctacgctcgccctggagggggtgcttcctgggctggggcccccgctggggatggcagcagcagcggcggggccggggcttgggggctccctcgggggcgcactggcggggccgcttgggggcgcgttgggagtgcctggggccaaagagtcacgcgctttcaattgccacgtggagtatgagaagacaaaccgcgcgcgcaagcaccgaccgtgcctgtacgacccatcgcaggtgtgcttcaccgagcacacgcagagccaggccgcctggctctgtgccaagcccttcaaagtcatctgtatcttcgtctctttcctcagctttgactacaaactggtgcagaaggtgtgcccagactataacttccagagtgagcacccctacttcggatagcgcccctccccagccagtcctgagcctcccgccaaatcccagcctcactaggtgggacccccttcccagtgttctgccgctcctgtggccatgtcgcccactccttccactctgggggcggaggggaatggcttctcgggaccctcagctagcgtgggtgcccttttccttatgcggagtgcccgcaaggctggggtagccccctccagtacaccccaaagtgaaagggataagagtgcagccccagaataggcggggcttggaggcggtcccaatgtcccctgggtccacagtgggtccccttttcacccttggcgctaggctgcgcactccctttcccctgcccgcccccctccagtccaggcagtcgagctccacctgccctctcctgctgcttcctctcggtgatattttttctacgccaaaacagacgggaaagggaacaaaataaagtgaaatccaatacaaaa

SEQ ID NO: 489343 - DNA, 935 bp, Homo sapiens
tggctcatgcctgatgcctgtaatcccagcactttgggaggcccaggcaggcagatcacctgaggtcgagagtttgaaaccagcctgggcaacatggcgaaaccccgtctctactaaaaatacaaaaattagccgggcatgatgatgcacgcctgtaatcccagctacttgggaggctgaggcaggagaatcgcttgaacccatgaaattggaagttgcagtgagccaagatcgcgccactgcactccagcctgggcaacagagcaagactctgtctcaaaaaaaaaaattcagctgatgcttggcctttggccacttcagggtcttcggggtcataactctttagggcgcatataaactcattgtggcctgtttgatgagcccattttacatctcgaggattgtcgagatacccaactttctcagatagttatccatgaagcaccaacgtcatgggcaatttccacgaagaacccatttgtgcctgtatagcaactcgatctgacatctggcaaatacggacatatctagggcttgataagtggtggagctgcttcctttccatgctacaacgctgtacagcttttagtacaaaaagcgaccataagagcaatctttaggaacatgtgcccgcaaagttagcggcttgcgtgtttctggacccacaccattttactgactgcacgccgtccattagacacctcaacagcttaaactttcaaacagaattacagccaggaaacacgttaccattccctgggaggggctcacccacgtttcaaacccctttaacaggcctgcgcgcgcacgttgcactcccacgccttgtaaagtcggcgagccactctgagatcggcccatggcaggccgagcacacggaggtcacgaagtttgagacgacagcctggccaatttgcggaaacccctttctacta

SEQ ID NO: 489344 - DNA, 338 bp, Homo sapiens
tagcagtttgagttggtgtagtgtattcttggttatcaaaatactcatatagctttggggattttgtgaattgtggtaaatattcagtgagtgtgtgtgaaaaatcagtgatacattacgtggtacagtctcagtcccataaaatgtggatgttggtgcctacacacaggatctaaaagaaatatgttcaaacttataaacgtggcttggtgaatgtggtgaaatgaacttgtggtccttgtggctgtggtgtttttcacaatttcccttataagtggcactattactaatcttttacaaaaataagaggtttattttacaaaaacaaaaaaagagag

SEQ ID NO: 489345 - DNA, 451 bp, Homo sapiens
caagatgggaacttcttgaataagaacttggaattgatgctgccagggtctcctccaactgtgataatatgaggatgagattctaatttttttaatatcaggtccagccttctgcctttaagcagacctgcactcttggaggaagctcaaattcctgtttgccaaggctttcccactccacgcacctggcaaaagggattgttcttcctgcatggctcttctcgctctaaacaaagctgtctcattttcatcgtccagggacatgcctcaaatgtcttttgctcacacagggctctcttccccatgtgctaaagtggatcaccctgtttttttctcatgatagaaccctagttatttcctacatgaatcttactacactctgacaattgtatatatttgtttactttcttagtgtttatcttcccaataaactccatgctggatccccaaa

SEQ ID NO: 489346 - DNA, 841 bp, Homo sapiens
tccgactgacccccggaaggttgatgtgcgctgcggatcgccggtctcgcctatgtctgccattttcaatttcagagtctattgattgtaatcttgctgcttagtttgtccctgtgcttattttcgatccttggacacccagcctcctgggctgcaccttcagactggatatgctgggtatacttttctggacagtgtgcctaggaagttggtgaccggagagagtccttgtgttgcaggtatgctgtctagtaatggccttcagcttcctcttcatacagtagctggggaaaattgccagaatgtggttgccatcgagcactctggatggtgaacacggactggactgcggaaacactctgggaggggactgttaagtctttgatctccgaacatcggtgagataaatttccagatgctgtgctctattgcaatgtcatgggaccaaatgttctgtataaccaatataagatgtaccatttaatagtctgtaacaatcaagctcagtgctgtcatctacgatattacactgcttgcaaatgtatgcgtgtgtcctccagatacgcagttttaagtgcgggtatctcctaggggcgcattagtagaccacccgcaactgtggtggacatttacgccgagcgtccttcgctgtgattgcaagttgttttactcgtttttagaatgggaccttttgggcgtaggctttctattaccctggccgttcgtgtggggagggggggtaaactagaagggcgggttcccctggccccctttgtccttacaggacctttctctggaccgttttgacggtttattttacacgctttctcgcggggggtat

SEQ ID NO: 489347 - DNA, 716 bp, Homo sapiens
  misc_feature (167)..(167): n is a, c, g, or t
  misc_feature (203)..(203): n is a, c, g, or t
  misc_feature (208)..(208): n is a, c, g, or t
  misc_feature (211)..(211): n is a, c, g, or t
  misc_feature (219)..(219): n is a, c, g, or t
  misc_feature (242)..(242): n is a, c, g, or t
  misc_feature (253)..(253): n is a, c, g, or t
  misc_feature (255)..(256): n is a, c, g, or t
  misc_feature (570)..(570): n is a, c, g, or t
agttaatactctagaaatatctgtgtgttgcaattcaaatgtatgttgagattgtgaaaagcgcttcagtgccactagcttaccggtacactagactaagccctggatgacttatgcatgatacagtaccaggaacaacaggtggcctaaatacatgaaaagcagtntaagctagtgacactaaagccagtcttgtattactntattnttnacagaatngttttgaaaactgtgctacaggngactgatgtgngnncaaataatatctctttatgcagaaggaagtctttttttttctttttttttttaagaagtatggctttttatgcatcctttccaatcggagggcatttgaagttgcatggacgtgataaaagctgatgcaaaacaagaaagaaacaaacaaaaaaaaaaaaaccggcaaactggtttaccaaaaaactcaaacaatgtgaccagggccggtccaatttccacagttctcggctggagtccagtggctaccatagtgtttcacaatgtgacatttcctgggcgaaaaaaattctctacacacttgcgtcgcacgcngtgcggggtacctacttcccaggcataggttcctcaaagctgcagtagaattagtgtctccactcaagcgtgttcaacttggggctatatatcatattagaacctttatagccatccggggaaaaagctgcccccacctcaatgat

SEQ ID NO: 489348 - DNA, 300 bp, Homo sapiens
  misc_feature (25)..(25): n is a, c, g, or t
  misc_feature (58)..(58): n is a, c, g, or t
  misc_feature (80)..(80): n is a, c, g, or t
  misc_feature (84)..(84): n is a, c, g, or t
  misc_feature (178)..(178): n is a, c, g, or t
  misc_feature (218)..(218): n is a, c, g, or t
acactgcaaatcaaggtggaacccnatatggactgtctgcaaattgcccaccaaccgnaacaccgaacccctagggcttntccntgcccgtttccaggaacctttcaccgtccaccctcctgcgacggggcacgtagtcttttcttgctctggaacccctgggaggttgagcagtganagagggaagggactaacgtgctccggaagggtggaggttnctcttctaagtccttggtctaaagagccctgtcacttttttctctcccacttttttttttctaaataaaatttgccaacttg

SEQ ID NO: 489349 - DNA, 141 bp, Homo sapiens
  misc_feature (132)..(132): n is a, c, g, or t
caggatccatcggtgacatttcatcatgtcatcatgtcatcatcactagcaagttcgttctgcctgaactgtactttctttacagacccaggcgtggcagctttattaccctttcttttctttaatctacgnactttggac

SEQ ID NO: 489350 - DNA, 242 bp, Homo sapiens
  misc_feature (27)..(27): n is a, c, g, or t
  misc_feature (89)..(89): n is a, c, g, or t
  misc_feature (96)..(96): n is a, c, g, or t
  misc_feature (220)..(220): n is a, c, g, or t
ctcgccctgtcagtgattccaatgttntcgtaacggggggattctctgccttttttgtatcaaagaacaagcaaatggacccccgccgntgcaggngcccatagccatcggtctctaaagcgagtgggctagcagcgtttgttttgttggtttggtttttttttttctgaaggtgggacagtcactccctcctccctcccacccctgtcgcatccacgtncgacctggaggactggatcaga

SEQ ID NO: 489351 - DNA, 124 bp, Homo sapiens
tctgcggttatcacgaaagggtcagaccagtggcacagtgtcagttgagttcagtccaagcagggtgtgatttccaaggacttagtacagtgtgactaaacagagaatctgttgtccccaatgc

SEQ ID NO: 489352 - DNA, 258 bp, Homo sapiens
tacccggatcaaaacaaatcctctcctgtaatccaaaggggtctacagggtgtgtcagtgacagggtgacattcaccagacttcttggtaatccagtagctgaataagttggattgaactagatatctatctatctgcctttgctgaaatataaatgaaggcaaggaaattcggagtttggtcttccgattcatacccctagcagctgatgtaatatttggacttggatctcaaattcatgaggatagaccctaagaa

SEQ ID NO: 489353 - DNA, 207 bp, Homo sapiens
agctacttcaacggaaactagctcatctgtagagactgctctgcaacccttccgggaagccatagctctgcaatggtaacgccgtttaaccatatttctttggcaaaatgtttaagagggtgctgtggaccccttttgtcacggggtaggtttaggtcccgatctactgttttttgtcttacagtaaacagcttggtctagcaatgt

SEQ ID NO: 489354 - DNA, 422 bp, Homo sapiens
tgcgtcttgtagacatattgtacgagttacctgaatcacagaacagctacatacaacatagatgaatctatgtaaacatatagtagagtataaggagccataaacaaaggagaacatagtccttacataaaattcaaaaacaggcaaaatagtctgtgatgtacgaagtgagaacactggttataaaaggaaagccatcgaaaaggaacacaagagatactctgggttgctgggaatgtactctttcttgaccagtgttctagttacacaggtgtgctcacttagtaaaaatccttgagataagaatataaggaattatagtatacttagcatacggatattatacctcagataagatgtaagtggaacaagaggctggatacagcaggtacacacctgtaataccaagcactttaagaagg

SEQ ID NO: 489355 - DNA, 172 bp, Homo sapiens
agtcccactcttatttatgggactatgtcctgtgcagcaacgtggatggagctggaagcattatcctaaatgaactcactcagaaacagaaaaccaaataccacatgttctcacgttataacgtagaagctaaacattgcagtacacactggatacaacagaacgggaaccg

SEQ ID NO: 489356 - DNA, 241 bp, Homo sapiens
  misc_feature (104)..(104): n is a, c, g, or t
gggccccccccccccccacttttttgcgataatatttccagcagcaattttagctaccttaggaggaggcagggcaaaaaaggcgagggcctgccttttacctnccgtgtcctttgcaggaaggagggaggcccccttttgaggttattttattccccccccccccccccaggcagggttggaaaaaaaggacttttttaacccttgttttgttttttaaaaaaaaatctgtaaaatttga

SEQ ID NO: 489357 - DNA, 217 bp, Homo sapiens
gacacggagctggaactgaagctggggtagcagctgggctaggtagatcctaggctaggctaggctaggctaggctataggcgggcacagctagagcccctaggcaatacggggcacgagcacgcttcccaagctaggggtgggcaaggaaggcaagtcgatcgagctatgcgattgacaccctatagggatctagggctaaacctcctagggctat

SEQ ID NO: 489358 - DNA, 119 bp, Homo sapiens
atggatggtcaggcctgtggtatcatcgtagggaacatcatcggctctggaatcttggtctcgccaaaagggagtgctggagaatgctggttctgtgggccttgctctcgatcgtctgg

SEQ ID NO: 489359 - DNA, 960 bp, Homo sapiens
  misc_feature (40)..(40): n is a, c, g, or t
  misc_feature (67)..(69): n is a, c, g, or t
  misc_feature (75)..(75): n is a, c, g, or t
  misc_feature (94)..(94): n is a, c, g, or t
  misc_feature (107)..(107): n is a, c, g, or t
  misc_feature (109)..(109): n is a, c, g, or t
  misc_feature (134)..(134): n is a, c, g, or t
  misc_feature (136)..(137): n is a, c, g, or t
  misc_feature (144)..(144): n is a, c, g, or t
  misc_feature (150)..(150): n is a, c, g, or t
  misc_feature (155)..(155): n is a, c, g, or t
  misc_feature (170)..(170): n is a, c, g, or t
  misc_feature (175)..(175): n is a, c, g, or t
  misc_feature (204)..(204): n is a, c, g, or t
  misc_feature (216)..(216): n is a, c, g, or t
  misc_feature (223)..(224): n is a, c, g, or t
  misc_feature (228)..(228): n is a, c, g, or t
  misc_feature (230)..(230): n is a, c, g, or t
  misc_feature (232)..(232): n is a, c, g, or t
  misc_feature (244)..(244): n is a, c, g, or t
  misc_feature (254)..(254): n is a, c, g, or t
  misc_feature (260)..(260): n is a, c, g, or t
  misc_feature (279)..(279): n is a, c, g, or t
  misc_feature (283)..(283): n is a, c, g, or t
  misc_feature (285)..(285): n is a, c, g, or t
  misc_feature (298)..(298): n is a, c, g, or t
  misc_feature (303)..(303): n is a, c, g, or t
  misc_feature (316)..(316): n is a, c, g, or t
  misc_feature (320)..(320): n is a, c, g, or t
  misc_feature (325)..(325): n is a, c, g, or t
  misc_feature (443)..(443): n is a, c, g, or t
  misc_feature (660)..(660): n is a, c, g, or t
  misc_feature (932)..(932): n is a, c, g, or t
gcacagtgagcagaaagaaggggcgttctcacacaaagangccacaaggactgcaattaaataaatnnntttganaagccttcattggcttacngcctatgcctccncntcttgctatcaggcgtacatcattncnnccatgtngggcantttcntggggatgtacaggngatantccatggggcctgggggggcctcaatggncacatcatccanggggggnngggngngngcagaacagggngggggggggngagggngggtgctggggtgcagcgnctgngngtggtcctcaagngtggntcttcgttctggngcgnggggngggacactctgcaggcctgaaaaggaatatacttccatatcatgccatctcttacactggcattccttgcctatgcatgtgcatggcttgccctggtttagcttggaaactgattganagtcagagagatcactggctttgagacttgcttgggggacttgggtagcgtcagaggggtcttccttcttactctctgatgggagccttggaacagaagttctcaaaggctcaacgactgcccctgtgtgattagcatcgagagaagtagagctttctcctgcactgaactctttaggggatgaaattcccagcccactgctgccatcaggtgagtnagtttggcttttgtgcttgagttgactgctggaagaagacgctattgtactgcaatgtataaactttggaggatgaaggacaggagacttagaacgtcgacgacgctgagttctccctgctcctcgtgaagacttccttgtagatccgtgccaactgtctttagatgcacatgtggttttaggtttggtatcatctgttgctgttctgactggtgctctgacacctgttccttctccaacagacagagatgctacagaaccctgatgcatcnctcttaattttttgaaagcagttgtaga

SEQ ID NO: 489360 - DNA, 233 bp, Homo sapiens
  misc_feature (94)..(94): n is a, c, g, or t
  misc_feature (166)..(166): n is a, c, g, or t
ccattaaacatcccctcttctcccctacgtcttcactttccatccagcctctggtaaccatccttctactctccatctccatgagtgtgatcgntttaatttttagctcccacaaataaatgagaacatgcaaagtttgtctttctgtgcctggcttctttcactncacatcatgaccagatgttggagcattctggatgttccacctgtactactacacacttggattagat

SEQ ID NO: 489361 - DNA, 440 bp, Homo sapiens
  misc_feature (4)..(4): n is a, c, g, or t
  misc_feature (79)..(79): n is a, c, g, or t
  misc_feature (86)..(86): n is a, c, g, or t
aaangaaaacaccgagagttactgaaaagcaaaaagttttgtagtgtgccttgaatttagtaaaacaagtacccactcnccctgcnaccttaaacaagcactttgtttttgttttatttttttgagatggagtctcactctgttgccccaggctggagtgtagtggcatgatcttggattactgcaacctctgcctccccaggttcaagctgttctcctgcctcagcctcccgagtagctgggattacaggcgtgtgccaccatgcctggctaatttttgtgttattagtagagacgggatttcaccatgttggccaagctggtctcaaactcttgacctcaggtgatccacctgccttggcctcccaaagtgctgagattacaggcacgagccaccatgcctggccttaagcactttttcacggatttacaaacaatcc

SEQ ID NO: 489362 - DNA, 201 bp, Homo sapiens
ctagtactctaaggatccccccgccgtacagttgcgcagcaggtctcgatgtgaacaagctctagcatgttgtgacaatgtaggtaagggaagtcggaaggcggatacgtaacttcgggataaggatttgctctaagggctggtcggtcgggctgaggcgcgaagcgtggctaggcgcgcgccgaaactgatacggcgggg

SEQ ID NO: 489363 - DNA, 299 bp, Homo sapiens
  misc_feature (38)..(38): n is a, c, g, or t
  misc_feature (41)..(41): n is a, c, g, or t
  misc_feature (52)..(52): n is a, c, g, or t
  misc_feature (105)..(105): n is a, c, g, or t
  misc_feature (249)..(249): n is a, c, g, or t
  misc_feature (288)..(288): n is a, c, g, or t
tcggcttctcgtcttgctctctctggtccctccggagnccngccgcgcgtcntcccggggaagcatggcaatgaaagcggtgtgcgtgctgaagggcgacggtcnggtgcatgggaaccatccacttcgagcaagaaggcaagcgggtgaaccagttgtgttgtcaggacaaatttacaggaattaacttgaagggcaagcatgggttcaaggtccatcagtatggggacaatacacaaggcttgtacnagttgcagggaccttcatttttaatccttaactcttaangaaacatgggt

SEQ ID NO: 489364 - DNA, 178 bp, Homo sapiens
ccaccacccctggctcatatccaattaaaagcagtatatcaaagaatgagccagctgggcccggtggctcacacctgtaatcccagcactttgggaggccaaggcaggtggatcagctgaagttaggagtcgagaacagcctgacccaacatggagaaaccccatttctactaaaaat

SEQ ID NO: 489365 - DNA, 379 bp, Homo sapiens
ctagctcggtaccccagcggactatctccgttgcggctggattcttcccaggcccttaccgctgccttagaacaagctggcgggcagcaacctgacgagggttccggaggcggactcatagatcgggctcgagcggaatatgacaagtacttcacgcccgggggatcagagcgtcgcaacgtcttcgcagatcgcgacgagctcgaggagatccgcagcaaccttgctaaaggacaagagaggctcgcagaggtcgacgaagtcgtcgactccctcagcagaatcaacgaacaaatcagccacgatcagaccggggtggcatccaaaaagaccgactgccaaaaagctgaggctgcccttgcgagcctcaccgaactcg

SEQ ID NO: 489366 - DNA, 171 bp, Homo sapiens
ggttggtggagaggagatttccgaaactcggtggctagttcattctggcagcacatattattatgtctggatgtgactcatggcagtttaaacatttcttctggttggcatcttagtagaaagggaaaataaccactccgggtcgtcttttcataaattttcatattttgg

SEQ ID NO: 489367 - DNA, 166 bp, Homo sapiens
cccgaacgcgcacgatggcgcgtcctcatttttactaaaaatacaaaaaattcgccaggcatggtggtgtgtgccttaatttcagctcctcaggcggctgacgtagatcatctgagctgggaagtcaaggccccagtgagctgtgaataggccactgcactccggc

SEQ ID NO: 489368 - DNA, 332 bp, Homo sapiens
  misc_feature (40)..(41): n is a, c, g, or t
tgaagggcttaaagatgaggggaggaagggaaaactcagnnctaagttaaatattctggggaaatgattaccttttccattcctttgatggatttttactgacatacgttcttttgtaatgggggcgtgatatcacaaaagaatggggcctttggaacttgatatagttgagtttgacccctggctttactctgtattgtgttttggggattaaatgagaacatttacagagctcctcacacaaggctagaaccacgtagatactcataaacgtcagcatattttgtgaataaagccctttcattcctacagaataaagtggtttaatggta

SEQ ID NO: 489369 - DNA, 236 bp, Homo sapiens
  misc_feature (55)..(55): n is a, c, g, or t
  misc_feature (153)..(153): n is a, c, g, or t
  misc_feature (155)..(155): n is a, c, g, or t
aaggccgtcgccggcgatgttgcgacggccgcggatccgaacgtgctgcagcagnacgtgacgcagcgcaatccggccggcgcgcagaagtggaagctgctggtcacgctggcggaacccggcgattcggtggacgacgcgacgaaggtctgngnccgcagcggacgacgatcgacgcgggcacgctcgtgctcgaccgcgtggaggcgcaggacagcgggccgtgccgcgatgtg

SEQ ID NO: 489370 - DNA, 353 bp, Homo sapiens
gtctgagcaagcggggatacggtataagggggtgtgtcttttctcaaccccacacttggaatatatgtagcttcaaaggagccatagggggagtatttactacagaaatgggcaaaggctaaaaggcagggctggagtttttatttggtggacggtgtagatttaagaaagtgatgcaaaaatgttaataatatgaattaagtatgaaagttggcatgcctgaagctgtaacataaggaggggcagaaaattggaggaaatattcttccagtattcgagaagtattatccaattcaggagagcagggactcaggtcacggatgaaggaatgaagttcaaatattcatctctgt

SEQ ID NO: 489371 - DNA, 554 bp, Homo sapiens
  misc_feature (475)..(475): n is a, c, g, or t
tttccaggcagaatgaggcttaagagagtccatggaagttaatacagagaaagacttcctaacaactagagctgcctgaaaaagcagcagcctgtctggcacggcagtggctgctgtggctcaaagggtatggaacatgaatgcacagcccctgaatagaaacgctgaggggacttcagcctccaggatccttccaacactaagactctgagacatcttgaaatagttcacttactgctgtctggtgtcaaatcatcatttcctaaagtcactatgactcatggttcctgaggacaacttttgtccccatatcccagatgtattcactttgaagttttaagaaagaagacaaacttgtaagcagggagtttgtgtttggctgtcagtgataacccacagatatttctcatctccctctccctgtgatatattttaaaagcacaccactatagggagtatacttggaggaaactgncaaaacgtcctcaaaacccaaggagtcacaattgatgtcccgccttcagaaacagccaggtaaatccttccatagacta

SEQ ID NO: 489372 - DNA, 394 bp, Homo sapiens
agggggcatgtcaggtctggggcccagagctctcccatgattgaagtttgccaccctcttgcagacagaggattgaaagcctggcatagaatatctagctattgtataagttttataggacaacagagagcatgaataacccttgggttgtctttggcagttgctttctagaaattcccttttcccaataagtaaaagaatcaaaatatcacccccaagattggcagatgcagaagtatcacctaaagtcagcttctaccttctaaactcttccatgggtcattcaaagaggttgtgccagccaggtgtagtggcacatgcctgtagttccagctaccagaaggctaaggtgggagggttgcttgggcagcatagcaagaccccgcctctacaa

SEQ ID NO: 489373 - DNA, 316 bp, Homo sapiens
gcagaccgcctactaatactactaaattcgaggccgctcaacttttttttttttacacattataaacccgccagtaaattattttgtagtaagatttagaacatataacatacagactgaaatatctgagtcagcatgaacagtacatattcttactagaggcagttacatggaaaaccaggttattatcaggttatttagcaagtaaggaatccaaacaagaggagactaaacttaagacctataactcgtccatgaagaaatggggcaaactttatctaccaccagaatgcattagcttccagaaagctgtgga

SEQ ID NO: 489374 - DNA, 131 bp, Homo sapiens
cgttttgcgtgtcacttacgattaaagtccttacgtgatctgagttcagaccggagtaatcctaggtcggtttctatctacttcaaattcctccctgtacgaataggacacgagaaataaggcctacttca

SEQ ID NO: 489375 - DNA, 897 bp, Homo sapiens
cagcgttgcccaagtctctatactttaacggtcaaaacatggcaaaacatataaaacttttaccccggctttttaaaccgtaatttccgcgcaacaattgtcccccccctaacttctgttagcccttgtctccagaaacatctatttttggcaatgaacaccttcccgaccagcaaaacatgggccttttaacacacccccccgtcctcctctcttaaaagtctcccgcgccacctttcctgacacacaatcttctgcagacatcggggcagaaatgccaccctccccagagaaagtcgccgctccttccctgcaaagatacatgtgtcagaccccccagatcttttggttcaccccgcaaaacctctatggtatattgttgccccaccccccactttagtattctacccccacttgtcataaacaccagagaaaattctttgttgcttatccaggtcttctctccaaaaagtcttttcgctcacctatacagtactacattatgagacccccccagtacaaccaccacaaaatcgttgctttgactccccacgtatacccaaagcggcgtcctctttatccacaatatgactctcctggtgagtgggataccaaacatatatgatgctgagaacctcccttaattgcgtgtctcgacacgcgaagcgatatggaccccgcaccactattctggtgggtgctacatcacccccgcccgcataggaattttgggaaggtaacatgttgttcgtcactttacactgtggggggttgatctctcctcggcgaacaataaagatgtgttcattttgcttcacgcaaacaagccagtaactttattttttagacccattccccaacaaaaacttcaatggtaaaaacgacccacataacaaa

SEQ ID NO: 489376 - DNA, 192 bp, Homo sapiens
cggcaacgcttcggatgggggggagatcccaagctcagtccccatgaaagttcgagggccggtcaggaggcaggggcaggtccgggtccaaagcaaggacaccgacagcatcttccgactccagtcggcagctccagcgacttaggacacggatgtgaagtcccacgctgctggctccaagcagcacgagag

SEQ ID NO: 489377 - DNA, 1180 bp, Homo sapiens
ttgtttcaagttggccaaattgacaagatgcgagaggtatactgcgttccactcccgacccggggccacggtagctggggaccctgtttcgctccctacctcgtgatccctcgtagagctcagtggttcctgctctttcttgcagtgtgtcccaggcgccctcggtccagggcctgggctgacccgactcgctggcgcttcatggatgaacttccaaaaggtggacaagatcggagagggcacgtacggagttgtgtacaaacgccagaaacaagttgaccgggagacggtggtggcgcttaagaaaatccgcctggacactgagactgagggtgtgcccagtactggcatccgagagatctctctgcttaaggagcttaagccatcctaatattgtcaagctgctggatgtcattcacacagaaaataaactctacctggtttttgaatttctgcaccaagatctcaagaaattcatggatgcctctggtctcactggcatacctcttcccctcatcaagagctatctgtaccagctgcctccaggggcctaggctttctgcccattctcatcgggtctccaccgtaacgaacacttaaaacctctagaaaacttggcttattaaccacacgaggggcgccatcaaaggctagcacgcactttgggactagccagaagcgttttggaaggtcacctgtgccggaactttataccccattgatgtgggtgacccctgttgtgtgacccgaggtcctcgaatcctctctggagcgggcacaatttatcccccaccttgtgcggcacatttggagcgccaggggcggcacctctgcgccgaacagttgagtgtgcagcggggcctaaatccctgcagaaaaccagtaaaacacaaaatttggagcattatatagtcgaggagccccccacactgggtgtgggcgagggcggagaaactattagtgcgttagagaaaaatcaacgggcggggcataaaatagatactctaccccactcacataatgaaacagaatgtaacatggtagctgcaacgcctcattatgacgagcgagcgaccggcactcctcacttaaagcgcgcgaccgcttcatactaaaagaacgaccaacaagcaaagacacacgtgagatgatgtcatacctaatctcgcaggcaaaatac

SEQ ID NO: 489378 - DNA, 719 bp, Homo sapiens
  misc_feature (18)..(18): n is a, c, g, or t
  misc_feature (63)..(63): n is a, c, g, or t
  misc_feature (84)..(84): n is a, c, g, or t
  misc_feature (86)..(87): n is a, c, g, or t
  misc_feature (89)..(90): n is a, c, g, or t
  misc_feature (93)..(96): n is a, c, g, or t
  misc_feature (100)..(103): n is a, c, g, or t
  misc_feature (112)..(114): n is a, c, g, or t
  misc_feature (122)..(122): n is a, c, g, or t
  misc_feature (124)..(124): n is a, c, g, or t
  misc_feature (140)..(141): n is a, c, g, or t
  misc_feature (148)..(148): n is a, c, g, or t
  misc_feature (159)..(159): n is a, c, g, or t
  misc_feature (164)..(164): n is a, c, g, or t
  misc_feature (182)..(182): n is a, c, g, or t
  misc_feature (184)..(185): n is a, c, g, or t
  misc_feature (215)..(215): n is a, c, g, or t
  misc_feature (220)..(220): n is a, c, g, or t
  misc_feature (257)..(258): n is a, c, g, or t
  misc_feature (262)..(262): n is a, c, g, or t
  misc_feature (266)..(266): n is a, c, g, or t
  misc_feature (270)..(270): n is a, c, g, or t
  misc_feature (278)..(279): n is a, c, g, or t
  misc_feature (285)..(285): n is a, c, g, or t
  misc_feature (328)..(328): n is a, c, g, or t
  misc_feature (336)..(336): n is a, c, g, or t
  misc_feature (339)..(339): n is a, c, g, or t
  misc_feature (343)..(343): n is a, c, g, or t
  misc_feature (346)..(346): n is a, c, g, or t
  misc_feature (348)..(348): n is a, c, g, or t
  misc_feature (350)..(351): n is a, c, g, or t
  misc_feature (354)..(355): n is a, c, g, or t
  misc_feature (358)..(358): n is a, c, g, or t
  misc_feature (363)..(363): n is a, c, g, or t
  misc_feature (380)..(381): n is a, c, g, or t
  misc_feature (383)..(383): n is a, c, g, or t
  misc_feature (388)..(389): n is a, c, g, or t
  misc_feature (393)..(393): n is a, c, g, or t
  misc_feature (403)..(403): n is a, c, g, or t
  misc_feature (409)..(409): n is a, c, g, or t
  misc_feature (413)..(413): n is a, c, g, or t
  misc_feature (418)..(419): n is a, c, g, or t
  misc_feature (421)..(421): n is a, c, g, or t
  misc_feature (423)..(423): n is a, c, g, or t
  misc_feature (432)..(432): n is a, c, g, or t
  misc_feature (437)..(437): n is a, c, g, or t
  misc_feature (449)..(450): n is a, c, g, or t
  misc_feature (455)..(455): n is a, c, g, or t
  misc_feature (467)..(467): n is a, c, g, or t
  misc_feature (470)..(470): n is a, c, g, or t
  misc_feature (477)..(477): n is a, c, g, or t
  misc_feature (482)..(482): n is a, c, g, or t
  misc_feature (489)..(489): n is a, c, g, or t
  misc_feature (495)..(495): n is a, c, g, or t
  misc_feature (499)..(499): n is a, c, g, or t
  misc_feature (501)..(501): n is a, c, g, or t
  misc_feature (503)..(503): n is a, c, g, or t
  misc_feature (505)..(505): n is a, c, g, or t
  misc_feature (512)..(512): n is a, c, g, or t
  misc_feature (519)..(519): n is a, c, g, or t
  misc_feature (527)..(527): n is a, c, g, or t
  misc_feature (529)..(529): n is a, c, g, or t
  misc_feature (538)..(539): n is a, c, g, or t
  misc_feature (546)..(546): n is a, c, g, or t
  misc_feature (548)..(548): n is a, c, g, or t
  misc_feature (556)..(556): n is a, c, g, or t
  misc_feature (576)..(576): n is a, c, g, or t
  misc_feature (581)..(581): n is a, c, g, or t
  misc_feature (583)..(583): n is a, c, g, or t
  misc_feature (591)..(591): n is a, c, g, or t
  misc_feature (597)..(597): n is a, c, g, or t
  misc_feature (603)..(604): n is a, c, g, or t
  misc_feature (642)..(642): n is a, c, g, or t
  misc_feature (649)..(650): n is a, c, g, or t
  misc_feature (709)..(709): n is a, c, g, or t
accggaattcccgggatnggcgtttgagtggcaagttgtttgttacagcgaacaccagctgcnccccgcgccgggcgccgcgcncnntnntannnncctnnnnaaatactannnttcttaananctcatagcaagaaagnntattcanctttaatattnaaatngcctccctagtaagatantnnttaaccatattcataccaatatcatcaaanaacantatgcgcacaagcacagaaatccgtttatctcatgcnnagtngtancgtnattccaanncacacnacctcttacccccaatcaccagtactgtataaaaacaccagtntacaacancancatnccnananncannaanaatcnaaaataaaaaataaatnnanaaaannaatnaatacatatnaaacanttanaaaannananatattaaantaatntttaaaaataannaattnaataaaaaattnaanttaaatnttaantaaaaanaaaaanaatnantnanttaattntaaaaanttataaananaaaaaaaannaaaaatnanaataaaanaagcaaaaacagctaaagtnaaaanancataaatntatccncaacanncaaaagctcagcccagcttaaaaatttgcagcaaaatncaaatgnntgcaattaaaatcaatataagctaaaaaaaagcttgcaagcaaattgcttttcaaaagnaaaataatgc

SEQ ID NO: 489379 - DNA, 203 bp, Homo sapiens
  misc_feature (1)..(1): n is a, c, g, or t
  misc_feature (33)..(34): n is a, c, g, or t
  misc_feature (36)..(36): n is a, c, g, or t
  misc_feature (52)..(52): n is a, c, g, or t
  misc_feature (55)..(55): n is a, c, g, or t
  misc_feature (62)..(62): n is a, c, g, or t
  misc_feature (79)..(79): n is a, c, g, or t
  misc_feature (95)..(95): n is a, c, g, or t
  misc_feature (116)..(116): n is a, c, g, or t
  misc_feature (124)..(124): n is a, c, g, or t
  misc_feature (135)..(136): n is a, c, g, or t
  misc_feature (151)..(151): n is a, c, g, or t
ngcacaagctgaaggcagacaaggcccgaaagnngntcctggctgaccaggntgnggcccgnaggtctaagaccaaggnagcacgcaagcccgtnaagagcgcctccaggccaagnaggggggngatcatcaagnntttatccaagggggnagagaccaagaaataaaacctcccactttgtctgtacatactggcctctgtg

SEQ ID NO: 489380 - DNA, 158 bp, Homo sapiens
gctgtcagatttatcatcgacatgagagacaggacccacctggaattgtacatcttgtctttatgaagtgacttaatgatagattacgcctcaatctgaaactctcctgtgtgattgggctatcactgggatcctctaaaggtcgatcgctggcatga

SEQ ID NO: 489381 - DNA, 1008 bp, Homo sapiens
tctggaggctgtggaatcagaatacaggcatcgtggggtctatcacaggctccaagtattatgtgcgcatcctgagcaccatcggatcgggagctgtcaaggcccaacgcctcagtggccctccataagcacagcaatgcactggtggacgtgctgccccccgaagccgacaggagcatcatgatgctcacctcagagcagaagccagatgtgatgtacgcggactatcggaggcatggtgcatccagaagcaggaggtgcgggaggcccgtggagctcccgctcaacgcattgtcgagctctacaagcagatcgggatcgaagtcccccccgaggccgtcctcatgtatggctcgcacggtggcgtgtgggaagaccagtgtgggaaaggcggtggcgacatcacacaaaagctgcatgcatccgggtcgtgggcttcggagctgtgtacagaagtatctgggtgagggcccccgacgatgggtcggggatgtgttccgccgtggctaggatgaatgccagctgccatcatcgttcagtagatggagattgatgccgtcgccaccaagagattcgatgctcagacaggggccgatgagggaggttcagaggatcctgcatggagctgctggatcacgatggatggatttgatccgaatgtcaatgtcgcggtgatcatggcacgaaagagcagagaccctggatccggccctggttcgggcaggacggggtggacggtagagattgaagttccggtttcctgaccgcgggcagagagattgattttctccactatcatagaagatgaaccccctgaggggttgactggaccatttgggtgcggcgatagtttcggagcggtttactccttgccgcgaggacattgggcggaacgcgaatgtgccgttgaacatacctggtaaaggacgcggaggacccccaccaggggttccccctcacccttcgggccatacaccactgtcctttcgaaggtggtttttttgcatt

SEQ ID NO: 489382 - DNA, 422 bp, Homo sapiens
gcatagccatatcctgttcgtgtgcccaacctcgtgaccccgccagcgacgcgcagtacctgccgccgctgcacaggataggcacagctgcactggccgatgagtttgtggtaagtatctggcccaagctcaactacactctgctgattacagccctatgacgtttccagactgaacaggtatcaaaagatatgccatacgcgagtgctgaaccggagcagatggaccgacttgaggagtttcccaacacctgtaaaatgagggaggagctaggagaactatcagagcagtttcacaaatatgcagcacaattgggtgaaatgttgtatatgtctgtccctgcagtcgctaaattgagacgtcttttagatagtctctcaagggaagctttaccagacatcttgacatcaattatccgaaca

SEQ ID NO: 489383 - DNA, 497 bp, Homo sapiens
accgggagacctcacacccaatataaggggctctgcttgggattgtctgtgctccccacaaaggttgtttaaccaccggtgctccctctttccctcctcagcggcgactgcacggggagaagaaattttctatttcctatagcgtcggggtccccacaacggagggtttttttgagaaaggcgtcggcgacacaaagaagtcttgctgcacgttagcgtactcccggcgccagaacctgcgacaaagtaccgcactgtttttggtgtaaaagttgcgttgctccggtcagagcttctttgtaacgcgccggttatcatggtccaacacgccgttgttgttttctcagaggagtacgactactgggggaatacatatcctaaaatgcgaagagacgctttttttggccccgggcaaaaaacaaagggggaaaaacaatccccgggaaccaaaaggccgatttctttaccaaaaaacggcctaaaaaaaccacaagaaa

SEQ ID NO: 489384 - DNA, 300 bp, Homo sapiens
gtcaggcttagccccaacaactcagaatttcacttccttgtacgggccctcactttctccacctggccccggggcaggtctagagggtctagaagtctgttgatcgtgaaggtccataggcaaatccagtcacttggagagcctggagatatttaacatacacggcccgtgtccccgtttcccaaggggactcgatttcctcagcactctcgtccactgtaccttgcccacaccccttgggggaaaacaaatgtattatttctatttggtgaatactatcctagaaacttgctgggcata

SEQ ID NO: 489385 - DNA, 384 bp, Homo sapiens
  misc_feature (384)..(384): n is a, c, g, or t
cgcagatgaggaggccacaaagtgtctgtgccccaaagacacaccacgtgtagacacacaagctgtatttgaggagagtggtgatgtggaccatttatatggacatgatatatgtcgtggatgtatggggaatctaagagagcgtgtcattggtgtgatgctgggaggtctaacacaaacaaggtggatgccggcattcaaggggagcctgtggaatgagatacacacatatatattacaagggataatttagaccccatacaaggttatataagaggcattggtattttctgggtggtggattaatttttctgtgggcttactgagctttgtgtattacatacatgctctgaagtttctgggtagatcttttcttgagctgtn

SEQ ID NO: 489386 - DNA, 323 bp, Homo sapiens
ctcggtgctgcatgtgtgctatgtgactatgtatgtgatatggtcggtgtgtcccaccaaatctcattgaatgtagctcccataattcccatctgtcatgggagggactggtgggaggtcacgaatcacggggcggcaggagagagaataagtgcaacaggggaaatgcaagacacttataaaaccatcagatctggtgagattcactcactatcatgagaacagcatgggggaaactgctgccgtgatctgattacctcctcctggtcctgcccttgaaacatggggattatggggataccaggggcacatgcatgcaccca

SEQ ID NO: 489387 - DNA, 150 bp, Homo sapiens
ggacaaggagaacagagaaggcaggtcttgttatctagagctagacaccagctaatatcttgggaaggccacctaccttgaataagaggttgcctttggtcaatcctatcagtttgggggtaagggaaaggttttctctcctgtctgtga

SEQ ID NO: 489388 - DNA, 381 bp, Homo sapiens
tagggtcttagggagagtaaatagtaatgaaggattataaagcactttgctaatataaaatgcacatcaaagctgaataataatcttactttagggtgaagggtttccattagcagagtaaaaataaaaaggacaaagggtagtgttgctttgtacctttgataacagttgtacaaattcacaaagtgctgctattgaatcctcattgccctgtgaactctcaacccaggaattttggctccccctcccctaaacttctctaaagtacttcctcttacccactcagtgttggtgaatgggcaaccttcccttaagaacggggtacccgaggctcgaaattcggtaaattcattgggtcataagcttgttttcctgttgtga

SEQ ID NO: 489389 - DNA, 433 bp, Homo sapiens
gcgcactacggggagcgctgggccgggcaccgggcttgtgtggatgatagtgagcgcgctcgtctgacccccgtgcccagccaccccagagcacacataaacggagatctacccaaggacctgaccagaggactctgtacactgtacctcagacaccgcagacaggaaaacagtttagcactcgagagagcgacgccgaaggcgagagcgacggcagagcggaaagcaagacagaaaggaaagagaaagcacggacacacagagcacaacagaacgccagaggaagcgaagaagagacgcgacaagaagacgccaacaacaagacgacaaccgaagaacaacaaacacaacccgagccgaaaagcacacaagaagcacaaacacaaacagcgagacacagaagcaaacgagaacgcacacgaaacgaaacacc

SEQ ID NO: 489390 - DNA, 456 bp, Homo sapiens
acctggactgttggattgcacaactcctatacacagatcactctgacgggtgctgcctggagtggtacaacatggtgaccctgcacatttccttgttaacctaactgaatctatcagatagaataaacgatggagatattgacaaaaaaatctcgctcatctcccatttacccaggttatcaaggagtgaaagcctggtatctgctggtaacaggccaggtggctttagacaagtcccttttcctctctgattctcattttgcccatctggatcaaaaagacctctagaggactttccagtagtaagtctccactatttggggattccctctcgttagtgtgggctaagtcagtctttaacatctgatgggaatcaccatggtccttggaaaggagagggaaattggagaggagaacagtagctgtagatgctaacactgacagatcccaaaatga

SEQ ID NO: 489391 - DNA, 122 bp, Homo sapiens
gccggcagtgtactcgacggcagtgtacacgccggcagtgtaaccgccggccagtgtcacacgccggccagtgtaaaccgcgcggccagatgtaaaacgcgcggccagtgtcaaccgaccgg

SEQ ID NO: 489392 - DNA, 442 bp, Homo sapiens
cacgagggccgagaagagaaagttgcccaaggccgccgccaccttcagcgtcgccaggaagaggccgacgggcgtggcttctccccccgcaccctccctaagcgtccgctgcacgatatcggtcagcaatgcccaaatggcgaggttcatgccgccgaatgacgcgccaagccccaccagcagtaccggctcggcgaccgaggcgggtgcgatcatcaacccgaacatcgcggcgatcgccgcgccatgggcgccgatcgcgatcgtccgcggcgggagccgccgcgatgccgccatccacaggggaagcgtcagcgattgcgacagcgtgatcgtcaacagcgcgggtcccgcccagctgggatcggcatgaaccgccttgccgtaaaaggggagcgcacgctggaacaggggcaccagcgccgcctggaacgcgatgacg

SEQ ID NO: 489393 - DNA, 892 bp, Homo sapiens
ggagtccgattgtggagagggcgagctgagtggttgtgtggtcgcgtctcggaaatcggtagcgctggcggctggttcgctctgtacatagtcgatctcactttgcttctaataatccctgcaagggtgatcaactgatgaagagcagattgcatgaattcccagaatgctctgtgtcactatgttgacaaagatggtgaatggaactagtagacagatcgagaaggaggtgggagctgtagatgagatctcttgggtcgagaatccgcaccagaagcacgagttacacggacatgattaatgaagtagatgctgatgatcaatggcacaattgacttccctgaatttctggacaatgatggcagaaaaatgaggacacagacagtgaagaagaaattagagaaggcattccgtgtgtttgataaggatggcaatggtatattagtgctggagaacttcgccatgtgatgacaaaccttggggagaagttcacagatgacgaagtgatgaactgatcagggaagcgatattgatggtgatggtcaagtaaactatgaaggagttgtgtgcaaatgatgacagcaagtgaagacttgtcagaaagggggttattccttggtcacaattggttattgccctttcttggttggacttatctgtcaagggtctccctacggtcaaaaagttttgctgttttgtaattggccttcttctccaggtttttccttatcttagtctggtcctaacctttttgaaatggccgtacgttctgtgttccggatttacccggcttaataagggtgtccaggcaccggggcctcagaattgaaggccgtggtcaggggaccggggcatatgacggggcccacgggcagcgttggggcactacacc

SEQ ID NO: 489394 - DNA, 117 bp, Homo sapiens
gatggccgaactctctcagactacaacatccagaaagagtccaccctgcacctagtgtagcgcctacgaggtggcattattgagccttctctccaccagcttgcccagaaatacact

SEQ ID NO: 489395 - DNA, 231 bp, Homo sapiens
ggtgcaagcttgcatgttgttgctacgacccaagcagggatccccctttgcactatcgagtagtaactcccgtatggaagcccccattccgtataatgaattacatcacaagacgtcattgcacgcatgagctagtcccctacaattaggcttgaaaacagattcatttcccgaatgtctacaccaaaccactttcaccgctacacggtctatgggtaccgacgctcgaag

SEQ ID NO: 489396 - DNA, 220 bp, Homo sapiens
cctaatggaactgccgcaagactaaattttagctcaatggggaaagagagagaaaaagcgggtagagcctaatgggagagtactattatataataatttactttaggggttagcagatgcaaactacacatttagaatggataagcaatgaggccctactgtacagcacagggaactgcatccagtctcttgggatagaccacgatggaagataatcgga

SEQ ID NO: 489397 - DNA, 367 bp, Homo sapiens
tagcgatcctattctgcaccacagccacttacaaatgtgttgaatacaatgtgctcgatttgtgaatgaattgattcactagtggtataggagcaaaggattgatatcagacctaggataatacaggctgcttgagaataacctcagtctcctataatacagtcttcttggaaactggagagactaatgggggtgttgtatctgtttcccatgttgcacctggtttggagcagctattagatggcatggaggccttatgcctacgtgaccagaacaacagattgataggcaaaagaggttaaagctttcacgtgtcaaagtgtcctaaatacaccatggtccttatctagggaaggcatacatgcct

SEQ ID NO: 489398 - DNA, 383 bp, Homo sapiens
  misc_feature (368)..(368): n is a, c, g, or t
ttaagacagagtctcgttctgtcaccaggctggagtgcagtggtgcagtcttagctcactgcaacctccaactccctggttcaagcaattctcctgcctcagcttcccgagtagctgggattacaggcatgtgccaccacacccggctaatttttgtatttttagtagagacagggtttcaccatgttggccaggatggtctcgatctgctgaccttgtgatccacccgcctcggcctcccaaagtgctgggattacaagtatgagcgactgtgcctgggcccaaacagttctttaaaattctccatcctatgattaaaaagcagcatgttgttctttctttagattcagggaaacagaagtgaagtnttttgaaataaatat

SEQ ID NO: 489399 - DNA, 271 bp, Homo sapiens
  misc_feature (249)..(249): n is a, c, g, or t
gtcccgacccccaggtggtatagcttagttacactttcgtttattgctaacggttcactcactgctgtttcccgtgggggtgtggctaggctaagcgtttacgagctgcacttgttagcgtgcttgactgcttgtccccttttgatcgtggctgatttagagaggtgaactcacatggaacggggatgcttgcatgctgtaactcttactaacgagctcaatagacaaggctaggaccaacacctatcngtgaacacatctccgcacttac

SEQ ID NO: 489400 - DNA, 187 bp, Homo sapiens
tgattctgcgagcctcaagctcgaagtcacgctgcagatcactgccggaggcaacatcatcctcgagtgggcatcaacaaggacagccgggggacgaccaggcctgccggcatcgcgatcaacaccaagccacgtgaagacctaggtactggtcgagaacggcggcacggtggtgatcgggcggcat

SEQ ID NO: 489401 - DNA, 1574 bp, Homo sapiens
  misc_feature (361)..(361): n is a, c, g, or t
  misc_feature (650)..(650): n is a, c, g, or t
  misc_feature (768)..(768): n is a, c, g, or t
tggcgcacacacactcctgtgctgtgtggtgctcgccttgctgttcgcgtggtgtcgtaccaacagaacattacgacaattttcaaagggggggggtttggctccttctctgttgttttcttggtgaagagcagaacattgtttagggaagatttgggggggatagaaaaggatagaactgtggagatgttccaaccaagtgggggatttttttttgggtagtggggggcccaactttaatttatttccgtggagaagcatttttgtggagttgaattcgcccaaagtagtgttatagggttccccgcccccgctctttgattcgtgccccgagacggtcgtgtggggaccagctagtggnccccgagcgtttttgcttaatatgtcccaaactggttgtattcccgccgtggaaagatgtggccgccttgcgcgtcttgtgcgctatgtaaaatgagagggctctgtggcctctgcacaacacaccagggatagtagggtccgggcgcgcggagaaccgtcagagccctcacattgtggggacaaccgattgggccccccacccctggtgggacaaccattttaaagggggcgtgtccttcttggtggtggcttctattgaaacatgagtaggcttgtgccctcctggngtgggagaaagtttgtataacttgtttgtgggtgccatcgagcacgccacacaaaaataacatgttttacaccgcgcctcctctttcgggggtgtttctcaagcggagatatatgtgncgcgtgctgctttataggacttgccccgcccaacattcgtcgggcgccgtcgtttggagagaaattgtctcacgcggagtatacacctctctcccgccgctgtgggcccttatatgtaatattttctactctcctcacatgttaaagggtgttgacacacatttgtgtggacacacaaaaggtgggcacattttggagacaccacacttaagagggggggctccccccccttgggtggaagacctccacaagacacacaacatgtttcacacacagacacaatgtgttataaaatgggcgctcgcacttttttggagagaatttctgggctgtggcctcttcacagtggcactctcccacggagaagagacacacactgggcactctgtgcctctctctttcacagaatgccctcgaaagggagagtgtcttctgagaggccaaggtgaatagtgcctgtggagagtgatggagcggctctcccacttctggacacccgcgggcctctctctgtgggagacctctgggctccctctctccgctggagacctcggggcatttcgctggtggaagcacctgtcagcactctcctgggcacattaccctcccacggcgccacgcacaccacctggcacaacaataatagagacctgaggtggctaattgtatttttgggcttgggtgtgtaatgctcttacacattgggtaaaaattgctgtttttttgacaaattaagtgattgttttgtttaactgtaagtttggaaatccacccttaaggaaataaattcccaaaaaaaataaaaa

SEQ ID NO: 489402 - DNA, 105 bp, Homo sapiens
gcggccgcctactactactactgctcgaattcaagcttctaacgatgtacggggacatgacaaaataaaataaaatggatgattcattcttaagtgcagaaaaaa

SEQ ID NO: 489403 - DNA, 858 bp, Homo sapiens
gcgccggttccttgtggtggccgtgaaggcgcgaagtctgagacccgggcctgcacgctcgtctgtcggcgcaatgggttcgatcgctagtctgcccgcgcgctgttctcttcgtcatggagtgtcgtgtcagtgctgtgagtaacgaggcgcgtgggcggccgtccgtggcgggttgggtggaccgccctccgtgggtacgggctgcgcgccaggcgtggcgtgcgtcgacgtgcggcgatcggtagacgtgtcgtacgcgaaggcggcaaatgtacgcggatgtgccgttatttatactcttgagaactctgagtacaggatgttggccgagcgctccgctcgcatgttccggacgcagcactgctgtccgggggtcggatcagtttcgcgcggcgtagcttcaagaggctgccgtcgtgcgccgggttggtgagctggggcgacccaagggatccctgagtcttgaacggtacgcccgtagatgaggcagccgccgcgttctagcgtccaggggccggcggcgggtctaggttgggatagtctccaggagctgttcggggccctgcagcagctctggggctcgaggtgctttgagtgggcggctcgttccggacacctgttgctgggcgacacagggaacttttacacacgacttacacggatcacggggcctagagtacgacccagatcgcttgattaccgcagaacttgaggattccccgaggtcttgcagtgctcaggaaaaccccggggctttgcaatctactgtaggcctaacgaaagtggacaattcgcaagggaggaaaacccttgggaaattactcggacggggttccagggatggttgtgaactcc

SEQ ID NO: 489404 - DNA, 134 bp, Homo sapiens
ctctgggctgagtcgcgtgctgactcggatatatcttgtgctcatgggtggggacttgtagcagcaatagcactgcgggtctttaggaagtgtgattaactgatgttcccagtgtgtgtcttctttgttgatgg

SEQ ID NO: 489405 - DNA, 122 bp, Homo sapiens
tgcatgtctagagaccggttcagtcactggatagaatcatctaagctcctgtatcagcactcctcatcatcactcatctgccaaggctcctcgctcgatctggtgtacctgagctcgaattc

SEQ ID NO: 489406 - DNA, 423 bp, Homo sapiens
cgaaggctgactgcgacatcacatgcgtggtcgactgaggctcgtgactcaatgcgacataaaatggcaataagaggcatacaaattggaaaagaagatcagaaactagcgtccgtatgccacaggacatgcaggtgtatgtagagagtcccagagaatctatgtttcaaatctcctagaatgaacgaggtgagcaagcccatacgacacatggtcaatgcaaaagttaaccatatttccacatgcgagacgaacaaccaggaactggctatttttaaaaagtaacatgtacagtagctcccccaccacatgttatacacagtcagcccttgtgtctctgggttccacagcgtcagactaattcaactgcagatcaaaaatatcttgggggaaaaagactttaaaaatacagtatagcaacta

SEQ ID NO: 489407 - DNA, 324 bp, Homo sapiens
  misc_feature (18)..(18): n is a, c, g, or t
  misc_feature (33)..(33): n is a, c, g, or t
  misc_feature (55)..(55): n is a, c, g, or t
  misc_feature (67)..(67): n is a, c, g, or t
  misc_feature (85)..(85): n is a, c, g, or t
  misc_feature (91)..(91): n is a, c, g, or t
  misc_feature (175)..(175): n is a, c, g, or t
  misc_feature (195)..(195): n is a, c, g, or t
  misc_feature (216)..(216): n is a, c, g, or t
  misc_feature (256)..(256): n is a, c, g, or t
  misc_feature (260)..(260): n is a, c, g, or t
  misc_feature (275)..(276): n is a, c, g, or t
agaaaacagtctttctgngtatacctacggatnagggtattatttaaactgccancaatatccaagncatggtcaataacctaancataantactttagaaagagtgaccaggccatgtatagaaatgtctgcttactgtagactttaaaaacaaacaaaaaaacaaacaaattnttggagcatttaatcatttnttttctccttttatctccttntgtaatcttattgtctcctgagtaaatatacacataaatntttngggattcattgctgnnagattatatcaggtgtttacatagtgtctactatatgctgttgataag

SEQ ID NO: 489408 - DNA, 1024 bp, Homo sapiens
aaatgcacggaagccagactggtctcaggagcggctaaatgcccttccgtggggatgtcgtctttctgagactagccctgctgtttaggacctgggtaccacaatgagggtacctgccgagggagtgtccccaaaagagatccacgactgatcatgtgatttatgtgtggcactgtgttcgtgtatttgtcggctacttgtgtcttgaaatctagaattatttcacgccacaaattggtcactgtgtatggctccatgggaagagtagataatggggcgtatatggcaaggcccaggtctatgtaggtttctgtgttccttgattcaccacatattagaacaattgaccattataagtgttctccaaatcacctgttggtgcctaatcacttaagtcattaatccattactgtagtatcttgtttgaaaattgtgacatatcttatccgtgtggtgtggggcacaagggagtggtcgttcagacgttgggttcatagttcatttgactgtggatgtacacaatggatacaggcttgacagctttgcatgctcccctttctacatggtggctgcatatgcggatgcaagcgcacatatacaaggtcccacctagcaaaagtgcaacaaataagataaaagaaacatagcccaaattgagaaaacacaagactcgagggaaatacccactgtatacagcgaacccacacgccacctaccgagacctcaggctcattggtacaaaacatccaacagcctaaccacaccgacatctgcaaccagcgacaacttgaacgcacccacctcacacctacgactaacaaccacccccaacacgcctcaccacgcaaccctcacacttacccatcacccacaccacactccaccctccacaaacataccatacccccaaatatccccaaacacaccccactaccacactcccacacctccccacatatcactcaaaaacaactccccccccaatccacccgtcacaaaccacacaccacatactctcctcatc

SEQ ID NO: 489409 - DNA, 83 bp, Homo sapiens
tgcaaaagacattggaggagcggggtacggtgactacgactactggggccagggaaccctggtcaccgtctcctcagcctcca

SEQ ID NO: 489410 - DNA, 110 bp, Homo sapiens
tgacagacaaagatcagtgttgcacggtcccagcagtccattggatcccttagactcaagctaaggaatgggagtgcaaagggttccctgcctcacccacgcagctccca

SEQ ID NO: 489411 - DNA, 285 bp, Homo sapiens
acaaattctcccacctcagcctctagagtagctgatactagaggtgcccgctaccacagcgcactaatttttgtgtggtgtgtgtgtgtgtgtgtgtttgtagagacagggttttgctatgttactgaggctggtctcgaactccgtgggtacaaccaatcctcctgacttggcctcctaaagtgctgggatagcaccacgcccagtccgctgctcttatttatagtctacccagtgatgtgtccttacagtcaggtgatccagtacatcaccagatagtctctg

SEQ ID NO: 489412 - DNA, 990 bp, Homo sapiens
cgtcatctactctaccatctttgcaggcacactcatcacagcgctgagctcgcactgatttcatacctgagtaggtcctagaaataaacatgctagctttattccagttctaaccaaaaaaataaaccctcgttccacagaagctgccatcaagtatttcctcacgcaagcaaccggatccataatccttcttaatagctatcctcttacaagcaatatagctctcccggacgaagtgaaccagtaaccaatactaccaatcaatagtcatcattaataatcataatggctatagcaataagagtaggaatagccccctttcacttctgaagtcccagaggtggacccaaggcattccctctgacgatccggcctgctttcttctcacatgacgaaaaactagccgcccatctcaagtcactatatccaaatctctcccgtcactaagagcgtaagccttctcctgcactctctcaactcttatccatcatagcaggcgagcccgaggtggattaaaccaaatcccagctacgcaaaatcttagcatactcctcaattacccacataggatgaataatagcagttctaccgtacaaccctaacataaccattcttaatttaactatttatattatcctaactactaccgatgcctactactcaagttaaactccagcaccacgaacctactatatctcgcacctgaaacaagctaacatgactaacacccttaattcattcaacctcctctcctaggaggctgcccgctaacggtttgtgccacatgggccttatctgaagaatcacaaaaaatagttcctatcccacatatagcgcatacctctaacttttttactagctattatcactaaaatatccaattaaagaaaagggtgggttaaaccccttccctggctaagagcgatcctctttaattaaaaaaggggttcggccccttaggggataggagagggatcacaatttctaaac

SEQ ID NO: 489413 - DNA, 1326 bp, Homo sapiens
agcgggggtcgggctcacgccatctgtaccccccccatcgccccgtcacacagccgagtcaccttttccctttctacactccaacaatatatgagcagacggggaagcgtgatcccgggaccgcaagacaagccgacgcagcaccacagcggaccagtactccacgacaccacagtgatccaccgcgagggacacgcggcagaacagggaccaccccacagggatacagggcaccgcagcaccgacggaacacacgccccggcagccagtcaggaccaacaaggactagctgcaacagagccccgccagacacgcacggaccagcagcggacaccagagagaagagacgggaggaaagcagcgaagaaagagaaggaagggacgcgagagaggcgggcagggcgaggcggaaagcagagactgccaggaaacagaggcgcccatatgaggggagcacgagtagggaaagaagggggacgccgccgaggagagcacagacaacaggcggtagaagaggagcacaatgccaggcgaacacagcacacgacacgcagaccaacacgcgctcaggcaggccacacgtcgagacaggccgcggacaggcccagctacacaccaggctagcgcaacgcgaaacagaggagcgtcagatagagagggaagcacagcagcacgacacgcacgacagcactcactaggcacgcacgagccaccacagactacacaccagaacagaccaagacaggaacgacacacagccgccagccgcaccgcacgggccagcggcgaacccaccgccagagtccacccaccggcgccgccgacgcgcccgacgcagacggagacgggaggcgcacccagcgaccgcacacctgcaacgaaccacacagacgcacggagcagccaacgacagccgacaccaccaacacaaacagctacatacacagcacggacggcacaccagcactacacacaacacgacgcgcacgaccgccaggcggacggagccaagagcgttacaccacccaagcgaacctgaccgacgaaccacgcggtcacagaccataccgagcaaggcaaggtgggcggggagcgccagggcgctacggacggagcgccggcgagcaggaagctggggcgaaggggggacgcggcggggcacggactcaaccgccgagagcgcgccgggacgcagccgcgcggaggccagtcaccgccggcgcacacgagacacgccacagcacgggaccagacgagcaggcagggccggaacagcgagtggccgcaggcgcgaccggcgcatcagacgagcgggacgcccgcggg

SEQ ID NO: 489414 - DNA, 116 bp, Homo sapiens
gtgaccgaagcatgggacgagaaccctggctggaggtccatctagccctctgcggaaagccaagcgagctcgcctctgctcctccagcagttcggacacatcttcccgaagcttct

SEQ ID NO: 489415 - DNA, 425 bp, Homo sapiens
  misc_feature (414)..(414): n is a, c, g, or t
cagtagctggtttgccttattggacctactatatttatgttgatttccaggtgtagcaagtgcatgagcatctaaacaagggtaggaaaaccagggctcatgggccaaacctggcccccttcttattttgtgaataaagttttattggaatgcagctaagcccatttacttatagactgtctaatggctgcctatgtaccacaacaggagaggtgacaggtttgacaaaggccatgtagccgtaaagtgtaaaatacttattacctggttcttgcagaaagaatttgcccacccctggtctacagcaactctgttgcaggtcaagtaaaggtaggtcatttcactcagtaccacaattcaataaaaaaaaaatcttctgatattaaagtaggctatccctcaccctccaaatanaaaaacaaaaa

SEQ ID NO: 489416 - DNA, 249 bp, Homo sapiens
  misc_feature (52)..(52): n is a, c, g, or t
  misc_feature (146)..(146): n is a, c, g, or t
  misc_feature (183)..(183): n is a, c, g, or t
ctggtctcgaactcctgacatggtgatcctcctgccttggcctcccaaagtnctgggattacaggcatgagccactgtgcccggccaaaatagagttactttaaatttaagtagaaaatttaaaattgttaattgccacattaagnaaaggtttaaaaaaggtgaaattaattttaataaaanattttccagtatattcagaatactattttcaacatgtaattcaacataaaaaatggttaatgaggt

SEQ ID NO: 489417 - DNA, 216 bp, Homo sapiens
ggtcaccgctttcagttcagtcgtggcaccacatctctcacctaacctgctacaagagtctactgctggttatgcttctccgaccctgcatctactgaagcctttccccacagcagccagagaaacttttcaaaagtacaaatgtgatcaagcaagtcactattctatttcaaaccttcaattgcttctcagagcacttaaaagacaaacctttct

SEQ ID NO: 489418 - DNA, 175 bp, Homo sapiens
ttgacaccaagcgggtggtattctgtcattttatagctgttagccccgtaccattgaagaaaaccaggactcagcttcaatcattactttgcggcggtcttaactgtaacaactgggttggagggcatgatggtaaggtgagaggcatttgatgggtagcgatggatgacctgag

SEQ ID NO: 489419 - DNA, 360 bp, Homo sapiens
acctgaggaccacagctaatatacggaccatcccaagacaactacagaccgtatctcatatgaatatagatgcaaaaatcctccacaaaatactagcaaacctaacccagcaacatattaacagaattatacaccatgagcaagtaggaattattccagaaatgcaagattgtttaacatacaaaaatcaatcagtgtggccgggcacggaggctcaccctgtaatcccagcactttgggaggctgaagcaggtggatcacttgaggtcaggagtttgagaccagcctagaccacacggtgaaatccatctctactaaaaatacaaaacatattagctggctgtggtggtgcacacctgt

SEQ ID NO: 489420 - DNA, 918 bp, Homo sapiens
aatgtggtcccccgtatcgcccgatcttgtgggaccccggttcccccctgtacgcggtgaaaccccccgcccccggttagtcgtggtgtactcgccgcctcccccttatgtgggctgctatgtttgtccgccaattgcgtggaatggactctgggccccagctcgtaggctattggttgccgcgtggtaaatcgcggctccgccctataacgttcggtgttctgcgcagagccccttttatgccgaagtttctcctctcttccgcggtttcctcgcgcaaataattccccccgggggaattctcgcgccccctttcagcgcccccgggggagattactaaaaaatatcggggtccgctcaggagagccagccaccaccctgtgtaaaactaatgtgtgtgttggttgtcatacaaggcttgttctgagcgccccctcgagtcagttcacagacgagtaattaactctctcttgttgtgtaacacactactaatacttgcctgggtttgtcccgagacctcgtttgtcgttgttgtataaaatatattagttatccatacaaagaaaacaaacgttgtgtgcatctagccactcggcctgaaatttccccgcgggcattcaccggagcgctaccaggtggtagatactttggtaaaccacacggctgtcctcccggttgaagcatgctggttccttagaggtgtcccgataacacggggataagagacaacacactttggctcgcgactttcgagatcaccacaggaataataatgaccacactctcgacagtattgtctttcggttgctcaattttggtttctatttttatctctgcacatacagacccacccactacgttccccccattgtgaaaaaaaagatttctgcgcgaaaaaaaaaaatttttaaaccccca

SEQ ID NO: 489421 - DNA, 432 bp, Homo sapiens
  misc_feature (186)..(186): n is a, c, g, or t
tcagtcagtatagcagaactagagtcggagtgacattagaatggcacggcaccgctatatcccaagctgggtcctcggtaggttacaggagtcactactagtcactatccgtgaaatcttagaatatcctctttgtcatcacaatatcagatatctactagagccctgcttcagaattcttacatngttgttggtgatgcctagatcgaatgatttatcccatctagcactactcgcagcttctgtgaatttctaagttcagggtgaggctgtacttatacattctataataacacacagactcctactgtactagacgagagttaagagtaataggtccattaaaccacggaaagtccccgccttgtttgttgactgacagtcttgtcttcccctctaattccttcagctcttggacaccggttccgagct

SEQ ID NO: 489422 - DNA, 1133 bp, Homo sapiens
  misc_feature (173)..(173): n is a, c, g, or t
  misc_feature (257)..(257): n is a, c, g, or t
  misc_feature (381)..(381): n is a, c, g, or t
tttccaccctgggccccaatgccgtcctttcctccgcagagactggtcttggaaagcctcagcaaactcagcatccaggacaagaatgtggacctgattactagggccacactcccgccttcaggccgcctgtgtgagtaagttgtatagcactatggtggcgcttcctcagntgaaccgagggagaacgccggtgtgccgggagatgggctgtggatagctgcatggacacatagccatggtctcaggggggacangccctggcaggcgtcgctcgctcgattggccaagtgctataacgggctaggtatcggtgtacaccgtctcgtgcggcttcctctaagacgcgacgatgcgcgtcttgcccgtcgacacgaggtntcgcagcgaggagcgcagcggcaagacgctcgcatcgcgatcgatagcaagagacgcgcaacggccttgggaatggccgagagcatacgttgtagtgacgagtggagtgcctggtcggagtgcttcgccccgtcggcggctggcatgtgccccttgggcgcaaatggctggacggcatgcacgcacgtcaggacgtttatcatctggtgacgaagtcgacgggcgtgtggggacgatcgtcgcgtatcaccggtttgatggaactacacttggttgcacgaaagtcatttcgtggatgtactggttctcgggattcggccagtcagtgacaggccgtgggacagctccccaccctccgtgctgtgtgtgcgtgtgtggatgaacttagaaactgactgttgccctttatttatgcaaaaccaactcagaatccagtttaccctggtgctgtccagcttctcccttgggagcccaagtctctcctggtgctctcgcctgcgtaaactgcgccttcctgcattaggttggggccttctggtcccggtcctcgcttagtccgctagggaccttacccacctctttgttaagacaatggctgccgtaacgttaacacctttgtagtttaaccaaggttccggtggtccggacctgggggaaccacaactagaacgcgtcccaggctgtgtaacggtgcccttaacatgttcacggacgacacaaccgagaccaccgggttttgggggcaacaaaga

SEQ ID NO: 489423 - DNA, 303 bp, Homo sapiens
gttataggaagataaggcgttcaagcagaaacaaaaagaggagcacgaagaaactcgaggagctaaaagcgaaggccgcggtgacaggggcccttagccacaggtgggaattaaggaaatctggcaaaaagtaagctgttccttgtgccctgagtgagatggtgaccccgttatttcatctagtatttaaagcctctctattccctgccataacatcttttgccacgtattagcgtggaatttaagtagtcgtctttgggaattagcttgctggggtaaccgaggctcgaaattcggtaatcc

SEQ ID NO: 489424 - DNA, 244 bp, Homo sapiens
aattcaaaaggaacagaatgatgtcgcctggaaatgcgtgtcctgccccatcccaggactcagggtcctgcacctgaaacggccttgcagaagtcctgtcagtgagacaattagaacaccaacctaagctaacccagcccccatcctgcccttcccgttaattattcctgggctattgggccaagctaacttggaagacatttaggctacagtttaaatgattgataataggccttgccccaaa

SEQ ID NO: 489425 - DNA, 255 bp, Homo sapiens
actttgagaggccaaggtgggtggatcacgaggtcaagagatcaagaccatcctggccaacatggtgaaaccttgcctctactaaaaatacaaaaatcagctggcatggtgcacatgcctctagtcccaactcctcgggaggctgaggcagaagaatcacttgaccctgggaggaggagattgcagtgagctgcgatcatgatgctgactcccagtatgggctccaagactgagactctggctcaaaaaacacac

SEQ ID NO: 489426 - DNA, 1028 bp, Homo sapiens
gcccaggctggagtgcagtgggccagtgtcgcctcacggggacctccgcctcccaggttcaggtgcttctcctgcctcagacgtcctgagtatctgggacgtacaggtccatgcctaccacacccagtctgatttagtatttctagtagagacatggtttcgctattttgtccaggctgctctcgaactcctgacctcaggttatctgttcccacacggcatcccaaagtgctgggattacaggcgtgaactaccgtgcttggcctctgtgtacttctttcttgtctgttattcgttcttcgagatggagtttcactcttgtcatacaggctggagtgcagtggcgccatctcagctcactgcaacctctgtcctcctgggttcaagcgattctcatgcctcagacctcccaagtagctgggattacaggtgtgcaccaccacgcccagctaacttcacgcatccaagtaaaagacagggttacaccacatggtcgggcaggctaggtctcagaaactccttacccctcaggtgatctcacccactatcagtctacacatagcgctgcgaattaccgagctgtgagacaaccgacacctggcaccatcgtccctcttcacccagataaacagtcccgcgttatcaacgtacaactcttccaacaatgatcactccttcacccagataatatccaggctcatcacaaaaccacaactcggaccacacagcatcgacgcactgatccatagaacaacgtaccctgcccgacgagtcaacccccaacacagcacccccgccctcacacccacacccactacaaataagccagaaacacccgcactcattccccctcccacccgaaacgcataaaaataacttactgtttcacctagacaccttcacccactcaacaaccaccgcaatttctttcaccacccgaacacacaaccactcaacccaccctaccctatagcactctcccaccaccacaccacctacccaacaaccaacaatgcactcttcaccac

SEQ ID NO: 489427 - DNA, 280 bp, Homo sapiens
  misc_feature (120)..(120): n is a, c, g, or t
acccagcgggccttgcttttcacaaaggctgagtcttaactgcacccatattttcctggccaccggcagcctggggcgggtgttgccatgtcacagcatgcctctcgccttggaaggaancagtgcctgctctgctgtgagccgccaggaaccctcctcctgtcaatgggggtgtagtatttttgccaaaatatcatgttcaatttcagtagtttgatcagttgaaggctagaagtgtgaagtgcagatgagtgtgtgttcttctgcaaggaacccacgg

SEQ ID NO: 489428 - DNA, 915 bp, Homo sapiens
atggcacatgcaggcgcaagtcggtctacaagacgctacttcccctatcatagaagagtttaatcaccttgcatgatcacgccctcataatcatttcccttatctgcttcctagtcctgtatgcccttttcctaaacattcacaaaaaaactaaataataataacaatatctagacgctcaggcaaatagaaaccgactgatctatcgtgcccgacaatcatcctagtcgactttcgacctcccaatcccatacgaatcctttatatcaaccggaggcagggcccacggatccctccgcttaacatcaaatcaggggcgccactagtggtaacttgaacctacgagtagaccgactacggcggactattcttcaactcattacatatcttatccccatctattcctagacatccaggctgaactgagtactaccttgaagtagacaattacgaggtagatactcccgatttgaaggaccccattgcgtattatgaattatacttcaaaagacgtcttgcctccatgagctgattcgccacataacaggttaaaaactagatgacactccccggagtactaaatcagaacaattaacgctacacgaccgggagaaatataggtcaatgctctgcactccgggagacaaccaagatacatgcccagccgtccagaatacgtcccctagactcttgcataggccgaatttactatgaaccataagcgtagagcaaaaaaagcaggcaaaaagtggcgctacgcagcaaagatccaacactatgcggggccgggaggaagccacggcagagaccgaccaaggagtcacaacaccggacagtgaaacaaggggagggtaagacgcaacagcgacgcgaggaaccgagggagaacaggcgcagccaagggcaccaacggag

SEQ ID NO: 489429 - DNA, 406 bp, Homo sapiens
  misc_feature (338)..(338): n is a, c, g, or t
  misc_feature (360)..(360): n is a, c, g, or t
tggaacttccggggtttatatagctaaagcaatcctgagcaaaaagaaaaaaactgaggtatcatactatctgacttcaaaatatactacacaaagctatacttaccatatatagctttatgagactggtataaaaagacacatagaccaatggaatagaatagagaattcagaaacaaatccacgtatttacagccaactgattttcgacaatgatgacaagaacacgcattgggaaaaggatactctcttcagtaaatggtgcttggaaaactggagatccatatgcagtatgaaactagacccctacttctcaccctatacaaaaatcaactcanaatggattagacttaagtgtangacatgagaccacaaaacccctagaagaaacatagtgagagatgct

SEQ ID NO: 489430 - DNA, 848 bp, Homo sapiens
gcgcgagcctggagcgcggttcgaggtgggcagcgccgccttccgccgcacgccgccccgtcgctcactccggtcggcggccagagtgccgtgctcgcgcttgccacactctcgcagccaacggtgcgcccagcggccatgaccgccgaggagatgaaggcggcggagaacggggcgcagtcggcgcccctgcctctcgaaggagtggacatcagccccaaacaggacgagggcgtgctcaaggtcatcaagagagagggtacaggcacagagacacccatgatcggggaccgagtctttgtccactacactggctggctgctagatggcacaaagtttgactccagtctggaccgcaaggacaaattctcctttgacctgggaaaaggggaggtcatcaaggcttgggatattgctgtggcaaccatgaaagtgggggaagtgtgccacatcacctgcaagccagaatatgcctatggcgcagcaggcagccctccgaagatcccccccaacgccacacttgtatttgaggtggagctgtttgagttcaaaggagaagatcttacagaagaagaagatggcgggatcatccgcagaatacggactcggggtgaaggctatgccaggcccaatgatggtgctatggtggaagtggccctgggaagctaccacaaggaccgcctctttgaccagcgggagctctgctttgaagtcgggggaaggggcaagtctagatctggcctgtggggctgggaggaggccattagggcctggagacagaggagattccattggggtactaaaactagtatggcttagggaggttgggacaggaggtcccaatccac

SEQ ID NO: 489431 - DNA, 207 bp, Homo sapiens
tctcaggagactggggatgattgaattacctctgtacgaggttgtaagtcatctatagaatccaagtcattgtgcctatcatttttcaccctggtgggttgggaaactcatggtgaaatgatacctctgcccccaaccacccttttctctggattcttcttgcttagttacatatgcctttttcctgccctcttgctaacatgtgct

SEQ ID NO: 489432 - DNA, 306 bp, Homo sapiens
gagggtagccaggccgccattgccggtcgtgcctgggccgttgccgccggcgatgacggtgagcattccagaagcatccaccttctgcacgctgccggtgaacgcctctgcgatgtagacgctcccgtccggaccgatggcgagatcctgcagactgttgaacggattggccgccagcgcagagcccggcacgcccgcaccgtagccggcgaacggcgcgatgatcccgtctggtccgacgcgacggaccacgtacggtgacgctccacccgcgacgttcgctgcgatgtagacgtagcctgcggc

SEQ ID NO: 489433 - DNA, 299 bp, Homo sapiens
aatcatattgattaaatgatgtgtgagatgtatcacattttcaggcactgtgtaattctattgtaatacactggcaggtctctttgtacctataaatagtgcatgctcagccatgtacactgtaaatagccttataccaaacgtgttagacaaggaccataattaacatcacttcgtgcattgtgatacagaacaaacagccatgatttattcgatgtgattggcttgtttttatgtggcgccaagaacgaacctgtttaacagctgtaaccaatggtactgatctatccatccaatgt

SEQ ID NO: 489434 - DNA, 227 bp, Homo sapiens
gaatttaaatgagaaacagctacggagatcacataattttgttcggcctatgttaggtactccatgtttgaaaggtaaagtgctagtcagcaagcagtctcagaaaaacaaattatttacaatttcatttcgggaaattctacgagaaaactggacagtgactaagtaaagatggccacactggcaactggaccatattgcaactatttaaaacgggacggcactta

SEQ ID NO: 489435 - DNA, 396 bp, Homo sapiens
cgggtgagtgagtagaaaacaatgtttaaaacattcttcagagtgatgatttctaatacccccctttcctctggggcttttgaactgtattaaagggggatgagggataatgtttataagtcaaacataagatatggtacattgggaaaatatctcctctgggggtgctaaaaataaattaagaacaggtagcctgggcaaaccaggaagcaccaaaccccttttcagtgagaactcttctttgacaggtgtgagaaagtgtgcatctaacagacagcgcagaacacactgagacttgaatcaagacagcaacagagcaaaataaaggttagataagtccgggtgtagcaaatttcggagcataagaaataaaatctaataaattcttaggggatc

SEQ ID NO: 489436 - DNA, 264 bp, Homo sapiens
tgacccacaaccgctgctaactagtatagaggctgggtttgaattggacgaggctcctcgcctccgagcacagcgcgctctgagctgccccaggatcctcccccgccgccagcagcccatttggagggaggaagtaagggaagatggatgaggaaggggatgcctggaccgactacccagacagagccggtgaatgggtttgtggtgacccgacgtcttacccaaccccttgtttctttctactctctctttcttacgtaacta

SEQ ID NO: 489437 - DNA, 204 bp, Homo sapiens
gatcaccaaaatggcaatctttatataaggaccaatggtgaacctctgctctatctcagtcgtcacacggtgaagcctcgagacctctccacatttctattcggctccattcgaggtgcagcccccgatggctgtggacacccggggccgcagtgcgctcacatctctcagccggactcctgacccatctgatgcctgcgcttg

SEQ ID NO: 489438 - DNA, 843 bp, Homo sapiens
  misc_feature (322)..(322): n is a, c, g, or t
  misc_feature (834)..(835): n is a, c, g, or t
  misc_feature (842)..(842): n is a, c, g, or t
gagcgggggccagtcgggacagaggagacaagatggcgctgcgggcgatgcgggggattgtcaacggggccgcacccgagtctacccgtgcccaccggtgggccggcggtgggagctcggggagcaggcgctggactacgtcagtcggaactacctctcccaagcctcgcctcgacatacaagacagtatctgggagtcagatggtccactagtgatcttagatcatgttaagtttcccaggtatgcctgaaattgtccatttgaccttaccggattggcacaaagagaagtgggcaagttctggaagttagtggttccaanggcagtagttcaggtatttgaagggacttcaggtatagatgctaacgaaaacgtcctgtgagtttactggggatattctccgtaatcaccggtgtctgaggatatgcttggtcgggtattcaatggatcgggaaaacccattgacagaggtcctgttgtactggccgaagacttccttgatatcatgggtcagccaatcaagcctcaatgtcgaatctacccagaggaaatgattcagacttggcatttcggccatcgatgggatgaacagtattgctagggggcagaaaattcctatcttctctgctgctgggctaccacacaatgagattgcagctcagatctgtcgccaggctggtttggtaaagaaatccaaagatgtagtagactacagtgaggaaaattttgcaattgtatttgctgctatgggtgtaaacatggaaactggccggttcttcaaatctgactttgaagaaatggtcatggacaatgtctgctcttttgaacttggnnatgaccna

SEQ ID NO: 489439 - DNA, 210 bp, Homo sapiens
aagtggtggcggaggtcgctctacgacggctcccctagacgtccactctacaccaatcgtatactcgcatcgggagtatcaatcagcggagctcaccatagtctaatagaaaacaaccgaaaccaattaatgcaggcacggtttattacaagtggggggggtgtctcatattttaccctccctacaacgcctcagacgtacttgcgagtc

SEQ ID NO: 489440 - DNA, 870 bp, Homo sapiens
ggctcagaattggggacgctctcagctctcgggcacggcccagttccttcaaaatgtctatgtcacgaaatcctgtgcaagctcagctgtgagggtgatcactctaacccccaagtgcatatgggtctgtcaaagcctatacaaacttgtgattgctgagcgggattgctttgacccatggaaacagccatcaagaccaaagtgtgtgcatgaggtcaccatgtgtcaaccatttggaccaaccgcagcactgcaccagagacgaggtatatgggccttgcgcctacccagagaggcggccaaaaagggaactgtgcatcagacatgaagtcagccttatctgccaccttgacggacggtgatttgggcctatgtgacagacacctgctcaggtatgacgcttctgagctaaaagcttccatgaagggggcttggacccgagcgagactctctcattgagatcatctgttccagaaccaacaggagctgccgcacatacacagagtctacacgtgacttgtacacacgacttgatcgtgcaacggacattcattccgggaccccattcctggtggactttccgcgaagctgcttggtgggcccgccaacgggtagaacagcacgcgagtgaccgggcagtgacttatgacggtgaccaagcagcccggggactttatgacggcgggtgaggagacagggactgtggccacgggacagcacaggccgccgcgcgcgtccaccctcaaaagcttgtggcaaacaataccccctataaatggggcagtcgaaggggacgccacgacagccccgactggagtcacacccgatggcgcgcgacacgaacggcgagccctactccgcaaggcgcca

SEQ ID NO: 489441 - DNA, 357 bp, Homo sapiens
  misc_feature (165)..(165): n is a, c, g, or t
ccccgagttggagtctcactcctgtcactccaggctggcagtgctagtgggtgtgatctcaggcttattgcaacctctgcctcccgggttctagcatttctcctgcctctgccttcccttgtgctgggattgcaggcatattctaccatgctgggcctgaacatnatttcaagaggaggatttatgataccattttctgtcatctaatgattggtgtcattttcccatttgccaatgttgtctcacttcccagaaaattagggagcaagaactggataattccttctacggcgcttgctagggtttcatgtgttccttataccccttcttcatgcaactctcaaagtggggtccgta

SEQ ID NO: 489442 - DNA, 1433 bp, Homo sapiens
gactcacagagaagcacagatgcaatacctagacgtagaacttgataccagagtccacaacagcctaatggtgggctgccatcaattggatcctgcctgggaggaggacttgaggtggcccactttcattgctcaagtatagaactaaggcgatcaaataggacagggaaaaaacatgtgagttagagtaccccatgaaatgttgtctgctggagggccgttatcaagcgaagcaatcgaggcagcacagaagggcctgcccagagatttggatgggttgtgcctctgcatgcatattaggatcttgaatagcttgacatgagtataaggctaattacagttggcctagatcacggggccaaatatgaaagatagtaggcgatccttgtgattagatcacaaaaactagaggttgaggatatcactccgttgcgagatcgcatgggagcgtttaataatcccttcacagaaagagtaaccttagtagccacaataggaaatttactccttagaaaaagaatgattagcaatctctatgcttttgaccagagatgcactaagctggagtagagaagagtctcttccaaaaggaagacgagcaaatggcggagtacgtgaccgtggatacaaatttgaacacgacgggtgacttcccatgacgtaatatccacttgggtcaaaggcaaacctgggattttaccacaataaatagcgctggacaccgaacaaagagggtgcggaccacatgcatgaagcgtaatagaagaggcccactttttatttcccatgacaagcccgttcattgatacaccatacttaccactttggaactcggtcggggttaaacaggaacattggcgacattttcggacggccaacaaggcggacggttcgacatgcactgtggtttcaattccttcattgattggaacaacttcatcaagaaaaacttacgtccctggggaacggaactcgcgttcgcataaagtggacacgccaaaatctggaacatgtcactcaacgcgcccctttggacatgggggcaacggatctaaactcaacatgcggggtacacaagcagctctcccctgggttgacgccacaggaaacgcgcacattacaccaattatctggggtaggcatcccccaaccaaggtacaagggtgacctgttacacaggctacttccctagtggcgctaattacccttgggtgtggccaagggagctgtgacatgggcgaactcaccagaggagcattaggcgccaccaaagcgatatcttcccggatggcatatagaaggcgggctcaagaaggcacgctaatttagcggtaaaaaagaacaattgccgcgacagctcaacatgagggcacatgaactgaagagaacaccaacacaaaagtgatacaacgagaattggaatgaaccaaaca

SEQ ID NO: 489443 - DNA, 111 bp, Homo sapiens
ccatacagcacactcgcgcgtcgcgcgcgcacacacacacagtcaccttcctccaccctggtgagccagcccccaggaggagtcttttcctctaaccaccctgtgtggtcc

SEQ ID NO: 489444 - DNA, 3670 bp, Homo sapiens
  misc_feature (254)..(254): n is a, c, g, or t
  misc_feature (595)..(595): n is a, c, g, or t
  misc_feature (617)..(618): n is a, c, g, or t
gtaataagccatttatatcagaaaccttttttcctgccacagaagctttaaattttcccctaagagtacaaagccaagagagtgtggtttatctaaatgtcctgaaatccacttgtcattccttaatttctcctctatgcaattaaagagaaaggggaaatctataacatttcttttgcccaagtgacacaaaaatgattactgcatagaaatcaaatgtaagtttagcttctaaatgaaataatatatagganggatatcagaatgtctagatagagaaagtattttcaaattcttgaatatatggatgctattaaaagctgctttccattgcctggaaagagagcttttttccctcctctattcagtgtttcaaactttggtcatctcaaattattgtcacttttaaaatgttaatgtcattctgagcagaaatagatatattttcagatttttttacactgatgctactccgtaattgcttaggagtattgtccatcatagtattttagaactagaagtaaacacataaatccttataaattacccaatccaactttctcatattgcatgtagagaacctgagacacatatnaaagtctagaatccttaacttnnccccatttggtttttttccgcctcataacaccatgctgcctttccctcatatgatcaccaagccagtagctgagttcaaaaactacatatttcttgggcagtcctctactggtatgtgatgccaactttgatttctttcgaagataattgccttctttgcctagccaagcagccaattttatgggagaaaagcaagttatatgttcacaagaatggaaggctttctacctaaatttattctcatctgtggtcctcttattctcttccatggcttctgacatacagtggaaaaacttggccaacgatgtgctctacatatagtgcttgtgtcgggttaacttttccattaatttctcaacatcaattattcaggcccctacagttgtggtattgaggcccctaaaggcttctgcctttcaccaattagtgctgccagttactgaggcttctcccaaaaggtatcagtccagtcttaaagatatttcattgtgaaagaagaaactaaactatcaggcctcttttacaaaatgagagattgaatttaagcttgtcaagcacgtactggaaggtatgaattacactaccatgtgttttgtatcttccctttcaagtgatgatgttaaatgaaggtaagtttttcatccttttttaatttttgttttttataaatcatttcagctttttctggtttatagaggtgtcttatttctaatgcaacagacccccaactttaacagatttgatatggatgcatttattcacaagcaaccccaaaagtccaaaaatgtaataattttgacaaggcccaaagttgagatgctatgaagcttgtgtgtgtgaaaagtcagttatgattgtctggagagaagctgtggtgtgtatgctgtagagtttccacatttcacatgcagtgtactccaaaaagcgggtttgggtcaaccatttcccatctctttttaagaagtgactgctgttggggccaggggacatcatgggaggtggggctgtccagttagctgtgccctgcaccttcagcccaggaaagatttgaacagagcaaaggcttcaagagagggcagaatgtattcggcagaaaagggactcaggtaagcccagcctgggatgagagcagaaaagcattcaagatttgcaggccttgctatggatgcgcttaatcaccatggaggccagcaatacccatctcagcatggctttgatattctctacttcctggcctttaaaaatgacctataatttttcagtttgctttactatattttataaagaaaattctatcttatggttgattgagcattgagacttatgaaggcattaggatagatagctcaggaatgtaaaggttcagaaaaggtctgttttctcagattaacaaatatgatggattccatggctgaccttggtgcttaaaccaggaggtttcaatctagtcctagagttgtgtccctctgaaaggcccaatgccatgtaactaactttaaactggatatatactttgagccttacttaattcacagataagttgacttaactcagtatttttatttcaattaatgaaaacagtcctcttttcaaccccaggttgcttacattttgctggtctccccaagtgaccattggtggagaccaattaatgaaggaatgaaattcactttattgggactgtggtattcaacagagccacacttaaccactttttccaatgaagaatctccagaatgataatgcccaaatatggatggccaagaagaatttgtatctacggtgtgctttatgtgtttttgacactgctgtattctgtgtgatcaagtgatttgcagctggttccaatgtgactgagtgttctcaaagatttctagtaactaagtcaacttaattttcttaagcctggtattactatcagcctcacatttaccactttgattctagttttttaactgttcataacagggcataccgagggttgggatgagagcctacttcctacctcttaaggcactttcctcattattttgccatataatcttgaactgcatgataagctgtttaaatgtccatgacttctcccagagcaactagcaaagtatatgacattttgaatagagattagtggaaaggaaaatgtagagatttaagttcagaggtacaaacctcaataaaacctccttagagcacataccatgagtagagtatatgtaaacgtatatgagaagagagtcgctataatagtcctctctaagtagattagttcattgtctaatggaagtgaacatctttactcctgttatcaccatagtactgaatgaactgtataatgagtttttcaaacaagtatttaaaatagaactttcacgtacaaagcaagggcataaagattttggtttgtgtttctgtaagtgtagtttaccatctaaagctttggtttttaattttaaaaaaagcttcaaggtattgccattccttagcatccttattgattatgggtgatgagtttttaactcttaaaatcatatacgtgtattagtttatcttaactgttgccctaagcaaaagggaaggtatacacctaagggatgtacttattttgcatttttggtcatgggtgggaatggggtgggtgcctacttaaatagtttttaaaaaagaaaaaaatcacaaatatttttctactgttatatatgatcttcctttatactagtttctctctagtaaggcatgccagaagcccaagataccatatcatgaattcttacatattgtaccttttgttggtggttaaatcgcatcagatgcttggcattgctgccataattataaaatgcttgtaaaggatcaaatatcactaaatactttaaattgttttacttaagagtctaatctgggaagttttcaaatcatactattaatgtgtaatctaagctcttcagatgtatccatgaataatcctggaacaatattgcttgtattcctgtcatagaacaggttttgtaatctttaaaagaaatgaaaatttatataataaagtttcaaatca

SEQ ID NO: 489445 - DNA, 274 bp, Homo sapiens
  misc_feature (36)..(36): n is a, c, g, or t
agggcctgagccttaccttattagccttgttgctgncttgagacccagctttgcttacaagcattgaagctcatttgaacacatgtgactgggataataaatgccaaagtacagtttaatgaagacaagtgtcatgtctttcagttcttaataatttcctcaaccacagcccatgaaggctgcgttcagatgggcttttgtaattgaaagcaaagcctcttaacatccttaaatttcccgcctacttaaccctaaatgctataactggtggtgt

SEQ ID NO: 489446 - DNA, 3795 bp, Homo sapiens
  misc_feature (254)..(254): n is a, c, g, or t
  misc_feature (595)..(595): n is a, c, g, or t
  misc_feature (617)..(618): n is a, c, g, or t
  misc_feature (3689)..(3689): n is a, c, g, or t
  misc_feature (3746)..(3746): n is a, c, g, or t
  misc_feature (3753)..(3753): n is a, c, g, or t
  misc_feature (3760)..(3760): n is a, c, g, or t
  misc_feature (3789)..(3789): n is a, c, g, or t
gtaataagccatttatatcagaaaccttttttcctgccacagaagctttaaattttcccctaagagtacaaagccaagagagtgtggtttatctaaatgtcctgaaatccacttgtcattccttaatttctcctctatgcaattaaagagaaaggggaaatctataacatttcttttgcccaagtgacacaaaaatgattactgcatagaaatcaaatgtaagtttagcttctaaatgaaataatatatagganggatatcagaatgtctagatagagaaagtattttcaaattcttgaatatatggatgctattaaaagctgctttccattgcctggaaagagagcttttttccctcctctattcagtgtttcaaactttggtcatctcaaattattgtcacttttaaaatgttaatgtcattctgagcagaaatagatatattttcagatttttttacactgatgctactccgtaattgcttaggagtattgtccatcatagtattttagaactagaagtaaacacataaatccttataaattacccaatccaactttctcatattgcatgtagagaacctgagacacatatnaaagtctagaatccttaacttnnccccatttggtttttttccgcctcataacaccatgctgcctttccctcatatgatcaccaagccagtagctgagttcaaaaactacatatttcttgggcagtcctctactggtatgtgatgccaactttgatttctttcgaagataattgccttctttgcctagccaagcagccaattttatgggagaaaagcaagttatatgttcacaagaatggaaggctttctacctaaatttattctcatctgtggtcctcttattctcttccatggcttctgacatacagtggaaaaacttggccaacgatgtgctctacatatagtgcttgtgtcgggttaacttttccattaatttctcaacatcaattattcaggcccctacagttgtggtattgaggcccctaaaggcttctgcctttcaccaattagtgctgccagttactgaggcttctcccaaaaggtatcagtccagtcttaaagatatttcattgtgaaagaagaaactaaactatcaggcctcttttacaaaatgagagattgaatttaagcttgtcaagcacgtactggaaggtatgaattacactaccatgtgttttgtatcttccctttcaagtgatgatgttaaatgaaggtaagtttttcatccttttttaatttttgttttttataaatcatttcagctttttctggtttatagaggtgtcttatttctaatgcaacagacccccaactttaacagatttgatatggatgcatttattcacaagcaaccccaaaagtccaaaaatgtaataattttgacaaggcccaaagttgagatgctatgaagcttgtgtgtgtgaaaagtcagttatgattgtctggagagaagctgtggtgtgtatgctgtagagtttccacatttcacatgcagtgtactccaaaaagcgggtttgggtcaaccatttcccatctctttttaagaagtgactgctgttggggccaggggacatcatgggaggtggggctgtccagttagctgtgccctgcaccttcagcccaggaaagatttgaacagagcaaaggcttcaagagagggcagaatgtattcggcagaaaagggactcaggtaagcccagcctgggatgagagcagaaaagcattcaagatttgcaggccttgctatggatgcgcttaatcaccatggaggccagcaatacccatctcagcatggctttgatattctctacttcctggcctttaaaaatgacctataatttttcagtttgctttactatattttataaagaaaattctatcttatggttgattgagcattgagacttatgaaggcattaggatagatagctcaggaatgtaaaggttcagaaaaggtctgttttctcagattaacaaatatgatggattccatggctgaccttggtgcttaaaccaggaggtttcaatctagtcctagagttgtgtccctctgaaaggcccaatgccatgtaactaactttaaactggatatatactttgagccttacttaattcacagataagttgacttaactcagtatttttatttcaattaatgaaaacagtcctcttttcaaccccaggttgcttacattttgctggtctccccaagtgaccattggtggagaccaattaatgaaggaatgaaattcactttattgggactgtggtattcaacagagccacacttaaccactttttccaatgaagaatctccagaatgataatgcccaaatatggatggccaagaagaatttgtatctacggtgtgctttatgtgtttttgacactgctgtattctgtgtgatcaagtgatttgcagctggttccaatgtgactgagtgttctcaaagatttctagtaactaagtcaacttaattttcttaagcctggtattactatcagcctcacatttaccactttgattctagttttttaactgttcataacagggcataccgagggttgggatgagagcctacttcctacctcttaaggcactttcctcattattttgccatataatcttgaactgcatgataagctgtttaaatgtccatgacttctcccagagcaactagcaaagtatatgacattttgaatagagattagtggaaaggaaaatgtagagatttaagttcagaggtacaaacctcaataaaacctccttagagcacataccatgagtagagtatatgtaaacgtatatgagaagagagtcgctataatagtcctctctaagtagattagttcattgtctaatggaagtgaacatctttactcctgttatcaccatagtactgaatgaactgtataatgagtttttcaaacaagtatttaaaatagaactttcacgtacaaagcaagggcataaagattttggtttgtgtttctgtaagtgtagtttaccatctaaagctttggtttttaattttaaaaaaagcttcaaggtattgccattccttagcatccttattgattatgggtgatgagtttttaactcttaaaatcatatacgtgtattagtttatcttaactgttgccctaagcaaaagggaaggtatacacctaagggatgtacttattttgcatttttggtcatgggtgggaatggggtgggtgcctacttaaatagtttttaaaaaagaaaaaaatcacaaatatttttctactgttatatatgatcttcctttatactagtttctctctagtaaggcatgccagaagcccaagataccatatcatgaattcttacatattgtaccttttgttggtggttaaatcgcatcagatgcttggcattgctgccataattataaaatgcttgtaaaggatcaaatatcactaaatactttaaattgttttacttaagagtctaatctgggaagttttcaaatcatactattaatgtgtaatctaagctcttcagatgtatccatgaataatcctggaacaatattgcttgtattcctgtcatagaacaggttttgtaatctttaaaagaaatgaaaatttatataataaagtttcaaatcaaaaaaaaaaaaaaaaaaanctcgcccacctaccacacattcggggacccgtatacataaaatctagacaaaaaggnggatcgncccccangctggttcagccacccatggcctccatgncttttc

SEQ ID NO: 489447 - DNA, 2480 bp, Homo sapiens
  misc_feature (2374)..(2374): n is a, c, g, or t
  misc_feature (2431)..(2431): n is a, c, g, or t
  misc_feature (2438)..(2438): n is a, c, g, or t
  misc_feature (2445)..(2445): n is a, c, g, or t
  misc_feature (2474)..(2474): n is a, c, g, or t
cctagttttagaagtttcaatagcaccccaactttaacagatttgatatggatgcatttattcacaagcaaccccaaaagtccaaaaatgtaataattttgacaaggcccaaagttgagatgctatgaagcttgtgtgtgtgaaaagtcagttatgattgtctggagagaagctgtggtgtgtatgctgtagagtttccacatttcacatgcagtgtactccaaaaagcgggtttgggtcaaccatttcccatctctttttaagaagtgactgctgttggggccaggggacatcatgggaggtggggctgtccagttagctgtgccctgcaccttcagcccaggaaagatttgaacagagcaaaggcttcaagagagggcagaatgtattcggcagaaaagggactcaggtaagcccagcctgggatgagagcagaaaagcattcaagatttgcaggccttgctatggatgcgcttaatcaccatggaggccagcaatacccatctcagcatggctttgatattctctacttcctggcctttaaaaatgacctataatttttcagtttgctttactatattttataaagaaaattctatcttatggttgattgagcattgagacttatgaaggcattaggatagatagctcaggaatgtaaaggttcagaaaaggtctgttttctcagattaacaaatatgatggattccatggctgaccttggtgcttaaaccaggaggtttcaatctagtcctagagttgtgtccctctgaaaggcccaatgccatgtaactaactttaaactggatatatactttgagccttacttaattcacagataagttgacttaactcagtatttttatttcaattaatgaaaacagtcctcttttcaaccccaggttgcttacattttgctggtctccccaagtgaccattggtggagaccaattaatgaaggaatgaaattcactttattgggactgtggtattcaacagagccacacttaaccactttttccaatgaagaatctccagaatgataatgcccaaatatggatggccaagaagaatttgtatctacggtgtgctttatgtgtttttgacactgctgtattctgtgtgatcaagtgatttgcagctggttccaatgtgactgagtgttctcaaagatttctagtaactaagtcaacttaattttcttaagcctggtattactatcagcctcacatttaccactttgattctagttttttaactgttcataacagggcataccgagggttgggatgagagcctacttcctacctcttaaggcactttcctcattattttgccatataatcttgaactgcatgataagctgtttaaatgtccatgacttctcccagagcaactagcaaagtatatgacattttgaatagagattagtggaaaggaaaatgtagagatttaagttcagaggtacaaacctcaataaaacctccttagagcacataccatgagtagagtatatgtaaacgtatatgagaagagagtcgctataatagtcctctctaagtagattagttcattgtctaatggaagtgaacatctttactcctgttatcaccatagtactgaatgaactgtataatgagtttttcaaacaagtatttaaaatagaactttcacgtacaaagcaagggcataaagattttggtttgtgtttctgtaagtgtagtttaccatctaaagctttggtttttaattttaaaaaaagcttcaaggtattgccattccttagcatccttattgattatgggtgatgagtttttaactcttaaaatcatatacgtgtattagtttatcttaactgttgccctaagcaaaagggaaggtatacacctaagggatgtacttattttgcatttttggtcatgggtgggaatggggtgggtgcctacttaaatagtttttaaaaaagaaaaaaatcacaaatatttttctactgttatatatgatcttcctttatactagtttctctctagtaaggcatgccagaagcccaagataccatatcatgaattcttacatattgtaccttttgttggtggttaaatcgcatcagatgcttggcattgctgccataattataaaatgcttgtaaaggatcaaatatcactaaatactttaaattgttttacttaagagtctaatctgggaagttttcaaatcatactattaatgtgtaatctaagctcttcagatgtatccatgaataatcctggaacaatattgcttgtattcctgtcatagaacaggttttgtaatctttaaaagaaatgaaaatttatataataaagtttcaaatcaaaaaaaaaaaaaaaaaaanctcgcccacctaccacacattcggggacccgtatacataaaatctagacaaaaaggnggatcgncccccangctggttcagccacccatggcctccatgncttttc

SEQ ID NO: 489448 - DNA, 150 bp, Homo sapiens
agccacggcgaatcttgaaagcgagcacaaaccatataccggagctagccacaggtaagcggtgagggtgtattcaatatgggattaaaccggtgttattgctggagccagtaaatattctccagaggattctgagcaaataaaacagat

SEQ ID NO: 489449 - DNA, 638 bp, Homo sapiens
  misc_feature (536)..(536): n is a, c, g, or t
  misc_feature (553)..(553): n is a, c, g, or t
  misc_feature (561)..(561): n is a, c, g, or t
  misc_feature (565)..(565): n is a, c, g, or t
  misc_feature (590)..(590): n is a, c, g, or t
  misc_feature (595)..(595): n is a, c, g, or t
cccttccccttccggggggggccccttttttaaaggggctttttttcacacggggaacccccccccccccttggggggatttttttattaaaagggattttcccaattcgcccttgttttaaaaaaaacgtttttacaaaaatttttcccgctttttttcaaaaatttaggcgccaaaaattcccttcccccaaaggggggggcaaatttgtaaaagggcaatcgggggcccctttttttatttcccccttctggaaaaggggtttttcccacacgcatataatgtgggacccccggggtttcccccatccccgtgttttaaacccggccccgtaaattttaaaaccccccctataaagggaatgtgtggcccggccccccccctaaggttttttttttttttttaccctttccttaagaccaacccctgttgggtttccagtaagggaaaaaacgccctgtggttgatgttaaaaattgggctgttaattgcaggtccagggttttaatctggcccaggcctatgccggagaagnaatgttttcatggtacntatactanccantagtctttctataggggtgatagantggtnccaattgggtgtgaggagttcagtactatgtccgggatttttt

SEQ ID NO: 489450 - DNA, 726 bp, Homo sapiens
cgattgccaggagtagtagtcagcaacaggtgcaagtcaggtcaggcctcgtgttcgtgatagagtggcgaggtgcaaatctgccagttgaccattggagtggagctgatcacggatgaagtgtttgccgatcagattgagcttcccgcgcaacaaaggtggtgggtcgtctttggccccggtcgccgatttcgtggcaaggggttgaaacagaggtttcgcctccaataccagtggttcacaataattggaccttgaccctttccctggtcagtctgtcgctggtttggtcctgcagctccgagatcgtgtccagcgcccccaagcctttagaaaggcctgatttctccctgctgtctccttcggacacgggcttgcctcgtgtggttttttttacgggcgtcgacgtaatgtccgcccactctcctgctcttctccgactggtattttttggtacggtctatgggtcactcgctgggcccacccctgccctcggctactgtccacaatctccacatctcgagtgaacattcaatagtaaatacatacagaaatatataaaaccataaatacacaacaataagaaaacacaagaaaacacaagaaaagacaatacacaacacaataaataaaaataaaaataagaaatagagaaaaaagaataacaaagaagaaacaagggcaaacaaaaaataaaaaaaaaccaacaaacacaatcatatcgca

SEQ ID NO: 489451 - DNA, 197 bp, Homo sapiens
aaaaccatcggagctgtggtcgctactgtgatgtgtaggaggaagagctcattttgaaaaggagggagctactctcaggctgcgtccttctacagtgcccagggctctcacgtgtctctcacagcttgaaaagcctgagacagctgtcttgtgagggactgagatgcaggatttcttcacacttctccttcagactt

SEQ ID NO: 489452 - DNA, 676 bp, Homo sapiens
  misc_feature (283)..(283): n is a, c, g, or t
cgataatctcaatcctccaacagggagtccctcgatcagtcacaagctatcgctctaacggttggatgagtgttctgtctggcactactcggccagtggccatctgcaagttgctttcatctgcggacatagcatcgtgtcacgactcagagtctgagtaatcagtggatctatcttcaactcgctaagatagtctcagcagtccatgtaggcatgtgctgtatgctgttccagagagaccttcgctcatttaccgatgtccactagacgcgaggtagatacncagtatagggtcatagcgcatgtagcgtcttgaatgcgtctgcagtagtacgatccctttaggcatccatcaggacacaatagccgtgtgtctttcagtttctatgagcagtcatctacagaagtgatctggactgctcatggcgcatgtcagtctgtagcagcagccaatcggtcttcaagtaggtcaaacccgtcccaggtagatcctgcagtcacagtatcctaacattacatagcgcatgcttgggccgcatctagattttcaatataacatggtgcatctgataatcagagtatggcaactccgcatctcatcactcgacctggagcagtcatcctcagtttctcagcaccagatgaacttatttacagagggcgatcctgaatcacc

SEQ ID NO: 489453 - DNA, 3567 bp, Homo sapiens
ctctgagttagagtcggtaaaggaaaacaagccatacatattgcagcagagcggctttaacacaaggagctggctacccagctgtgggagggctagaaagcaaatgggaacgctgagtaacctaacagtagagattgcagggagcagttaccttgcctagggctgagaaactaaacgagaagattaggatttccagaagccacaagcattgaggagagatcctgtggaccactgtccaagtacggctgcagctctgaggggcccaaggagctggttatgggatcattgggaaaagttggagtctgcaatcaactgcccctaccgagaggaccctgatgagaacagcagcatgcagaaaggagcaagcctgctctgtcctcctaccttccagtcgccctcttggtcccccttttggctgtacctaacagttggaaaaaggagaacatggtttgcagggctctggcatcacttagtagaggatagaagagtgagtgtggagcagggacagtcgcttaataaagggcaaggggctgactcacaagacctgcccaactcagccagagctgttctgccaggggccagaaaggccatagggccctgacttgcactgccactgccagctgtgactctagaactttgcaaagcacctttccacttacttataataactggtagtaagtgacggccatgtcttccttagaatgtaaaatactaccaaggtatccgggctgccgtgagcagggtgaaggacagaggacagaaggccttggttctcgacattggcactggcacgggactcttgtcaatgatggcggtcacagcaggtgccgacttctgctatgccatcgaggaaaattgtgaggccgtgccccacagagccaccgtctatgcacagctggtggagtccgggaggatgtggtcgtggaacaagctatttcccatccacgtgcagaccagcctcggagagcaggtcatcgtccctcccgttgacgtggagagctgccctggcgcaccctctgtctgtgacattcagctgaaccaggtgtcaccagccgactttacagtcctcagcgatgtgctgcccatgttcagcatagacttcagcaagcaagtcagtagctcagcagcctgccatagcaggcggtttgaacctctgacatctggccgagctcaggtggttctctcgtggtgggacattgaaatggaccctgaggggaagatcaagtgcaccatggcccccttctgggcacactcagacccagaggagatgcagtggcgggaccactggatgcagtgtgtgtacttcctgccacaagaggagcctgtggtgcagggctcagcgctctatctggtagcccaccacgatgactactgcgtatggtacagcctgcagaggaccagccctgaaaagaatgagagagtccgccagatgcgccccgtgtgtgactgccaggctcacctgctctggaaccggcctcggtttggagagatcaatgaccaggacagaactgatcgatacgtccaggctctgaggaccgtctctctcctcctgggcgagccgttcttcactaccagcctgctgccgtggcacaacctctacttctggtacgtgcggaccgctgtggaccagcacctggggccaggtgccatggtgatgccccaggcagcctcgctgcacgctgtggttgtggagttcagggacctgtggcggatccggagcccctgtggtgactgcgaaggcttcgacgtgcacatcatggacgacatgattaagcgtgccctggacttcagggagagcagggaagctgagccccacccgctgtgggagtacccatgccgcagcctctccgagccctggcagatcctgacctttgacttccagcagccggtgcccctgcagcccctgtgtgccgagggcaccgtggagctcagaaggcccgggcagagccacgcagcggtgctatggatggagtaccacctgaccccggagtgcacgctcagcactggcctcctggagcctgcagaccctgaggggggctgctgctggaacccccactgcaagcaggccgtctacttcttcagccctgccccagatcccagagcactgctgggtggcccacggactgtcagctatgcagtggagtttcaccccgacacaggcgacatcatcatggagttcaggcatgcagataccccagactgaccactcttgagcaataaagtggcctgagggctggggttctgagtggctcatggctttctaggggggaaggctgaaggccctcctctcctctctgggagctgctcggcctcagggatgggaaagactgcgccgtgttgcatcttgttgcatctttgcactgctggcctctggctccagctgtggcaggaagcatgagagggtgactgaatttggagccctggaggggctgggaagacccccctgcttgtgcttctgaggtgctgagaatgctccaacacagagacatctctccccagctgggaagggagtggaagcacagggagcttgtggggctggccggtggggttgtccacgccgcccttggcgagcagtccccgtggcgggagcctgtcctgtctgtctcactctcgaggatctccgggtccctgctcttctggcttctgctaggagggtggagatttctggccctctagtgggtggagatgctgagttgtggctgggtctctggggcttgaagaccctggctgggcccgggctgagaggcctgggttctggccctttcacctgacaggtaacttcaagccacatccataggtgtctggcctcagtgctgcaccagctggtggcctgccaggacctgagactggacacaaggcagctgtcccagagcagttcctgagatgcaggcccaggaaagtggctgtcaggggagctgggaggcagccctgttccctgcacctccctcagattggaaagcccctcctgcaggtggggtatggcagggagcagcccctgcccagcgccgcttcaccaggaaggtcagtaggtgccgtggccttgcttctctcacacactaacccccctttggttatgtcccagctctcagaggtaacagcagacaccacgtgagagaacccagtggcctctggctcgcagcttagaaggtgaggcttgtgccaggccagccgagccgcctgtatgagcagagttccggtgtcctcggattcagggcagacttgggcagtgcctgtcctgcagttgggggcaggaactccctcccctgcccccaggcgtgcccctgaggcctggccccaacttgtcgctgaaataagtggagaacaccagccttgagcctcacagttttattttctcctcgttatccatccttcctttcagcaccagtaaggaaaaagaacacctctcttcgcaaaatattttatcaggtgtaaagacttgtttttcttctagggaagaaccgtctggatatatatttgataatgtttttaccaaaaccataggtgtgcttaccatagaaaacccctaatgtcccatgaagatacaatacagaaaaaaatacagaaatt

SEQ ID NO: 489454 - DNA, 155 bp, Homo sapiens
agaaaacagagagaagattgccctgtgtggaacctttgattcctccacaggaatttcccttttcttatttatttattttaaagggagatggagcctcgctctgtcacccaggctggagtgaaatggaacgatctcggttcactgaaaccggatcc

SEQ ID NO: 489455 - DNA, 193 bp, Homo sapiens
  misc_feature (15)..(15): n is a, c, g, or t
gcttgtgggactgangccctggctccttgttccaccctggtttccaactataacccaaaggtatttgaaatcctgattcagtattattccggaaaacaatgtggcttcaacatgagaaagctcctacagaagaagggaaaaaagagcctggtgttcctaagtaacgcgaacccctcgctgctggagcggaact

SEQ ID NO: 489456 - DNA, 368 bp, Homo sapiens
tctcgctatatagtagatcttgaactcagctgaacagattccgtcctcttcgaccctattcttttgcaaaatatatctgctataaattagtatatgaatttaagaataaccttgtctacatctacaaaacatcttctaggattcagataggaactgcatataacttgtatgttacttggaggagaacttgatatctttactgtatcctgtctagcaatccatgaacatggcatgtctatttaaatctttgataacatcacgattttataatcatcagcatacaagtccttgcatatttcgttagatttaaaccgaagtatttccctttttcagcaattgtaaacagtacatattattaacttttgtgt

SEQ ID NO: 489457 - DNA, 1015 bp, Homo sapiens
  misc_feature (262)..(262): n is a, c, g, or t
  misc_feature (377)..(377): n is a, c, g, or t
  misc_feature (637)..(637): n is a, c, g, or t
cgggattcgccgccagaacagcaggtgtcgtgaaaactagccctaaaagccaaagattgggaaaggaaagagactcatatcaacattgtcgtcatggacacgtaggattgcgggcaagtccaccagctactggccagctgatctatataagtgcggtggactatgacgagaaagaaccatttgaagaagagttgtgagaagggaggctgctgagtatgggaaagggctatcccttaatagtatgtccttggggatctgggantaaacttgaatagctgagtcgatgaactgtggtagtacagctaatatgaatatactccttgtggaacatttgagacttcatgcaagagtactattgatgactataatcagtagantgccgctctaaggaccccaggagtacttattatctaacaaacattgactatacacgggtacactcgtcaagggcttgacgtgatgcttgtccatgacttggtatgcatgcctggatgtttggttgcaattggaacgctgggtattcttcccaagaagtggtgcatgaacccgagtagcaatgtcccctggtcttggacttacatctatctggggttgctgtagaacacatctaaattgtctgggtggttaatcataaatntgggatttctcaacttgaatgactcaccacataacagacctagcaaacggaagaatagtgaagggaaacatgttagaggcgaaagctcacgtcacctataactgttaatgacacaggactgtgggcgtacacacccaccagtaagagccagcctagacttattaatggtcggcccaaaatttttcctggtctgggaacgtgggttgtaccaaacgatggactgtgcagtccgcagagatggcctgaaaacaatgtcccttccgggggttccacaccggggaatggggaaagagttcacccccgtttaagcgaatgtgggaatggcacctggtggaaccaacgcctggtttgaaggactgctgggactggattcgtaaa

SEQ ID NO: 489458 - DNA, 248 bp, Homo sapiens
aacctctcgcaatacctttacaattacttgcagaaagtctagtaccaatatgatatactctattctcatattagaaggcatacagtctgattactaaatataattctcatttgtcgtgacttgaaacctccctggcgaaattaaatttcattactcatttctggcattagttgtattcatttcacattgggttagcagtactttagaatggatattgctgaagtaagtggtgtgtcaataagatgtga

SEQ ID NO: 489459 - DNA, 338 bp, Homo sapiens
cggtctctctgaggatcccctcataaggggccagaggaggagacaactggagtttgagaccaacgtgggcacatggagagacctcatctttacaaaaaaaatttaagaatcagccaggcatggtggcacatacctgcaggcccagctacttagaaggccgagacagaaggatcacttgtgcccaggagttcaaggctgcagtgagctatgactgcaccactgcactccaacatgggtaacagagcaagaccatctcaaaaatgtgtttgtgtgtgtgtgtgtctgtatgtgtgtgtgtgcacgtgcgcgcacgcatgcgtgtgttggcccttatcgag

SEQ ID NO: 489460 - DNA, 214 bp, Homo sapiens
ttatttattacaagctctatttccaacacagattcccacacagccgtgagatctctgtggtctctccatcttaattacctcattccaggtcccatagctctatgcgtgaatttctagcaacactatctgtgctctcaccatcttttcatccttactattagccagggaaagcttttgatacaccagtgaactatccattagggcgtacggggca

SEQ ID NO: 489461 - DNA, 856 bp, Homo sapiens
atgaagaaattagaaaaaaaagaaaaagaaaataaaaaatagaatgaattaaatctctactttcaatttcgagtttcgaggaacattatataatgttttgaaaatgtctgtgtatctggatttgattttgcatgggtacaaggttcacactattcttgcaaaactggtgatggggggaatggtatcggaaaccattatgaatgagatagtggcacaaatagatgcacaaaatactctgtgaaaaatctgaggctggcttatccagaactccagcccgtgctgtatcagctgtaaagaatattaatgctgctgacatcccattacatattatcattgggtgacatcaatatataagtgctctaacctgccctcttttaaatcaaaatgtattaaagatattttaatgaatgtattcttgggatgatttatttatcattactttctactcttttttcccaattaaacgcccgatactctctttcttccgtctactttcttttaccccgcacttattttattcttattcgtaatttttttgtttatctatctttttattcctcattcatgtcatattccaacttatattctaatgtccccacaataataatactccccccatccttccccctctactcttggcttgtcctcactatttagtgctcaccccctcctttactcactgtacccccttcccccctctcactcctttttattattcctctccctcaccagatatctcttagtatacgaattaaggtaataaaaataattataccccctcctccacctttatatatcctcctcattcatcttctatctacaactgtccacactcttattcaagtttatcatccat

SEQ ID NO: 489462 - DNA, 573 bp, Homo sapiens
  misc_feature (58)..(58): n is a, c, g, or t
  misc_feature (79)..(80): n is a, c, g, or t
  misc_feature (151)..(151): n is a, c, g, or t
  misc_feature (325)..(325): n is a, c, g, or t
ttgcgggtatctagagatccagaccaggctgagcagaaggaggatctgtgttatcttnctggcccgagtctgcgccctnntagagcaaatgattatgcagctccaaggacgcatcaagaaaagctgacagggatcaagcatgaattgcaangcaactggctacgagaggtcagggacgctgcaccctggcagagaagctggggggcagtgccgtcatctccctggagggcaagcctttgtgagccccttctggccccctgcctggagcatctggcagccccacacctgcccttgggggttgcaggctggccccttcctgccagancggaggggctggggggatcccagcagggggagggcaatcccttcaccccagttgccaaacagaccccccaccccctggattttccttctccctccatcccttgacggttctggccttcccaaactgcttttgatcttttgattcctcttgggctgaagcagaccaagttccccccaggcaccccagttgtgggggagcctgtatttttttaacaacatccccattcctcagactgggtcgggtacgag

SEQ ID NO: 489463 - DNA, 177 bp, Homo sapiens
tacgaaatgaccgacataaacatcgactgatttttatgtttagtattttttttcggggccagagtttacatctcgttgcccaggctggagtgcaatgggcacaatctacagttcaccgacaacctccatttaccttggttcaagcaatactcctgcatcagcctcccatgtagctgg

SEQ ID NO: 489464 - DNA, 234 bp, Homo sapiens
aacgggtgatgcggttggagaaggaattaagaataaaggaacaaggccgagcatggtggctcatgcctgtaatcccagcactttgggaggccaaggcgggcggatcatttgaggtcagaagtttgagaccagtctggccaacatggtgaaactctgtctctactaaaaatacaaaaattagctgggtgtggtagcgcgtgcccatagtgtcccaaccgcatcacccgttcgggt

SEQ ID NO: 489465 - DNA, 440 bp, Homo sapiens
  misc_feature (97)..(97): n is a, c, g, or t
ctctctcacattggcgagaagcatataatgtaagaatgtggtaaggctatcacccggagagtcaagcctgaatgaacatcggcggagccatcactgnagagaaagcctatcaatgtaaggagtgtggaaaagccttcagtgccagtaatggcctcactcgacatagaagaatccagactggggaaaatccatctgaatgcaaagtgtgtggaaaggctttcctcctcagctcatgccttgtccaggcatcagagggatacacacgtggagagaagcgctatcagtgtcgtgagtgtggcaaagccttcattcagaatgcagggtttttcccagcatctccgagtccacactggttgaaaaaccctatcagtgcagtcagtgcagtaaactctttagtaagcggacacttcttaagacacatcagaaaaaccagtgtgaag

SEQ ID NO: 489466 - DNA, 297 bp, Homo sapiens
ccctgctaaagccaggcggaagtctccccctgcccggatgtggtgcttgcctctgtttcccacccctggaggcctctctcctccaatatccgagctctccttacccccgaccctgcacccagtcccttaggaagagagaagcctctccagctagatttcaacctccaggaggggcatccatatacccagcgccccccagcccaccacggtaacatccgatcagagtgcactcaactgagtttggccctggccctgatgactctgatggaagctggtctccttcgaccaagagctgcc

SEQ ID NO: 489467 - DNA, 1987 bp, Homo sapiens
  misc_feature (1715)..(1715): n is a, c, g, or t
ttgtgctgcgagttgcgcgcgctgtggctgcggagcgttgcctgtgctgagctgtctggctggtgcttgcgctgtgttgtggtggtggcttgttgctggctcgctttctgcgttgatgttgtatggtggctcgtgtttgctctttcgctttgtgctgttgtgcctgcggtgcgcgtgctgttgctgtgctgtgtgtgctggtgtggcttggtgtggctggtgtgagcgctgcgcgctgtgagccgggcgtatcggcgtgttcggttcgttttgtcgagtggtgtgtgatgtcgatcgggcttgcttgcgtgcgtgtgtggtgctgttgtgtgggttgcggtgtggtgcgtgtgctgtctgtctttgctgtgctgttgcgtccgtcgttctgccgtgcttctgtgtcgttgttttgttctcgtcttttcgttcgttgcgtttctctgttcttcgtcgtgtgtccgtctctcttcttgtctccgttgttgttgcgtgtgttttcgtgcttttggttgtgttgtttgtgtgtggtgttcgtgcgtggtcggttcttgttgtgtcgtgttggtggttgtgttcgttgttgtgtggtgtcttggtgttctcgtgtgtcgttcgtgttggttcgttgtgtcgagtctgtgctgccttttccgtacgtgttgatcgtgtgggtgttgtattgtttgtctgtcgaacgtgtgttgtattgtgtcacctggcgttccaccatttgttgtgttagcctagtttctgcgccgtcttgttgttgggtggtttgtgctcttttgcctctaacagtatcttgtctgttttgttttgtggttgggtcgccccgccccttttgttggtgtttcccttctctgttgggtgggtgtgtgcggctcccacacagggtgtgtgttgttgagcccacacaaatagatggcgccgcgggcggggtgggcgtgtgtgtatactttgtctggtggcccgcccagcggttggttctgtgaatgttatcgcgggggtgtcgtcgtgaatgtggtgtttttcttagtggcggctccctgttcggtgtgggggctgccgtatagtgtttgtgcgccggctgcacgtactgtgggtatgttttgttttgtctgtgtgttttccgtggggggggttgttctatgttgtaggggtcggcgctctcattgcttggtgttgctttgcggtggcggtggtgtgatagatgctccttccacatagaggagtgtgtgggtcgcccccttgctggtctcaccacactctctgcgggggggcccgctcttctgtcttgctctctttggcccgccaaagtgtgttgccccggttggtggtttccccgcggtgcctcacatggagtgtttcttttgtgtgtgggaacacacaaagttcgcgtcgctcttatctcccctacccatgtggtgcccctcttccccacgtggggtttgcacgacgtgctcgtcgctttgcgggtgtgttctgtttggtctgtgggtggtccgctcgctcttgttgtcgctggttcacaccccctcgcggggctctctcggggccttttgtgttcctcgcaccctcggtggcgctctatgatgatgctgtgtttctctgatgttgtgctgggtatgtttcagcttgttctgtgtaacacccctctcctcccgcgcgggctgtccactggccaccccctggggccaccttgtgcccacaanacaccacacacttggaatcaccacattttttagacaccttccatcttactcttgacaccccagacctcgtttgaaaagtaaacactgtattccccccaattgtgtccctatccaagaatgttcactggacaacaaccgttttctaaacacccacaccccgaatgtttcccggccacaccggactcccggcgtccccctccgggggtgaccaacaaataggggtttgttaacccaaaaaattaaatggatttagccggtgataaaaaatatta

SEQ ID NO: 489468 - DNA, 504 bp, Homo sapiens
aaggtaactaggaccatgctgtgttggcgcgcgagcccagataggaaagtgaacatggtcactactcgtgttgtccgctagtgatgatccttggtcactgactagggttactatggattactcacgcaataaaacaagcggccccggctggagacacctgtgccgttccttgacccaaattccatgacttgggcgttctgctgtgatcacttaccgctgtgaatcctaatcacgcacatgagtatgtccacatgcgaagcggtgagaagtattcagaaaaggtctaagagcgatcgactacgagaggtggagaggaggaggagaagtgagaggtgggtggaatggggaagtggagaggaataggaaaagcgagagaaaaaaataggaaaagagaatagcgataaaggggagagagggaaggatcaagatagaaaagaaggcaagagtggagagaggagaaggaaaagagagtgtaaagaggaaaggaaaaagagagaaatcaac

SEQ ID NO: 489469 - DNA, 825 bp, Homo sapiens
  misc_feature (552)..(552): n is a, c, g, or t
agcggaaatgtaggaatgcgggggcgatcgaggcggggataggtgggttctcggaaagtccgtgggactactgacccggcgtactgacaggctccattttatccggtgactcagttattaaccttcacctcaatggctcctctgagcgagagaggcggcttccgttagttaactcgctcgaggtgcaaatctgcagaatccaagagctcactggagttcccttctgtggtgtaggatctgcgcaggataaacttctgttgtcatgcagatgtttcgaggctctcaccggggcccgaagctaaggaggtaatgccgatgaaacgaaggatgttctggaaggagagttactgtggtaaaagtggccttgcaaaacaacgtagtgttccgcacgaagcacgcgcctgcgactgcatcgtgggacgaggtgtgcgtgtaagtccctcctgggttctgtccggggaaaaatgagtgtgtattcaaacctggcatgcgttaagttgaacgccatgcagtgcgcatgcatttgcgcccttcgaggatgcattgtacacntggtaagcaaccacaaataggggcagcattgtgagtgggtgggcctccggggagtctgctgtgtgagtgacaccattctcgaatggaacgggtgccatgggacgtcgtagttgaccacggcagtgaccctttgcgaagcggcttctcgtaggaggtctggcaccctggggcccgatgctatcggggtgggccgctcactatggggaggtcgtgggcttggccggggaggttgtggcaatgtttgatcggccgtccgtttacctccggatactc

SEQ ID NO: 489470 - DNA, 403 bp, Homo sapiens
gtttattctataggcatctgtatttggtgttggacctaggagatcccttgccaggtcccaaactcatcctatgcaaagtggcacttggaaggtaactatttcctagtggacagaggaatccctttaaaatacctgttcttccttcccagtgggagtaacacagagatgctatgaatcaccttgtgttaatgggacatcagggtcaaaaggaggagaaaaggaataagaaggtcagggaagaggcactagtacagtgatctgaccagaagcactgaggtgagtgacctagaggcgtggtctctcctctgagcctgtgttctgctagggattgagcatctaatcctaacacctgagaagcttcggagccccactctttgtttctataccctttctttttgcccac

SEQ ID NO: 489471 - DNA, 719 bp, Homo sapiens
  misc_feature (445)..(445): n is a, c, g, or t
ggagctcagtgccaccatgaacccaggtgaaataacacaagcatgtggctcatcacaaagcctgtttggtggtctcttcacatggacgcgcatgaaatttggtgccatgactcggatcgggggacctcccttgggagatcaagtcccctgtcctcctgttcttggcgtccgctgagaaagatccagccgtagcaagccgtcagggtcctcagagccgaggcaggcccaaggaaacaatcctgcagccagagtttgtaacatcagcgtaaggcgggtgcgtcttctgtactcctcgtgtcgtccagagcctcgtcgtccactggtcccgtcaaggccacgttatctccctttccagcgtcgtgtcaagtcgtctccccttctcttaagtttcaatctcctcttccattttctggcgagagacaacaggagacatgttttatccgtnggacccataaactccggtcgccgggtcacagactgggaaggcagctttccccttggcttgttctaactcatttgcagggacgccttctctgattattcagccaggtttcaaaggtgtcagaccacgcaggaacggcctgtctatggtccttcacccttagcggcaagtcccgcttttctggggaaggggcagtacccaagcccttctctccttgtctctaccccttctctgctttcctgggcaggggcagtacccagaaccttgctctcctgtc

SEQ ID NO: 489472 - DNA, 1209 bp, Homo sapiens
  misc_feature (1121)..(1121): n is a, c, g, or t
  misc_feature (1209)..(1209): n is a, c, g, or t
ggacgcgtgggtcgacccacgcgtccggaactgaacatttggcgtggacactagctacatagtagattaattatagttgagtagtaggacatggacaaatttggtgtttgggtcctttgtggacatttacttagtattatcgtcctcttaacaccaaattgaagtataatcaaactgctatatgaagaagggcctagaaaatgtggaggttttacactacttgccctgcctttctatatctagtttaagctgttaggactcaatggctctgattatgaccataattaaaagcattccgactttactatgaccctagcttatgcattactttagggggtgaggggaagctcctgtactggtatagtagtagcgcagattgcattagcggttattcaaggacacgaactctgtgcaagccctgtccacgtagctcgtggtaggctgttacagaacattgggtttccctgatgactccagtatacttgggtagtactcagacagtaaatcacttagtatagcatgtcgagacctataaggagtgcttatgactagctacaaagatggcatccactcctaaatcagtatctcaattcacgatgatgaattaaccattctcttacaagtacaaggtgttgcacaaccaacactggagacacacaaaatgtcttcacaacacagcacgtaatgcccatgccaccattcaaaagcacaaccctggccccaacacgaaagaccccaacaccacgcgcacggccagcaagaacacacgcgcaacagttgccaaagcagaccaacacagcaaacagccgacaaacacaccaccacactccacaagacacgagcacaactcaaagacaacataccaaagaacccgggcaatcagggaacggccaaggttaaacgccgcacccaacggcaaatgaacccacaacacggcgaacagacgatggcccagaacggaggaaaccaagacagaaacgggagcacaaccaccacaacaggcaagaaagtgccacgcgatacgccctagtcgcgactagacagacggaagcacaaagcagtaacaaacgacacacgaacgactaaaaaacacacacacggaaagcaacagacaactcacnacaacgggcacacgacctcagcacaatacgccacaccaactaacgcagcaagtaaacgccagcgctcacacatcgacgaagtcgtgtn

SEQ ID NO: 489473 - DNA, 103 bp, Homo sapiens
gagtccgaggaggttagttgtggcataaaatgcattaaggcatctcagtataagagcatcaggttcgtcctttagtgtttgtgtatggttatcatttgtatcc

SEQ ID NO: 489474 - DNA, 394 bp, Homo sapiens
ttggtgttttccagctggcagtggtttccaagccaccctggggacagagttcccagggggagggatggggctgtcatctttgaatgtttcacattcttagccattgttgcctttgggctctagggagtctgagttggttagggactggagtgatcccctggtacagagcagcagctctaaggagaagtggtcaggctgcttcctcatgtggctcctggatctcatttctcctcactgggtgggatctcccgactgaggtctacaaccataccccaaccagtgttttctggccagcagcagtttcaaacctccctggaatggctctcccagagagaggggcagggtgccagctttgctgttttgcagccttatctctttgcctttgggatttgga

SEQ ID NO: 489475 - DNA, 346 bp, Homo sapiens
cacagcaagaagcagcagtacccttagtaccaggtgcttgtcatgggagaagcttacaggagagctgccttttgaagctactaaactctcattcttgattattctgtacctcattatctatgccttcataactttacaacgatcaaaatctgtcatctaggctataccttactactgagacttcaatcactaggaccatcgtgtggctgcccatttagtattgatgtctgccttctgccaggcttgtcggacatacttctggtgggcacagtgcggaaacttgaggatgaaatcagtgcgctgcatgcacttaaaaggcatggcctgtctcctcacttgagtgcaa

SEQ ID NO: 489476 - DNA, 369 bp, Homo sapiens
ggagtagaatggattgcaagttggctagtggtcacggtgcccaccattcttggcctgttacttacctgagatgagctcttttaactcaagcgaaacttcaaggccagaagatcttgcctgttggtgatcatgctcctcatcaggacagagactgtataggctgaccagaagcatgctgctgaattatcaacgaggattcccacagcataacttttaaacactggttattatacaattttatatccgtatcattcttttctagtacaatggagatctagagacacacatgctttcttcccaccacaaacttgtgacaacattatgcgaatgttttattattttttaaaataaacatttgatataattatc

SEQ ID NO: 489477 - DNA, 337 bp, Homo sapiens
gtgttctcgaggatccccgggacagatacggactgttaggtccgcatctggcgtgtgccccattctcagcatgtgtgactcgtgggcaagttaaccttactgagtcttggcgtccttaatgtgccgttcacaggatcagatgccaccatagatgtgtacttgctgaatgggctctattaataatctctgtcactgagcgctggaatgacgtgtatgcatgtactgggctcgaggcctcttccctcaactccccaccactgtccctgcttcccaggtctgcacgcagacgtgcgcacgatcttccttctcagctacctaccctgaagactctccatcc

SEQ ID NO: 489478 - DNA, 409 bp, Homo sapiens
atagtggcaatatatatatagttcccgacggctctccatttggcatcgcttaatttatatgtcatggtctaagcacagctctcttgtcctattttcatcggtgccagcacactcatcatatttacaatggagtttgcgattgtagttaccttccgatctttgctccataagtatcaagcaagattgcacgttttgcggtaacccggagatctgtagattctgtatccgttgcgatttgtgggccagggcagccctcttcccatgctggttatcccgtcggagaccgcctcgttgggaacttcacaggatttgttgagcgctgacaagccctccgcccatctttgcaacgccctttatcattcttgaactatagttcggtcggtgggcaataaacagtattatcaaaaaa

SEQ ID NO: 489479 - DNA, 1725 bp, Homo sapiens
  misc_feature (974)..(974): n is a, c, g, or t
  misc_feature (1084)..(1084): n is a, c, g, or t
tgtgtcaaaaaaaaaaaaaagaaagaaagaaagaaaaaatgctttatggcccagtgcaggggctcacacctataattccttagcactttggggaaggctaaggcaggaggatggcttgaggccaagaagtttcaaaacaagccgtgggcaacatttgcaagaaccccaacttctacaaaaaacgaaaaattagccgggagcggtgatgttgttgccgtgttagttcccagcttacctcaaggaagaactgtgaggtgtgggagaaattcacttgtgaagcctgtgggaaggcttgaggctgccaggtgagcctggtgttttattaccaactgtgcacttccaagcccgtgcgtgggtatacacgagaagcaaaagaacttccaatctcttcaaaaaagagaaaacaggaaaaaaacagtgcttttgtgcttatacctctcacagtggaggggccagagcgccaaaaaacaacaacaagagagttcgcgtgtgtgggaacatctcctctatctgggacaccaaacgctatttgtgtgccacaaagtctgtggctataagttggggcccaatgtgtgcatcacccaaggtgtgtctctcacaccgtgtgtgtgtctccatataccgctgtgtggcacatctctttttattaagcgggtggaattctttctaatatgtgagaacggagagatttttctaacatatatcgtggtgggataaccccccaatattctcgagagaaaaaacctctcggtggttatacaagagttgtgcccataatggagggccatatctcccctttataaccagacctattagaggagattatgtaatatctcaatatatgttgcgccttccccccggggtggtgttataactcaaacacctttttgaggagcaagacacacctggtgaactaatgtgtggcgacaccaccaccaaggagaacgatatagtgggtggttcttaaacagacncacagacccccccaacacgagggggcgtggatccaaccttctcgtgtgggcgacattcataaagtgtggctgtttctcttccacacacaatcactatcatcacagacggngcagactttgctcagcatataaacacacgaggtgtttattcggggggggcgatatagtaatctcctcctctcacaaaccagcaacaatcaccacactactactaaccacacaactacgtcacataacaccacacaacatactaatccaatcaacaccatcaaccaacacacgcaccaccacgacgcacatgtagccaaccctacgtactagccaaaccacctacaccacctctgctaccactaaactaaatacagcacacagcaaccagcaacaactaccacacgcacaccgagtagagtgaagagaacgacgagagagcataacagaagacacaacagacggcgtgggtcgcagcggacgcgcgacgcagcaagagaaccacaaacagacatcgtcgcgcggcggccatgcgacagtccgagggatacatggtcacgacacacgaccgcttcgcgtgtcgatgagtgaaggacgccggacgagccaaatgaacagaggagcaatggatagactatcaacggaagcgtcgcgagcgcgccgccgcagtctcaacacacgcgccggtggagcgaacaaccgcacagcgatttaggatgggttgtcgatacagggcaagacaccccaccgatcggtgggagca

SEQ ID NO: 489480 - DNA, 360 bp, Homo sapiens
  misc_feature (34)..(34): n is a, c, g, or t
ggattcgtgtcatccccttcgtggagcctcatgncggctatcgggcttacagaactgggtgaagaagaacgggctgagcactcgctcccgacctggcctcaccaataaccagctcttcttcctgggctttgcacaggtctggtgctcagctcgcacacctgagagctcacacgatggcctcatcaccgatccccacagcccctctcgcttccgggtcatcggccttcctctccaattccagggagttctcagaacacttccgctgcccacctggctcacccatgaacccgcctcacaagtgcgaagtctgctaaggggacgaagcgggagaagagccatagacgaagtggggattggaca

SEQ ID NO: 489481 - DNA, 229 bp, Homo sapiens
cagctattgccttggtacgatctattttgacttttgggacaagctgagagttctggagagtaccagctctgatatcataggaaggtcaaggtgggcagtaacaaggtcacggaagggcaggagggcctctttatctggcggggactctccaagggccttggctggggcatcagatcccacaggcttcaagaacgttaacaagggctctgcactgagtcagcgacttggt

SEQ ID NO: 489482 - DNA, 217 bp, Homo sapiens
  misc_feature (22)..(22): n is a, c, g, or t
  misc_feature (175)..(175): n is a, c, g, or t
tgagcccctgttccgcatgagntgtttgattcggcttgccaatggggcgtgccgtgaaacgaggttaatcatgcggcgcgcttccacgtggctcttggcagccctgctctcgtgggtcagcatcgtcgcgtgctccggtggctcgggggacgcgggcgatgccgcagagcacgcngcggtctccgggaacgtcggcgccccgggggcgctcggtgac

SEQ ID NO: 489483 - DNA, 93 bp, Homo sapiens
tggagtgggggaatgggggaagaggtcatgttggggcacccaaatgacatccagtgctctcggcgaatggctgccgaggttctggctttgttt

SEQ ID NO: 489484 - DNA, 799 bp, Homo sapiens
ccagcttctggctactttttttgaaattaatttttagaaattaatgttttaataaaaaagttttgagacaggatctcactctgttccccaggctggaatgcagggtgcaatcatagcccactgcagcctcgaactcctgagctcaggcaatcctcccacctcagcttcctctgtagctgggactaaaggcgcgtgccaccatggctggctgatttttttaattttttgtggagatgaggtctcactatgttgcctgggctggtctcaaactcctgggctcatgtggtccttctacctcagcctcccaaagtgctgggattacaggtgtgagccaccacacctggccttcttctagtctacttttaaccatgagcataactgggtggaaaagttagtgatagaatcctagtatagttgtcccatggtatcggtggggattggttcagggactccttgcagataccaaaatctgtgatgctcaagttcctgataggaaatggtacagtatttgcatataacctaagcacatcctcctgtaaactttaaatcatctctaggttactcagaatagctattataataccacacatcagctcatttgtgtggatcccatgaaatacttggtggggggccaattcaagtttagctttctggaactttgtggaattttgccccctgaatatttcacctgtggtggttgaatcccaggactgcagaaggctgactgtactaaccccgctgcaagactgcaccgtacacaccattgagaaaaacggccatcgtttaagacccgatttgg

SEQ ID NO: 489485 - DNA, 694 bp, Homo sapiens
  misc_feature (272)..(272): n is a, c, g, or t
ttagaaatacaaccgtttcactcttaagaatttgcttaaattgggccgggggagtttaaaagcgggaaattaagggttaataaataacgcgggtggcccataggtttatacttttctagagggggtattgaagcagggtgtttcataaccttttctctcaccttttgttatgtttaaaatttatgagaggtgatgttttttgcacatgacacatgatgtttacagctcgcactaggacctctcacggcatggatgtcgtcagagagacagcntcagaaataatagctaatgtatgctgggctcaatacaagggtgatgaaatgatctgtgcagcaaagcccgatggaacatgtttacttatgtagcaaacctgcacatcctgctcatgtacactggaacttaataaaagttgtttttttttaaaaagaatgaataagacatggtatttgatagctcaacaggcagtctatagtcaacagcgatttatatgtatattttaactctgcctcaaagagtataatggattgtttgtatcacaaataaatgcttgagaggatggacaccccatattacatgatgtgattattacacgtcgcatgcttatatcaaaacatctcatgtcccccataaatatatacgcgtgatacccgccaaacttaaaatataaaatgtttaaataaaaataaagaaaaga

SEQ ID NO: 489486 - DNA, 895 bp, Homo sapiens
  misc_feature (14)..(14): n is a, c, g, or t
  misc_feature (131)..(131): n is a, c, g, or t
  misc_feature (206)..(206): n is a, c, g, or t
  misc_feature (304)..(304): n is a, c, g, or t
  misc_feature (425)..(425): n is a, c, g, or t
  misc_feature (470)..(470): n is a, c, g, or t
  misc_feature (584)..(584): n is a, c, g, or t
  misc_feature (623)..(623): n is a, c, g, or t
  misc_feature (658)..(658): n is a, c, g, or t
  misc_feature (670)..(670): n is a, c, g, or t
  misc_feature (685)..(685): n is a, c, g, or t
  misc_feature (715)..(715): n is a, c, g, or t
  misc_feature (717)..(717): n is a, c, g, or t
  misc_feature (741)..(741): n is a, c, g, or t
  misc_feature (751)..(751): n is a, c, g, or t
  misc_feature (759)..(759): n is a, c, g, or t
  misc_feature (762)..(762): n is a, c, g, or t
  misc_feature (765)..(765): n is a, c, g, or t
  misc_feature (769)..(769): n is a, c, g, or t
  misc_feature (774)..(774): n is a, c, g, or t
  misc_feature (777)..(777): n is a, c, g, or t
  misc_feature (797)..(797): n is a, c, g, or t
  misc_feature (866)..(866): n is a, c, g, or t
aagcgcgggacgancaaagtcatggaccgcaacccctcgccgccgccgccgggtcgcgacaaggaggaggaggaggaggtggccggtggagactgcatagggagcacggtctacagcaaacactggctctncggcgtcctcagcggactcatccagattgttagccctgaaaacaccaaatctagctcagatgatgaggagcagcngaaggagcttgaagaagaaatggagaatgaaatttgcagagtattgggataagtcaatggatgaggacgtggctttatttctccaagaatttaatgcncctgaaaaattcatgggagtactggccaagtccaagtgtccccgattaagagaaaactgtgtgggaattttaggtaaaaaggcctgttttccaggagaaatgtgttgttccaacagcagtnaaaaaaaacttgggcaggggttattgtgcactgttttgttatgantcagacccacccaccctgccggaaacaagcaggttgtggcttacttgcctttcccaggcagaaggggccagtgtttgggttgaaaggatccaggaacatccagccatttaaganagcattagcttcattatgtcaagtacaacaaatgtaganttgctggtgaaggtgggggaggttgtggacaagcnctttgatttggntgagaaactaatgtnagaatgggtcagaaatggggctgctcagcntntggaccaaccccaggaagattttnaagagcagcnagtttttnggnttntgcnctgtntanttgaagctgccaaacaagtncgttctgaaaatccagaatggcttgatgtttacatgcacattttacaactgcttactacagtggatganggaattcaagcaattttacattgttctga

SEQ ID NO: 489487 - DNA, 531 bp, Homo sapiens
  misc_feature (427)..(427): n is a, c, g, or t
  misc_feature (433)..(433): n is a, c, g, or t
aaaatagaatattagaatatggtgagctcaggtgattgatactcgtgatgagagtaatacgaatgtgtttagaagtggatcttatagggaattaagcggggtaatgcttgttggggcacagtgccctccaagttgggggatagggtataggttgaagtggtaaaaggctcagaaaaatcttgagaagaaaaaaacttgtgaggtaataaataggattatccggtatagaagcgcctttttgcacaggtggtgtgtggtgcccttggtatgtgcttttctggtgtaacatcgcgccatcattggtatatggatagtgtgttggttagtaggcatagtatgaggagcgatatgaagtgaaagtgaaatcacactcgtgctgaattcgtgcagcgcgtggtgatcaagtagtagaatatcgttggctctnttcaanggtttcacaaggtgggccaactctctgtgtaactgataaacagactactagtactacttactgtagacagtctgggttgctactgaaactgcctaacg

SEQ ID NO: 489488 - DNA, 502 bp, Homo sapiens
cgtaaatagagtccaagtgggcggagagccgtcccgcgccgcccgctcatgtctctacagatgccgactgtccggcctgcctggcacatgctgctgctgctgtgctggtggcagctgcctcgatcccccctgctgccccctgtgccccgtgacactttgtgctggtgtgccacgatgtgaccctgcatgcatgccaccgttgctgtgtcccccctgtgctggttcaccttgtgggccgttggtatcctgggccctgccctggttgctgctgtgaaccttctgcgctggtggcaaggtttggggcggtgctggtttggcagcggcgtgcctgcgcctggtgctgtggtttggagagagatggcctggggacccaagtggaccccgtgcgggggttttggctggcaaccattcttggtgggtggccgccccaacacaacattttggcggcacccactttggtggccctgggtgggctgggaataacagcgggctttggggaccg

SEQ ID NO: 489489 - DNA, 907 bp, Homo sapiens
tgctccgtggactttttcgctattttccaagttcatcgtataggccaaaagtggtgtccgcgggaaatcgtcgccattttggggggtaatacacccccccggtgggtcgcgccctggaattgtttcgcccccccaacatttttgcgggcgcgacattataacgaacagcccttttctcatttcacggaagcgttcttacttctaacgagggtttaccgccccacctcgtaacacagggtcgccctttatttgctgcccggaacgcccgttttcttctggaaccggcggctacttggcccttaaaaaggacccctgtttccggggagctccgccttttaatcaatttaatcctcggttggtcaggaaacccacaagtgatatttctcaatacaggggggcacgcaaaaaaaagagttgggatcaccctgggttccccaccctgagggctgctagatatcccccgtatcagctgccaaatgtccgtgtcgccataggagcagtctaatgagaataagggcaggtatctttctgttgaagaaagtgaccagtacaccaaaggaatctcgcttgcgccaccacatctatcaggagatccactcccgtactaggggacacaagaagccccgccgtcaagatgagggctgacatcttttataggtataaaaaaaggcaggtaccagcgccacaaggcgatggaaggaaggttgaaacgtggcagtcgacattccccatcatcaccacgtaaccaaaatgggggtgcacatggtgcgccaataaccgtctagatcacgcccaaccgtggggcaccgacagcacgggggagccgtcatcagcggccaccgagcttggtaagcggcccgggcccaaaaggcgagacccccttttacaaaaacaccccaacaaaaca

SEQ ID NO: 489490 - DNA, 307 bp, Homo sapiens
tttttttttcggttgcccaggctagagtacactggtgtgatcacagctcatttcagcctcaagctgctgggctccagcaatcttcccacctcagcctctcaagtagctgagactacaggcgtgtgccaccctgcccagttaattgtttattttttgtacaaacgcagggggcgtctcactatgttgcttaggttgctcttgaacttctgggctcaagtgatcctcctactttggcctcctgaagtgttgggactacagttgtgagccatcacacccagcatttagtgagggttaatcgaaaaaaaaa

SEQ ID NO: 489491 - DNA, 355 bp, Homo sapiens
atttttaaattatatgtgggtataccctaataccgttgttatttggctttcccttccatccccttatatagaaccttttaaaaatagatgtatgttcaatattgaaaaagatgaaggaaatagctccccttttaaattccagcaaggttaaaatccctgctcttctaagaaagttcagtgccatgctattcataaaaatgtgcccttagtagtctttgtaattataaatatatagtaatgtgggattttatgtgaactgtaaaacttttgtcctatctccctttttcatatctgtgaaaaatatacctatgtgtttgtcatgtctctcaaataataaattaagcttattaagtca

SEQ ID NO: 489492 - DNA, 570 bp, Homo sapiens
  misc_feature (1)..(1): n is a, c, g, or t
  misc_feature (187)..(187): n is a, c, g, or t
  misc_feature (191)..(191): n is a, c, g, or t
  misc_feature (198)..(198): n is a, c, g, or t
  misc_feature (247)..(247): n is a, c, g, or t
  misc_feature (256)..(256): n is a, c, g, or t
  misc_feature (337)..(337): n is a, c, g, or t
  misc_feature (349)..(349): n is a, c, g, or t
  misc_feature (367)..(367): n is a, c, g, or t
  misc_feature (370)..(370): n is a, c, g, or t
  misc_feature (376)..(376): n is a, c, g, or t
  misc_feature (379)..(379): n is a, c, g, or t
  misc_feature (459)..(459): n is a, c, g, or t
  misc_feature (463)..(465): n is a, c, g, or t
  misc_feature (471)..(471): n is a, c, g, or t
  misc_feature (478)..(478): n is a, c, g, or t
  misc_feature (480)..(480): n is a, c, g, or t
  misc_feature (483)..(483): n is a, c, g, or t
  misc_feature (485)..(485): n is a, c, g, or t
  misc_feature (487)..(487): n is a, c, g, or t
  misc_feature (493)..(494): n is a, c, g, or t
  misc_feature (546)..(546): n is a, c, g, or t
nacaagtagcttgagactccagctgaaatcatagaggtagtttctgtttaaatcctgggagaccttagataaggtatgtgaactgaaaaaagatcaaatcagcacacacagataaaggatacaacagataccaagatgggtaaatgcccaattattttcagtcctcataatctgtacatagctatgnggcnacccgtnggccatatctcactaggcagactttgaggtagatgtttccctatttganacacaaganattatgacaatatggagatgaagagggagtagttctgtgcttcttgctgtgttacctttattatattcctagtgtcactgncactagtttaanaacaagcctgccacaagnatnttctcntcncccgccaccttttcctcctttcttctttttctgttgctgtttcttttttgttgctggtgcccctgctggtttctggtgtnttgnnntttttntgttaantntanangnagaaanngttgcagcactgccaggtcttggggaggtgggtgggctgctcacagttttantggcatccagttcagatgaagctc

SEQ ID NO: 489493 - DNA, 429 bp, Homo sapiens
tattcaactccctaactctccattacatttgattccattcgggttgttccattccattccattccattccactgcattccattgcactcgggttgattccattccattccattccattccggaagattccattccattacattccattacattccattcccctgcactcgcgttgattccattccattccattccattccattccattccgttttgttccgttccattccattccattccattccattccattccattccgttccgttccattccattccattccattccactctattcgggttaattccattccattccattcgattgcaatcgagttgattccattccattccattccattccattccattcctttcccctgtactcgggttgattccattccattccattccaatccatgccattc

SEQ ID NO: 489494 - DNA, 840 bp, Homo sapiens
  misc_feature (13)..(13): n is a, c, g, or t
  misc_feature (89)..(89): n is a, c, g, or t
caaaaaaaccacnacaaaaacaaaaccacccccacccacccaaacaaaaaaaaaaacctaggcgtgaaaacatcctgctgtcactccanctgccgcaagccctgctgctgccagtccagctgctgtgttcccgtgtgctgccagtccagctgctgcaagccctgttgctgccagtccaactgttgtgtccctgtgtgctgccagcgtaagatctgaggctctggacccacaccttcacgcttctcctgtttggtgaacgcatctattatggatccctgaatcattttttcccacacatactacctgaggcacctaaacctgctatatgcttccctccctgctaacgacctacttacatggctcacattgcttccccgccctccctcctatcttctcactccacacaccaccccaccccctccgccctcccagcaccccccccccaccctacttccacccgcaaccccgactttccataaactccagagcgacccactatcacactctatctcagcgaatccgtcccatatgtaaatctccacctccagcaaatttaataaaattcttccagactcgcaatccacataatatctctcaaaaaagccccacacaacgtcaccacagagggcgatcacgaccgcgccccccacccccccgcacatcctccccccccacacccgctacccgtctccagccaccccacaagcacccaccaaaataaacccccacaacgcacctcaaccactacaataatatatccttaacctccaacgcatatacaatatcacaagatccagacaaaacggccacatacgccagatcatctcaacgccaaccacg

SEQ ID NO: 489495 - DNA, 259 bp, Homo sapiens
  misc_feature (250)..(250): n is a, c, g, or t
agtgtaaccacccatataataaatccacctcttccgctgttttagctgaagaattaaaaaaaaaacctggctaacacagtgaaaccccgtctctactaaaaatacaaaaaagtagtcgggtgtggtggcgggcgcctgtggtcccagccactcaggaggctgaggcaggagaatggcatgaacctgggaggcggagcttgcagtgagctgagatcgcgccactgcattccagcctgggcgacagagttanctccgtctc

SEQ ID NO: 489496 - DNA, 150 bp, Homo sapiens
atcaacattgtcgacattggacacgtagattcgggcaagtcaccactactggccatctgatctataaatgcggtgaatcgacaaaagaaccattgaaaattaagagaaggaggctgactgggatgggaagggctcatcaggtttacctgg

SEQ ID NO: 489497 - DNA, 337 bp, Homo sapiens
ccctctttcatcccctgccaattttagagggaaaaacatgtaattcttaaacccagaccatttccctttcaaagacaggaaagagatggacgctaaaatgcagatataaaaatgttccgagggctgggcacggtggctcacgcctgtaatcccagcactttgggaggccgaggcaggcggatcacctgaggtcaggagttcgagaccagcatggctaacatggtgaaaccctgtctctactaaaaatacaaaaattaggtgtgtgtggtggtgcgctcctgtagttccagctacttgggaggctgagacaggagaatcgcttgaacctgggaggcga

SEQ ID NO: 489498 - DNA, 300 bp, Homo sapiens
  misc_feature (11)..(11): n is a, c, g, or t
  misc_feature (42)..(42): n is a, c, g, or t
  misc_feature (130)..(130): n is a, c, g, or t
  misc_feature (138)..(138): n is a, c, g, or t
  misc_feature (161)..(161): n is a, c, g, or t
  misc_feature (173)..(173): n is a, c, g, or t
  misc_feature (262)..(262): n is a, c, g, or t
  misc_feature (265)..(265): n is a, c, g, or t
cggtgcattcngacacgggacaccaactttcgggacgaactncatctgccgcgtgcccaaaagcaagctggaagtgggccgcatcatcgagtgcacacactgtggctgtcgtggctgctctggctggagntggcgcgntccaccctggactctggacttcncaggttcctgcntgtcacgccacccccttcctgggagcagcgagcagtgccccaggcccgagttggagcacggtctctatggggaaggtcgctgtctatcngcntgtgatttgtaaaaataaaatctttaaatctctcg

SEQ ID NO: 489499 - DNA, 305 bp, Homo sapiens
ggccatcgggtgcccagacaaaacagtggtgtctgctggacaatgagaatccaggagtgggaggtggcgcctggtgagctctatcgacctgcctggaatttctaggtcacccagatgctctgcggcagtgatctgagccacgtggcacaccctctccctctctggtcctgccttggggacccatcctagacttgcagcttttcatggtaacctgcgtgtacacttaaatgctttgcgttccgtttctgcttgatgatgatgattgttggtatatattttacaatgacatggaaaacaagttccag

SEQ ID NO: 489500 - DNA, 156 bp, Homo sapiens
gacacgtgtgagtactgcatgttgggaagttggcgacagacatctgctcgctttgcgtctatcccatacacctgtgcttctgcctccttccccacccattcccactccctgggtagaggagaggtctacagagcccaacccagtactatactgtca

SEQ ID NO: 489501 - DNA, 307 bp, Homo sapiens
aagcagtagacagtgaagatctgctggaattgtccgaggagcataaggaacacctgttggcttcctgactcaagtgtgacagcgcggtggtcgccgagtttgggcggattgctgtgagaattcctgagacgcggcgcaaaaccgataaatctacgacggcgccgcctgaaaagtcaatgtgagtagtgacactgtcctggatggtgtgtgaggattaacgtagtctccgtcactgagagcacaaagttcatgagtttctgagctggatttccaagaactctgtttcttgtccatgggaattctcgtg

SEQ ID NO: 489502 - DNA, 939 bp, Homo sapiens
gagacatcatcagtggggtggagactgcatgtttgtgcaggaaaagctgagaagcggcaatttggcacctgcagagctggccattgtggctgcagacagaaaaaggactttcctcacgggatccctgagtgtgggacagctgccctgagattcacactcatgctcccatggagttcaggcgggcgacttgcaactgtcagtcatctgcggtccagacgctgcacgacattatcttgcaacaagatctggaatgctcttcgctttatcctcaatgctttcggggcgaccttttgtgccacagaactggctgaggcgctgatctccctcactcccacgagtggatgccttggatcctgacgccgacattgacctgatgctgcccaggagtgtgagcgggggcattcctcacccgagagatcatcgctcgatcactcatgccctgtaccacttcttggcattcaccaagctctgtgcacgtcataacttggacggctgtgacgacccgtgctgtggcactcgcacccgaacccactgaggggacccacataaaggatcctggtaatcccatgggcttgaacatcaggagcatccagactcctgggacccaattgactcgacccttccattgagttgaaggcatacgtcatcggacacacagcattgaaacaaacagggaaccaaagagaccaggcaacccaccagaccacacaagagaaacccacgagaagagcacaacaaaaaccaacccagcccacagcgacaaccaacaaccacacggacgcgcaggcaacaaccaggcaacgagcaagcacccaacaacccacccgacaccaagaccacaaacagcgcaacacaaaagcggcaacaaccacagacaaacaccacacacacgacaccaccaacagaccgcgcacacaaagaacactgccaccaaaaaac

SEQ ID NO: 489503 - DNA, 111 bp, Homo sapiens
gggtccagttcaactcggtacgtgggatggcgtgggaggttgcataatggccaagacaaaggccgccgggagggagcagttcgaaccaacacgtgacccgcgctgggtgca

SEQ ID NO: 489504 - DNA, 350 bp, Homo sapiens
  misc_feature (292)..(292): n is a, c, g, or t
ctccaacacagcccaaggcaggtttagacactagcatcctgcccatctgcaagggctccctgggctgtatgtacaacaagctggacatgaactatgacctcctgcttgacccttcagagatcaatgccatctacctggttaagtacgagccctggatcaagcctatgttcaactcgagtgacttctccaaggatggcacgctttctaacaatgagtggtgctactgcttccagaagcctggaggtctcccttgccagaatgaaatgaacagaattcagaagctgagtaaggngaaaagcctgttgggggccttcatacctcgatgtaatgaggagggctattacaaagcc

SEQ ID NO: 489505 - DNA, 130 bp, Homo sapiens
aatatctgacgcagaatacatgtgaaagagtctctaccctttctgtcgaagttcattttatcccttcctgtctgaacaaaactgttgggatcacaccaacgaggctctgtggggaaaaacgaaaacctgc

SEQ ID NO: 489506 - DNA, 440 bp, Homo sapiens
ctaaggattcctcctaagacatgtcccatctgttcgggacacactggaaatctggacgttcaactcaactggcagcactcccagagcccctggaactctggcccaagggtctctgactgactccttctcggcttagcggctgaagactgatgctagccgatcgcctcggaagccccgtagaccatcacggacaccgagctttgggtaactctcacagtggaaggtaagtccgtccccttcttaatccatatggaggctacccactccacattaacttcttttcaagggcccgtttccgttgcctccataactgttgtgggtattgacggccaggcttctaaacctctttaaactccccaactctagtgccaccttagacgatactcttttaagcactcctttttagttatccccacctgccccgttcccttattacgctg

SEQ ID NO: 489507 - DNA, 105 bp, Homo sapiens
  misc_feature (80)..(80): n is a, c, g, or t
cacttctcatgactgaccctcgccccaacccctattttagagaatacggctgagatttaatatgtgtctgtcacagcctntcctggtgtagaaagactaagccaa

SEQ ID NO: 489508 - DNA, 361 bp, Homo sapiens
cgtaatttatcccaacactaacgacagctgacgcgcttaaaaatagtcgcaaaaaaatctcataaagttggctgggcgtggtggctcatgctataatcccagcactttggtgggcaaggtgggtggatcatgatgtcaggagttcaagaccagcctggccaagatggtgaaaccccatctctactaaagaatacaaaaattagccgggcgcagtggcaggcgcctgtaatcgcagctacttgggaggctgaggcagaacaatcgcttgaacccgggtggcagagtctgcagtgagccgagatcacaccactgcacactagcctgggcaacagagcaagactctgtctcaaaaaaaaaaaat

SEQ ID NO: 489509 - DNA, 581 bp, Homo sapiens
cgactcagaggatccatagctgtgtcatacggaaactacaactgcacgcaagaactattaaggtatcagaaacgtgagcagcattgttcgcattcggcatttgaaaacaatttgcgtggaaactttaatttggtcctggaccggtcaagaaaaacattattgaggaaaattaatatcacagcataaccccaccctttacattttgtgcagtgattattttttaaagtcttctttcatgtaagtagcaaacagggctttactatcttttcatctcattaattcaattaaaaccattaccttaaaatttttttctttcgaagtgtggtgtcttttatatttgaattagtaactgtatgaagtcctagataatagtacatgtcaccttaggtagtaggaagaattaccatttctttaaatcatttatctggatttttatgttttattaggattttcaagaagacggattatctagagaataaccatatatatgcctacgtaaaaaatggcccccaggtggacttaattgtagttgttagttgccctgttacctagtttgttagtgcctttgagcccccatatta

SEQ ID NO: 489510 - DNA, 771 bp, Homo sapiens
agcggggggtcgcggggcggggaggcccctccgtgcggggcggccctgtggtggtccgcgcacaggcggaggccgctccgatgcctgtgcagcctctgggcgcctgctggatcgcgggcgatgatgggcggcgttggtgccgcctctgcgttggtggacccgcggggctcgcgacgcatggggacacttggctctccctcgccgtagtctgaagctgttgcataccgcggagttcacgggtccccgtgccaagagaccgactccgccgagagtggcctcgtggccgagcgatccccgacggggtggactgctgtgcatcccttttgccactcccaagcctggcgcgttgcgtatgcgctgtacacggtggtcgttgcagtcccaattgcctggtgttcaggccagccaatctgcggtgacacggctgcgttgtcccgatgccttgggtggccgtcgaaaccccggagtgagcgctaactcgtggcctcggctgctctctttaataatgccctcactcatgggcgcctggggaccctgggtgttcccggctctggactgtccacaccatggatgacccagactgtcggggttccatcccttcaccggcggaccgtgctccgggtccactatggggtagcatttggcttcgccggatttacccctaaggtacaccccaagttccaatggacttgccctataaggttccgtggaaggctccgcctgcgtagaccaagagtaaatacgtgccccagtttgcgcccagggttaccc

SEQ ID NO: 489511 - DNA, 642 bp, Homo sapiens
ggtaccaatgctgttctcaataaatgcattaagacaacaggtacctgtgtcttaatgctgttctcaataaatgcattaagacaacaggtaccagtggatcaatgcatttatatgatagatcagcatgggtaccttcggaggggatgaattcgagaatagtgtgtgctaaattgagtatagtagcaaaatcgtgttaagagtagagtataataatggataataagcaggaatgacggaagtaaagagagtaaagaagaggtcaaaaagaatatataggagagagacatgacgaagatacaacgcaaccaggagaccctgcacaacatagactgcacgaacacggaccgccagagacgacatcccacaaccttaatgcccgaaaactaacaggcgaaagcccaactgcggcctacatgaaggaactaagccacaaagtcgcaagcaagacgcccatcagaaaacagaccaagacagaacggacgcaggagcacccagacccacacatagccaccaccgagaaaggggagagaagccgcaacatccagcgcaaaccgacggaacccaccagcaatcgagcactgagtgacacacaataaacgagcagccacgcaaagaacaggatggcgaacagcacgaaacaac

SEQ ID NO: 489512 - DNA, 731 bp, Homo sapiens
  misc_feature (32)..(32): n is a, c, g, or t
  misc_feature (543)..(543): n is a, c, g, or t
ggtggtggctcacgcctacaatcccagcactntgggaggccaagtctgacagattgcttgagtccaggaattccaagaccagcctgggcaacatggtgaaaccccatctctactaaaaatacaaaaattagccaggtgcgatggcgggcgcctgtagtcccagctactcgggaagcagaggcaggagaatcgcccgaacccaggggcagaggctgcagtgagccgagatcctaccataagagctccaacctaggtgacagagcaagactgtctcaaaaaaaatcatcttcacaaataaaatttgcagcctttactccattgctggtcattactgttcgtgtacacagtgttcttgaaatatacaagacaacaatatgcctttcccataaatacattagcagctaatatgtgcccattaacacaccttacacaatttaggccaggtaccagtggctcatacctgtaatgccagcccttttgggaaggcccgatggcgggagcgatccacctggagggtcaaggagtcacgagaatcagccctgnggaacaaccattgcgtggaatcccggacccgaacacacggggcatacccaaccaggtggaaggggaattggcacaggcgcctcggaccacagaggaacccccgggctgaggactatcatactctcacaggcggcgggaccaaacccagacaggtgaaaaaacggagaaccatatggctaacaaataag

SEQ ID NO: 489513 - DNA, 303 bp, Homo sapiens
agggaattcgtgctgatgctatctcttccagtgaccatccaggcacgggtgagcacaggccaggctggtagactgcaatccagggtggaacagactgtcctccatgtcagttccttctggcttcaggcccgcaattctttcgctttgagcttttttagaccccagatctcctaggcccaggctctctcttgaccccagagaagccactgtcaggaaaggaagtgaaccctactgcaggctgacgagtcacccggtacaagcaggccctctgggtccagcccctcattccacaccacaccagca

SEQ ID NO: 489514 - DNA, 143 bp, Homo sapiens
cataattaaaacacatctgtgtagagtggctttgtaatgaaagtaccttgtacttcaagcttgccaaactacctgtaatctccccaataagaaataatagtacttgtagatagttgtcctgagaaatactcatctataatcac

SEQ ID NO: 489515 - DNA, 212 bp, Homo sapiens
cagagcgctggcgcgcatttctccgcctgctgcttcgggccggttgtatcggcgagcgagcgagttcccgcgagtttctcggtgggcgctcccccctttcctttacagtctccacggactggcccctcgtcctatctacttgaccgctcccgtcttccgccgccttctcgtgcttcccggtttgggcctgattcccggccccgtttcctcct

SEQ ID NO: 489516 - DNA, 264 bp, Homo sapiens
  misc_feature (65)..(65): n is a, c, g, or t
  misc_feature (72)..(72): n is a, c, g, or t
  misc_feature (79)..(79): n is a, c, g, or t
  misc_feature (84)..(84): n is a, c, g, or t
cggcacgaggtgtgaccttactcaactgattatcaccctccctgtcatacaatacttcctggctngatttcntgggggntggtntcagcccactccacctcccctcagccgagcctagagtagaggggccaggcatcctccccaggggaggggcgttgaagcaaggagcctctcctgggctgtcctagcctcacatttacttgaccacaataacctggcaggaggagctggtggaaaggatgaagagctgactgatggggaaga

SEQ ID NO: 489517 - DNA, 155 bp, Homo sapiens
ctcttgctcacagaggccccgccactgctggaatactgggacatcagctagctgggcactgcccacagcactagaggactttccctaatcacttcttcagaagagagttgtactctttgcgtctcctatgttccatctggccagcaccagctctt

SEQ ID NO: 489518 - DNA, 401 bp, Homo sapiens
  misc_feature (46)..(46): n is a, c, g, or t
  misc_feature (98)..(98): n is a, c, g, or t
  misc_feature (109)..(109): n is a, c, g, or t
  misc_feature (323)..(323): n is a, c, g, or t
cccgggaccccctgtagatagccaaaatttgcgggtgccccccagnccctttatataaaatggccttagtatttgccatataacctcacaatcctcanccctcttgcanactttaagctcctagattatttataataccctaatacaatgtaaatgcctatgtaaatagttacactgtattgtttagggaattatgacccccccccacaaaagtctggtgaaaccccctctctactaaaaatacaaaaaatatcagccgggtgtggtggcgagcacctgtaatcccagctactctggaggctgaggcaggagaattgcttgancctgggaggcaggggttgcagtgagccgagatcgcgccattgcactccagcctgggcaacaagaacgaaatccgtctc

SEQ ID NO: 489519 - DNA, 656 bp, Homo sapiens
cggacgcgtgggtgaccacctcaaccacactgtcctgggccctgctgctcatgatcctgcatccagatgtgcagcgccgtgtccaccaggaaatcgacgaggtcatagggcacgtgcggcatccagagatggcagaccaggcccgcatgccctacacaaacgcggtcattcatgaggtgcaacgctttgcagacatcgtcccaacaaatttaccacatatgacatcccgagacattaaattccaagacttcttcatccccaaggggacgacactcattcccaacctgtcctccgtgctgaaggatgagactgtctgggagaagcccctccgcttctatcctgaacacttcctggatgcccaggccactttgtgaagcacgaggccttcatgccattctcagcaggccgcagatcatgcctgggggagcccctggcccgcatggagctcttcctcttcttcacctgcctcctgcagcgctttagcttctcagtgcccgatggacagcccagacccagtgattatggcatctatacaatgccagttactccagagccctatcagctctgtgcagtggctcgatagcaggggcaatggtctaccttcccccaagtttggcctagatttggtgttcaataaacaagttctggtgtcttgc

SEQ ID NO: 489520 - DNA, 400 bp, Homo sapiens
  misc_feature (12)..(13): n is a, c, g, or t
  misc_feature (75)..(75): n is a, c, g, or t
tccttataatannagatagaccagataggttgagtgtgtcaagttgaacagagtcatataaagacgtgactcacntcaaggcgaaaacgctataggcatggcactacggacatacctaataagttttgggtcagtgcgaaaactatatgaccctaagagccccattaacttacgggaagcgcaacctcagaagaagataaaccaagacgccctaggcttgaaataacgaactgcgaacacaacgcggctaagccgtaaagggtagggctttgggaaggccgacccattattttaaacataaattctataaaaaccaaattaatttaagaaaagttaactcgggccaccttgtgcatcccttgtacaaactgaaaaataaataggccaggttcatttacag

SEQ ID NO: 489521 - DNA, 1075 bp, Homo sapiens
  misc_feature (38)..(38): n is a, c, g, or t
  misc_feature (41)..(43): n is a, c, g, or t
  misc_feature (964)..(964): n is a, c, g, or t
  misc_feature (985)..(985): n is a, c, g, or t
  misc_feature (999)..(999): n is a, c, g, or t
  misc_feature (1014)..(1014): n is a, c, g, or t
  misc_feature (1063)..(1063): n is a, c, g, or t
actcaccccggcaactacggctaggtacgaggctgggnggnnngtgggttgtgggcggcccggtctcggagaagaggggagagtggagggccgctgaataagcttccaaaatgatgcccacaccagttatcctattgaaagaggggactgatagctcccaaggcatcccccagcttgtgagtaacatcagtgcctgccaggtgattgctgaggctgtaagaactaccctgggtccccgtggcatggacaagcttattgtagatggcagaggcaaagcaacaatttctaatgatggggccacaattctgaaacttcttgatgttgtccatcctgcagcaaagactttggtagacattgccaaaatcccaagatgcttgaggtgggtgatggcaccacctccagtgaccttggcgtggctgcagagtttctgaagcaggtgaaaccctatgtggaggaaggtttacacccccagatcatcattcgagctttccgcacgagcgcaccctcagcggcagttaacaagatcaaaagagattgctgtgaccgtgaagaaggcagataaagtggagcagaggaagctgctggaaaagtgtgccatgaccgctctgagctccaaagctgatctcccagcagaaagctttctttgctaagatggtggtggatgcagtgatgatgctcgatgatttgctgcagcttaaaatgattggaatcaagaaggtacagggtggagccctcgaggattctcagctggtagctggtgttgcattcagaagactttctcttacgctgggtttgaaatgcaacccaaaaagtaccacaatcccaagattgcccttttgaatgtcgagctcgagttgaaagctgagaaagacaatgctgagataagagtccacacagttgaggattatcaggcaattgttgatgctgagtgggacattctctatgacaagttagagaagatccntcattctggagccaagttgtnttgtccaactcccnttggggatgtgggcncccagtactttgctgacaggacatgttctgtgctggcgagtacctgagnggatctgaagag

SEQ ID NO: 489522 - DNA, 133 bp, Homo sapiens
ttttttttttttgggggggcctcccaggggtacttccccccccctgtttttttggggggggggccctcccccccctttggttcctggggtttggttttcccccgtttgcccggttaaggccttttttcggcca

SEQ ID NO: 489523 - DNA, 1797 bp, Homo sapiens
aggaggagtggttcgctccgtctgttattcctatgtttttgtttatatcgcctgcgtcctctcctcgtcctgttgttggtgtggtgtctgtacgtggtgtttgcttgttttgtgtgtgctctctgtgtcttgggtgggtggtgcgcgctctctatatggtgtgtctttcgtcgcgtgcgtctggggggtggttgtgctgtggcgggtggggtgcggctccgactatctgcgctcgggtgtggttgctagtcgttcgtgctgtgtgttgtggttgcgtcacagctcggatgtttgttgccttctcctcctcgcagttagtggtgttggtgggttatttctccttccgccctctctctatgctacttgttggtggttgtggctttgattgtgtggcctcgctgatggtgtgggtgttcgcgcgactatcgccctccttcttatctacttgttgtggtgggtttgttcatacgtctctcgtctgtctgcttagtgttggttggttgtgggttctggttgcgtgggccgcggccggtctcttattgtgtattgtgcttgtctttgttgttttgtgtttgggcgtctgtgtgtgttttgcttcccccgctccttgcttgggtggttgtgtgtgtgcgtctgctcagtagatcgtctgctgttgtatcttcgttgttgtgtcgtctcccgcggctggtgactgcatcctccgcagtgtgttggtgggattaggttgttgtgggcctgttgtgttgtcgcgcgggttgtaggtgttttttgtgtgtcgtggggtcttgttttggttgtgtttttttgttggttgttgtcgtgtgcgggggtgttgttttttgtttgttttgttctgtgtagttgttcgttgttgtggggcgtcgtgtggtgtgtctctctcctctcgtctgtatattttggtaagtattagtaaacttttgtggtgggtcgactctcctgtgtgtggaataataggtggtggtatgtcaaccacgcctccttctttctctgtgttgtttgtgtgaagtattgtcagctagaggcctatgttcgcctcaccccgccgccacagagttgtttgtcaccccacaacattggtgtgtggtcgctctgcagtgggtgaggatcatgtttgttgggttgtggccacgccacatttgtgtgtgtgtgttttgtgtgtttgtaatataggggtgcgtctgtgtcgcccggattatttggaggatatgtgcgggtgtgtgtgtatcgcaccggggaggtgtgcgccctcgtagcggcacatgtcgcttgtaaagagcgcgcacacgcgcccgcttgttctctctctcgtaaagagagagaatttgggccccccgtggctctctctgtctctcacacgtgtcgcacacaccacagagggagaggtgtatatatccactctgtggctgtttgtatgtgtggtgaaggtgagaggttataagtgcgaccaattgtgtgttttatagttgttgcgccgctatagaactctgttgttagagtgtggtggtgttatatgttgtaatgtatgagaccgtctgtgtgtgcccaccccgtctgcccccgtcttgtttggttcccgcccacactgtgtagaaagtttatgtgaggctgtgttgtgttctgccctcgggagaggtgtggtggagaggcacacccacagggccttatccctggatcacctgagacttgtagagccaccgttgtaagtttaagggcaccccccttttaaaataaaaagataatatactcgagcaataaactcgggccgaaaggaga

SEQ ID NO: 489524 - DNA, 985 bp, Homo sapiens
gcctggactgccacaggtgtgcaggacacatgagtcttagtagctggagatgctgctcaaatcagaagaaacattttactgaagtcaaagtggtgccgcctacatctctgcagtgtggttcgaatatttacatcaggatgctctatcgatcactgggagatgtcctccgtgatgtggatgccaatgctttggtgcgctcatgacttccttctggtgttctggggatgtcgattctcaataccatcgatattattcatcgctagaagccctttgaggaatcacagggttgagacggaagctacagaagtagatgtttcgtgtgaatgaccgagagagacttcaaaggaagtcaatcccccgagctcatcccaacgtcgttgccacgaagacaaatgtggtagtggctgtggatagtaccacaaacagggttctccattttcagaagacccaggtctccggcgttttgcatttcctctgagcctgtttcagggcagtagtgatggagtggaggttcgactatgatttactggattgtcggtatcagcatctgttctcctcaggtggcacaatctttacagacgactttgaactagcaaacctcgagatgagctttgttgcgaggtctcttagtgaatgaggagatcctagggaaccagatccacatgcacgtaacgagcttatggaatatggtgcccgtgtatccaagctagcgacattgtctcagctgtctgtgctgacgtccatccgcgatggttctacctctcacgccagaggcgaacttcactgataggtcaccagaagtgatcattcccgctaacgtctacgggggctgaggtcagcctggctggcggtctgaggaatggtcctgggctgcctgcttggggctgtttttcccggttttgccgggccctggctactggggcccccccttgcgggtcgtggggggccccccttcttggagtgtggatagcctgcccgggggccc

SEQ ID NO: 489525 - DNA, 863 bp, Homo sapiens
  misc_feature (8)..(8): n is a, c, g, or t
  misc_feature (68)..(68): n is a, c, g, or t
  misc_feature (75)..(77): n is a, c, g, or t
  misc_feature (81)..(81): n is a, c, g, or t
  misc_feature (103)..(103): n is a, c, g, or t
  misc_feature (106)..(107): n is a, c, g, or t
  misc_feature (112)..(112): n is a, c, g, or t
  misc_feature (114)..(114): n is a, c, g, or t
  misc_feature (125)..(125): n is a, c, g, or t
  misc_feature (131)..(131): n is a, c, g, or t
  misc_feature (143)..(143): n is a, c, g, or t
  misc_feature (149)..(149): n is a, c, g, or t
  misc_feature (154)..(154): n is a, c, g, or t
  misc_feature (156)..(156): n is a, c, g, or t
  misc_feature (158)..(158): n is a, c, g, or t
  misc_feature (172)..(172): n is a, c, g, or t
  misc_feature (205)..(205): n is a, c, g, or t
  misc_feature (208)..(208): n is a, c, g, or t
  misc_feature (210)..(210): n is a, c, g, or t
  misc_feature (214)..(214): n is a, c, g, or t
  misc_feature (224)..(224): n is a, c, g, or t
  misc_feature (233)..(235): n is a, c, g, or t
  misc_feature (240)..(241): n is a, c, g, or t
  misc_feature (243)..(244): n is a, c, g, or t
  misc_feature (255)..(255): n is a, c, g, or t
  misc_feature (267)..(267): n is a, c, g, or t
  misc_feature (269)..(269): n is a, c, g, or t
  misc_feature (273)..(273): n is a, c, g, or t
  misc_feature (275)..(275): n is a, c, g, or t
  misc_feature (277)..(278): n is a, c, g, or t
  misc_feature (292)..(292): n is a, c, g, or t
  misc_feature (310)..(310): n is a, c, g, or t
  misc_feature (355)..(355): n is a, c, g, or t
  misc_feature (357)..(358): n is a, c, g, or t
  misc_feature (364)..(365): n is a, c, g, or t
  misc_feature (369)..(369): n is a, c, g, or t
  misc_feature (372)..(372): n is a, c, g, or t
  misc_feature (414)..(416): n is a, c, g, or t
  misc_feature (419)..(419): n is a, c, g, or t
  misc_feature (423)..(423): n is a, c, g, or t
  misc_feature (428)..(429): n is a, c, g, or t
  misc_feature (431)..(431): n is a, c, g, or t
  misc_feature (440)..(440): n is a, c, g, or t
  misc_feature (445)..(445): n is a, c, g, or t
  misc_feature (452)..(452): n is a, c, g, or t
  misc_feature (455)..(455): n is a, c, g, or t
  misc_feature (498)..(498): n is a, c, g, or t
  misc_feature (510)..(510): n is a, c, g, or t
  misc_feature (563)..(563): n is a, c, g, or t
  misc_feature (637)..(637): n is a, c, g, or t
  misc_feature (850)..(850): n is a, c, g, or t
tgaagtgnaatttttcaaaaacagtaaaagcgggtttctcctaaactattttccttgtggtagtaganatcagtnnntcanaaacaactcctgaccacttggnttnnttttnanccgcgtcattnggaggnaatctgtaaaantagcanaggtntncngctgttccactggntcacccacatgattagcagagtgcacgaaaaantanantttntattaaagantcatgctgnnnacccnntnnggggggttgtnacattgcaaacncnctancngnngggggcctggccgnctggcgttctccaaaggnctcccaacaccatctctcctctgatttctgtgacaaatgtgggangnnacttgnntggnggngcgggggggactggggggggggctttcatcctgttagggggnnngcnttcnattcnngngtctctgtnttgcnccctggngangggtgggtggggggggggggcacagtcagctggggcagcaggnactccctacggnactagtctacagggggaaggacgctctgtgctggcagcggtggctcacatggnctgtctgcactgtaaccacaggctgggatgtagccaggacttggtctccttggaagacaggtctgatgtttggncaatccagtccttcagaccctgcctgaaacttgtatcttacgtgaacttaaagaataaaatgcatttctaccccgatctcgcccccaggactggcacgacaggcccacggcagattagatcttttcccagtactgatcggtgcgtggaattccagccaccacttctgattcgattccacagtgatcctgtcctctgagtattttaaagaagcnattgtcacccagt

SEQ ID NO: 489526 - DNA, 412 bp, Homo sapiens
aacgacggcttcatacgacggcttcagcagtctctgataaaataggcatagtcccaaaacaggaaacgacatctacacaagataaaggtattatactcaacttcacacacacgggctccatgcactgctgaccaacatgtcaccaggcgaggacactcaatcatgtatgaagccaacatgcttgctgtcccctttgaaggcatccttcgagctgggacccctggttcgcaatgtcgtttccctcttcccgtgttccgagtgtcgtagcgtgtgccactcttctagcgactgggcgtgtgtgagtcagctcatggcttcaattaatacacacagaagtccctgcctgcccgcctgcttggaaatctttggtactgctggttaatttccaacttcaactgggacaaagaaggca

SEQ ID NO: 489527 - DNA, 400 bp, Homo sapiens
gcaataaaagcaggggttgtcccctgtgcgagatttttggccccccccccaggccccccgagaacttgtcccgcttctggcggtccccactccgggcctcctttgggggactggggggcttccgttagggggacattcgggaaagcctcccaatgctctggcaatgcccacaaaaagcgttccccacactgccggtgggttgcccagcccccgggattcccccctgtagccttttcccctgtccctggtgcataaggaggcgcccatcaccgttcccccatttgttccaggcccggagcgcaactcgttgtcccatgaatttttttccgccccgcccttggcaccccccaatgttggggggccaaaaaacccatctttttttttttttttttaataagga

SEQ ID NO: 489528 - DNA, 225 bp, Homo sapiens
ggtagagctgcaaccggtatattttccttctgttaaacacccattctggacacaatctggcgccatcgaccttcttgtgaggccaagcctgaaaatgcgaagcagagaggcaggagcaaaattgaggcgaattcaggaacctgccaatgtggctctccggagctgcggtctctgaaactggcggactatcgcgcacggacaggtttctccgatgcggcagctaac

SEQ ID NO: 489529 - DNA, 298 bp, Homo sapiens
tcatgaacttcctggtccagatagtaccgtgtcattcatcgtggtgatcctgtgacaaaatatgttccatggctgaaaaatgttcaacaatgattgacgctcatgttgatgtcaagactacgatggttacttctttcatcttgtttagtgttggttttactaaaaaacgcaacaatcagatacggaagacctcttatgctcaggaccaacagtctgccaaatccagaagaaaatgatggaaatcatgacctgagaggtgcagacaaatgacttgaaagaagtggtcaataaactgatt

SEQ ID NO: 489530 - DNA, 710 bp, Homo sapiens
tggaagggaaaattggttttatttcaattatttttatgtacagaaaactcaaccagggtacttttaccccagtttagtgggcaagttctttagcccttggccttttcgagctgggcgatacgagccacagacttaggacccaggactattggccaccccagtgacgggggatctcatcgtatctggtcattggtaatgggccctgatagcttccaccagcttagccaaagcgccttggtctcccgagttcacctggtgtgaaggcgacagtgggtgcaggtcttccctggtgggactagactgtcccagttctggccttccccttgataatggcagtaaggggacccccattttacgacacagggcaggcaagaagacaaccagtctcgatggggatccacgtcgtggtgcaatcaccaccagctgagctttctggttctccaccaggggtggtgacggtgttaactccggctcgaaggacagggtggtctcttcgtggggacgtcccctttgccagcagccttcttctcggcccgggccaacagtctcgtgttcttctctggctatgctctggtctgtacttgtggggcccagttaagcaggtgagttagctgttggcgggccaggccctgggttgaactggttaccgcgggaggacttcaagcggtataaaggagggctctgcgggggactgtatgcgggccttccag

SEQ ID NO: 489531 - DNA, 415 bp, Homo sapiens
atgtatcgccacactctgcggctgtgtcccacaatcagccgtctcagacactgagagggtatatatcttttcaggctgagagaaggtccagcattaccaggagttcttgggattccacaggttaactggcttgttcccaatttcaagtgaccatcacattccatttctggacagtattcaacacatttgataggggcattatgggttccaacaaagattttctttgatcagtgttccaatccatgcattttccatttggattgatctagtcctccactccaggcatgggttggatcgtagaagggcgcagtccaggacggcgccggtgtgctggtacttgagccgcatggagttggccggcacatcgtagagacgcacggacgtgtcccaggaggagacaagcaggaactgggag

SEQ ID NO: 489532 - DNA, 514 bp, Homo sapiens
  misc_feature (503)..(503): n is a, c, g, or t
gatccacagtcgtggttatagcttgaaccggagccaaaaaaaacggcaacacagtcatcagtcaggccaaggccagctctgggagcagaaaaggccatctctttctctgttctcttcaccttcttaggggaaaggactctaaacaaggttgtgggaaagcccaccagtatgtttcccccagtgctgacctctgccttcacagtcaaaaagctttctgctttgccacaaatatctaaggagcatagaaatatctgtgacatttcaaatattgttccaaccaggggtaaatattaaagagtctgtcagagttgtcttctagagattacctaggtatagcctaatgtagcaagctgggttattagaaataatctgtagtacaattttctgtgtgtagcctcaatttccttatttactaaataaggcgacttggttggttgatctttgaggcttcaagtccagacgtctaaaacttcatggggctatttatgtatgtaatatttggncacctaaatcg

SEQ ID NO: 489533 - DNA, 359 bp, Homo sapiens
atgtggagagagaacgggacattgacttcccggagttcctgtaccatgatggccagatagatgaaggacacagactgtgaggaggagatccgagaggcgttccgtgtctttgacaacggatgggaatggctacatcagcgccgcatagctgcgttcacgtaatgacgaacctgggggagaagctgaccgatgacgaggtggatgagatgatcagggagggtgacatcgatggagatggccaggtcaattattgaggagtttgtacagatgatgacggagaagtgaagggctcacccgggcagatggcgatgcccgtgctcttgatctctctcttctcgcgcgcgcattctctctccact

SEQ ID NO: 489534 - DNA, 164 bp, Homo sapiens
tctagacgatcccgtttagcctcgccagtgtggtgaagccatgtttatactaaaaatacaaaattaggtcggacattgtggtgcacgtctgtcatcccagcaaggcaggcgaatcgcttgaacccgggaagcggaggttgcggtgagccaggatcgtgccattg

SEQ ID NO: 489535 - DNA, 772 bp, Homo sapiens
  misc_feature (258)..(258): n is a, c, g, or t
ggtgggcccccccggggcagtcccatccttgccaaggccaaaaattagtgcccgaagtttggcccgtttgtggttaagacaaacaaaaggttttttataaccgcaagtggctccccgcatgaaatttacacctggcccgtttgttagttcaagaatggtttttttgaaaattttgatgactagtacttcaaattggtccaaaaggttactttcaatggctggtgttacatggccccagatgggtcaaaaaaccccggngcaatgggtctcctcagggtggatccagtgacaagaaccattacaaagatgctaaaggggcggtcattgtcctctaacctgtttggggcatcgggctccttgtagtcccttcctcggtctcggagatgctatggacattcatcatggatacatacacctgcgagcatgcattcgtgcgcccatttagcaatagtgttcctcaacagtcgtgtatgtaatcatagaagcatacgaactatggagcttaaatgtcatatcaaaacaagaaaaaataggccattcatcataatgagcctctcgcaattgttcatttcaatgtcaggaatcacttattatttggttaacctgttgctccgtaatcagtctgggcacaaattatttccagcccgcatgctgctctagttcatgtctggtacggctgcggtggaccatactcaattgttagctttcactactgtgtgccggtgtgtcttaacaaaagcaaagcagtgtgtgtcataaaaatcttgtcagc

SEQ ID NO: 489536 - DNA, 519 bp, Homo sapiens
aagctaggtagggctggttgaatcggccgaggtggggcggaggctggcggttaggcgcagaggtctgtgggcctgagcccacgctggactctgtccgttctgcgatgactgctgctctggccgtcgtcacgacgtcgggttggaagatggggtgcctaggtcccgtggcgaagggaccggggaagtggtcttggagcgggggcccggcgcggctaccacatgttcgtggtgatggaggacttggtggagaagctgagctgctccgctacgaggaggagttcctccggaagagcaactgaaggcccgtccagacactattttgcactgctaccaaccctggcgaacagttctacatgttttgtactctttgctgcttggttggatttaataaagggggacggtcccttttggaagcaagccttcaggaatattgatgaaccttaatggcaaaaaataattcttaacattactattccgagctttcgggtccattgggaaagaactgagattttccttcct

SEQ ID NO: 489537 - DNA, 222 bp, Homo sapiens
acctggctccggcttactgacttctgcctcagcatcaatgcgcttcactcccagtgtggctgctcgggctgctaattgcccccaggtcaccctgcccatggtgttgtgggattggtgcatgactacagggggatagagcaacagggtgacggagggtcctagcaacatgacagctgtgacttaggttgtccggggggagcccttggggcagtaggctgacga

SEQ ID NO: 489538 - DNA, 1061 bp, Homo sapiens
  misc_feature (308)..(308): n is a, c, g, or t
  misc_feature (390)..(390): n is a, c, g, or t
  misc_feature (394)..(394): n is a, c, g, or t
  misc_feature (397)..(398): n is a, c, g, or t
  misc_feature (403)..(403): n is a, c, g, or t
  misc_feature (416)..(416): n is a, c, g, or t
  misc_feature (418)..(419): n is a, c, g, or t
  misc_feature (606)..(607): n is a, c, g, or t
  misc_feature (659)..(659): n is a, c, g, or t
  misc_feature (690)..(690): n is a, c, g, or t
  misc_feature (797)..(797): n is a, c, g, or t
tgcctgttttatttatgttttgttgtcttggttgtctggtggtgttgttgttttttggtgtgtttgggtgtgtcgtgtttgttgtttttgtgtgtgcggagtttggcgtgtcgtcgttgtggaggtagaagtggtagagaagagacgaggacaggggaggaggggacgatatatagaatagtagtgatactcttcggggtctaactcgtatgtactctctctcgcccccccttctacgcgccgttggtgtcccccccccgaggcccgctgttggcctttcggggtaacgggcccccccccccctcgcncgacacaagaacggtggggttccccccccccaagtcggcttttaacccaccaaaaatccatatctgggcctggtcacaggtngctnganntaccnggcatgcaccacncnnggaggagaagaggaagaagaaccacgatcccttccgggagaagaacacctcatgaggctacggaaacaggccgagaagaacgtggagaagaaaattgaccaatacaccagaggtcctccagacccccggactcctggtctgagccccataaagactggtaattcctcaagcgttgcctgcccctccnnccattgttgccctggaaagtacgggacccacggggcagctagcagtcccagngtcccacaggcagccctgggacataggaaanctgggagcacaggaaagggttttagtcactgcctcccgaagttgcttgaaagcactcggagaattgtgcaggtgtcatttatctatgacccataggaagagcaaccngttactatgagtgaaaagggagccacgaagactgattgtgagggccctatcttgtgagtggggcatctgttggactttccacctggtcatatactctgcagctgttagaatgtgcaagcacttggggacagcatgagcttgctgttgtacacagggtatttctagaagcagaaatagactgggaagatgcacaaccaaggggttacaggcatcgcccatgctcctcacctgtattttgtaatcagaaataaattgcttttaaag

SEQ ID NO: 489539 - DNA, 119 bp, Homo sapiens
ccggttttgcacaaaggtaggagaacaagtagaccagtgaggcagaatatgtatcggggatatagaccacgaattcccagtaagtgcgggtcataagcttgcgttgattaagtccctgc

SEQ ID NO: 489540 - DNA, 113 bp, Homo sapiens
acccgcttcatatactacccttcatcatacctacccatctcaaaaaaagaaaaagaaagcagaagaaaagaaagaagagaagaaagaagaagaggtaggtatgatgaaggacg

SEQ ID NO: 489541 - DNA, 1109 bp, Homo sapiens
  misc_feature (308)..(308): n is a, c, g, or t
  misc_feature (390)..(390): n is a, c, g, or t
  misc_feature (394)..(394): n is a, c, g, or t
  misc_feature (397)..(398): n is a, c, g, or t
  misc_feature (403)..(403): n is a, c, g, or t
  misc_feature (416)..(416): n is a, c, g, or t
  misc_feature (418)..(419): n is a, c, g, or t
  misc_feature (606)..(607): n is a, c, g, or t
  misc_feature (659)..(659): n is a, c, g, or t
  misc_feature (690)..(690): n is a, c, g, or t
  misc_feature (797)..(797): n is a, c, g, or t
  misc_feature (1062)..(1062): n is a, c, g, or t
tgcctgttttatttatgttttgttgtcttggttgtctggtggtgttgttgttttttggtgtgtttgggtgtgtcgtgtttgttgtttttgtgtgtgcggagtttggcgtgtcgtcgttgtggaggtagaagtggtagagaagagacgaggacaggggaggaggggacgatatatagaatagtagtgatactcttcggggtctaactcgtatgtactctctctcgcccccccttctacgcgccgttggtgtcccccccccgaggcccgctgttggcctttcggggtaacgggcccccccccccctcgcncgacacaagaacggtggggttccccccccccaagtcggcttttaacccaccaaaaatccatatctgggcctggtcacaggtngctnganntaccnggcatgcaccacncnnggaggagaagaggaagaagaaccacgatcccttccgggagaagaacacctcatgaggctacggaaacaggccgagaagaacgtggagaagaaaattgaccaatacaccagaggtcctccagacccccggactcctggtctgagccccataaagactggtaattcctcaagcgttgcctgcccctccnnccattgttgccctggaaagtacgggacccacggggcagctagcagtcccagngtcccacaggcagccctgggacataggaaanctgggagcacaggaaagggttttagtcactgcctcccgaagttgcttgaaagcactcggagaattgtgcaggtgtcatttatctatgacccataggaagagcaaccngttactatgagtgaaaagggagccacgaagactgattgtgagggccctatcttgtgagtggggcatctgttggactttccacctggtcatatactctgcagctgttagaatgtgcaagcacttggggacagcatgagcttgctgttgtacacagggtatttctagaagcagaaatagactgggaagatgcacaaccaaggggttacaggcatcgcccatgctcctcacctgtattttgtaatcagaaataaattgcttttaaagnaatataagaaaaactccgagactagttctctctctctctctctctcc

SEQ ID NO: 489542 - DNA, 162 bp, Homo sapiens
gctggtcttgaacctcctgacctcaggtaatctgtcaccttggcgtgccaaaatgctgggattataggcgtgaactaccacgcccagccattacccgtttatttttcatatacctatgtgctatattgcaaatgatctccaaaagtatggcttagagaggct

SEQ ID NO: 489543 - DNA, 679 bp, Homo sapiens
  misc_feature (104)..(104): n is a, c, g, or t
  misc_feature (455)..(455): n is a, c, g, or t
  misc_feature (535)..(535): n is a, c, g, or t
agaattcgtcgagtgtaatttgtatctttactaaattcatttcatacatgtagatgggttttatttaatacaggggcctcaatagaatatgttttttcatatanataaaacaaagtttaagactaatttttaaaaaatatcccaaagtttattttgaataatctaaacatatgatattatagggaaattgctattacttttctagagaagtaacatccataaaaactaaaaccaaagtttctaatatgtgtataattaaagttaatttctagtgagtcccctttctggacatgatcacataaaaacactattcttaattagattctaataaggaattatattagagagagagagagagagggagagacagaaatgtatgtcttataacaagttatcttacaaacattggaacataagtattaatatgtataatacaaatttggaacatgcggctnttaacttactgaaatattcattatcagtaactaagcaagaatctgcatgcagtccttaaaatctcctgataaatttaatntactggtgatataacgatctattacattccaacccattaagaaattgtaaaagagtttaacaactgtgcagttattacaattgttcgtaatatctaatttatttaagagaagtttactggagtggcaagccaactcacacgctt

SEQ ID NO: 489544 - DNA, 230 bp, Homo sapiens
  misc_feature (12)..(12): n is a, c, g, or t
  misc_feature (16)..(16): n is a, c, g, or t
  misc_feature (44)..(44): n is a, c, g, or t
  misc_feature (130)..(131): n is a, c, g, or t
tataggtacgtntttnttgtagcaatactgcacccacataaaanttgcatttttaatacgagataaaaaggtatatcacaaaaagtgtaaggtttgctggtatagatgcagtaatggcttcataaatttnnttaatttttttttaacagtggtccttatgctggattcatttatcttgaaggatgggcaactacagctgcagaccagtacacatcaagcaatttaacttt

SEQ ID NO: 489545 - DNA, 707 bp, Homo sapiens
ggtgcttcttagcagccttctggaagagatctcgcaggtctgctttctgcggggcacaagtaaaggggtgaagagtagccctggtcctccaggcagacaggaggcagtagggggcacctcacccgacgactgtgactcccgcacatgggcagaggacacttactgtgtgggacccctccatcatggcctgcacaaaggcctgtggtagctcgctggatacaggatacgcttacagtctcagtccgtccctcccggaacattctggtcattgaggcctcataggtcaggcagaacttacccctgtcctgggatatagcagaggggtgaactctggcaggtggaccctggtaccaccctgccctctctagcagcggcgcaggcggggctcctacccggaagtgagccagctgcatgacgcgatcgtgcagcaagaggtcactcacgggctggtccggcacttcttgatgaggcctttgccatagagggcaggaacatggtagagctagtacaaggtccacgttcgtctgccataatcgccttggccaccgtggtaggaactcttgatgaccgcctgggactgccaagacatgggaagggtcacgctgagggtagggctctccaagtcaggactctgggtcatgtctaggaggcatgacggtttagctggtggagaaagggccagcggcgaagaatcttcacgaggaggg

SEQ ID NO: 489546 - DNA, 620 bp, Homo sapiens
  misc_feature (29)..(29): n is a, c, g, or t
cagtaggttttcaaattcttgggtatatnttaagagttttaggtaaacaagaataggaattagaaataattcttattttttaatataattgttatttagtcatataaatcattatgcttcagtgattttgacgtgggcccaaactgattgccaagaattgttctgcactgaatgaaaagttcagagatgaattatttggttggattggagaagacagtttacaggagaccacacacccctaatttgagagaatactagcagttaggtttgaatatagtaaacgcttatcactaggtgggaaacagctagctgaaatacacattcttcttgtacttaacacttgctgtacacacaaatgccaacttgaaagacaatgaatcatgttttcactaataatgaatattcttctgctaattttataatgtaaatgagatattggtaaatatccatttaatgctacaatgttgtctaaagatttttctgtaattgtctatgcaccagaaaaattgcaagaagaaagttaatattcctgttagtttttctagaaatcagaaagttttattcctttctaaatagaagacaattccttttaaagatttctagtgcgccacccccaacca

SEQ ID NO: 489547 - DNA, 267 bp, Homo sapiens
ttaaagcacacccaatttagagttagaatgacattatatctttttaaaacatgcaaaatcaagctggaagagtgccagtcaatgaatttcagaagtatgatgatgtaaacaaaaccatgccatacacaaaaacattctttatgaacacagtcagaaaaaaccccaaactaagtattccaacaggcttcgaaacacaccttgatgtcctaaccacccatgtcaaagtcatctttgatgactgcattcagagaacaaaacgagtacaag

SEQ ID NO: 489548 - DNA, 356 bp, Homo sapiens
tggcccgaggaggtttgaaacccaattttttttcaaaggagtcaggtaagctgggtttacttatgggccaacatttaaaaggggggaaggatttgaaatttgccaatgggaaatttccccttagctaggtagcattgtcagacttcaatttcctcaagggtttggccgtcctgttttaagcatgaaaaatgttggccccatttcccaaagttttcattgaggggggtcataaaaaaacaggggttttttttttttttaaaaagcagcccagcccaaaggggggctttgttgacattttatgggactttgtcaaatgttcctaaccccccaaaaaagcaatgttgcatccactggga

SEQ ID NO: 489549 - DNA, 196 bp, Homo sapiens
ttatagaagatgctgacgaaaagttgttcgaagatgatgattcaatgagaagttgttgatgaggaggaagattcagtgagaagttgtttgacgattctgatgagagggggactattgggtggtatcagagctataccaccttggaatgtcaccccctaacttaggcaggcacatggaccacttcgaccacttcctg

SEQ ID NO: 489550 - DNA, 192 bp, Homo sapiens
ggagctcaggggggggctgttgcactgaacgaagaattcttaataaattatttcactgataaagcggcctcttacactgaggaagatgaatatcacacagccaaagattgccttctggtttattctcacgaagaaaccgaatcgctgaatgcttctattggatgccgcacctttattgaaggagagctagat

SEQ ID NO: 489551 - DNA, 373 bp, Homo sapiens
  misc_feature (119)..(119): n is a, c, g, or t
  misc_feature (192)..(192): n is a, c, g, or t
  misc_feature (198)..(198): n is a, c, g, or t
  misc_feature (200)..(200): n is a, c, g, or t
  misc_feature (204)..(204): n is a, c, g, or t
  misc_feature (209)..(209): n is a, c, g, or t
  misc_feature (234)..(234): n is a, c, g, or t
  misc_feature (237)..(237): n is a, c, g, or t
  misc_feature (275)..(275): n is a, c, g, or t
  misc_feature (319)..(319): n is a, c, g, or t
  misc_feature (330)..(330): n is a, c, g, or t
ggaaccagaggtttgagaagccctgagtggtagagtaaggcctccagcgctgcctctgggtgcagggcagagtggcagaggagagggggagaggcactgggcaccatgggggccagttncccacttcggggatctctctcgcagaaccgagggtccccttcatgggggttagatgcccagggctagctgttnccatananctgnaaagnaacctgagttctgggacatgcccgngtnactcaggagtggctgcttgggcgggctctgtcaccctngagatgttatacattctgggaactgggacaggagtggctgcttnggcgggctctngcaccctggggatgttattacattcttggggaactggacagga

SEQ ID NO: 489552 - DNA, 184 bp, Homo sapiens
gtgatcactcatgtcccatacactgaactctgttttttctggacaatctcaggttctcagattgaacattcagttttgtctactgacaaaatgcaactaaaatgttttaattcaacctcttacctttacacttatttaccttttcccagggctgggccttccctgagatccttaaggggtgatt

SEQ ID NO: 489553 - DNA, 288 bp, Homo sapiens
aggatggtgagtgtatagctagaggataaggagcttctgaggtctggaatgttctacatctttatctgagcggagtctcttggtggtacacttaacattgtgctttctgtgtgtagaagctatacctcaataaagaagaagaagaaaaaaaataggcttaagataggcagtgacttccctaaccatgaatgcaacattttctatgtatagcattactcttggataaaggtcctcagctttcatcagattgtcttttaaaatatcaactacctgatgacagatattttt

SEQ ID NO: 489554 - DNA, 150 bp, Homo sapiens
actgtgcttgactgaggtaatgggggctgtctgtgaagcttgcggcaggacagcccaggtaatttgctgagcctgatgggtgtcagggtgaaagtgaagagaggctgggacgaggggtgcaggggaatagtgaaaaaagcatctttaaga

SEQ ID NO: 489555 - DNA, 429 bp, Homo sapiens
  misc_feature (120)..(120): n is a, c, g, or t
  misc_feature (157)..(157): n is a, c, g, or t
  misc_feature (169)..(169): n is a, c, g, or t
agattgatagacctaagtgaatgaagctaggtgtgtatgccttaattaagaaaggctctgtggctcagtcctgggatcagcccaggttgtaaatcttaatgcacctaaagatttacagancggtctccaaagtaacttcagagccaggcacagtggnctcacgctgtanatcccagcacttttggaggctgaggcagatgaatcacttcaggtcaggagttccagactagcctgaccaacatggcgaaaccccatctctactaaaaatacaaaattagccgggtgtggtggcgggcgcttgtaatccgagctacttggaaggctgaggcaggagaattgcttaaatttgggagacggaggttggagtaagtcaaaatctcgccattgtgcttcagcctgggcaacaagagcgaaagccgtctcaaaaaa

SEQ ID NO: 489556 - DNA, 161 bp, Homo sapiens
tatacagaggctacattaatttattgagaacacagataaagagcagaggaggaacgggagagagcaggaagagcagttgccgtgtagcacaggttctggtcctggcccttcctgctcctgaggccccttcctatggtgcggggtaccagagactcgaaatt

SEQ ID NO: 489557 - DNA, 271 bp, Homo sapiens
acctgtctcaggctcctatatggttcctgggccttatagccaggtttgtgtggcgctcccccattttgtgacaaacgggggttcttcccatttggactggggcctggccagagccccttgcatatcccccctgtcaggggcagcccgggctgttcccctccccctggaatgggggacccttccttatcccctgcccccctcccccctcccataaagcccctgggcccccccccatggcctcccctgtgctgttgctgggatgtttgtttta

SEQ ID NO: 489558 - DNA, 527 bp, Homo sapiens
gcggagagtctcgtcaggaacggtgggtcatctgtggagagtgagtcattccttgttttaatttcactccattgtgtttctatataactaaatcttgtaattctctaaatcttttttcatgatataaaaaaaagaaaatcccaaaccacaatttaagatagcttttttttttaaaaaaaaaggttctccgtgttgccacctgctccgggaaggccaggccgatgggcggccaggtttgggagcagcggcttcggctccgattgcttcctgacggtcagttcctagcacaggctctgagaaacgcctcgaacccttggtatctggtgaccgtctccgcaggcttccgtgagtctccgataggtgtttggggctttgggaatactttcagaatactttcccattttttcataaggcaaaacggagtggacggcctttttttgagagaaacagcattctaagagtgtgcttggaaaacacactttttgggagtcacgtgcggagtggcactcaggaaggaagcggtggcc

SEQ ID NO: 489559 - DNA, 1255 bp, Homo sapiens
  misc_feature (1255)..(1255): n is a, c, g, or t
gtcgagacgcaggcgccgtctgccgagcgctcgtgtagatagcgagcccaagacggaccctccggacttccgtccgtcacccgacactcgacggagtgtcggcgtgcgtgccggcgtcgcgtccactagactgcctctccatcgctgtctctgtgggtgtgtcctagcattcgttgtaggcctcgcaagccgtctgcagttggctccagtggcttcacgtcgcaggttcgcgccagacggggtgtcgccgctacgtacctcggtgctcgcggtcggtgtagtccctgtgttcacaagcaagagacacgacctcgtttgggcgatcttggtttttggtagcatcttgatccctgatggtggtacccatcggtagctgggaaatagcgctaatcggttgcaattcgtgtcccagtggccccacatgagagacctatctgaattggaaactaatcgacacccaaaggtcatccctgtgtacaccagactgacctatagtcacagagtcctacagggaggaaatcgcgagaggcaactcaataggtttctcagtggacacacgagcgtatctggataatgggcgactgtgcggaaggctcagcagttaccccgtcttaacgatgtgaccttgggacctatgtccgacaggtgtccccgcagttggaggtcctttgagccctcgtggggaaggccagtgcaacaccatcggcaaagagtcggccaagcgggaagcgtcttgagagtaaccgtcgattggagcttggtcttggggatccaataggcgaaccgctattagcttgtacaaaaagcgctatagtggaaagtcgaaaccgtccaaaggcagcgtctccgttgggcgaaaacgccgttcggattctccgagagggtgcgcacattggcgcttccactcccgacggaagagcgtacacccctttatctggtggcggcccagaagaaatgccctattactaggagaacgatatcagcgcccaagagagctgagagcaggaggtccataaggttcagaaacaccccattggcttcaccccacatatccgaacgaccacgcctttggaacacagtttcggtgcgcccaacggggggccgagaagagcgggaaaccagacaccgcgcttggtgacgcgcttatccatttgagtaggggagcgccgaaccaaaccaggtgggttcgcaattttcccccattgatacctattgttggccaggaattcctctggggtacaagggggtcccgcan

SEQ ID NO: 489560 - DNA, 210 bp, Homo sapiens
aatgaggacccattaggcgcgtctgcgtgtgtgtgtgtgcaggagagtgctgtgtgtctgtgtgtgagtgagtgtgtgtgtgtgcaggagagtgcccagcacccagtaggacctcatgggcctcatgtataaaacttcttttttttttgagagggagtctcgctctgtcacccagactggagtgcagtggcgcaatctcggctcacggca

SEQ ID NO: 489561 - DNA, 160 bp, Homo sapiens
ctgatcaactatgagcgtctctgtgattaccattcagaccattctttcagctatagatatgttaatcagacttccgtgtgtgtaccagatgttctttcagggatgatcactgaagtcagttttccagctgtgctttggcaggcagccagctacctacctg

SEQ ID NO: 489562 - DNA, 136 bp, Homo sapiens
agacagctcagccgtggcatctgaatgggaggaagaatggacagtgtgggaaggcgaagggcagcagtgacttaggaccagatggggcctgtagctctggggacggcacaggtgcacgcaagatccggctgtctca

SEQ ID NO: 489563 - DNA, 235 bp, Homo sapiens
aattttgagcactaactgtcagggcttgtggtaggcagaaaaatggtccttcaaaggtgtctgcatatttatccctgaaacctgtgcatatgttactttacatggcaaaaaaagacttcgaaaatgtgattaagtgaaatatcttgagataggaagattatcctggattatccaatgggcccattgtggtcacaagggtccctctcttaaggagacaggagaatcaaagaagatt

SEQ ID NO: 489564 - DNA, 139 bp, Homo sapiens
tatatttaaacctttctaacacagtaacacatagcgtgcccagccatgtctgggggaaggtgcccactgtcatgcctaggccagaagttggtaaataagagagtaaacaatggcaatgcccccaatctgtcaatcataa

SEQ ID NO: 489565 - DNA, 873 bp, Homo sapiens
agcgggccaggcccaggaaatccatgaagggctacatgcacagcgggtcctgcatgcacgccgaccaaaaggacgactatggcgtgctgcatgctcgtcgcgtccacgctcgggcatcgactacacgcctgttaccggtccgaggggacgcgacgagaaccccagtcagtccccacggagagacccacgagccgggaaagacggagcccggaagccaagacggagagtctgggcagacagcaggcatgaggaggaagaagcagcgtgcgagggggctacagcctgcgatgagagattgatttggcacgagcgatgatggggacgagtggtcacccagtaacgagtcgcacaagcaagccttgtactgagtgacacgtaaacgatcgagggcccctctcaagggcagtcacagagtctggtacgaacgttgggggaacaaggtcccgattgggtgcaaagacatattgccttgagagcattaggaggaaagccccctcaggtagcagacccaggctcttacgagacgttcgagaatgcacctcaagggaccgtgaacgaaggacgaacttcagcctgcaagctgcgcgatcgtacttccctggaggagcgcaatgcgacagaagtacgaggccaggcggggaggacgtcgtacgagcggaacactgagcctgaaggttgaaggtggatgaaggttgaaaggagaactccagtggcatagaaacaggcatctgggatcaaaacatggggcttgatgtggcaggacatcgtcacccgagttcaggaattgacagctgaggctcccgatgccaggtttgaacgaagcgaccgccacgagactggagcccttgtgtattgaagcttcttggagcaata

SEQ ID NO: 489566 - DNA, 265 bp, Homo sapiens
gcatctgaggcacaccatattctaatagaaatacaaactcgacactccaataatacatgcacgactccgcttattacaatttcactggatctctattctaccttcctacggatcccctagaatttcgcttctcgcttgaccatttgcgacgggatgtacggctcaacagtcgtggtagccacaggcttccagggacttcacgtcattattggctcaactttcctcactatctgcttcatccgccaactaatatttcactttacat

SEQ ID NO: 489567 - DNA, 526 bp, Homo sapiens
gtgatcctctaacaggaggtgtgggaaacttatctccaaggcaacagggtggggaggtagggcctaaaagaaggaggtgaggtcatgaaggctctaccattataaacagattaaggcctataatgaaagggctggaggccactagtttactctttggctctccctcaccctcttggcccttcggccaggagaagatgcaggaagaaaaccctcaccagatgcgggcgcatgggacttaccagcttccagaatcatgagccaataaattggggtccattataaattacccagtctcaggtatttggttatagcagcacagaagggaccaagacaatctcttggttaagggggtatcggccagaacgctgaacggtaaagttacggttggtccttttctatgccagtatcacatggtctggactactactatttggtacaggtggagcatccctaatccaaaaattggaaattcaaaatgctccaaaatccaaagctttgggagtaccgagatccaaaatggtccaaa

SEQ ID NO: 489568 - DNA, 136 bp, Homo sapiens
agcgcagagcttcatcctctgagtctgagcattcactctcttctaccatcctcgtcctcctcatctatcctcctcctcttcctcagaggagctctcacagctactttcctcactggaggactctgaagacgatttg

SEQ ID NO: 489569 - DNA, 889 bp, Homo sapiens
ctgttcgacagtcagtccggcatcttcttatgcgtcgccagccgaggccacatcgctgagacaccagggggaaggtgaaggtcggagtcaacggattaggtcgattagtggggcgcctgcgtcaccgagggtctgcttgttaactgctggtacaagctggatatgtgtgtgccatacaatgacgcccattcatatgaccgtcaatctacatggctttgacatagtggccaataatgagttgccagcctcatgggccaaatttccactggtcaccgatgcagaggcatgagtagacgtggtaagcttagtgccgatcgaagtggcaagatcgccccgaatcaccgatgcttctcaggcaggccgagatcctctcgccaaaaatctaagtgggtgcgatgctggcgtctgatgtacgctcggtggagtcctactggtcgtgcttcaaccagccatgtgagagaaggctggggctacagtttgcagggtgggagctcataagggtctatcatattcatgaccccctctgctgactgcccccatgttcgtcatgggtgtgaaccatgagaagtatgacaattagccttcggagatcatcagcagatgcctgctgctacgaatctaagtgtttagcgaccccgtggtctaggtcgtccatgacagaggctttggtatcgtggaaaggactcatggaccatcgagtccatgccatccacttgctaccaagaagactgtggatggccctccggggaaactgggcgtgaggccgcgggggctcaccagaaaaatatccttggctctaaaggcgccgccagggttgtgggccaggcgaccctgagtgaagggaagctcgtggctggccgcctgtccccttggcacgtgtcctgggggc

SEQ ID NO: 489570 - DNA, 121 bp, Homo sapiens
tctgaggatcctactctgggccttgagagatgggcactgccgtccttcggaacggcgctcgcccatctctcagtgaccgactgacccatgtacagggcccgagagtcaggacccgagagta

SEQ ID NO: 489571 - DNA, 101 bp, Homo sapiens
gtcaggcatcttagctagattgtggagtcgttcctactctcgcagaagggagaacatcaatgtgctggtgagttgggagcaggaaggatggctgagaccgg

SEQ ID NO: 489572 - DNA, 228 bp, Homo sapiens
cataccccactccccgaaacaaaacacaaaaccttccaggtcccgtagtcagctggatgtgagaaatggtgcctcatagagtgtactcggcttacctttctgtctggagggtgtctactcaattcaagcgtacaacgtttttgagagaagacccaattttcctattttgccattcagtggtttttggcaagccaggacacccgttcatcctttacggaaactgatcta

SEQ ID NO: 489573 - DNA, 91 bp, Homo sapiens
ggatttgctggtgcagtacaactaggcttaatagggaatatgtggaatatcttcagaccaatcaatatcatacacgatattaacaggaaaa

SEQ ID NO: 489574 - DNA, 266 bp, Homo sapiens
  misc_feature (169)..(169): n is a, c, g, or t
cggtacccaggaaaattgagccgacgggtcgggtccgatgtggctaggcttggagagcttgaccgaatccgcggagtccttcggtctgtctcttttgccgagcgaggggcagccgtctcgacccggacgccttcctcggtgcaggctgagatgctttcttggggttttngttgtcatggctctttctggactgtcgccgactcgaagggcatcctttgcaggttcgccccagagtgcgtcgctaatttataagcatccgctaggca

SEQ ID NO: 489575 - DNA, 170 bp, Homo sapiens
ttactaaacttaaatgatgtcgataatacttatataccagcacctatagaggcagctcccttccaatatcaatatcaattcttcttttctttttggagatggagtcttactccgtcacccaggctggagtgcaagggtacgatcttagctcaccgcaacctcggcctccg

SEQ ID NO: 489576 - DNA, 295 bp, Homo sapiens
  misc_feature (100)..(101): n is a, c, g, or t
gccctcgcccagcaccagctttccgcggggcgtgcaaggggctcctcctagccccacagccctgtctttccacgggggacaccaaggcccttggaacggnncccgcggccagtcgtctcgcccgtcgtttaacgacgaacttcaatccaccgtgcccagttacctccccgcgaagtcccagggactaggtcgactaggccaccgatagcaaggagtcgcatgtcggaccgactcgggccgtgggatgggcagcgcactagcaacctcggcggcttccacagcctcacgcggtcgc

SEQ ID NO: 489577 - DNA, 975 bp, Homo sapiens
  misc_feature (131)..(131): n is a, c, g, or t
  misc_feature (133)..(133): n is a, c, g, or t
  misc_feature (275)..(275): n is a, c, g, or t
agcggagtcgcgatcctgaggtaacggataactttataccatggatagcacaagaggatgaagtgtgacaggttacaacagcatgatcttctgcgtgtcaggaataggcgacttcaaatgatgacactagnangactagcgaactggacaggattcaggataacatggagaataattcaacaaaagttataatggacatgccacgaaggcggctccacgattttatggaagatgatgctcaaggaaagaatgagcaagtctaaccaatcgcaatntgcacaaaactatgattgacaacaaaatagtctctaattcaccagtccaacagtctatacgaaatagtccacaagtgtactggattgactggactttgcaaatgggaattaagaacaaagccgtaacacctttgtaggcaataccagtaggtgccactcttgacagtgcgatgtcttactatgcagctgtagacatgagggacaatccatgaattgcacaggataagacgccagttgctgtaggatcatatgagtatgcgtgtctacttcatcattacctatgccaggagacttcggtgtgcgtcgcagccatgccacgcgattgattggctaagaggctgtgcccgctatttaataagtagtgcaccccaatctttgacgaaatacgcgagctgtgcacgtaagacgcaggttgaaggaaatacttgctgcatgtatgatcccaattcttatggacatgagtcttgatgaaggcctacgttgtaatttgagcaaagcacttagaaatgacagaccaataattgggcctgaggacttacacgaagggtaatttcatcccacaatggggaaagctctgtaggaaaaatgattaatcccggggaacggggacttcaataaactgggttgtagcctttaaccgaatcccattctcttccactagatttttggaagagaagtcccttcttgatgttgcagccca

SEQ ID NO: 489578 - DNA, 304 bp, Homo sapiens
ggctgaggcaggagaagggcctgaacccaggaggcggagcttgccgtcagcagagatcgtgccactgcactccagcctgggtgacaaagccagactccgtctccaaaaaaaaaaaaaaaaaaagaaaaaaaaagaaaaataactttattagaaagtcaattttagatcataagtgatctagcttatatacctaaaatctaaaaaagttgaacgcatagaagcagaaagtacaatgctggtttccagggtgtgacagggaggaggtggggagatgttggtcagaggatacaaaatttaagttgaa

SEQ ID NO: 489579 - DNA, 282 bp, Homo sapiens
  misc_feature (184)..(184): n is a, c, g, or t
tggtgagatctagaggatcccgtccagcgtcgtaagtgctaaaacatcgaaaacgaggaaagaggccaggcgccgtggctcacgcctgtgatcccagcactttgggaggccgaggcaggcagatcacccaaggtcagcgtgttctgagaccatgccgtggagaaaccaacatgagagaaacccncgatctctacataaaaatacaaaaaaattagccatgcgatggtggcgcagtgcgctgtaactcccactgccactgtgctgagtgctaggacggtgtac

SEQ ID NO: 489580 - DNA, 531 bp, Homo sapiens
  misc_feature (31)..(31): n is a, c, g, or t
acgacgagtgagtacctgtggtaccccacgntttgtggtgggaggacggtgtgtacagctgcatacgggtacgatgagtttccgtatgtgcaggaatagcattaggctgaggcataggttgacctttaacagccaaaggtgctcttgctggccttatctccataggacttggctccataggggctgcagcaataggctcctgatgcatatctgcacttgttataggagcaggctcaataggtgcatgatgctcctccacttcagggtgttgaactctgtgcacatgcctgctgaaatgagggtatggccggacagggctgctgcctctgcctcagtagactcttctgaaagctctgccaccgggtgcatccttatagtatggaatctaggggctgtcagccatccttatcccaccaccaccacccccaccaccaccaactcgatttagtttcctcacttgaggatgagtcacctgctgtcaattaatctaaaattggttctcagacaaaccaaaaaaaaaaccacaacgcc

SEQ ID NO: 489581 - DNA, 4358 bp, Homo sapiens
gcgcagttagagccgatctcccgcgccccgaggttgctcctctccgaggtctcccgcggcccaagttctccgcgccccgaggtctccgcgccccgaggtctccgcggcccgaggtctccgcccgcaccatgcggctgggcagtcctggactgctcttcctgctcttcagcagccttcgagctgatactcaggagaaggaagtcagagcgatggtaggcagcgacgtggagctcagctgcgcttgccctgaaggaagccgttttgatttaaatgatgtttacgtatattggcaaaccagtgagtcgaaaaccgtggtgacctaccacatcccacagaacagctccttggaaaacgtggacagccgctaccggaaccgagccctgatgtcaccggccggcatgctgcggggcgacttctccctgcgcttgttcaacgtcaccccccaggacgagcagaagtttcactgcctggtgttgagccaatccctgggattccaggaggttttgagcgttgaggttacactgcatgtggcagcaaacttcagcgtgcccgtcgtcagcgccccccacagcccctcccaggatgagctcaccttcacgtgtacatccataaacggctaccccaggcccaacgtgtactggatcaataagacggacaacagcctgctggaccaggctctgcagaatgacaccgtcttcttgaacatgcggggcttgtatgacgtggtcagcgtgctgaggatcgcacggacccccagcgtgaacattggctgctgcatagagaacgtgcttctgcagcagaacctgactgtcggcagccagacaggaaatgacatcggagagagagacaagatcacagagaatccagtcagtaccggcgagaaaaacgcggccacgtggagcatcctggctgtcctgtgcctgcttgtggtcgtggcggtggccataggctgggtgtgcagggaccgatgcctccaacacagctatgcaggtgcctgggctgtgagtccggagacagagctcactggtgagtttgccgtgggaagcagcaggttctggggggcccaggggaggcttggctgccagctgtctttcagagtttcaaaaaactttcagaaggcaaaagtcccttgccttgaacaactgttgttcctggagacgcagcgaagccctcgatggtgcgcacggcatttcctgcagcctccccttggcatgggatggcatcctggtgtgcactttgtcacactgcgatgggattttcccaacatgcacagaagcagagagacgagtgctagacccccgcgctccccagtgcccagccccgaccagggtgtccagggcgggtccaggcaccggcgcccagcccccatggggtgtccggagtgggtccaggcaccggcgcccagcccccgtggggtgtccagggcgggtccaggcaccggcgcccagcccccgtggggtgtccagggcgggtccaggcaccggcgcccagcccccatggggtgtccggagtgggtccaggcaccggcgcccagcccccgtggggtgtccagggcgggtccaggcaccggcgcccagcccctgtggggtgtctggagcgggtccgggcaccgccagcttctctctgtggcagccactcctgcagctctcgtttgcccctcagttccaggagcaacatagatgtggattcctgtccaatttgggaaaaatgtccacacacggtcacccacctggcaggtgcctctggctgcaaggggcgctgggcttcgcaggcaggccagccgggctccccgccatgggccaggatcccctccgagccctgtttgccgcccaggagaaggggttccccggggacagtgggctcagggtgtgcgcagccaccacgctgtggtgtcacctgtggacccaggcgagctgatggccgaccgcagaaacgcacttccaaggccaggtcggcccatccagatgatgcaggaacacagcttgctaaaaacacggccggcctgttcccgtcggagccagtcgaagttccctgaacaggccgctgtttccgaagctttaaaccctgtgtttccaccaagctgagtcctgagaaaaccggcgtctgcctgcagaagggaaaggggtgcttcatgttcctctctctccttcatctcccttccaaggccacgtttgaccggagctcaccgcccagagcgtggacagggcttccgtgagacgccaccgtgagaggccaggtggcagcttgagcatggactcccagactgcaggggagcacttggggcagcccccagaaggaccactgctggatcccagggagaacctgctggcgttggctgtgatcctggaatgaggccctttcaaaagcgtcatccacaccaaaggcaaatgtccccaagtgagtgggctccccgctgtcactgccagtcacccacaggaagggactggtgatgggctgtctctacccggagcgtgcgggattcagcaccaggctcttcccagtaccccagacccactgtgggtcttcccgtgggatgcgggatcctgagaccgaagggtgtttggtttaaaaagaagactgggcgtccgctcttccaggacggcgtctgtgctgctggggtcacgcgaggctgtttgcaggggacacggtcacaggagctcttctgccctgaacgctcccaacctgcctcccgcccggaagccacaggacccactcatgtgtgtgcccacaagtgtagttagccgtccacaccgaggagcccccggaagtccccactgggcttcagtgtcctctgccacattccctgggaggaacaatgtccctcggctgttccggtgaaaagttgagccacctttggaagacgcacgggtggagtttgccagaagaaaggctgtgccagggccgtgtttggctacaggggctgccggggctcttggctctgcagcgagaaagacacagcccagcagggctggagacgcccatgtccagcaggcgcaggcctggcaacacggtccccagagtcctgagcagcagttaggtgcatggagagggtatcacctggtggccacagtcccccttctcacctcagcaatgatccccaaagtgagaggtggctcccccggcccccaccaccctcagcagccccaccccactcaaccctgagggtccccagggtcctgatgaagacctccgaccccagcgccaggctcctcggagcccaacagtcccaagggggcagtgttgaggggtacagccctgggccctgaccagccccggcacctgccatgctggttcccggaatgaatcagctgctgactgtctccagaagggctggaaaggatgctgccaggtgacccgaggtgcactcgccccagggagatggagtagacagcctggcctggccctcgggacacattgtctgccccgggactatgggcaaatgcccctccttcttacttcccagaatcccctgacattcccagggtcagccaggacctgttacagccctggtcacttggaactgacagctgtgtgaggcctgcacttctcagacccagacttagaacaaaaggaggagtgaggactcaaggctacaatgaggttccagtacttgttacaagaaattggttttctgcaaaaaaagtccctacctgggcctttaggtgaatgtgggatccactcccgcttttaacatgaaagcattagaagatgtgtggtgtttataaaagaacagttgtcatcaccgggcattgattggcagggacaaggagctgcttgggtgtggaaagttggggcgttggaaagtgggctgtggtgcccatttgcagtgactgtgaagtgactccaggacggacctgcgggggcacccagaggtcctaagccccaggactgagggtcgtgcatcaccactcgggtgtcccgggaggtgccctgggcccggggacctcacaggcaggacggcgacactaatgcagggagagggagtctggccccagcttttcctatcagaggcgattttccttcaccaggggatgggcaggaaagaggcaggggccccagaagcttctgtccctcatgcctgagggcacgggggacacttggaggctgctgtcaccactgtgcgtccaaggccatgctctctgcgggtcagtgcctgagtctcgcctccctgctggtccctgaagccccctcagaagccctgcctgtcacgtcggcatttgtgagacctaccctgtaacgcctgcccctctcagcccaacatcagcttcctctttctcccttgctgtagacaggctggattccagtgttgggacagccatctccagaaacctgacttaagagagtaagatgcaaatcgt

SEQ ID NO: 489582 - DNA, 1010 bp, Homo sapiens
cggaagcgtcacacacactcttccccccagacctgttcggcgagctgctggcttcttcggagctggaggccacagcggagagggtggagcactgtgagccgactgctgtggcggatgcccgcgccggtgctggtggttctgcgctacctcttcaccttcctcaaccacctcggcccagtacagcgatgagaacatgatggaccccatacaacctggactgtgtgcttcgtggcccactgctgcatacctggtgccccgcatgtgtgcagtgaacctggtgtgcgctgcagaggagcgggtgaaccagctgggtgcagacgactcatacgtgcagcccgatcgggtcttcccgcacccatgacctctgctgcactgagaccacgtctacgcagacagtgcagtggcacccggactatcctgccatgctgcacttggagggagacgccccaggctggacgatgcctggagaggcggacaactgacgccggagcgtggacagccgaagatgccacgcaccaggaggactgacctgagagggggtcgtcggacggcatgtggcactgcgcaagccctacacaggagccgcagaagaaacacgcgacaccgcaagacaccccggcaggaggaggaccagtaaccggacagcatgccaagacgacgggacccatcgaaggcgacctgcgcgagacagcaagcgcgaaggcaacacacggtagaatagccaggggcacctcaaagcacaccaaagagcgaagatatccccagacctagaacacagaccgggtgacacgggaccacaaacacagatgcgacgagacacccaacggacaaagcacacgccaccgccacacgcgcaaacccggggaacacaggacacccgaacggagagacaaccacaggagaacacaggagaacagacgaggccaaacaaaacgaagtaagagccacccaacccggcagccggcgaaagacaagaggagaaaccgacaggcgaagccaaccacgacgac

SEQ ID NO: 489583 - DNA, 863 bp, Homo sapiens
gagactccagcgcgtgagaagcacggggcagaaaccgacctccaagaccttcgccatgggacaggaacgggcacacagcttctgagatccatacaggagaagaaagatcggtagtcctctcctgcgggccttcctgtctcctgggctggggactccagggtgtgcccagggagactgggcagcacaccgagcgagaacagaccctgtggcgccccgtgccctggctcaccccagcccatttgctgctcccgtagagacctcttgtacaggaagttgcccaccaggtggatggggcccctccattgcctaggctggttggtaaaagagaggaggtcaacactccagctctagccacctctgcctcttgggtcagcacctcctggactgtgtcccagccagcagcaggccagcatgcctcatcccgtgccattcagggctgttccagagattcgatcctcttaaggcattatcagtgagcaaatgtgaaggaaatggtgtctggaagaaagttctggttcacatgccgagtagctaagtctttctgcaaacaacctcccttccccccgtcgagtcatttggtgactttgatggggggagttctggttatgtcgaggctctggagacaggaagggcctttggccgcattggagtagttgacctgccttttgctgactccgggacgagccagtcccaggctgctctccagggagcatcttgaggtatcccgcaggccatgaggaccacactgggcagctctataggacagcctcttggctccagcccgaacccgaaagtggacacgtggctcagctctggcgacctggggactggcactgtggtgataacgcccaggtgccaacgaa

SEQ ID NO: 489584 - DNA, 1112 bp, Homo sapiens
tatacaccaaggacaattttaatcctggcattttcctggagtaacatccactgctaggctatctatggatgtgtaacgtgcattgtgctaagaaacgtggtgaaccacaaagaaaactttacagtgaagtccacagtgtttgatcacaggccaccacagacatcttttcagcagcaacagactacactacataacgcatcaccagaataggtctcgaagtggataaatcgtgctctcaccagataatctctattttagtaaaatccacagattaagtggcagaaattccatttttataatttatacattcttttactacacatttcctctaacatatctttattgttgttaagacaaaacaccctccattctcaagcagtgtgataaattgtgcatgtgggcgaataagacagaggggtgttaccagtgggtgtctcataagtgttctcttctaaagagtgtgttctcacgcagccacacctttaacagacgcacccaacagagagtcgattctattttacccacaaatttgtggcagggcaccccgtgtaccctctacagaggtttataaaaattttacatctcagaacataccatctccactctacaacagcgtggtccacatttgtcatcactcgtgtggtggaggaaacgacacatgtggtgttttccaaaattgtgggctttaaattatcccaccaagggggaaccataaaatcatttcatttctgagcgcccaagtggggcgggtgtttcccagggataaccctttatatagagcctggggatttagccgcgccacaatgagttatacctccccccaaataaacatttagacataagccccccgacacattaaggaagacgcgtctataagacgctacgttcgctgaacagcgggggcaccttactcaccaacattcgaagcaagcaaagaaagtggaactgggccgaatttaacaagtttgtcgctcacaaagagtggtatctcctgagggaagataaactccccaagcctttgagacccatgttatgcgcccaaaaagcacttggtattacccaagaagataaaattctttagacaacacatatttgaatactattttaacacc

SEQ ID NO: 489585 - DNA, 925 bp, Homo sapiens
  misc_feature (9)..(9): n is a, c, g, or t
  misc_feature (242)..(242): n is a, c, g, or t
  misc_feature (374)..(374): n is a, c, g, or t
  misc_feature (393)..(393): n is a, c, g, or t
  misc_feature (395)..(395): n is a, c, g, or t
  misc_feature (432)..(432): n is a, c, g, or t
  misc_feature (521)..(521): n is a, c, g, or t
  misc_feature (524)..(524): n is a, c, g, or t
  misc_feature (659)..(659): n is a, c, g, or t
  misc_feature (849)..(849): n is a, c, g, or t
  misc_feature (922)..(922): n is a, c, g, or t
agattggantaagcttcctgggctttgtatgaaaaaggtgttgtacgtgggggtttttgggagtaataatgaataaaataaccataataaaaatgaaagggtttgttttgaccattttttaggttttttgttgaaacggaaaagtgcaaagaaattgaagtacatatgcagtttgttttaacctcaaatagtggaagtgccacttcgtttcgtttgatagtttgtttagtttaggagatggngaggggttgggttgtttttgttttgattttgtccagaaggtttttttttgggaaatgcacttttttcttgctcgttattgaatggagtttgatgaccccatttttgagtttttggtgggggatgataggaanaagtgggatgggtgggttntnatagtattgtaattggtttagtagttttgggttgttnttgtagagggggtgagggttgatgggaggatggcaaagttttgagaaaagttttagtgtttggtgtagcaggttgttgtgtgcagatgnganaagaacttgtgtttgagtggtgggtatcttctcctccaaagcctctagtctctgttccacgatggagaaaatccgctccaccccaatgctgagccccacacatggcaccttgcgccctttggggtcgaacatgcncactagcccatcatagcgtcctccagcagccacactgcccacacccaggggctcttcccctgcctgggctggggtctgtagcagcactgcctcatagatcaccccagtgtagtaatccagccctcgagcaaggctcaggtcaaaggagattttgtcatcaatgccaaatagggtcaggtactcaaagagnaacttcaggtctcccaggccctccaaggcctggcttgttttgggatagtttaggatcctggagagctgttcancag

SEQ ID NO: 489586 - DNA, 109 bp, Homo sapiens
atttgttctctttcatctgtctatgtacaaccatttacgattgacacctataagtgtatctctgtgtcacacgagagactgcggttatatgtctctttcctcctttttt

SEQ ID NO: 489587 - DNA, 1246 bp, Homo sapiens
tccttaatgacattaacactattctcaccagacctccctaggcgacccagacaagttatacccatagaccaaccccttaaagcaccccgtcccgcacatcaagcccgaagtgatatttcctattcgccatacacaaatacatccgatccgtccctaacaaacctaggaggacgtccattgcaccatagttacctagtccaatccgtcatcactaggcacataagtcacccagtacctccagtacatatcacaagagcaagcaacagcagtaatagtgttcagccccacgctaaggcacgaaagtcaacgtagttagtgtgcaccatacacataggcccgacaacgcacacgttcgcagtcaacattcataacccgtgcaacatcaggcacgagacaccacaacgcaacgctacatggcataaacacaccatgtcaattaacacacatcacaagattaggaagcaagaaggtcacgaccgataccagtgtcaacactgacatacacagaatgcaagcacaaaccgcacaacgtccgccctgcacaagtgctcacctcagaaattaacgcacacaagacagtacagtgcgattcccagcatcaaacgtctcggaacaggcaacccaagacagaacttaagcactgccagaacacatcgtcgcgaccacacaagacagagacagcgaacacaagcagacagaagagacgcagagcgaaagatagcaaacgacacgcagaacgtgagtacagaagacgaccgaagagacctaagcgaggaacgagaccggtgagcgacagacaagcccaagacgatgataacacaacccgatacacaacggagcacagcaagaccagcacccacgaggccagctacagccaagacaatacgagatataaccaactaagtacacacctcacgtctgacaccctatcacaagctagcagtacaccaccccagaaacaagcaaaaacacaagagggaaagacacacaaaacaaaaggcagagagatgaagccacagcaccaccacacaaccgagcaaaaccgcaagacacccaatacagagaggaacacaccaaagcgagcgacacctacaccacaaacacacacaccatcaacacagaaaggaaacatcacccacatcagcgcagcacgaccacgaatctcggaggaacactcacaacaaaaagaaggcaagaacagcacacagagcaccagaacggagaacaacacagaaaattccacgcc

SEQ ID NO: 489588 - DNA, 683 bp, Homo sapiens
tttgtgtccaccagctgtgatcgtagctgaacttcagcctataatctggaatttgaagcaggtttgatgctgcagaatgattatgcttgacttgcaacatggctcatagtgttcttccagactttcacgcacatggttaaccgtacatgtcctaaggaaaagccaattttgtgtcgtcctaaccacggcctgatatcttgtcagtctatcatccatgtcccaccctgccaggaatgcgcctacatgggccctgctgctggccaggccgccttcctcagcgtgcacacgcgtcactgccggccccggcgaagccaggaagccaccgcagcctgcggcgttccagccacagaccgcaccagctgcattccgtccagggacttggccagctggcatgaaggcataaaggagggagcagaagctcgcagggtcagatcaccaagcgccgaccacgcgcggctagcgccgcatcgccccagccgcgctcctcagtctgtctcgccgcgccttccctgggtgaactggagtcggagggagcctacttctggcaatatgttttctccatggattcagcagcagtgttaaaggcaaaaatttcatcaaccaatcatttatatttatttaatataagatatacactgcgaaccagtgaactggatagaaactcttcatgtacagaaccgtgc

SEQ ID NO: 489589 - DNA, 346 bp, Homo sapiens
tactaaattcgcggccgcgtcgacctccggtcctgagctgatgctagtcctcatactagccatgtggccttgggcaaagcgtgcccccacctccgtttccgcttccataaaatgaggggtttggactggaataactaattctcctccccctgagaagtgcccccccacattgtgttcgctgtcacgatggcaagaatggcccaggatgaatcagatccaaagttatcgaggacacactgaggtcaagcaagtgaccacgcgtgaccggggggataaataacgaaggccacataattccattccgcccttcccctgcttttttcgtcgacgcggccgcgaatttagt

SEQ ID NO: 489590 - DNA, 201 bp, Homo sapiens
aactgagagacgtgttgcatgctaccagtgtgtaagccagagtgtgggaggcatctagccaacttccggatgccaggtcaacatggagaagcctgtcccactgacatccctagctctagctccttctcgaatcaccagaaacgtctggatgtctgactcaggaactgaaattaagagcaaccattgcaacacggtctctca

SEQ ID NO: 489591 - DNA, 228 bp, Homo sapiens
aattgaatgatgattcagatccaggcgagtatgtttacttcattgaatttgtggctctacacatcataatcaaaagtgaaacaaaggaaaaatttccctgggtcatgtgtctaggcttcaaggactaggagtcagcggccctacaaaataggaaaaacagattctacttatttagtgctcttctttctcttgatcttagaaatatatttttgaggggaaaagaccctg

SEQ ID NO: 489592 - DNA, 939 bp, Homo sapiens
  misc_feature (611)..(611): n is a, c, g, or t
ggcggcggcggcggtaagaggccggaggtgccggcatcgatgtccctcttgccaccgtgcggaccccctttgccaggcgaatcggctcccgatcagggtcctgaagatgctgagcgctcacgaccggtcaccttcctgcacccggagtaccgtgcagccggtgtcctccactcccgtcagccccattgatgctggacggccaagaagagccccttggcgctgttggctcagaccgtgctacgcaagatctggctaagcctggaccacgtccgccctacctacctaaactgcgaactcgtgttggacggcgagcgtgccaaacggggttgctaggagctggcagaatgcgaccaccggccagctacagccccggaggcgcctggctccggcgagaccagcggtgcgcctcgaaggcaggctagaggggactcgaccgtggcgcggagagacgaacgtccatgcgttcaaggcccataagcgtccaaaggtggcttccgggctggccgtgcgagctcccagcagaagaccaagcgtgcctccgtccttcgggttcggtcttaccagccatccctccgtacgttccctcccttcgtgcccctcgggatgaccanaggtcgggggctttccatggggttcccccccagggcgcccgttccttgcgccggccccttttcaccctcggcataggagcgcgccgggtactcgcgacactacctccggtcctccgctccgtacggccccgggccggaggcttcccgcggcgtgccgggcgtcccctcgtgaacgcaagcttcttgtaacttggccaaccgaagcggtgcgagaccgaggggttcggccgtggcgggggcacgcgtggcatcgaaaggaaacatcacccatggggacggcccccaaaggcccccatgaccccgggaggcccgggccacccaccggtga

SEQ ID NO: 489593 - DNA, 87 bp, Homo sapiens
gcctacgccgaaaaccccttcctttttttcatccagaaaagcaagagaaaaaggattctcttctgcggccgccaacgcgtcggagat

SEQ ID NO: 489594 - DNA, 977 bp, Homo sapiens
tggggaaatacaatatgaatcttttttcataaaagcaaaaatgtcccgggccctcttggggtacccgaaaattagtgtcactgtggagtttttaagtttatagcgtgacacccccgaggtgaaaaaataagaagactcactaacccaagaaaaagcaagctatttatgacacaaagttattcatcaccaccaggtgaagaggtattaaagtagagggcgcctcgtgcaacacgtgtgggtctcaacacacagcgggtgtggtcttatttgtggggttctcacaacaataagttttctcttaatatctcgcgtgtgtgaaagaggtgccttggcgagtagtgtggggaaacatgtgccgagccgaaacaccagaggagactcctctcctccacagaggtttattagaggcctgtgtgcccacgtgtgggaatagtggctcaggtgtgaagaaatttcaccccggggtgaaacaccttgagggcaaagtgatatttggtgcgcccgggggccaacaaaccctttggggggcttttatctcaaatatgtgacaccttttctcgttttatactcacaaaagcggtggcgcttatctccctcttaacaatgtgtggcgctcctttcaaaattgcaccggaaaaatcctccaaatcgtggccttgaaggtatagggggggggaaatatttctcccacgcgtgggagcgttttttatatccccccaatcacaggcatattcaccattttgtataacagtctccgtttaccactctataggaagattgcgctgtgtcccaatatttcttgtgtgtggatatccaccacggagagggcggcggcgagaccaactttaacgggtggacacccacattttatttctcgcgccggtcagtggattattaccccactccactcatggggagggggataagggagattcaaccagaactgaggtttaccccactcatctagtcacaacctc

SEQ ID NO: 489595 - DNA, 109 bp, Homo sapiens
  misc_feature (81)..(81): n is a, c, g, or t
acggtatggccgagctcaggcatcattcaggctagttgatcggcagtgagtgtacacactcttagcgtatcgactacatgncacgtctgctgtctatatcaccaacact

SEQ ID NO: 489596 - DNA, 356 bp, Homo sapiens
tgctccttgcgcagggtttggtattgggtagcttaagtcgtccgaaggctttttgcccccgggaatttagacgggaagcgggcgaggcagcgcgatgcgtcttgctcacttcttgcccgcgtgtaacgggctacgtcagttgccaataggcgtggcgcgccggcagattggcacccgatgccaaaatttggatgatgctttagaagcgcgatgcgtgatccgcggtgcggatcggccatacacctgggaaattgcagcgttcttcctcgacggagccgagatgcttcgctagcgttgaactgctctggcacaattgcggttgtgggcgtctgaaagtgtgcgctatcagccacgct

SEQ ID NO: 489597 - DNA, 471 bp, Homo sapiens
  misc_feature (45)..(45): n is a, c, g, or t
  misc_feature (53)..(53): n is a, c, g, or t
  misc_feature (66)..(66): n is a, c, g, or t
  misc_feature (77)..(77): n is a, c, g, or t
  misc_feature (80)..(81): n is a, c, g, or t
tttatttaaaaggcccaaagtggccaaagggcctataatccaacnggtacgtnccccccctttttnattacaaaatnccnnggttaaatgcaaaaccaaaatagtacataacaaaaacataatcgtgcccattagccgaacactctcagatataataatttattgtatatctgtttggatttttttctatgcatatagtaatttttttaaagtccagcatattacaagtacagttttacaacatttttgtttgtttgttttgttttctgcctaatatatcttgggcctctgtatcaagacatactgatctacctcataaagatatatgtttaacaaggtggatttttaaaattgcctcaccctactagatgtttatctatttttctatatttgacaaaaattttcaaaattcttccttgtactcacaaaagcttaaatattacaagaaataaagattccggaattgtttta

SEQ ID NO: 489598 - DNA, 915 bp, Homo sapiens
cctgttgtttgactccgccatttctttgtacatatatttgtcgtgccgtccctaaattcggcggtttttccttttccggagagcttttttttggcagcgggcctttaactaattgtggccgccccgtgggatcaccggttacagcgacccttggcgtggccaccgtggttgtgatgcccggccaccacggggtgtccaaccacacgcttgggaaactgcggcaattctcgtgtctgctcccggggataccacacatggtgccccgcccctaggttgccggtcctcccttgtggtaccacacaatccttgtggggcctctggccctcccagcaattctttgtaccccgggtggctcctttcttccccttggcgcgggtttcatctccccgcgcccctctcccctctccgtggtgccaaataaggcgttgtcccctcctttctgctctcccaaatcaataagttgtttatttttttcgcctcccttgaagaattttttcgcagtacttgtgatacagtcgagctccttatttcccccaggcgcctagagccgcattggtttcttgcatctcggggtccaccgccccgctatcggactcctcccccggggtgtttcgcccggactcccctctgtggcctcagcctccgcgagtatctgtggtgccacccgcggttctcgcgtccctccccctgtcgcaacacattggggtaccccccctgttgtttcccttatttcatcctttcaaggcgtggttttggaccccccttgctgctgcgatgggtgatccatatctgggggggcatatctggaggggcttgcccttgaccgcccgtgaagttcttccaatgcccggggcagccgtggtgatatttgtcatagccttttcctcgggccccgcgccccccggcccacatgac

SEQ ID NO: 489599 - DNA, 136 bp, Homo sapiens
cacctcccatactatgtgctcgtaaatatattatatctcaggaaagtaatcctgaactatgtgacatctaaattggaatgtatacttttaaacattcaatgtgaccatcctgaaagaaattctcctttcttgatag

SEQ ID NO: 489600 - DNA, 171 bp, Homo sapiens
gaagggtatgatccacgtgtcctcctcaaggacgtcatgatttctagcaggacttacctgagtggtcgatcacatgcagttggttggttgatgcactcagttttccctatatgtgcagcattcaagttacaggctcatttccaggtcaagcccaaggtcatctgccagcag

SEQ ID NO: 489601 - DNA, 177 bp, Homo sapiens
ggaccgccatcagtcatgagagtatcaagacttgagatattgagggtaatgtacttgtcttaagtacagaacattgtcccacatatactaataacaaatatacagtaaatgctttaatctatttaactgtcatctggaaaaccaaaggaaacgaaacggaacaaatatcaaaacttt

SEQ ID NO: 489602 - DNA, 143 bp, Homo sapiens
atcttagcaacctttaccaataaggatagcgatagaatgaacctggcgcaatagatatagtacgcagggaaagatgaaaatcatagccagcatatatagcaaggctaaccacatacctctgcatatgattactagaatacttt

SEQ ID NO: 489603 - DNA, 164 bp, Homo sapiens
gcgtacatcttcgatacccctggagccccaaaccctggagccctaccctggagcaccaaaccctggagccgcctatccctggagaccctagccttggagccctcaaagtcggtcttgctctgattctagggcccctctcgagtcttcttagctctgatttctgg

SEQ ID NO: 489604 - DNA, 1070 bp, Homo sapiens
ggtgaagcccgctggccgcgaactggactggtggatctctcagacctggggccccggactccgatctccgccgtctccgccaccatcagggcgggatcctggctctggtgtttctgagcgagggggtgtggtgtagggaaacggaatccctgtccctctccaccttctctcgccttcggggcttcagcactcacggaactcgctcatggctctcctttgatgaagacagaacgaaattcaaattccaaactactttcaccctggaggagctgactgcggttcccttcgtgaacggggtcctcttctgcaatggccctggccgctccgaacccctccgagcccaggcaccactgtgaactattctcctctgaaccactagagggcaggccaggcaggccacggcgggcccgtgcagcttgtgggcaagcaaggagctggcaaggacccggcgctgcctggagactgacccatgcctctggctgaggacatgcagcagctcctaaatgtacgacgatgcctgtggctgactggtggcctctctacctgtgtccccactcactccaggagcactggcttctgcgtcacgtcttcacgccgccagggccttgcctccgttgttcccttgtcctggtggtggcgcgcggccatgaccgcctccggaatcctgccacctgtgactgctctgactgcttaagctgcctctcagctgtcccttaccttgtgtactgggggaacctgctgggggcctcatccctgtgcagcccatgccgaaaacgcttggcctccaccccggcaaactgtcctccccgctggccttgcatccccctggtacgcatctagcactttggaaagcaccccatagcgcatatggcccgtcacttgggccccattcactagtccccgtttccacttgcgcctccctttcacccatgggagccataggtgaaccttggcctctgctggctgcgccatacggccgtgtggctctacggaaccactcgccgcacactgcacgtggctttatctcccacgaaacgcccgaccatctttaaaacctgctgacaacctgt

SEQ ID NO: 489605 - DNA, 138 bp, Homo sapiens
catcgagatctgctccctcagcgaacacagatcccctccagtagactcaactgtgaccttggagacgtactaagctgaaccccgaggagacagcagatgtagacattctaacactaaacttgatttacaaccttgaca

SEQ ID NO: 489606 - DNA, 129 bp, Homo sapiens
gatttacagcttcttaatagaaaataggttcttattatatttctgactggagaaggatttgtaaggctaaaagcaatggaagggatcgcaaaagaaaatattgacaggctttggctccttcatttgtct

SEQ ID NO: 489607 - DNA, 4823 bp, Homo sapiens
agcggggaggagagagagaggggagggcggcaccgcccctagccccgcgctccggaagtgaagcggccagaccaccagctaatggatgcggagcggagggcccgctgaccgctctccgcgcctggagcagcttggcttggctggagctaagagccagacacaccactgtgtggaggtgggtgatgtcttcctgtgctaaaaggtgaataaataagctcctcacctctcgcggaacactcgggaacacatcaacaggggtccaagccgccctgctgggaggcttctcttcaagagttctgggtcccagagtggaaggcattttcccatcaactggagagagacgaaacatcagagaccaggaggctgtggagaaagcagctgtcccaggtgcctcaactatcagagaagggtcagcgtcacgtggctgccagcatctttgagaaaatcactggcaatcggacttcagagctgcgggcacaggtgtggttagaactgagatacgacctgcccacctgggtcaggcctaaagacaagaagtcctgagttcttgccactgagtaggccagggtcatttgtccagaaaactttgtgactgtctttgagtgacctagtctgggacccattcattggtgggttctaaggttagaagctcatccaggatattttcaatattaagtcagtgcatagctgcaccactaacaaattggtgcctgtagagtcagagtgggtcaattcttaggacaatggccctggcactgttagaggactggtgcaggataatgagtgtggatgagcagaagtcactgatggttacggggataccggcggactttgaggaggctgagattcaggaggtccttcaggagactttaaagtctctgggcaggtatagactgcttggcaagatattccggaagcaggagaatgccaatgctgtcttactagagcttctggaagatactgatgtctcggccattcccagtgaggtccagggaaaggggggtgtctggaaggtgatctttaagacccctaatcaggacactgagtttcttgaaagattgaacctgtttctagaaaaagaggggcagacggtctcgggtatgtttcgagccctggggcaggagggcgtgtctccagccacagtgccctgcatctcaccagaattactggcccatttgttgggacaggcaatggcacatgcgcctcagcccctgctacccatgagataccggaaactgcgagtattctcagggagtgctgtcccagccccagaggaagagtcctttgaggtctggttggaacaggccacggagatagtcaaagagtggccagtaacagaggcagaaaagaaaaggtggctggcggaaagcctgcggggccctgccctggacctcatgcacatagtgcaggcagacaacccgtccatcagtgtagaagagtgtttggaggcctttaagcaagtgtttgggagcctagagagccgcaggacagcccaggtgaggtatctgaagacctatcaggaggaaggagagaaggtctcagcctatgtgttacggctagaaaccctgctccggagagcggtggagaaacgcgccatccctcggcgtattgcggaccaggtccgcctggagcaggtcatggctggggccactcttaaccagatgctgtggtgccggcttagggagctgaaggatcagggcccgccccccagcttccttgagctaatgaaggtaatacgggaagaagaggaggaagaggcctcctttgagaatgagagtatcgaagagccagaggaacgagatggctatggccgctggaatcatgagggagacgactgaaaaccacctgggggcaggacccacagccagtgggctaagacctttaaaaaatttttttctttaatgtatgggactgaaatcaaaccatgaaagccaattattgaccttccttccttccttccttccctcccttcctccttctctccttctctcctcctctctcctctcctctcctctctttccttccttccttccttttttctttttctctttcttctttatttcttgggtctcactctcatcacccaggctagagtgcagtggcacaaaaatctcggctcactgcagccttgacttcccaggctcaggctcaggtgatcctcacaccttagcctcccaagtacctgggactacaggcacgcaccaccatgcctagctattcttttgtatttttggtagagacagggttttgctgtgttgctcaggctggtctggaacccctaggctcaaatgatgtgcccaactcggcctcccaaagtgctgggattacaggcatgaaccgccatgcctggcccttgatttttctttttaagaaaaaaatatctaggagtttcttagaccctatgtagattattaatgaacaaaagattaaactccaaatattaaatagtaagcctgaaggaatctgaaacacttgtacttccaattttctttaaataatcccaaatagaccagaattggcccataccatagaagaaagaattggcagtcaaaaaaaaaaataccttttgtaatgtttgaaaaataaagctgtttgacttgtcaggtgttttcctttctcaaatcagcaaattctctctgagtgcctggctttgtgagacactgtacaaggagttacaagactacagctataacctgcagttgagcagttataaacctacaaaatgggccctgccctcagagaggttccagtctagatgaggagctgatctagacaggtaaaaggctaactaaccctttgtgtaaataagttcatcaccccagtaaaagtgtcatcacccagtgaataggaccacctctgcctgcagatttttgttgttgttgttgtcattgttgttgttgttttaacctgggaagtgttcttcctgcctttctgctaggtgtcagatagatggtcccagagctaggtgctgtgtcaggccctgaagacacagatgactcaacctaagctttactttccagaggtccacagcctgagaggtgtccccaaagaaagggggacatgaggggactgcatgcttgagagcagggttgtttagggcaggtttggatttagtgagcaggctggtttgcttagagaaggcttttagtggcaacaaaggatgaagaggagagaaaaggaactcacatttattgaaggcctactgtgtgcaaagtgtttcatgtatatctcattgaatgtatacagccaccctgttgtggtataattttgctctttataaagagaaagaccgaagctcagatgagttaagtggtctcctcaacaccaaaatgccaagaagtgatggagcctagacagaagcccagaactttctgactcacactagtccatcctctaccatcacgatgactttcaaattgtgctctgcagttctgcagattttctagcagtgccatctccaaaatgtgttttaaactctttatttttttaattattattagtattattttgagactgagtcttgctctatcacccaggctggagtgcagtggtgcaatctcagctcactgcaacctccgcctcccaggttcaagcgatttcgtgcctcagcctcccgagtagctgggattacaggcacccaccaccacgcccagctaatttttgtatttttagtagaaatggggtttcaccatgttggccaggctggtctcgaactcctgacctcaagtgatccactcacctcggcctcccaaagtgctgggattacaggtgtgagccaccatgcctgggctaaactctttaagtctctagtaaatgcagctagattcaaatgggctgataaccaaattttaacacatcagcattcaccaccaggtttacttttattttcagattggctcattttgtgcagaccttagagcaaagtttcctttatggtatctgtgtacgtatccaaacttcttttaattgttcacagattttaaaagcggtagcaccacatggttgtgtagatcagacctgtgtatttagatcagacctgtgtatcacgtaagtgtgtgagtgcagtgcagatgagcaccatttagttatatgtgctaggcaaatctccaacacagttgatgtgtagtcttgtggtagatttgtgcatactgtaagcaaattgcttagcttctctagacatcagtttccacatctgaaaaataagaagatgagagtacacggttgttatgaacaaatgacttaatgctttttaagcacgttgcatgacatctggaacacagaaagccctcaatacattgaagctcttaggattttcacgatgttcctgtctgctcaatgcatgctttctttattgttctgacagttgtgtggtaacaagctaatatgcttccagttgacttccagtctaccctggtgttagaaaccgtttcatctcttattgtaaatttgagtgcttgttgttttttatatttgtgatgactcttccagcagttgttgacaattgttagaggtttgacttttaaataattacttattttttctgattgtggttcagtttaactgaagaatatcctgagattgtaagaaaagcattttttaaaaggtatcacttgtgatcatttatctttctaaattctatttttaatactgttccaccaaagtgatgcagtggttaccatgacaccctaatttcatgtgtttttgtatttatgaaaatagtttcattgtcatttattggcggtatacaaagtaaaatgttataaatgtgaagttataaaataaatatatgctaataaaatcctgagtttttctgaaaaaaaaaa

SEQ ID NO: 489608 - DNA, 1411 bp, Homo sapiens
gcattagactgagatctctgagatgaaccggatcatcagccggttcctggctgacattgacgggcctcgagaggtccatgaagggcttcctctggaggccgctctaattgccgaagactgccggatgcagccgtggcagaggctaggctctattaaagtgatgccacacgctcataagttagttcctgatgcttgcgacggcccgcccgtgctatgcgtgagactcaatgctatgcgtacattggctgcgtgacacgcttgcattagatgttacgcagggatgctggactgaacggtcaaaggctcggctcatggaatactcgaggaatccgcccaatccttggccagtgtaagctcgctgtgaagagcgcagcaaggaaggagtccccgtggcatcgttcatgttactcgtgcgcacttgctacgtacacctatcgtacgcttagttccattacctcataggcatcataccgagcgggggcgtcatggcaaggcgtttggatcctagaggtcttcagagccacgttcatgagggggtcctcctatcaagacgacgcgcgccagggttcaattcctacgccctaacaacggtcgcgtaaggcgcccttccccgatggacgtattctccgtgacatccctaagtgcctggtccgtgcgccttttcaccaaagcccttcaccgttttaccaagtcggcttgactaaccctacgttcattcccttttccacagggggggcccccagtttggaggatttttgttcggaatacggaacacagaacttccagactggaattccaaccaggttagtaatagggggaacaccggcccttggggttcgatttcttagcaactgttacactttccttcggaacaggtgcccttcgtcttccgtaatacggtttgcataaggcactggccctgggtccgcgttcaaagtgtccgacacattgtgcgcacagatgcccctttaaactctatccgttccgcttagtttgtctcttggcgccccacaattcaccgttccacttgttgtggtatcatggggccaagtggcaccggtatttaatcgtttaacggtgagttacagggcagactgggcgaaaaaacctaggtgtatggaaaccccaaaagccttttgctatgtggagaatatcccagcgcggacgatgaggacagcgctatgtgagatgaaaacacaccccaatgtggtgcgtgaaagtattctcacaagcattaaacccccgttaggttgtggaatagccacctcaactcatttgtgggcgctcccaaatagtggccctggtcacacaagagctgtttaacatcagttatccttataaatttccaataatatcaggagggtgctattacagggggcaaagatatggggtccctctcacaagttatatg

SEQ ID NO: 489609 - DNA, 553 bp, Homo sapiens
  misc_feature (399)..(399): n is a, c, g, or t
aatgaaagacagagggtagctggtgatttgcataaggctcaccagtccctggagccttacccagtccaaaatagtaaaagctgctggaggcctactgttattgaaaatagtgatgtttccccagaaacggagtcttctgagaaggagacaatgtctgtaagtttaaatcagactgtaacccagttcacgcagttgcttcaggcggttaaccccacgctcccaaaggagaaagagcccttcccggggttagagtgaagtaattggggaactgttcctttgaggataaaaaaggccttgtattatattttgcccaattaaagccctatttatggtttccccccttctaccttggcagaaacccggacaagaggtttgtcttttttaatccctggtaggccnctggtttaaagaaggaaaaaaaaaagccccctctgtagaccccctcagaggttagttttataataaaaactgtttgaataattaggccctttccttcctgaagataaacatgtaatcttttttctttttttggcccataaaattgttccgaaga

SEQ ID NO: 489610 - DNA, 4769 bp, Homo sapiens
agcggggaggagagagagaggggagggcggcaccgcccctagccccgcgctccggaagtgaagcggccagaccaccagctaatggatgcggagcggagggcccgctgaccgctctccgcgcctggagcagcttggcttggctggagctaagagccagacacaccactgtgtggaggtgggtgatgtcttcctgtgctaaaaggtgaataaataagctcctcacctctcgcggaacactcgggaacacatcaacaggggtccaagccgccctgctgggaggcttctcttcaagagttctgggtcccagagtggaaggcattttcccatcaactggagagagacgaaacatcagagaccaggaggctgtggagaaagcagctgtcccaggtgcctcaactatcagagaagggtcagcgtcacgtggctgccagcatctttgagaaaatcactggcaatcggacttcagagctgcgggcacaggtgtggttagaactgagatacgacctgcccacctgggtcaggcctaaagacaagaagtcctgagttcttgccactgagtaggccagggtcatttgtccagaaaactttgtgactgtctttgagtgacctagtctgggacccattcattggtgggttctaaggttagaagctcatccaggatattttcaatattaagtcagtgcatagctgcaccactaacaaattggtgcctgtagagtcagagtgggtcaattcttaggacaatggccctggcactgttagaggactggtgcaggataatgagtgtggatgagcagaagtcactgatggttacggggataccggcggactttgaggaggctgagattcaggaggtccttcaggagactttaaagtctctgggcaggtatagactgcttggcaagatattccggaagcaggagaatgccaatgctgtcttactagagcttctggaagatactgatgtctcggccattcccagtgaggtccagggaaaggggggtgtctggaaggtgatctttaagacccctaatcaggacactgagtttcttgaaagattgaacctgtttctagaaaaagaggggcagacggtctcgggtatgtttcgagccctggggcaggagggcgtgtctccagccacagtgccctgcatctcaccagaattactggcccatttgttgggacaggcaatggcacatgcgcctcagcccctgctacccatgagataccggaaactgcgagtattctcagggagtgctgtcccagccccagaggaagagtcctttgaggtctggttggaacaggccacggagatagtcaaagagtggccagtaacagaggcagaaaagaaaaggtggctggcggaaagcctgcggggccctgccctggacctcatgcacatagtgcaggcagacaacccgtccatcagtgtagaagagtgtttggaggcctttaagcaagtgtttgggagcctagagagccgcaggacagcccaggtgaggtatctgaagacctatcaggaggaaggagagaaggtctcagcctatgtgttacggctagaaaccctgctccggagagcggtggagaaacgcgccatccctcggcgtattgcggaccaggtccgcctggagcaggtcatggctggggccactcttaaccagatgctgtggtgccggcttagggagctgaaggatcagggcccgccccccagcttccttgagctaatgaaggtaatacgggaagaagaggaggaagaggcctcctttgagaatgagagtatcgaagagccagaggaacgagatggctatggccgctggaatcatgagggagacgactgaaaaccacctgggggcaggacccacagccagtgggctaagacctttaaaaaatttttttctttaatgtatgggactgaaatcaaaccatgaaagccaattattgaccttccttccttccttccttccctcccttcctccttctctccttctctcctcctctctcctctcctctcctctctttccttccttccttccttttttctttttctctttcttctttatttcttgggtctcactctcatcacccaggctagagtgcagtggcacaaaaatctcggctcactgcagccttgacttcccaggctcaggctcaggtgatcctcacaccttagcctcccaagtacctgggactacaggcacgcaccaccatgcctagctattcttttgtatttttggtagagacagggttttgctgtgttgctcaggctggtctggaacccctaggctcaaatgatgtgcccaactcggcctcccaaagtgctgggattacaggcatgaaccgccatgcctggcccttgatttttctttttaagaaaaaaatatctaggagtttcttagaccctatgtagattattaatgaacaaaagattaaactccaaatattaaatagtaagcctgaaggaatctgaaacacttgtacttccaattttctttaaataatcccaaatagaccagaattggcccataccatagaagaaagaattggcagtcaaaaaaaaaaataccttttgtaatgtttgaaaaataaagctgtttgacttgtcaggtgttttcctttctcaaatcagcaaattctctctgagtgcctggctttgtgagacactgtacaaggagttacaagactacagctataacctgcagttgagcagttataaacctacaaaatgggccctgccctcagagaggttccagtctagatgaggagctgatctagacaggtaaaaggctaactaaccctttgtgtaaataagttcatcaccccagtaaaagtgtcatcacccagtgaataggaccacctctgcctgcagatttttgttgttgttgttgtcattgttgttgttgttttaacctgggaagtgttcttcctgcctttctgctaggtgtcagatagatggtcccagagctaggtgctgtgtcaggccctgaagacacagatgactcaacctaagctttactttccagaggtccacagcctgagaggtgtccccaaagaaagggggacatgaggggactgcatgcttgagagcagggttgtttagggcaggtttggatttagtgagcaggctggtttgcttagagaaggcttttagtggcaacaaaggatgaagaggagagaaaaggaactcacatttattgaaggcctactgtgtgcaaagtgtttcatgtatatctcattgaatgtatacagccaccctgttgtggtataattttgctctttataaagagaaagaccgaagctcagatgagttaagtggtctcctcaacaccaaaatgccaagaagtgatggagcctagacagaagcccagaactttctgactcacactagtccatcctctaccatcacgatgactttcaaattgtgctctgcagttctgcagattttctagcagtgccatctccctgagtcttgctctatcacccaggctggagtgcagtggtgcaatctcagctcactgcaacctccgcctcccaggttcaagcgatttcgtgcctcagcctcccgagtagctgggattacaggcacccaccaccacgcccagctaatttttgtatttttagtagaaatggggtttcaccatgttggccaggctggtctcgaactcctgacctcaagtgatccactcacctcggcctcccaaagtgctgggattacaggtgtgagccaccatgcctgggctaaactctttaagtctctagtaaatgcagctagattcaaatgggctgataaccaaattttaacacatcagcattcaccaccaggtttacttttattttcagattggctcattttgtgcagaccttagagcaaagtttcctttatggtatctgtgtacgtatccaaacttcttttaattgttcacagattttaaaagcggtagcaccacatggttgtgtagatcagacctgtgtatttagatcagacctgtgtatcacgtaagtgtgtgagtgcagtgcagatgagcaccatttagttatatgtgctaggcaaatctccaacacagttgatgtgtagtcttgtggtagatttgtgcatactgtaagcaaattgcttagcttctctagacatcagtttccacatctgaaaaataagaagatgagagtacacggttgttatgaacaaatgacttaatgctttttaagcacgttgcatgacatctggaacacagaaagccctcaatacattgaagctcttaggattttcacgatgttcctgtctgctcaatgcatgctttctttattgttctgacagttgtgtggtaacaagctaatatgcttccagttgacttccagtctaccctggtgttagaaaccgtttcatctcttattgtaaatttgagtgcttgttgttttttatatttgtgatgactcttccagcagttgttgacaattgttagaggtttgacttttaaataattacttattttttctgattgtggttcagtttaactgaagaatatcctgagattgtaagaaaagcattttttaaaaggtatcacttgtgatcatttatctttctaaattctatttttaatactgttccaccaaagtgatgcagtggttaccatgacaccctaatttcatgtgtttttgtatttatgaaaatagtttcattgtcatttattggcggtatacaaagtaaaatgttataaatgtgaagttataaaataaatatatgctaataaaatcctgagtttttctgaaaaaaaaaa

SEQ ID NO: 489611 - DNA, 236 bp, Homo sapiens
tcatccttattctattgcagtaatatacctatttacccctgtatttgtgtcataattatttcttgccttaaacagttatgtgttaatgtacttctaaaagcacatgactttttttttatttaaacagggtatcctataaatttaagtattataggttggtcctttgctgcaccatgggctttaaaaaagagtaaggaaaaatacacggatggtttaaccagtggtgttcatgagga

SEQ ID NO: 489612 - DNA, 4769 bp, Homo sapiens
agcggggaggagagagagaggggagggcggcaccgcccctagccccgcgctccggaagtgaagcggccagaccaccagctaatggatgcggagcggagggcccgctgaccgctctccgcgcctggagcagcttggcttggctggagctaagagccagacacaccactgtgtggaggtgggtgatgtcttcctgtgctaaaaggtgaataaataagctcctcacctctcgcggaacactcgggaacacatcaacaggggtccaagccgccctgctgggaggcttctcttcaagagttctgggtcccagagtggaaggcattttcccatcaactggagagagacgaaacatcagagaccaggaggctgtggagaaagcagctgtcccaggtgcctcaactatcagagaagggtcagcgtcacgtggctgccagcatctttgagaaaatcactggcaatcggacttcagagctgcgggcacaggtgtggttagaactgagatacgacctgcccacctgggtcaggcctaaagacaagaagtcctgagttcttgccactgagtaggccagggtcatttgtccagaaaactttgtgactgtctttgagtgacctagtctgggacccattcattggtgggttctaaggttagaagctcatccaggatattttcaatattaagtcagtgcatagctgcaccactaacaaattggtgcctgtagagtcagagtgggtcaattcttaggacaatggccctggcactgttagaggactggtgcaggataatgagtgtggatgagcagaagtcactgatggttacggggataccggcggactttgaggaggctgagattcaggaggtccttcaggagactttaaagtctctgggcaggtatagactgcttggcaagatattccggaagcaggagaatgccaatgctgtcttactagagcttctggaagatactgatgtctcggccattcccagtgaggtccagggaaaggggggtgtctggaaggtgatctttaagacccctaatcaggacactgagtttcttgaaagattgaacctgtttctagaaaaagaggggcagacggtctcgggtatgtttcgagccctggggcaggagggcgtgtctccagccacagtgccctgcatctcaccagaattactggcccatttgttgggacaggcaatggcacatgcgcctcagcccctgctacccatgagataccggaaactgcgagtattctcagggagtgctgtcccagccccagaggaagagtcctttgaggtctggttggaacaggccacggagatagtcaaagagtggccagtaacagaggcagaaaagaaaaggtggctggcggaaagcctgcggggccctgccctggacctcatgcacatagtgcaggcagacaacccgtccatcagtgtagaagagtgtttggaggcctttaagcaagtgtttgggagcctagagagccgcaggacagcccaggtgaggtatctgaagacctatcaggaggaaggagagaaggtctcagcctatgtgttacggctagaaaccctgctccggagagcggtggagaaacgcgccatccctcggcgtattgcggaccaggtccgcctggagcaggtcatggctggggccactcttaaccagatgctgtggtgccggcttagggagctgaaggatcagggcccgccccccagcttccttgagctaatgaaggtaatacgggaagaagaggaggaagaggcctcctttgagaatgagagtatcgaagagccagaggaacgagatggctatggccgctggaatcatgagggagacgactgaaaaccacctgggggcaggacccacagccagtgggctaagacctttaaaaaatttttttctttaatgtatgggactgaaatcaaaccatgaaagccaattattgaccttccttccttccttccttccctcccttcctccttctctccttctctcctcctctctcctctcctctcctctctttccttccttccttccttttttctttttctctttcttctttatttcttgggtctcactctcatcacccaggctagagtgcagtggcacaaaaatctcggctcactgcagccttgacttcccaggctcaggctcaggtgatcctcacaccttagcctcccaagtacctgggactacaggcacgcaccaccatgcctagctattcttttgtatttttggtagagacagggttttgctgtgttgctcaggctggtctggaacccctaggctcaaatgatgtgcccaactcggcctcccaaagtgctgggattacaggcatgaaccgccatgcctggcccttgatttttctttttaagaaaaaaatatctaggagtttcttagaccctatgtagattattaatgaacaaaagattaaactccaaatattaaatagtaagcctgaaggaatctgaaacacttgtacttccaattttctttaaataatcccaaatagaccagaattggcccataccatagaagaaagaattggcagtcaaaaaaaaaaataccttttgtaatgtttgaaaaataaagctgtttgacttgtcaggtgttttcctttctcaaatcagcaaattctctctgagtgcctggctttgtgagacactgtacaaggagttacaagactacagctataacctgcagttgagcagttataaacctacaaaatgggccctgccctcagagaggttccagtctagatgaggagctgatctagacaggtaaaaggctaactaaccctttgtgtaaataagttcatcaccccagtaaaagtgtcatcacccagtgaataggaccacctctgcctgcagatttttgttgttgttgttgtcattgttgttgttgttttaacctgggaagtgttcttcctgcctttctgctaggtgtcagatagatggtcccagagctaggtgctgtgtcaggccctgaagacacagatgactcaacctaagctttactttccagaggtccacagcctgagaggtgtccccaaagaaagggggacatgaggggactgcatgcttgagagcagggttgtttagggcaggtttggatttagtgagcaggctggtttgcttagagaaggcttttagtggcaacaaaggatgaagaggagagaaaaggaactcacatttattgaaggcctactgtgtgcaaagtgtttcatgtatatctcattgaatgtatacagccaccctgttgtggtataattttgctctttataaagagaaagaccgaagctcagatgagttaagtggtctcctcaacaccaaaatgccaagaagtgatggagcctagacagaagcccagaactttctgactcacactagtccatcctctaccatcacgatgactttcaaattgtgctctgcagttctgcagattttctagcagtgccatctccaaaatgtgttttaaactctttatttttttaattattattagtattattttgagactgagtcttgctctatcacccaggctggagtgcagtggtgcaatctcagctcactgcaacctccgcctcccaggttcaagcgatttcgtgcctcagcctcccgagtagctgggattacaggcacccaccaccacgcccagctaatttttgtatttttagtagaaatggggtttcaccatgttggccaggctggtctcgaactcctgacctcaagtgatccactcacctcggcctcccaaagtgctgggattacaggtgtgagccaccatgcctgggctaaactctttaagtctctagtaaatgcagctagattcaaatgggctgataaccaaattttaacacatcagcattcaccaccaggtttacttttattttcagattggctcattttgtgcagaccttagagcaaagtttcctttatggtatctgtgtacgtatccaaacttcttttaattgttcacagattttaaaagcggtagcaccacatggttgtgtagatcagacctgtgtatttagatcagacctgtgtatcacgtaagtgtgtgagtgcagtgcagatgagcaccatttagttatatgtgctaggcaaatctccaacacagttgatgtgtagtcttgtggtagatttgtgcatactgtaagcaaattgcttagcttctctagacatcagtttccacatctgataagcacgttgcatgacatctggaacacagaaagccctcaatacattgaagctcttaggattttcacgatgttcctgtctgctcaatgcatgctttctttattgttctgacagttgtgtggtaacaagctaatatgcttccagttgacttccagtctaccctggtgttagaaaccgtttcatctcttattgtaaatttgagtgcttgttgttttttatatttgtgatgactcttccagcagttgttgacaattgttagaggtttgacttttaaataattacttattttttctgattgtggttcagtttaactgaagaatatcctgagattgtaagaaaagcattttttaaaaggtatcacttgtgatcatttatctttctaaattctatttttaatactgttccaccaaagtgatgcagtggttaccatgacaccctaatttcatgtgtttttgtatttatgaaaatagtttcattgtcatttattggcggtatacaaagtaaaatgttataaatgtgaagttataaaataaatatatgctaataaaatcctgagtttttctgaaaaaaaaaa

SEQ ID NO: 489613 - DNA, 4121 bp, Homo sapiens
gaggaggtcccaaacgctggtgggacctcgacctcagctggtgtccaggctcttgatactgccacgggaaggaattcaaggatgagtcagaaaatagtgaaaatatggttacggggataccggcggactttgaggaggctgagattcaggaggtccttcaggagactttaaagtctctgggcaggtatagactgcttggcaagatattccggaagcaggagaatgccaatgctgtcttactagagcttctggaagatactgatgtctcggccattcccagtgaggtccagggaaaggggggtgtctggaaggtgatctttaagacccctaatcaggacactgagtttcttgaaagattgaacctgtttctagaaaaagaggggcagacggtctcgggtatgtttcgagccctggggcaggagggcgtgtctccagccacagtgccctgcatctcaccagaattactggcccatttgttgggacaggcaatggcacatgcgcctcagcccctgctacccatgagataccggaaactgcgagtattctcagggagtgctgtcccagccccagaggaagagtcctttgaggtctggttggaacaggccacggagatagtcaaagagtggccagtaacagaggcagaaaagaaaaggtggctggcggaaagcctgcggggccctgccctggacctcatgcacatagtgcaggcagacaacccgtccatcagtgtagaagagtgtttggaggcctttaagcaagtgtttgggagcctagagagccgcaggacagcccaggtgaggtatctgaagacctatcaggaggaaggagagaaggtctcagcctatgtgttacggctagaaaccctgctccggagagcggtggagaaacgcgccatccctcggcgtattgcggaccaggtccgcctggagcaggtcatggctggggccactcttaaccagatgctgtggtgccggcttagggagctgaaggatcagggcccgccccccagcttccttgagctaatgaaggtaatacgggaagaagaggaggaagaggcctcctttgagaatgagagtatcgaagagccagaggaacgagatggctatggccgctggaatcatgagggagacgactgaaaaccacctgggggcaggacccacagccagtgggctaagacctttaaaaaatttttttctttaatgtatgggactgaaatcaaaccatgaaagccaattattgaccttccttccttccttccttccctcccttcctccttctctccttctctcctcctctctcctctcctctcctctctttccttccttccttccttttttctttttctctttcttctttatttcttgggtctcactctcatcacccaggctagagtgcagtggcacaaaaatctcggctcactgcagccttgacttcccaggctcaggctcaggtgatcctcacaccttagcctcccaagtacctgggactacaggcacgcaccaccatgcctagctattcttttgtatttttggtagagacagggttttgctgtgttgctcaggctggtctggaacccctaggctcaaatgatgtgcccaactcggcctcccaaagtgctgggattacaggcatgaaccgccatgcctggcccttgatttttctttttaagaaaaaaatatctaggagtttcttagaccctatgtagattattaatgaacaaaagattaaactccaaatattaaatagtaagcctgaaggaatctgaaacacttgtacttccaattttctttaaataatcccaaatagaccagaattggcccataccatagaagaaagaattggcagtcaaaaaaaaaaataccttttgtaatgtttgaaaaataaagctgtttgacttgtcaggtgttttcctttctcaaatcagcaaattctctctgagtgcctggctttgtgagacactgtacaaggagttacaagactacagctataacctgcagttgagcagttataaacctacaaaatgggccctgccctcagagaggttccagtctagatgaggagctgatctagacaggtaaaaggctaactaaccctttgtgtaaataagttcatcaccccagtaaaagtgtcatcacccagtgaataggaccacctctgcctgcagatttttgttgttgttgttgtcattgttgttgttgttttaacctgggaagtgttcttcctgcctttctgctaggtgtcagatagatggtcccagagctaggtgctgtgtcaggccctgaagacacagatgactcaacctaagctttactttccagaggtccacagcctgagaggtgtccccaaagaaagggggacatgaggggactgcatgcttgagagcagggttgtttagggcaggtttggatttagtgagcaggctggtttgcttagagaaggcttttagtggcaacaaaggatgaagaggagagaaaaggaactcacatttattgaaggcctactgtgtgcaaagtgtttcatgtatatctcattgaatgtatacagccaccctgttgtggtataattttgctctttataaagagaaagaccgaagctcagatgagttaagtggtctcctcaacaccaaaatgccaagaagtgatggagcctagacagaagcccagaactttctgactcacactagtccatcctctaccatcacgatgactttcaaattgtgctctgcagttctgcagattttctagcagtgccatctccaaaatgtgttttaaactctttatttttttaattattattagtattattttgagactgagtcttgctctatcacccaggctggagtgcagtggtgcaatctcagctcactgcaacctccgcctcccaggttcaagcgatttcgtgcctcagcctcccgagtagctgggattacaggcacccaccaccacgcccagctaatttttgtatttttagtagaaatggggtttcaccatgttggccaggctggtctcgaactcctgacctcaagtgatccactcacctcggcctcccaaagtgctgggattacaggtgtgagccaccatgcctgggctaaactctttaagtctctagtaaatgcagctagattcaaatgggctgataaccaaattttaacacatcagcattcaccaccaggtttacttttattttcagattggctcattttgtgcagaccttagagcaaagtttcctttatggtatctgtgtacgtatccaaacttcttttaattgttcacagattttaaaagcggtagcaccacatggttgtgtagatcagacctgtgtatttagatcagacctgtgtatcacgtaagtgtgtgagtgcagtgcagatgagcaccatttagttatatgtgctaggcaaatctccaacacagttgatgtgtagtcttgtggtagatttgtgcatactgtaagcaaattgcttagcttctctagacatcagtttccacatctgaaaaataagaagatgagagtacacggttgttatgaacaaatgacttaatgctttttaagcacgttgcatgacatctggaacacagaaagccctcaatacattgaagctcttaggattttcacgatgttcctgtctgctcaatgcatgctttctttattgttctgacagttgtgtggtaacaagctaatatgcttccagttgacttccagtctaccctggtgttagaaaccgtttcatctcttattgtaaatttgagtgcttgttgttttttatatttgtgatgactcttccagcagttgttgacaattgttagaggtttgacttttaaataattacttattttttctgattgtggttcagtttaactgaagaatatcctgagattgtaagaaaagcattttttaaaaggtatcacttgtgatcatttatctttctaaattctatttttaatactgttccaccaaagtgatgcagtggttaccatgacaccctaatttcatgtgtttttgtatttatgaaaatagtttcattgtcatttattggcggtatacaaagtaaaatgttataaatgtgaagttataaaataaatatatgctaataaaatcctgagtttttctgaaaaaaaaaa

SEQ ID NO: 489614 - DNA, 81 bp, Homo sapiens
gctgaggacacggccgtgtatgactgtatgagagccccatattacgatgatagtagtgtccgccccgcccgcggccaggga

SEQ ID NO: 489615 - DNA, 1198 bp, Homo sapiens
atttcgtgtctcgtgctgatgtttcctagagtctcgactgttcctacctcttctgccccctttcccgaccaacccatattgtcctcatggaatgccacggagacaatcatgcggctgacgactatatgctacatcagatgattcgtgcatcggaacatgtcacggtacctgcatgtatcaagctgcatttgatatggccctggcaccacaaaacataacgatcccaaaaggataattgtatggcgcacataaccagtgtgcatcttgtcagccaagcaacgcatacagccagtctgttctgaaacttgagtggcagcacttcacaaggcagactatcagcagcaggcccaagcaccagctggaacccggcaaccactaccgcacaacacaagcactagaacaaggcaatcaatccaacggggccatgcacaagtcgcacatcccacgcccccagccaccactgacacgaaaccaaccagataggaagccccgcataacagcaaggacccatgcgatgacacacaagcattcggcgacaagcataaccaccctatggggccagcggcatctgcaacggcagcctaccacggaaagatagtggcatcccaaaccgaacagaacgaaccttgacgagcccccgctggaagtcccgtggcagaatcggggcagggccaaagacatggccaaccctagacacggcagggcgccaaggaatgtgcattcgacacccagtaaccggacaacagccaaacacaaatccaacacggtcacgaagacaggccgtgacagcccaagggatgcccaggcagcaccgtcacgggaacggccgccacacggggccaaccaaccagtacactgccaaaacgagcacccccaaccatccagctgccacattaagcgccatcaagtcgccagagcatcccgcacaccgcacgcgcgcagcgccctgcgcaaacgcagcacgaaaggcctaggcacaacacaccacgacactgcggcagctcacggacgggggaaacgcaacaccaccacaccacccgggaccagcgcaacacgaccgaacactaccacacacgggcaacccacataaccacggcaacagaaaaacacacaacggacgtacagtaccacacaacaacacccccgacgaccgacaccaacccacacgaccggcaaagacacagccagcacgcgacac

SEQ ID NO: 489616 - DNA, 499 bp, Homo sapiens
tgagcagacagtgttgaatcgtataccttaatgactatctgcctagttattctagcagctgttggagttgggggctggagtcgtcaactgcaacagaaggtttgtctcttcctcctttcagctctatcagtttctgctttatacatgttgaaggtctgtggtttgctgtacacacatttggaattgctgttatcttcccagtggattcttttatcattatgtaatgtccctctttttcccaaggaatttcaacagccactcccgctttttaaaatttatgtttacatgatactcttttgccgtccttttactttcaatgtgcctatgttattatgtttgaagtgagcttcagcatatagtagacatcatacagttgggtcatgtttggtatccacgtggcgaacctctgtcttctaattggtgtgattaggccatttacatttaaattagtgatatattagggcttacgcttgccattgcaacacggggggtaccgagc

SEQ ID NO: 489617 - DNA, 126 bp, Homo sapiens
ggtctgaccgggaggcgaggtgggcgatcacctgagtccaggaggtcaagactgcaatgagccatgatggcgctactgcactccagcctggactccagcctgggtggcagagtaagatccagtctc

SEQ ID NO: 489618 - DNA, 161 bp, Homo sapiens
ttgcgaggaatgctgagacaaatgtcatgtcctttctcccaaggtacagaatacgattattctcaatgatgtggtggttctggagactcaggattcttggatccatgcgtgggcctcatacatctcttccacgttgaatcccatcagattgatggcaggag

SEQ ID NO: 489619 - DNA, 110 bp, Homo sapiens
gcacaacgaaatgtatcctggaatccgagaagcccaagggttggggccaaaacacggatgggcccagtactggcatctcaggtccaggtgacttcctggctcacaccagg

SEQ ID NO: 489620 - DNA, 361 bp, Homo sapiens
caatttactcaataacatgttcttggtgctttgtatatttactcattcctcacaagggtctgatgtatgtttaatatatatttcatttacatatgtgaaccctaggcacagaaattcgatgtacttgcctaaggtcaagcgtgtagaatttgtagcaaagccctgattcttgctatgccagaagttcctagtttttatgcttggtcattagcttttcctattttaaaaatgatttttaaagcccacttttctttaaaccttaaatatacttaaaaattcactgaaaaatttagttgggtgttaatattaaaaatgcctatttgcttgttttttgactgatgctcaagcgcttttacatttg

SEQ ID NO: 489621 - DNA, 105 bp, Homo sapiens
  misc_feature (66)..(66): n is a, c, g, or t
  misc_feature (76)..(76): n is a, c, g, or t
ggcaagataagctaggagccgcgcgagtcgtagtgtcgctgtttagcggggctccccgcggccccntgcgcgcgangcgggatcgcttgagagcggagagatctt

SEQ ID NO: 489622 - DNA, 590 bp, Homo sapiens
tacaaaataatttttttttagagacacagtctccctctgttgcccaggctacagtgcagtggcacaatcacgagctcactgcaacctcagcctcctgggctcatgcaagcttccaggcctgacgctcctgagtacctggcactactatgcctggctaattttttttggtattgttttgtagagacagggttttgccatgttgcccaggctggtctcaaactcctaagctcaaacaatccacccaccttggcctcccaagtagctgggattaaaggcgtgcaccaccatgcctggctaatttttgtatttttagtagagatggggttccaccatgatggccaggctggtctggaacccctgacctcatgtgatctgtctgccttggcctcccaaactgctgggattacaggcatgagccaccacgcccgagcgctttattctttgttgtagtagtttgtttttaagagacagggccttgccttgttgcccaggctgaagtgcagcagtgcgatcgtagcttgctgtagccttgaactccttgcctcaggtgatctcctaacttggttcccaaagtgtgggatatagggtga

SEQ ID NO: 489623 - DNA, 204 bp, Homo sapiens
tagccgacgacactttacctcttttctttgttagtcctgaaaaacaaaaacaagggcatgcccctttggttttaattccctcacccatacaattgcgcaggtttatgacgatttgggttagttttcttcattggcttcagggcactattcacctttaaagatataacttcttagagtccccgtcgtgcctccgtgggttatttt

SEQ ID NO: 489624 - DNA, 167 bp, Homo sapiens
acatacgagatggtagcaaaacagaagctgaaggccaccgatatacccgactgatcgaccgaatcctccaggacccatgattagcagatctccaaagtgttcctaatggagacggaccaggtggaggaagtcacctacgacgtggcccagtatataaagttcgcgat

SEQ ID NO: 489625 - DNA, 909 bp, Homo sapiens
agatggccaagacagaaaatcgtggctagggttgactgagaactgtcgtcttccatgtattacaacgcaattaagcttttgcatattccactctctgtgctgaccctggctgaggcatttgggagacaagggactctgaatcttctgctgtccagttaacagaaacgaactgtgactattcaacattaggacttgtctgagaagtaaaagattacggatgattccttgtagaactttgagcttacttgtatgacaatgtccagctaggttaggttttgccatttcctatatactcttgggtaaagctacatttgatgagcaatgtgaatgtctctgacaatgttcattcctgtgtttctcttaagagaatgtgctgtgtactagcatgcaggccgcatagtgtctgcctgttgaagatctggaatctgcctccccagatctgttttgtattggtcgcgtaggggggtcagtttcttcttgctcagttgtgtgtgttaatctacacgccactctgtggaaccagggtgttgctttggggaactcctcctgtgtactaggaggatggtaccttagggagaccagagaggagagaagcatttcctttgatgatgtcacattctgtctagtgatgcccactaatgctgtgacatgggggcttgaaacagaagtgtcttgtaaaagccttgctcaggtgtggctatagcatcgtggttggttcacgcacttagattgtttggggaccgtagaaggggtaacccccgaattctgcccgggactgggaatggcgcaaaagtaaccgtctagtgggtggaatgggtagccgactggctttgcgagtcgcttcggaaattgggggacccaaatggaacgggcgacacattataagcgggggggaaaagggaacaaaaa

SEQ ID NO: 489626 - DNA, 949 bp, Homo sapiens
tcactgcacaatttcttttcatggttcatgcgaatatctggcagccttccaggtcccctgaatgtagtagacacttcagcagccgtctcctaccccttttgccactaaatgcttcaaaatgcctttgacctcgccgcgggcaggcggaacgcttaagataccgggtcagtatcgtcctgtcggactggggctggccgccggtcgcatcgtgaggacacgtgtagttatccgacagggtttatgggaccgcgttaaagtcatgagatgcacgcacttatgaggttgttgaatgaatgtggaacgcttcatcatgtcacgcgtctcggttcactggaacactggacaactgtaagagggcaatccagcaggcattccaggcctcatggacccccagggacatgacgggttgacgacgggtggaccatcccccggcatcggttcgtctacataaggacgaacgaagtacaacctgcgtctgggcctaacaaagtaagccccacaaaaagcacgaaccctggatcgggtctgggggccacggtccgagccagtgcgacaaaagcatagaggtctattccaggctggagtcaccagacacgaacactgcatcggtttacgggaagcatacactgagggatgcgacacactgggagggaccggaaaagacaagaccaacgacctcggagtaagagcattggaccactcaataacaccgaccctaccacgaggtgacactgcagggcccaggtgacacacgcccaaacgacggaacaaacacatgagtgcgccccacagccaggactggcgggctgcagcgcaacagtgaagagcgcccagagaaggcgaagcagcgaacagcccgagcgaccagagaaacacgcccatacgcaccagccccagcgaaaccggacaccaccgcacggcacggagccagagaaaagacaggacacaa

SEQ ID NO: 489627 - DNA, 115 bp, Homo sapiens
cgagatagctacaaaatgagactaattatcacatgctactacgggtccatgtcaagggtgctaaaagcactctagttcccaatgtatatgtttagttccctctcccccacaccac

SEQ ID NO: 489628 - DNA, 129 bp, Homo sapiens
taacgacgccactgaaaacttgagaatcatgttgaagctaaacccatatgcaaagaccatgcgccgttaggaaggcgctcgttacggagggcgctcgttacggagggcgctcgttacggaaggggctcg

SEQ ID NO: 489629 - DNA, 285 bp, Homo sapiens
  misc_feature (17)..(17): n is a, c, g, or t
  misc_feature (19)..(19): n is a, c, g, or t
  misc_feature (31)..(31): n is a, c, g, or t
  misc_feature (260)..(260): n is a, c, g, or t
aacaatttctgtttaantnagggtcttttgntgcacaacaaaaacagactctggctttactaaccagaaaagaactacactggaagaatataggttggctcagacagtccataggaaggctaaataaccacgctcaggaaatgggccttagagagtgggaagagaaaatgtatctaaacttatatctcagtaacagcttgataggacattgtcactagcagtgccaccactaggtccttaccattgctgcttggcatgancagttaccacttcttatgacttctt

SEQ ID NO: 489630 - DNA, 123 bp, Homo sapiens
ccccccctttccccccaggggttttaaaatttttgggcccccggttttttttcgggggggcccccgggtttttccccgggggttttttgtttcaatttaaaaccccccgtgcccccctgggga

SEQ ID NO: 489631 - DNA, 306 bp, Homo sapiens
  misc_feature (21)..(21): n is a, c, g, or t
agttgcacatgtcctccaaangttcgtgtgttagagacttaatccccaatgcaactattgggaggtgggtcctaacaggaagtgtctgagtcatgagggcccttccctcctgaatggattaatgccagtgataaaaagccacgatattaggctgcaagtttgatctcttgttctctcatgctctcttgcccttccaccttttgccagggaggatgtagcacaaaggtcctcaccagatgccagcccctcaatcttggactttccagcctccagaactgtaagaaataaatctcttctttataaatt

SEQ ID NO: 489632 - DNA, 663 bp, Homo sapiens
cgaactctgaacccctctccggctggatggttcgtgcaggcagcacccggatgctggagctcatgagcatgcttcctgggaacggttcggccgcaactggctgcagtacaggagtcacctggagccctccggaaaccctctgcctggccacccccactacttctgcacccagtgcacctccagccagctcccagggcccctgacactgcacccagaccttcaccccctgcaggaggaaggccagaggcccccaggagtcaccacagaaaatgtcagaggaggtcatgggcggacgccatcaggatggaggaagacggacgaacggaggggaccggacggcagaaggaggagggcgagatggtggaaaccgggagaacgaggaggcaggagagcgaggaacgaagaggtagcaggaccacaaggaagtggaacgcggaactttgtcggccccttgttggtgtgtcccctggatggggcctgagggcgtacgggcgcacgggaatgctttctcatgggtcacttcttgcccacctgtttgaggtggacactccaagcagctcgcaccttggagcgactggagctccagagtctggaggcagctgagatagagccggaggtccaggccagaggtcgccaggccccgggctcagatctgtcctggaa

SEQ ID NO: 489633 - DNA, 279 bp, Homo sapiens
gacatctgaagcagctactccaaccacgaagcagacgccccaaaccttgtaacatgcctcaagtgctgctctcatgacctacacattaaacaaaacattcaaaggaatagtccactcctccatcggtcatctcaatgagcacttcctggatgggtaatataaactcctgagggttaatacattcagtggctccacactctaatggcccttgcaacttcatcttaattgatgtccacaccaatgatccgggaagcaccagccactttacagcccatgcta

SEQ ID NO: 489634 - DNA, 631 bp, Homo sapiens
ctatccactttgtttatattattccccttttttttttgggagacggagtcttgctctgttgcccagcctggagtacagtggtgcgatctcagttcactgcaaaactccacctcccgggctcatgccattctcctgcctcagcctcagcctcccgagcagctgggattacaggcaccagccaccacacctggctaatttttggtatggttttagtagagacagggtttcaccgttttagccaggatggtcctcaatctcctgacttcgtgatccgcccgccttggcctcccaaaaatgctgggattacaggcgtgagccaccgcgcctggccattttttttttttttttcccgagaagacgggagtctggctctgtgtcccccagggttgggctgtggcatggggctgtgagactcccgggctcggttggaaacctcttgcctcccgggtgcccagggcagttctcctggcctcaagcctcccggattagctggggtttccggggcgcccagcattggcccctgggtaaatcggggttctcaaggaggggatggggtttcccccgttgtggtgcaggctggtcgggactctcgacctcggggtctgcccactttggcccccaatgtgtgggc

SEQ ID NO: 489635 - DNA, 391 bp, Homo sapiens
gattctatgaggatcccgtaaccactcgaggacacgcccctgtgttcggtctcattatcatcattgtgtgagcgggagaggtctacttccctagaacgacccacagtcagtagtacgtgctagactctggaatatccatgcccggtccatccaaagcttacagccatatgtctcttctctggacctctctggaaatgcttctcaactttgatgatggctccagtgacaggcagcagccaccaggactgtgatctccctgggatttaaagtgggaggttaaaccaggctccacgccactgcggaattgtgcaattgtaagtcaagtctcaattgtgagccaagcttctcccagggtcagaggtggagttagaaaggccccatgtgaccctga

SEQ ID NO: 489636 - DNA, 1030 bp, Homo sapiens
agcggcttctgtacaaggatggcgccgaaagcgaagaaggaagctcctgcccctcctaaagctgacagccaaagcgactggctttagagaggccaacgcaaggcatgatgttgaaaaggctgtccacagccacaaaaagaagaagatccgcaacgtcacccacacttcctgagtcggccgacagacactgcagacgtccggcatgacagcgccacgagtatccctcggcaagagcgtctcccaaggagaatacaaagcttgtaccagctatgcttatcatcacagtttccggctgaccactgatgtctgccagtgaaggaagataggaagacaatcagagcagcacttgtgttcacttgtggatgttagaagcctaacaaagcacgcagattgaaacaggctcgtgaagaagctgtactgacacttcgactgtggccaaggctcaatcaccctgagttcggcctgaatggagagaagaacggcatatgttcgacatgagctcctggacttcacgagtgctttgcgaatgtttgccgaactagatagattggcgactcgatcgtagaacgtgtagtcccagcgtgcgctaaacttctgcacatttatactactagtagtcacttatcatcctttgtccacctaagaacataacaacaaacaaacgaacgtctatcacagagcgccgtgtgcacctgcgcgtgcacacgatatgcgcgtgccctttgcacactcctgtgtcagtagcggggtgggtgtgcccccaccggatctacgccaggggcatagtggcgttgtctgcccctcttatctagcttgggagagcggggtggataacggttcatctcctgtgagccttttgggtgcccgtttgacctttacttgagtcgcgccaaccatttatgccgcgtggagtttccccccctgtgtgctgtgttgaccaaccttgtgtggttccttagtgccccggacttcccacccaagtttcccctcgagacccccgaatttttgtgtgctctggggcgccccacac

SEQ ID NO: 489637 - DNA, 215 bp, Homo sapiens
  misc_feature (33)..(33): n is a, c, g, or t
  misc_feature (66)..(66): n is a, c, g, or t
tctttgatagggtgctgcatctagcatagatgnggtctggcttccttaataagagagattagcttnatttcattatatatcagctgttgccacattttggttggaaaaaggtctatttttttaaaagggttaaatcttttgattttaaatgtttaaaaatgctttattatgggaatgataacaagtagagaaaatagtatagtgagatcataggt

SEQ ID NO: 489638 - DNA, 181 bp, Homo sapiens
ggaccctgccaatttcctctcaggtcaaatacctctaataaatccatctgcgtcctcataggtctctccctatccctgcccttttcctccaatccatctttaactgctcttgagcagtctaactgagagtatgattcaaagcaaaataaatcttaaggtggcatgactctgaaaaaaaaaa

SEQ ID NO: 489639 - DNA, 487 bp, Homo sapiens
gtgcagccgctattaaaggttcgttgtaaaagaaaaaaaaaaaaaaaaaaaaaaaaaaaaaaacatggttggggcgggcctacgggccacctaggaagaaggttttctaaagacccactcccggtgggggggcgggggggccaaggacaggcgtacaggtgtagaaccatggggtccaaataggcgtgagttccaatagggagagaactcggcgggggcccagagaaccaagagcggggccgtgggaacttctcctacacacaatataaaaaaaagggccggcggggggaagacacgcgggagcgcgtttctctgagaaaacccacaaacctcgcgagcagagtgggacagctttctcgagaggagagccaaccaaattaacgcggggagaactcttaatcacaacacgaggcggagagctccacaaaagcgacggaaggcctgcgcgaatacatctacaaattaacgcgccccgcgccgcggagac

SEQ ID NO: 489640 - DNA, 208 bp, Homo sapiens
accacatatttcaacacacacacacatgggtctctgtcaatcagtcttttcaggccgctttcccctcttgtcatcaccagcatgtcatttcatcacagtccacacagcacattcatgcaacattgaggttccatcttcccatacttatttcacacacaggtcagtccacacaacatcacatgagtccagcatcgccaatagcagcatc

SEQ ID NO: 489641 - DNA, 312 bp, Homo sapiens
acgctctctctgtggggacaagagagtgaggctatataataagataaagcctttgttatagtgatttctgggcaagttcttcaacggttgttgctgttagtaaaatatacacaatagtacctgtgttctgaagtttttataaagagtaaatatggaaaagtgggaaacaaggggtgtacatagctatgattcagattaaaccaataggtagtagacttatggtaactggaataacagaaggcaacaattacgtagaaactactaagaatttacctgaaaacttatacaaacggagaaaaggtgtgcttggta

SEQ ID NO: 489642 - DNA, 178 bp, Homo sapiens
atccgggaagcgggatcgcagtgagccgagatcacgccacagcacgccagtctgagcaacagtgagactctgcataaagagcataacccatgtgtgtacctatctatctatctatctatctatctatctatctatctatctatctatctatctgtatatagatatataaacatgtaaa

SEQ ID NO: 489643 - DNA, 217 bp, Homo sapiens
gtccatgatggtgattctgcagccctctggtgtgtctgggtgtgggatggctgctggtgaggacaggactctgccaggtggagcactggcctgtggccacactcagggatgggtctgtgcatgctgctgggccagctcagagctctgcggcccgtccctgtccatccctgcccgtccctgttcatccctgtccgtccttgtccatctgacccatctt

SEQ ID NO: 489644 - DNA, 836 bp, Homo sapiens
ggcggcgcgggtcctccatatgctgagcgccggtcccctgggcccacttttctttctctatacttgtctctgtgtctttcttttctcaagtctctcgttccacctgaggaggaatgcccacagctgtggaggcgcaggccactccatctggtgcccaacgtggatgcttttctctagggtgaagggactctcgagtgtggtcattgaggacaagtcaacgagagattcccgagtacgtctacagtgagccttgtgggtgaaggtactctacagtgtggtcattgaggacaagttgacgagagagtcccaagtacgtccacggtcagccttgcggtaagcttgtgtgcttagaggaacccaggtaacgatggggcaaactgaaagtaaatatgcctcttatctcagctttattaacaattcttttaagaagagggggagttagagcttctacagaaaatctaattacgctatttcaaacaatagaacaattctgccccatggttttccagaacagggaactttagatctaaaaagatgggcaacaacttcggcacagaatttaaaaccaagccaaatacgggaaggttaaaaatcatcccacttacagtatggaatgatgggcgccattatttaaagccactttagaacccatttcaaacaggagcacgatatggttcaggttcctgatgacactaaagctgtgtaccgcactgtgcgacagaggccgcgcagattccagacaggaacggcagtccttgttctttgtcgacttgtaggtccgacaccaaaagtgacacggcatcacgggaatataccgacgcaatgggggggcaact

SEQ ID NO: 489645 - DNA, 395 bp, Homo sapiens
tgtgaaaaccttgcgagaacagtgtgaggagcgaatagaaaggtcacaataaatgggaatgaactgtagcttccagatacctgaatgaatataatgatcagagagatcaggtccaagcgccccagtgagcctcagaccaggctgcatgcaggatgcctgccaaacacagaggtgccacatagggcaagtggaaacgtgtcttggtaacagcgagtgccagatcccagcatccagttccgaagtggttatgtgttcaaagagacatgttgacaattaggactgcaattagatccaggtggtgagtgaggagtcgtccaggagatgggttgtcgtaggaggctttgccggtgagctcgttgctggattacagagctgtaagtggaagatgcttcgtg

SEQ ID NO: 489646 - DNA, 427 bp, Homo sapiens
  misc_feature (4)..(4): n is a, c, g, or t
  misc_feature (27)..(27): n is a, c, g, or t
  misc_feature (292)..(292): n is a, c, g, or t
  misc_feature (417)..(417): n is a, c, g, or t
  misc_feature (419)..(419): n is a, c, g, or t
gggnccctctattcccacacacagganaggtggtgcctagggacagggcttatccatttatagtcttgtttcccattttctgaagacaaatattcccagtttcaaaatgtttgtggggatgataaagacagcccaggtccatggccgggcgcagtggctcatgcctgtaatcccagcacttcgggaggccaaggtgggtggatcacctgaggtaaggagttcgagaccagcctggccaacataatgaaaccccatctctactaaaaatacaaaaattagccgggcatggtantcacgcctgtagtcccaggtacttgggaggctgatgcatgagaattgcttgaacccgggaggcggcagttgcaatgagcagagatcacgccactgcactctaccttgggcaacagagtgaactananttctcggg

SEQ ID NO: 489647 - DNA, 338 bp, Homo sapiens
acggctacacttactcggcgcacccggtggcgtgtgctgcgggcctggcggcactggacctgctgcagaaggaaaacctggtgcagagcgtggccgaagttgccccgcatttcgagaatgcactgcacggcatcaagggtacgaagaacgtgatcgacatccgtaacttcggcctggctggcgcgatccagattgccccccgtgatggcgatgccatcgtgcgtccgttcgaggccggcatggcgttgtggaaggccggcttctatgtgcgcttcggcggcgacaccttgcagttcggcccaaccttcaacagcaagccgcaggacctcgatcgactg

SEQ ID NO: 489648 - DNA, 312 bp, Homo sapiens
gcggccgggctggctcagcgtcgcgccgtgtctgcagtccttcacggtggacagcagcacagctggctggctccgctggaagtgaggttctgagcccacgaggcttggtggacgccgtgaacatggtggacaatggagatggcacacacacagtaacctacaccccatctcaggagggaccttacatggtctcagttaaatatgctgatgaagagattcctcgcagtaccttcaaggtcaaggtccttcccacatatgatgcccgcaacagtgactgccagtggccccggactaagttcctatggtgtgcct

SEQ ID NO: 489649 - DNA, 143 bp, Homo sapiens
tttcacaagtttatctctcagccataaagacaaacctgaagtcacaatataacaagtaaatacatttttgttattttcctatgtcaaaattacaattaatttagtgtttgaacagtaccttagatataggtcgtcacacgcgc

SEQ ID NO: 489650 - DNA, 854 bp, Homo sapiens
gaataatttacaattacatgtatcccttctcaataagtttaatcagactaaccctaagctagaggtcaaaatctacttcctctaatatcaaaacgaaaatttaaagttttcccaaatattaattcaactattaattgaatattcaatgaattcatttaatgttagattaattcattgaatattaattcgatgaatgactaattaatagtattttaacaagattctggtatatttaacaacattttggtaataaagacaataatttgagagtgtgtggaagtccccctaatagaagccatctatctaatcaatgtcccaaacagtgtgaactacctagtagagcaaaggaagcagtgaacaaagaatgcaactttttcttcaccattcacaagtacagagatcacatgcataacaatgaactcatacagatcaagaacatcgaaactacccagcaacctgataagcacagagtgttcaaagcctccaccgtgtggagaaactaaattagaggtaactagctattgagtactattgagtacccttcaagagcacgtcaactgacaggtctttacagacgtggaaatctatcaatacttatgacatttctaccttggtatataaccaataatctaccatacgaatgtagtcatttttaaagctcattaacaagcaatatattaacatactaatgtattatatcgtgactctagaacccattcctatgtacaactaattgcctaggtgagccctctcacttcagaagtgtcactgaaccctatgggagggtcacaatagaaagaggatacgtagtaaccacaggtcaccagacatgataaaaaggatggtcccaagaa

SEQ ID NO: 489651 - DNA, 396 bp, Homo sapiens
tctgactgccagatgcaggatcccggagaacaagataaggctgcgctcgaaatgattggtcgctcacgtgctcaccagcattcgagctgcaatgactccgaatgatgctgctgctcacctacctactgaaggcggtcgcgagttacagcttttcgacgatgagttcaaataggctttcggtctgcaatgccgcccgaaatggccaccgtgacctttcgcactcatacaactggaaaaagggatcaagtgtgggacgacgaaagcctcccatttgatgtagttcagcatcaagaatggcttgaacccctcgccgacgttgcaaaagtcgagtgcgacggtatgacccgcgtggttgaccatttgatgcgcaagaatgggatagaacatgttgtagcc

SEQ ID NO: 489652 - DNA, 199 bp, Homo sapiens
tatgggttaggtttggtatattcacaatcctatgctttcttgtccggatagcaattcattgcttggttgaacggacctgacacttctctgttctgtcctacaaaatatagcatagttgcgaggacagattggagtgttaattgagtagtgtcaaacgaataggtgatatgggtagggctgtcctcatgtacagtggcat

SEQ ID NO: 489653 - DNA, 413 bp, Homo sapiens
ggctagtgtcggctgcagaaccgaggaaggcatggtaggttgcgcaaggctgtgtcctgtgtgcatgtgcgacacacaatgctcatgggagcaggatcactgatgctctgcccttgatgatcaaggctgtggctgaagtggatgagggaggcaagttctggggtaattgcctttgcagagtatgaggacaagctctgtatccctcctatttgtagttgatctcataactagaagcatttgtcaattgctgtgactcccaactgacagcacaggttcattgtcgaacccttctaacatcttatacctttcttctgctagaactagattacagtttgattttattctatcatgagctgtgcactagccatgtcctacttggttatcttgattactgctaccgcttcttgccttcc

SEQ ID NO: 489654 - DNA, 438 bp, Homo sapiens
gtcggggcagcagaatttatgctgcattgaaaagcaggtaccagtgccccttttcagacagtttttgattcgctctagactttttttttttaaatagggagggaaaaaattggataattttcttttttctacatgcacttaagattaaaacacaggttgggattaatttaattggcttcctttttccgcttttcttcccgcagagcctgatgggagaatgtccagggcagggaaaccacatttttggtcggtgataactcactgaacatgggggctaatcttttacacttctctctggtggacctctgggtggggcaatcggtttaaaggtctccttgaaggcgcacgggggtccctggccatgcctcgttctcccggctttctttatccggtaatggcctccacagtcggtggccagggactctacgatcaatgcag

SEQ ID NO: 489655 - DNA, 867 bp, Homo sapiens
aatgaactctttctgggaagagattcttcttttatgactatattactcatattatgacaattcattgaatagtaaaagacattgatgatgtgtttgggtgaggtagaactcttgtcttcaaaggacaggagaaatttatctatccacatttattgcaaggtgttttcaaataactcttctgatagcgtatgacatatccattagccctggacctaagaggagtaagttatgggtatttagaatggttctaagctgagacacccagtcccttccacccaaccacattggcatccatttagataggtacaattttgaaaatctcttcccaggaaagagccagattgtcacagtatgcaagaaagtgttgtgcatagcaaaagaaacttaggtaaaggatatttaagaagattcaaacatcagtataagggcgatctgtgcagaaattttattaagcaaggggatgagcaacaggagactgttgtcacataaaatgttcagggcagagaatgaatgttcatctttcaggatattgaatactaagggtgatagatctgattaatcatccaagttttctccaaactctgatatttagaaaaggttcttagggttggaggcattaatttggttgactggtaattcaagtaagttcggtgtatagaagcgatcagatataggatgggggggggattatggaaggggtccaaaagcggatggaaaggttaacaggagggtacagggtggttcggggttggaccggccggggggggcaaggggagaggcccgggaagggttttacgggttgggagttaggaagggggtggggggtcaaaaaaacaggggtggggtatagtggacagtgagtgtatg

SEQ ID NO: 489656 - DNA, 885 bp, Homo sapiens
gtagaagggtgttggcgtcgttccctggctgctttccgacacgcatgtgtttcactacaggggtattcttcacagcattgcttatatagcttgtgaacttgtgtgcccacctgggggccgcgagtgcccacgtggacgctgggtcttctctcccagtgtgtcttgctgtccacccgtgcatagtgggcgccgtgttgccctcttggggtcccccccgtacaaacaaaggcaacttcctcctgtcttaagaaaattatgtgtctccctctgtggttaaacctggacggccgccccaattttctttcaggctcgtgcgaaccccccactctatgtgaggctgtctgccagcacaacgggggcagagccctccccgatttggcacacgtatgctccaagtatccgtcccgtgaaacaggaaccccaactgccgcggcaaggggtcggatcaaacccggggccacacaggcatccgggcacgggcgaaggatccccgacagacacacaacatcgacaataggaagcccacgagagtcttcacccagagcgtcaccccccgctgtcaatagagcgcatgtggaacagaccgttcttcacagctgtttcgttgaacatgggcgccacatgatggattatgtatatccgagatcggggtatcagacagatcacacccagatcggttcaacccgtcccagtgccaatagacccaatcaattttttggaagaccactcctttggatgatgtcaatgctgcgacgggcccgtcatataagaatcgattattgttgtaagaccgcagtccgttgttgacctgcgaagcaacgcgtggcccccacataggcattgccaactttcgggcccccttcaaaaatccagccaacattgaca

SEQ ID NO: 489657 - DNA, 116 bp, Homo sapiens
tactcaattttcccttccataaaatattttctacttctatataacttctttttttatttttttgagatggagccttgctctgtggcccaggttggagtgcagtggcgcgatctcag

SEQ ID NO: 489658 - DNA, 148 bp, Homo sapiens
tgcaggttgactttatcctgagagtacgggtgagttctggcaggatatccaagcgagatgtacacatgatcagttctgcttattagaaagacattggctcgagcatggtggctcacacctgtaatcactgttactcggtaataggagg

SEQ ID NO: 489659 - DNA, 437 bp, Homo sapiens
cacgtcagggcccatctccggctgagcctcctccatcctggtcaccctgatgtccgggctggctgactgcaccactgatgcggggcacgggtctggtgtgcgaggggagacggccgcttgcccctcttctcatcgcggacgggaaagacgagacttgacggagctttggcattctgcggcacgaaggactttgaccaggattcacagtacgcgctgctgcaagggttactgacgtcctggactctggacgaatggcttattatccggggcacgaaacagcagagggcggcgggccaggacgctatctcctctggaaactgtggctccgggcatacatccttgctgactttcccaccggccctctgtgctgccatagcaccgtatgcactggaatgacgatcctgtcggcttccagaccaatctgttcacatctcggc

SEQ ID NO: 489660 - DNA, 156 bp, Homo sapiens
cactgtctgtgctggtggcacgaggaactggtacaaacatgctagagagaggagctagtatagagcaccgagacaagaaaggttttactccactcatcttggctgccacagctggtcatgttggtgttgtggaaatattgctggacaatggtgcag

SEQ ID NO: 489661 - DNA, 182 bp, Homo sapiens
cctagaggatctcaagcttctcaacggggtcaggcacttgaccaaagtcacacaatggggggcagggacatccctgatgatatcttgccccagtggcaatgctttccaccactatactatatcagttctggtgatacagcagttaacagtatagatgaaataaactacattgcagcgttgag

SEQ ID NO: 489662 - DNA, 1157 bp, Homo sapiens
actgacacgaagaacaagagaaagccagactgatctgcgtctagaagaaacacgagagactgcacaggttgaaaaaggatcaacgtagaagagatcatcaacttagacttctggtaagcccaaaaaagaaaccaagaagtggttctacgctcgcaaaactgaagaggttacggctcttcgtacggcaagtaagacccatgtcagatacacagtggctgggaaagttcaatcggaacgctgagtacatctagatgacacctgctcaggacacaggttccagtgcagctgactgtcgaaacagatgacatcaagagacacggagcccagcagcacaaatgacgaattcctgtggcgagcagatccacgccttaccaacgccggacaactcacatggacacacaggacaaccaatatcagcaggcaaagtgctcgcctggccgcgtgtcaataaccaagacagatcgcatgcagtggcaagctcctatgagccgcagggtcacaagcacatcatcatgcacgaacgatgaccatatcccaaacatggaaggccagatatgaatagactccctcaaaggcacacgcggaaggaactcacaccaacacagaacgaaaagcaccatctcccaacaaaagacacggcacgcaaagacacgtccaaggcccaactgggccagcgacagcatcacaacatgcagcctcactaatcagatctactcacgccactgcgcaagactaacttgcaactgacacaataatcacattcaccattccaactgacactgacactacctggacatggtccagcgcccaagcataactgtgcaaattggaaaacactcaccaagatacacagcagcataaaaatcgcctaaacacatgacactattaaagatcgacaccactaaaaaaagcgcgacgatagcggtcagaaaaaactacagtgataaaaggcgcatcacgcaaaggcaatcaaaagtggtgacgtaaaagaggacccaaaacgaaagtgcatcgggagttgatgttatcaatgaccgtcaataatcgagacaaaatacagaaggacgacgacaaccgagagacacaaacggtgaacaaagcagaaaaccacgaaagacagaagtatgattaaacaagaagatgcatgagatgggtga

SEQ ID NO: 489663 - DNA, 236 bp, Homo sapiens
  misc_feature (33)..(33): n is a, c, g, or t
aggatcaggtactgctactagtgaccaggatancataggcagtcagacagagtagcagatcagaggcagttctgcacacatatttatacccacttgtaactatatacaaattaaggaggaggttatttagaaatttctagaaaaggggtggtaactttcaggtcattgccatggaaaggggcagtaatttccagctgttaccatgagaacggcaaactcacttggcaccagtgggt

SEQ ID NO: 489664 - DNA, 240 bp, Homo sapiens
  misc_feature (144)..(144): n is a, c, g, or t
ggacacttccagggccgaggtgacatctcaggaggccagaacaacactcttgctgtgagaggtctacccgggtactctgcactactcactgcctggggccgtggcaagttgccagggtgggggtgcctagccaggtgcagtccncgcccgcctagtcctcggcgtcacgcaatgctcacctcgcctcttccccactaacatcccagactttaaaattcagtaaatcagatgtacaccgag

SEQ ID NO: 489665 - DNA, 570 bp, Homo sapiens
  misc_feature (12)..(13): n is a, c, g, or t
  misc_feature (24)..(24): n is a, c, g, or t
  misc_feature (52)..(52): n is a, c, g, or t
  misc_feature (202)..(202): n is a, c, g, or t
aaacaaaacctnntattcactctntttttatattaacaaaattaatccattnaaggaaaaaagcataatattacccaagtccttgatctctgtggtaaaaagtgctactttagatacaaaacctgaatcaaaatatgtatcactggggacgtcataccatccattttccttaaaaaagaaggtggtctgtgaaaaacccttntctccatcaacacttccaggcatgcataccaaaaacaatccatgaaaagtggaacatacagaacaactttctattataacagaagtcgtaactactgaagaaaatattcctgacgtggtcccgggcagccatctgactccaatagagagagagagttcttcacctttaagtagtaaccagtctaaacctggcagcatcgctttaaactcgtatcactccagaaattgttctgaaagtgatcactccagaaatggttttaatactaattccaactggctggaatcacatagctccttatctgactcagaatttcccccatataataaaggtgaaataaaaacagagggacatgagctcataaccgtaat

SEQ ID NO: 489666 - DNA, 775 bp, Homo sapiens
cccacgcgtcgcgcacgagatgtgtggtgtgtcagaagacggttcacttcgccgatcaggttcagtgccaaggcagcagtttccataaatcctgctgcctgtgcatggtctgcaacatgcactctggacagtaccatctgtggacgtgcatggtgaggagatttactgcaagatcctgctacggccagaagtatgggcccaaatggctatgggctacggtcagggcgcaggcatgctcagcactgacaagggggagtccgctgggtatcaagtcacgaggaagccgcctggccacaggctccaccagcaaccccaatgcatccaatatttgcccagaagattggtggctccgaacgctgcccccgatgctgccaggcagtctatgctgcgtaagaaagtgcattgtgtgctggtggaaatcctgtgccataatggcctgcttttcgatgtgccaacgtgtggcaaaggccttgagtcaaacaccctggcagacaaggatggcgagattcactgcaaaggatgttatgctaaaaacttcgggcccaagggctttggttttgggcaccggtagcttgcggccttgggtccacctctgagtgaggccacctatcatccgccgacatcgctgtccacatcctgcgcttatcattcgccaatacatgcccagcagctttggagacctcccggattttttctctgtcgacctgttacgttcctatggcttgacttggcatttggtcccttgggtggggctgctaagcccccctaaggtccc

SEQ ID NO: 489667 - DNA, 340 bp, Homo sapiens
ggccacgcaggacaggcacggtggctcatgctgtaatcctagcactctgggaggcccaggcaggtagatgacaaggtcaggagttcgagaccagcctggccaacatagtgaaaacctgtcgctactaaaaatacaaaaaattagctgggcgtggtggcgggtgcctgtagtcccacctactggggaggctgagacaggagaatcacttgaacccaggaggcagatgttgcagtgaaccgagatcacaccgttgtactccagcccaggcaacagtacgagattccctctcaaaaaaataagaaatgccacgcggggcttgagaaaagcggttatccaggaa

SEQ ID NO: 489668 - DNA, 1092 bp, Homo sapiens
  misc_feature (1)..(1): n is a, c, g, or t
ngggcttataattaattaaaccaacacagagcctgttctcctttttttatgatttgtcatccacccgatctactatgatagtctccctcgtccgtggcgatacgactccactattcatctcacactacccttggtgtgtgttgtcacccccccacccattttttgatagtatactccctcgcgggtgagcccgacatgattcttacaccagctccccccgcgcgactattttttatgccatctaattggcgccccgcgcgcgcggctcgcgttaatatactcacatacatgttttctatcacacacgacgtgaggacataacactgctcgatttgttgatgtaccaatcttcatattgcggcgcatactcatattatatatgggttgacgacacatcctatatatgatacaaaaaacaagctttgtgtgtacactaaaacaaaaacattactacaccacggcgcttcgttgtgatctactcgcccttcgctggtcgagatattttttccgacggaagataattattatgcttcttctacactaactctacatcgcggccacaccccactctagggggaatcactctatctacgcttttgtattcacccactcactcatacgtgcacactcaccgcgctatctctcactcttctcgcgagtgacattctccacgcaatccaccgcaccacaccctaatcgcttttgttctgtatgacatctctttgtgtgttttttcctcctctcttttcccaggcaaatctctgtttgtagatggtccacctcaccgagcggatgtttattaggaggggtgccatctggcacagcgctgttgtttcgtgtaataagaggagggaatgggtttcatgaggtgtacttgagtggtttttagaaacaatccggcacctctctcctctttgatattcttttttgtgtttttcttctttcgcctccctgcgggcgccaagcaaaattgctcatcctttttccccttgcgctctcttcttccgcggatatgtaattttttggggggcccccccccaaagttttttttcccccccccacaaggggggggaaaaaaatctttttttttta

SEQ ID NO: 489669 - DNA, 641 bp, Homo sapiens
  misc_feature (641)..(641): n is a, c, g, or t
ggcttcctctcgccgtgttgtgagggcaaaggagagaagggagaaaaaaaaaaaaaaaaaccaaaacccataatttaccagaaaaagaaagaagggtgggagagcgaacatttggcctaatttgggtaataaaacacgttgtctttcggggatggctcgcagggatgggagaaacttttcttaaccaaaattcaaaaaaaaaaaaaaaaaaaaaaaacaaaaactgttgttggggggcgctgaacggcgccgagaaaagtctttaaaacaaccaactgcgtgtgtgtgggcgcgcgcggcggccccacaacgttagtgagatagacaagacgaccaacagcggtgctcgccaaaagaggtgtggctcccatcaaagaagaacgactccggcgggaacaagaacagaaagagggcggcggggagactgtccaccaccaacatagaaaaaaaacgacgcgcggcgggggagacaacaaaacgaacggcttgtttgagagaaaaaataccacaagaaggcgggagtcaacagaaggggcaccagtagaaggaggagatatatctaaccagagaggggacgctcaccaagaagcgagcgcccgcaaaatataaaattataaccgccgcggcagggggggagacgn

SEQ ID NO: 489670 - DNA, 226 bp, Homo sapiens
cggaagtgcgcggatcgctcgacgccaccgggttagtgaggctctcgacatcgacgccgcgctggcacaagctgatcttgtcgtcacctgccgtgggtcgggggttcctgcgttgtcggctgaggctgctcggcgcgcggtcgacgctcgaaggggccgagatctcatggtgctcgatttagcaatcagcggggacgttgaggagcctgtccctgctggggtagag

SEQ ID NO: 489671 - DNA, 145 bp, Homo sapiens
gtgcagcactatgcaagctggaggaggagacgcgcacatcaaacgctgccctacgtgcaaggtctacatcgagcgggacgaagggtgtgcccagatgatgtgtaagaactgcaagcacgccttctgctggtactgcctcgagtcc

SEQ ID NO: 489672 - DNA, 130 bp, Homo sapiens
  misc_feature (5)..(5): n is a, c, g, or t
  misc_feature (26)..(26): n is a, c, g, or t
  misc_feature (101)..(101): n is a, c, g, or t
  misc_feature (130)..(130): n is a, c, g, or t
cgggnattaaatgtgctgactcacgnaccattccataaagaatatcagtgggggtacaggaaagggtctcactggaagtgctggggtctttaaccagaggngcctttgccactttactatgccactccan

SEQ ID NO: 489673 - DNA, 320 bp, Homo sapiens
atattcatgagacagggagagatcattaaggaaattagagagtatttagaatcaactggcgcagttgctcacgtcttttaatcccagcactttgggaggctcaggcagaaggatgcttgagcccaggagttccagaccagcctgggcaagacattgagactgtgtctgtacaaaaataaaataaaattagccaggtgtggccaggcatggtggctcatgcctgtgatcccagcattttgggagggcaaggtaggaagactgcctgagctcaggagtttaagaccagcctgcgcaacatggcgggacttcatctcatttaa

SEQ ID NO: 489674 - DNA, 639 bp, Homo sapiens
  misc_feature (1)..(1): n is a, c, g, or t
  misc_feature (221)..(221): n is a, c, g, or t
  misc_feature (354)..(354): n is a, c, g, or t
naaatcttggctggacgtgtggttcacgcctgtcatccaagcacttggtgaggctgaggcagtggtatcacgaggtcaggagatcaagacaagcctagccaacatagtgaaccccgtctctactaaaaatgcaaaaaattagcctggcatggtggcaggcacctataatcccagctactcgggaggccaggaggcggaggttgcagtgagccgagatcgcnacattgcactccagcccgggcaacagtgcgagactctgtctcaaaaaatatagatatagatatagatagatagatagattcttaccatgcaatctagcagttttgctcctgaatatttatccaactgaattgnaaacttatgtccacataaaaacctgcatgcaggccaggcatggtggctcacgcttataatcccagcagtttgggaggctgaggcaggaggatcgcttgagcccaggagttcaagaccagcctgggcaacatactgagaccccatctctaccaaactaaaaaacttagccgagtgtcacagcacacacacatggtcccacctgtcaagaggctgagtgggatctcaagcccggaaggcagaggttgcagcgagctgtgattgagccactgcactgcagcctccaga

SEQ ID NO: 489675 - DNA, 779 bp, Homo sapiens
  misc_feature (46)..(46): n is a, c, g, or t
  misc_feature (81)..(81): n is a, c, g, or t
  misc_feature (83)..(85): n is a, c, g, or t
  misc_feature (87)..(87): n is a, c, g, or t
  misc_feature (94)..(94): n is a, c, g, or t
  misc_feature (122)..(122): n is a, c, g, or t
  misc_feature (124)..(126): n is a, c, g, or t
  misc_feature (128)..(128): n is a, c, g, or t
  misc_feature (130)..(130): n is a, c, g, or t
  misc_feature (132)..(132): n is a, c, g, or t
  misc_feature (135)..(135): n is a, c, g, or t
  misc_feature (137)..(137): n is a, c, g, or t
  misc_feature (140)..(140): n is a, c, g, or t
  misc_feature (144)..(144): n is a, c, g, or t
  misc_feature (146)..(147): n is a, c, g, or t
  misc_feature (155)..(155): n is a, c, g, or t
  misc_feature (159)..(159): n is a, c, g, or t
  misc_feature (176)..(176): n is a, c, g, or t
  misc_feature (183)..(183): n is a, c, g, or t
  misc_feature (190)..(190): n is a, c, g, or t
  misc_feature (208)..(209): n is a, c, g, or t
  misc_feature (224)..(224): n is a, c, g, or t
  misc_feature (228)..(228): n is a, c, g, or t
  misc_feature (232)..(232): n is a, c, g, or t
  misc_feature (234)..(234): n is a, c, g, or t
  misc_feature (237)..(237): n is a, c, g, or t
  misc_feature (308)..(308): n is a, c, g, or t
  misc_feature (312)..(312): n is a, c, g, or t
  misc_feature (317)..(317): n is a, c, g, or t
  misc_feature (386)..(389): n is a, c, g, or t
  misc_feature (392)..(393): n is a, c, g, or t
  misc_feature (407)..(407): n is a, c, g, or t
  misc_feature (409)..(409): n is a, c, g, or t
  misc_feature (415)..(415): n is a, c, g, or t
  misc_feature (417)..(417): n is a, c, g, or t
  misc_feature (428)..(428): n is a, c, g, or t
  misc_feature (431)..(431): n is a, c, g, or t
  misc_feature (435)..(435): n is a, c, g, or t
  misc_feature (559)..(559): n is a, c, g, or t
  misc_feature (589)..(589): n is a, c, g, or t
  misc_feature (593)..(594): n is a, c, g, or t
  misc_feature (597)..(597): n is a, c, g, or t
  misc_feature (636)..(636): n is a, c, g, or t
  misc_feature (702)..(702): n is a, c, g, or t
  misc_feature (740)..(740): n is a, c, g, or t
aatattttttttattatacaaaacacggagatattgcttcacttgnaaagaggttccagaccagatggggagacgagacanannntngggacanggagggccgagagggggcgttgcgtgcngnnnangngnggngngangggngnnggggggangggnttctccctgcatcaatnggcaggnatatttnggaggccttttctatctnntttttgcggaggagngggngggngntgngagcccggggggtccgcctgccccggcccccgctgcctggttcttcgggctttggcccaaagcacggttcngggnggggncgagcgggctggctgggccacccggtcacagatggagggaggcaatcgctccctagagtcggccaatgnnnnttnnataaggcggctccntntgctcntnctcctctcctnttnccanccccgtccatcctgccgccctccccaccccgccaagacgctgtggggacccgagtttcatgggtgcagcaaaccggggcttctagcttttccccgggcaggacggggtagcactggctcctgtncttcctgggccccggcccggccgtgcaganctcnnctnggagggctggaacgagccggccacagagggacagctggnaggggccagaggataccgtggcgggggcgggcggaggacgtgcacgcacgctgggtggaggcgcanggggtcacaggttctggcacactgcagcttgtttgggntctgtgcgtccgtggtgggcggcactgcatttccacacg

SEQ ID NO: 489676 - DNA, 544 bp, Homo sapiens
  misc_feature (12)..(12): n is a, c, g, or t
cacaaccatgcngtagaatgagaaaatttgcatattggttttccttccactatgtggtttccaggaatcaaactcagagattgttgggcttggcagcaccttgaccactgaaaaatgtcacgggcccccaacattttgagatggtgttaaacagatccatctgcccatgtcagctggatgccattatataggcaaagtctaattgctttgttttctattttacagggtccactactcaatttcactttggcatgaggagataatccgttgaaacattaattgaatattaaatagattcccttttgtaaatcaatggctcttttgtgcttttgtattgtgaatattcgatgggaccaatacatgcacagcttatgattgtatacaaatccttagcagcagcacatgaagacaaactggagtttgtgtatataagcaatgtgtgtgtgttcatgcacagtaatcattaaattacatgtatatttgtggaatgctaatttaagtgattaaattataaactttgtgtatttatcaggtgggtgaaaag

SEQ ID NO: 489677 - DNA, 436 bp, Homo sapiens
aagcttaacgaggagcgaagtcgatgtgatgatcagatacgagagcagttagtgatcagtcgatcttagtgtatctgttggggtagctgtgtcgagtataggctagcgcatgctgacctagagtctagagtgggctagtggctgatttttaggtccagtgctagatagtaggctgtgagttaagtggcgtcagtagctaggctgtagcggttaggctgcgtcagtctgagagtgtgagcagctagatcttagcagtctgagagtgtgagcagctagatcttagagcctaggataggcaggtgactagagtcagggctgaagccagtagagctaggtccagagctagctagatcgaagtctgcatatcaggtgtcagatcggcactaggaacctgactaggaccatgactagtccgtaccagccggaaaaaaaaaaa

SEQ ID NO: 489678 - DNA, 457 bp, Homo sapiens
tgcatttaggttactgtgagtactctatctgtagtagtccagagcgaccccgatgtgcatctcttctgctcaaagcaggtggtcttggaaccattcagcaccccaccctctctcagcacacctagttccgtgccattgaagtcctcagtcttgccctcaccatcaggacgatctgctcagggcagttcaagcccagtgccctcaatggtacagaaatcacccaggataacccctccagcggcaaaagccaggctctccccaggcaaagtcacttcagcctgctgttgcagaaaagcagggacatcagtggaaagattcagatcctgtaatggctggaataggggaggagattgcacactttcagaaggagttggaagagttaaaagcccgaacttccaaagcctgtttccaagtgggcacttctgaggagatgaagatgctgcgaacagaatcagat

SEQ ID NO: 489679 - DNA, 150 bp, Homo sapiens
gacttgcgccatacagtgctgtacactacagtaatgatgtactgggtaaactagaaacaaagaatgcatgcaggatctgtcgtagcttattaaagatgaaactgaattggaaaaatagctccattttttggtgcttggaaagtcagtgcg

SEQ ID NO: 489680 - DNA, 1637 bp, Homo sapiens
tccacgcttaatccatttttatttttctggtttaaaacccctatgtgtttgtagccacagcttggagccgtgagttccctgtgcacggagactcggggtgtgggctctggacgacggtggctcaggtgaactccgtgataagggagactggggtgaactacagctctcctttccagaggctcgggggttcacggtacctgataggctcttaaaaatgtggctctcacacggggtggccttgggcagaagttgtgcccagggtgtggcagtgtgcatgcccgcgggcttgaggtgtgtagcagctcattcgaataccaggccattcagtgagacagtctctttataggcaccagggtgcggtgagaccacagagtgccccgagtgtgcccctgtgtggtgtgcgagggggcatggaggcggttaccaagcacggaagagctcgccagtggcgcctgtgttccaccttgtgtctagagggcaccaggtgtgtggcggcttgtgccgaactcttgggtctcccccaagtataagccttctgtgtggcacggggtggacctcgatagcgacgcacgtcttcggtgccactgtgtatagtatttgggccccctactgtgatgtgcgctgtgggcgcccaccctcctcttggggaagcatcttaatcgaccctcatgaccggacctgtgtggcccattgggtgagtgtccccccggaataagcaaccaatatcgctttggaacgcttgggtgtgcggcttggccgggaccggagcgtaccgagcttcctcggccccgggcgcattaaatctctcacaagaaagcctctcatctcttatggagaaaagaaggcccccctaggggaaagacacatccacaaggggagcttcacgagaatacccactaaaggggcgcgagggcgacaacaggcaaagacttccctcccaccagggacatctggtacgtcaaactgttcactctggacccacatcggcgcccacaccttcgaggtaacagggcatccaaccagttaaccactgggctgtgcaccatgaaaaactcaatggtaaatgctgcaagctccgtaatagtcgggtaacccagcgcacagtcatagctgaaacccgaggagacagcgagctccacacagtgcatcataagtcgttcccacactactggaatcctactcggacgaagcgtgccagcagctacatcctggcagtcaaacagagatacaccaccacacactctacgtacagactgctctcacttctcgattacagcatcacctctactacttcgacctcgtagcagtcgatgaacatattgcactgaccctgtcatcagtagcaagacactgccagtgtcgactgactcagcgcgaagccatctcataaaagatcaatcagcactcaacacaaactaaccaacaaacacaacaccacatacagcacagaagacaaccgccattaaccaaaagagccacaccccacacccacccgaccacacacccaacaacccaccacgactcgcgttgtcaggcgcatcatcgcacctactcccgtcgtctcgttcccgtccgttggcgtcgtgcgcgcatgtcggctcggctgctgcgatgtgtggtctagctgtgttgcgtcg

SEQ ID NO: 489681 - DNA, 144 bp, Homo sapiens
cgctctggcgatctgtgtgtccgcactaagttcggcatcatatgtgacctcccgtgagtcgggggatcaccaggtagcctaaggaggggtgaaccggcccaggtcggaaacggagcatgtcaaaactccagcgtgctgatacaa

SEQ ID NO: 489682 - DNA, 183 bp, Homo sapiens
atggtgattatgggaggcactttatttggaagtaatgagggattccaaaaatagtcttagtgatgcttaacaaattggaaagacaaaaggaactgaggccaaagaagattgagataggtgaaatgtttcattgtatacattttcattaacttggttaataataatggatgtggcatttatatg

SEQ ID NO: 489683 - DNA, 219 bp, Homo sapiens
gacacagtggagtccataggactgatgctcgctcagtcccatggattcagctttcttcctaggagtgtttagagaggtccacatccttgcattttctgagtagcttccagctttgccagagatctcggagcctgagtatctagcggctcctgagattctgtttgtgcctgagtagttgctctgtccaataccatgcagttcggtgggtcagaacataag

SEQ ID NO: 489684 - DNA, 387 bp, Homo sapiens
cgaccaaggccaaagggccagatagattaccaggatgtgtagccagagcatgctcttcactaacattttcaacctctccctgtttgagtctgtaataccaacatgtttcaatcagaccaccatagtccctgtgcccaagaacactaaggtaacctgcctaaatgactaccgacccgtagcattcacatctgtagccatgaagtgctttgaaaggccttaatggtgtacatcaacaccattatcccggaaaccctagacccactccaatttgcttaccgccccaacagatccacagataatgccatctctattgcactccacacttcccttccacacctggagaaaaggaacacctatgtgagaatgcgtagacgcgcccgcgaattt

SEQ ID NO: 489685 - DNA, 471 bp, Homo sapiens
tcctattatcagtctccatgcttcggaatctgctgctggtgggtaaacacaaatccagccagaaagagaaatactggtctcccatacttgcaaacatcttgaatctctagttacttcctcaggccttcctcctgcggttttgtttttttgagatagggtctcactgtcacccaggctggagtgcagtggagcaaccatggctcactgcagcctactcttcccgggcttgggtgatcctcctgcctcaccctccttggtggctggaactacaggtgcgccaccacagctggctagctttgtggtattttttgtagagtcagggtttcaccatgttgcccagactggtctcaaattcctggagccaagtgatccaccctccttagccccggaaagtgctgggattactagccatgagccactgcacctggccctcttttaacacacactatctgtgggtctttggcctgaagt

SEQ ID NO: 489686 - DNA, 642 bp, Homo sapiens
cagcaacgttgttgagcgcagatgcttcttggcagccaaccatcagctcccagagtcgagagagttattgcaccgacttgctggcatccggctacagccagcctaaatcgtacctgcaggcctcatacacgtacctctctctgggctagtatttcgaccgccatgatgaggctatggatggcgtgtgccactactaacgcgaagtggccctagagaagcgctagggctacgagcgcctactgaagatgcgtagccagcatggcagacatgctatgttacaggacatgatgatgccacctgatgatgagagacgtccctatacgcgatgaatgctgccatgatcctgaagaacccccatctgtgtgactaactggagactgagctgctagatgaggaagagactgctgatacgaagatggctgacgacctgaccgaccggcacaggctgattaggacataagctgtgctgtacagtatctgtatgaatgctgactatcacgcacgtcatagagcacattgagggcagcgacttctgaagctaccttgcagagtagggctgctgctgaggcagttcccttagccaagtagccgattgcttaactactcctacagcccattggctcaatgataataggcttgttg

SEQ ID NO: 489687 - DNA, 440 bp, Homo sapiens
tccttgagtatccccctaagcaggctttggagcggcgctgggctcggtgggtcacaggcccgggatgatgaggtacaccacctcggccacattgaggattatgcgatccagaggcacgcgtagcatgaagacggtgaagacggttttctcggtggggcgggacacgatgcagtccactgtgttggggcaggggtagacgtcgcagattgagcagacgcatcatggcatagccagggtagagcagataaaagacatacatgaagacggcctcaaacaacagccggaacaccacgctgatgacataggtccaccacagtgtccctgagatgtggaccttgtgcctcttcacctcctccaggtgtagggggtccccatggccctcaagccgtagcattttcttctctatgtgttgctggtgagccacgtgcatggccacgagg

SEQ ID NO: 489688 - DNA, 180 bp, Homo sapiens
cccccctctaggcgagctttacttcccacactcaatgtggtcgcatttaggcaatcaggtgtggtgtggtgctgacaaacacaatgtatattctgttgatttggggtggagagttctgtagctgtctattaggtctgcttggtgcagagctgagttcacttcctgagctctgccacgggg

SEQ ID NO: 489689 - DNA, 256 bp, Homo sapiens
cagagcacgcaccacgtcctgagtgtctcatactcgtatgtggtggttaaaaagactggagaccagaatgctgccaatgcctctgcatccaagtcggtcaagaccgtcactgcaggagcaggaactatcaggacgatcaagtcatctgctgtgcccccaggtctccctgtgtatttggacctgtgctacattccatatccacagcaatatgtaagaatgttgatgtgtgaatttttcatgatagtgcgtgtcttcc

SEQ ID NO: 489690 - DNA, 920 bp, Homo sapiens
  misc_feature (655)..(655): n is a, c, g, or t
ttagaggctgacttttactctgtcaattacagtggtattttaaatgcatgaatataattcattgaatgtctgtatctttctgcctccatgactttttcaaaaaaaaaaaaaaaaaaaaaaaaaaaaaaaaaaaaaaaaaaaaaaaaaaaaaaaaaaagaggggcgcgcgcgcacgacaagaagacccccgcggggccgcccgcgagatgagcagctgccccaattttttgttgtagacgagggggcgcgccccatcatgagggcggcgctgatgacaataaaagcgacaagcggcgagcgcgcggggttataaaacaacggcgggctggagggcgggaaacacctggcgtcaacgcggggcgatccttggtgtgagagaagacgcacactaacacctgcgggcgggggcgggcgaacaatatggtaggtggggcacaacaactctcatcatagaggaggatattatatagaagcgctcctacgagggagcataatataattaatcatttttcgatgcaggtgcgtatccaggtggtgggttctacccacagcagcgcgagatcatatctgccctgcgggcgggaggaaaaatatgttgtggcgccatcagggggattattgtattatcagtggcgaacaacatcttttatcaccncgcggggcgcgtgttattagattataataaaaaacggccaacccacgcacttagccaacaccgaccgtccccagcaccacaccgacaccgcacagaccatctgacgccctctgaccgctgaccgagccagcctgccagccgcaccaccgacacacccccacgcaacacgctgctccggccgccccacgatgcaacccggcaccgccgccctgcacctcacgcgtctccacactacacgccaccacacgatacaacggaccaacca

SEQ ID NO: 489691 - DNA, 642 bp, Homo sapiens
cgggctggcccgcccaagaaaagaaggccacggttcccctgaaagaagcttggctgtgtgcaacggaccccctccagctctgatgccttatgggggatcggtcaaggtcaacttgagtgttccaggaagactcatacctgattcgctaggccccgagccacagctctggcacgggcggtgaggtatgtggaccaagccgtctagattggtctcgcaaggcagggaaaactcggcttgcaacttactttactcacctttcaggtagcacgcgcgacagccctcgtccttgagtttcttggtcaacagcctgagctacgactcgccgaccgtaatctcgttccagtcgatgctgctctcgtcgtagagctccactgtgtcggtgccacagctccgggtgaatcggtctcggtcctctccgcgtgtgaagagcgcgcgcaccggcaggttacccttatgcaggcgcctcagcataatgcccgggatggccacgttgatggccgactcgatgtgcgcgcactcgaatagctcctgcggccggcagtccatcagcagcagccgctcgttgcccagctccagctgctcgttgagccacgcccccgtcttgctgatcgccatatccgacgagaagggcgcgggtttgag

SEQ ID NO: 489692 - DNA, 756 bp, Homo sapiens
  misc_feature (58)..(58): n is a, c, g, or t
  misc_feature (413)..(413): n is a, c, g, or t
  misc_feature (507)..(507): n is a, c, g, or t
acttttaaaatatatttctaaacagaaggggccgactcagtcacagtaactgtggatnctccagtagtagagcaacccacaaagacagaactgattttttccccataatcaggggtgaaaaatatacaactgtgttctctgaaccaaaaaccacaattctctgcagtcttaataagtgctttcacgtgctaattattggcccgtggttagcaaatttagtgtacgttttctttctctctcttttaaaaacaaaacattctaaacaaaatttctccttaagaaccacttaaatctccctcaatctcgtggaaatgtgttagattctctagagccacaagagccacctctcagtctatacccttaaacaaaataacagaaaaaaattcatcccattcaacctgtgtgtcctcagntgagggccgtgaaagaggagcaagaagttagtgtggtggggaaaccccctgtggcttgggatagtggaagagtctcagcggcccctttgtaccncagaaccgaagaccgtgaagttaagccattaagcgtgggtgcttcctctcaggattaaacctcgagattgtcaggagagttttcacccttcttgagacgcggaattgggggtccccccagtttatacgcaggcgcatttcccattgtcttcttttctgagatactcgaccatccccattccatccttctgcacttcagcttaccagacttccccagcttctcgcttgtgactccttcaggtcctgccag

SEQ ID NO: 489693 - DNA, 166 bp, Homo sapiens
cccccacccccaccccatcattgtttttaaaaaattaaggcctggcgcagcagctcatgcctataatcccagcactttgggaggctgaggcgggcggatcacttgaggccaggagtttgagaccagcccaggcaacatagcaaaaccccattctgctttaaaaaaa

SEQ ID NO: 489694 - DNA, 960 bp, Homo sapiens
ttatggagatcattaactcctagaatttgagattatatttccatacaacattttataaagttatgttgaacttactacctgttatgtgaatagttacataataacctgcacataacaggtagtaagttcaacataactttataaaatgttgtacgagctactgtatgtgcaggtgattgatgtatacttaatacacagatgcttgtcatatatttgctttatcttcctcatctaacatgcataagaagttaaaatccgggacgcacaatgtagaataatcgtaaaccgagacattctgggacatggtaactactcgccacataaaaccccaggagactataacagagatgcaatgttacctaaatgtacatgttactggcagcccactcttccagatatataaatgttgcattaaaatctggcagatcatgaactgagcataattatatccaaaacgatcttgcagtgatgcgcctcctaacatatattcctgtgattacgtaaatcaggcagatcatctgtaggagctagattgtcgctacagatcccgttatctaagacgaaaggcttactcactagttatggcctgattagcgattgacgcacgccgggaactcaccagggcatttgaggatgccccttgacgcatggctcaccgagaaactcggcgtacagagatacagcccggggacggggatcaaagtctggtaactcaccatgcacattgcgaatgacagacaccggggatgcagaaggcagcggacagagcaacatcctgggaagcgcggagaaagcccatcctgtacgcaaccgtgcagggcacggctcgaggctgggccagaccgccggaatgcacaccaccgagagacagaaaggagacacctcacccaggaagagaaagaaaacaggagccgaccgaggaagcccaagcagggcacggaaactctataacacagcaaa

SEQ ID NO: 489695 - DNA, 615 bp, Homo sapiens
gttgcgtggctgtcccaacaaaaaatcccgatggcacgatgaacctcatgaactggaggagtgcgccattccaggaaagacagggactccgtgggaaggaggcttgtgttaaagctacggatgctttgcaacgatgattatgcagcttcgccaccacaaatgtaaatgcgaagcatcatgatttcacccggactgtgtacccttcggggacagtgtgcctgtccatctttagaggaggacaaggactggaggccagccatcacaatcacacgagatcctattaggaataaaaggacagttctaaatgcaaccaacacaatatgccaagaaccagttccacgcagcggacctgcacgattatactggcaataatccagagtggacgtacgaagacaaacgggtccgagcaaaagccaccgacggttcgacgcccctcataagacgagtggatcttgtggacatcgttccgacacggcaggtgattggttaggcaacgaactcgttctaccaaatgacgggaactactacacgttgctgcatagccaatgacttagacacctggaggggatggacgggccgccatcttcataggcgcagcgcatgtgggctcccaat

SEQ ID NO: 489696 - DNA, 1856 bp, Homo sapiens
  misc_feature (398)..(398): n is a, c, g, or t
  misc_feature (450)..(450): n is a, c, g, or t
  misc_feature (482)..(482): n is a, c, g, or t
  misc_feature (493)..(493): n is a, c, g, or t
  misc_feature (879)..(879): n is a, c, g, or t
gattcgcgaagaagcgctgagaggtacctttgacttgctgctgtaatcttgtcaccaagtgcacttgtagtacagagagatatgtcatggcgaagcatgtattctcaaagcctgagaattggagcatcaatcaaatgagacatgaaacgcagttcagcgtgcgtccttgtagcgggacagctgggccgtgattggcttgcttgactctcgcacagacgcgtagctctgcgaccctgcgtcactatagttcgctccatcatagactatcggctgtacgcgacgtcctcgcaaggtgtagcgacgcgctgtcgccgcggacccctcgccacttccagggtcggtcctctcgctggcacacacactgaggtcgcaaacacctctcgagcaatctcctattntcttcacctcgcgaacataacgaagcaatgcaaactcttctcaagggactcntgttgtgcaatatctgacagtctcaatcatcntgggtaatggntcaaatatacacacaaaacaaggccatgcagaggggcgagagagacagagaacactataaaaaagagataacacacacacagacagagagaacaccacacacaaaatatataaacagaagtataacacacaaagacaatttgacgcgtggtggtgagcgacacacgcgcttgtgtggtacccccattaattaccgctgagaagcgttgcggcgtcactcacatcctaaacgcaggccatagcgtcgacacacctggcgacgcaccctgtaccctgtattcttatgtaaccacaactcgatgtgtcccggttcagcaccttttgtgggagaaaaacaacgcgtgacgcagtaatagactattgaggcggaggacatcacctcattgnaggcgtacgcaaacgcgggtaaaacgctgctttttaaaccaatctacagtcgagtcgaagaataggtttgcaaccgctctcaacaaattagtggggcaccccacaggcacccttgagccgcgcttaacctactagaaacgaaattttatcaaacaagaagagcccctccataaaacgggggttacacacaggtactttagacagcaccactccctctaccaacacgggcggcgctgcaataaccacgcggcttcggcttcaacacaaacccagttaccacctcatgccacacatatagttgccccctatggagcagtaggcccattagtcaacacaaacacacatactgccgaggcataatagcagtggaaagaaataaggtggcaccgtctccaaactgcgacacccacagctaccttacatattaccaacacaggggagagctaacccgcatgcaagaaaaaaaactgagcgaccaacaaccagcgcaaaccacagacaacagatcgacaaagcagcgaacgaccaacactacgcatcacaccacggagcacacgacaatcaaccgaggcgcccaaacaaaacacaggcccgcgagacaagcgagcagaaacaccaaagaacacagcgaccaaccgaagcagcgccgtagggacgacgacgaggaggaccaacagcagcaagagaaccagcaacaaaagacacaaacaaaaccaaacacaaaaacacaacacaccgccagacaagagagaacaaaccaccacacacaacacgaacaaggaaaacaagcacaacaggcaaaagcgaaaacacaacaaaaagacaaagaaaagcaaagcacgcagacaagtgaagagaaaagaagaaacccacagcgcaacgcacgctagcaggagcacgaagcaggcaacgaagaaaacaccacgcacgacacaccgctagcaacggaaaaccgaggaccaacagcacaacacgga

SEQ ID NO: 489697 - DNA, 917 bp, Homo sapiens
  misc_feature (15)..(15): n is a, c, g, or t
  misc_feature (116)..(116): n is a, c, g, or t
  misc_feature (132)..(132): n is a, c, g, or t
  misc_feature (161)..(161): n is a, c, g, or t
  misc_feature (163)..(164): n is a, c, g, or t
  misc_feature (166)..(166): n is a, c, g, or t
  misc_feature (197)..(198): n is a, c, g, or t
  misc_feature (207)..(207): n is a, c, g, or t
  misc_feature (210)..(211): n is a, c, g, or t
  misc_feature (214)..(214): n is a, c, g, or t
  misc_feature (230)..(230): n is a, c, g, or t
  misc_feature (232)..(233): n is a, c, g, or t
  misc_feature (236)..(236): n is a, c, g, or t
  misc_feature (238)..(238): n is a, c, g, or t
  misc_feature (245)..(245): n is a, c, g, or t
  misc_feature (255)..(255): n is a, c, g, or t
  misc_feature (270)..(270): n is a, c, g, or t
  misc_feature (273)..(273): n is a, c, g, or t
  misc_feature (283)..(283): n is a, c, g, or t
  misc_feature (285)..(285): n is a, c, g, or t
  misc_feature (313)..(313): n is a, c, g, or t
  misc_feature (347)..(347): n is a, c, g, or t
  misc_feature (355)..(355): n is a, c, g, or t
  misc_feature (357)..(357): n is a, c, g, or t
  misc_feature (360)..(360): n is a, c, g, or t
  misc_feature (376)..(376): n is a, c, g, or t
  misc_feature (384)..(385): n is a, c, g, or t
  misc_feature (391)..(391): n is a, c, g, or t
  misc_feature (406)..(407): n is a, c, g, or t
  misc_feature (409)..(409): n is a, c, g, or t
  misc_feature (440)..(440): n is a, c, g, or t
  misc_feature (471)..(471): n is a, c, g, or t
  misc_feature (473)..(473): n is a, c, g, or t
  misc_feature (479)..(479): n is a, c, g, or t
  misc_feature (481)..(481): n is a, c, g, or t
  misc_feature (498)..(498): n is a, c, g, or t
  misc_feature (516)..(516): n is a, c, g, or t
  misc_feature (628)..(628): n is a, c, g, or t
  misc_feature (780)..(780): n is a, c, g, or t
  misc_feature (782)..(782): n is a, c, g, or t
  misc_feature (784)..(784): n is a, c, g, or t
  misc_feature (811)..(811): n is a, c, g, or t
  misc_feature (913)..(913): n is a, c, g, or t
gacgatgcgtgcgcnccgcgaccgagccgggctcctcctctgcgtgctgctgctggcggcgctgctggaggcggcgctagggctccccgtgaagaagccgcggctccgcggaccanggcctgggagcctcangaggctcgcagaggtctcagcctccccananncnaggcctctgaaggaagaggaggaggcaccanngctccccanaanncanctgcaggcagagccanannaananggatgcnggactgtcantgagccagcagccangancccaggcaanancacccctcccaggaccccagaggttacnccgttgcggctggagctgcagaagctgccgggantggccaananaancttgagtacccctaancctgaaanncaggcntcagcctccccaganncnaggcctctgagggaagaggaggaggcacgantgctccccagaacccacctgcaggcagagcnanaccaananggatgttggactgtcantgagccagcagccctgancccagggaatgccacgcctcccaggacccaggaggttactcccttgctgctggagctgcagaagctgccagaattggtccacgcaaccttgagtacccctaaccctgataancaggtgaccatcaaggtggtggaggacccccaggccgaggtgtcgatagacctgttggctgagcccagcaatcccccgccccaggatacccttagctggctgcccgcactctggtccttcctctgggggagactacaaaggagaggaaaaanananggccccaggggagaagggggaggaaangaggaagacgaggactatccttcagaggatatcgagggtgaggatcaagaggacaaaagaggaagatgaggaagagcagcgctctggttcaatggaatacanacaa

SEQ ID NO: 489698 - DNA, 577 bp, Homo sapiens
tgctgtccacttttgagcagaaacgcaacgaggagggctcggaggtagagaggggcccgaggtgcgttcgtcctgggcgaaggtggcgagtgagctccagcgcgtgtgcgacaccgtgctgtgtctgctgtccagccatcctcatcgaggagtgccgtggtcgccgagagccgggtcttctacctcacagatgaagggtgattaatatccgctagctggccgaggtggtcaccggtgacgacaagaagcgcatcattgactcagcccggtcagtctaccaggaggccatggacatcagcaagaaggagatgccgcccaccaaccccatccgcctgggcctggccctgaacttttccgtcttccactacgagatcgccaacagccccgaggaggccatctctctggccaagaccactttcgacgaggccatggctgatctgcacaccctcagcgaggactcctacaaagacagcaccctcatcatgcagctgctgcgagacaacctgacactgtggacgggcgacaacgccggggaagaggggggcgaggctccccaagagacccaaaagtttttttg

SEQ ID NO: 489699 - DNA, 276 bp, Homo sapiens
aatatccttcagaacccacccagaggccccaccacgttctcctcctcctctccaaccccagaccactttctcttttttccactcgaggacctgtttctcactctagacccctgagcctgacagtaagaccctctcggacggggccagcacaggctgccctaggtctcctcccagggtccagcacagcctgctgtggccaggacatatggtctgcaggatcccctgaggctacccggccagtcgtctcctcaccgtgccagacctgagcaagccagg

SEQ ID NO: 489700 - DNA, 237 bp, Homo sapiens
cgttgggtggggtcccacctggttggaggcttgtggggccgggaacccaagcccaagaagttggggcggccccaatggcaaggctaaaactccctgccctaaagatgaactttcccaaaccttttaccttttttaaccggaattggagttttgtctgaactacaagcgaattggcaccccaagaaggcaagcaggggattcccaaggaggaggagtataaagctgatgtacgggatg

SEQ ID NO: 489701 - DNA, 1342 bp, Homo sapiens
tatactccagcctaagcaacaagagcgaaactgtcttaaagaaaaaaaaaaaaaaaaaaagggcctagtgttgcaggggatcatgcctgtaataccagccacttggggaggctgagggtgggtggatccacctgagactcaggagttttgagaacacagccttggccaaccagggtgaaacccgcatcttctacttaaaacttacacaaaagaattacccggacaggtggttgggtgggcacccgcgtgttaatgcccacttatctcgggaagattctgaagagccagtgaaaaattggctgtggaacccgcggagaggtagaaggttgtgaggagtggagccacaaaaatcccgcccatgttggaccctccccaagacctgcgggggcaaaggagaagaggaagagacctctgtgggcctcagagaaacacaaaaaaaccaacacacaaaaagcagaacaacaaaagaccaaaacaacaaaacacaacaccgacagagagaaccaagagggtgtcacccagagagatcctctccccaagaaaagagctgtttcaccaacaagatggacacattgcgagtgggcttgaaagaaaaggggcaacagggggctcaacaatgaactcaaaggaccgacctgcacggtctgtttcccctgtgcgcaacgacgtgggggaaatacctacgtggcgcacacccataggggtcaacatagaacgagagataacacacaaacccagagagacccgccaccactcacaaacggcgggaatcccacaaccgtcaacaaaacccccgcggggggagcacacccagccacatgcgcaaaaacggggaacacacctcccacacaacaaaacaaagaaacagtgatctaaacgcacatgggccccaaccaccctagagtgtcccgggcaccaaacagtagaatgcccttattggaccccccatttatagtgaaaaacccaggggctcttgccatattgatgcagatatatcctctgcaacccccaacatatgtatgaaacccaaaccttcaacacatgaaaaacaatctaaaagggaacacagcgtccgcacataaagttgcccctgaaaaaagagacgaaactataatttaatgcggacatcccaggtgcaaattctatctaaaacgcagtacgggcctctcgagaaaccctaaacagcaagtgccatgatggtacccaagtagttaacactatacatagagacatatctcaaatattaagacggaaatggcgcacgtgatatggaacaaaaagtgctcttgatacatgagacaaaaacaactagtgcaacctatacaccaacaaataacagcag

SEQ ID NO: 489702 - DNA, 768 bp, Homo sapiens
ggtctgtctcttgacttcatcagtggtgtggaacaggacacatgatccaggggactctcttccatgcctcctgacctgccctcctgatttcctctcctgcttgccaatctcctgggaccatcttctcgagcatctcctgcttcttggcgacctgccagcaccgttttttgtggttcggctccttcttgcccaaccaactcatgagctcccagattctgtcaggaattattccacctgactgtgtgagtgcagccgtcaacatgcctgtgtcaaatttgtacctgcaagtgcctcctacaactacctctctctgggcttctatttcgaccgcgatgatgtgcgttctggaaggcgtgatgccacttcttccgcgaattgtgccgagctgagaacgcgcgagcggctacgagcgtctcctgaagatgcaaacccagcggtgtcggccgcgctcgtctttccagtgacatctaagaagcccaggctgaaagatgaggtgggcgtcaaaccccagacgccatgaacagcttgtcatgtgcccttggtgatcaacaaagctgacaccaggccctttttggatcttcatgccagtggtgtctgcccgcaaggaccccccatctctgtgacctcctggcgagacctcaccttcctagataaggagttggaccttctcacgaagatgggtgaccgcttgccaacttcacaaggcttgatgcctggggttgggctgcgcgagttccttcgaaaggcccgtccagacgactcaagagc

SEQ ID NO: 489703 - DNA, 803 bp, Homo sapiens
gatgtcgtcatcaggatgagatctccaggcagcttaccagggcccttgataacgcttacctccgatctatcacttcacgatcctcttcttcacgatgaagcgaatcatcgtaaggaaaatggaagttgcaacccagcttcaggtgacttgcagctcgcaagtcctgtgtaccagatttcagaactcatagtttccacctcttccaatgtggcaccctttgcccagctttaagccaggaatgtatacgagcgaatggccatcagaatctactatcctcctcctgttccatttggcttatccaaattcagggaagatcatatttaccatatcgcccaattccagtgacatgggtacctcctcctggaatgcattgtgaccggaatcactggattaatcctcacatgttagcacctcactaacttcgtttttgattgtgttggtgtcatgttgagcaaaaggtagaagtaaaccgttatctacacagttaaaagttgaaagttcgtgtgacgtaatagtagtgaagttagatgggccaaacctatcagaactggtatttattatagaagttattgagaataatgtttccgtggaaaatagtatgcactgttagatagttgatatagtttgagaaatgttgtattaaagttagtcaagtgcctaagtttttaatattggacttgagtatttatatattgtgcatcaactctgttggataccgagaacatctgtagaagtggacgatttgttctagacctttgagaatctactttatggaacgtatgtaagttatttatatacaagga

SEQ ID NO: 489704 - DNA, 643 bp, Homo sapiens
aaagaaagtataaaatagtttatggcccttaaggcaggccttgttgaatttgaactatacttaccccaatgatagttctgtggtagtttgtttgaatatgtaatatgagaagcacgatggcaaacgataatcttcactgagctgatttacgagcgaccatcatctccacggtgcgaattaataagctgtggcgatgtgctgtagttgccctatcgcccctgcggagcttgcgtcaactagctctcccctttccccattgaagttagcgtattaccatcagttaatgattgataggctcatacgaagaagaaaaaaagccgggataagaaaccccgcctccacttttttggctcatccgaaaatttatccgcggagacatccacggagcacccgcaaaactgaagtaataactctaaattatatgccgctgagaaaaatctcgtacgaggatacggtaaataatccgtgcgagaaagtttttccgaaaatcattcccggtcaaaagcgtttctggtatataagcgattgggaaacccgtctataatacgtagtaacttacgatctgcctgtcaaattgtgtgcttgtccttgtactattaccattgtgtagcttatcttaaatctcaattaagttttaactcac

SEQ ID NO: 489705 - DNA, 942 bp, Homo sapiens
gaactccgcgcgcccgctgagactgtgtgcgtggagaggtctccccggtgcttcccatcaccaggtatccgacaccagttgggtcctctccggcatgccaaaaaagagtgccaaagaagtgcgcggcacctgggacaccaaggccgcccgggacaccggggtcccccgccggtgttttcccggcccccggcccattgcccgcggttggcccctattggggctccaaccccgggccacatgcagcaaatgtgcggcctgtaaggaaacgttgggtgcccccgccctgggaataaccgtgggaaaatggcccctaaatattctgcaaagatgttggggggaaaacccccccactgattgataaagggtccgaggcaaaccaaacgtgtgggttggagacgcgttctccaagcacaccacccgtgggggccgcccttgcccggttccagtaagtatgaaggaccaagacaaactcccggggggggtcatcaaaagcaagtgggccaacaaaaaggcggggtgggagagcgtggcgcaagggccaacaccaagtcgcggccccggaaacgtccagagaaggcgttaatgtgattatttaattccgccgaagtacgccgcgccacgccgccacttccgtagaacacttggtgggagaaaacgcgtgctcacaagactgtgttgttttgccaatggcacacttaaagttaaataacttataaaagactggggttaagagtgaacacaggcaggttcgtgtaaaccctgtcacagaaggaaaaggaggacaaatttttgtggagaccaccgcttggggttttctctttttgcgggtggccacatttaaaggtaattaagtgttaaaacaacaaacttttttatgggaaaaaatggccccaaaaattgtcccaaaaatttgggacccccttaaaaaagttaaccgaaaaa

SEQ ID NO: 489706 - DNA, 863 bp, Homo sapiens
gagtctcgccaactcctgggctcaatgtgattctcctgcttccacctccccacagtgctgggattacaggcatgagccaccacgcctggctctctgttcttttcagtgtctccgtgccatcagctcagcagtgcttacatgtatcagcatacttgtcatgcacgttcactcttctgttcccacgagactatctctggacaaaaaaattgaccacacagtacatgtgtctttccccacctatcccttacgaaacaccctaactgtgtactgctacttttaaaaccaaaaacgagaccgcgtgacgactgcgtaacgcactttgtcttagccttaccttatgtcttgatctgttaactgagaccaacatacctgcccacgacctcacccctacctctactacttgctgctgaccagacaactacaactttacgacttgcaccaacattctgaccaactactacactcagcctggtcttcttaccacgagctcggctgccgccactcttaacacaagcaccacgtttcacgccacgtccttacgacgcatccaagacgcccaccacgtctcttaccgcagccttacgtatggtgccgctgggctcaaacacctactcgcacccatttactttcaacatactcaagcatttgccagggggtatatacccagctggccgccagcacaacagcgcgggaacacagaagtgtgcaatggttgcccttccgtccaaggaacgacttaacatcgacccgttagacttcacaaacttggacgacataacgtacatactccggcattcctggcatctcacggacaatatgctaaaaagtgagtccagaacacacgtgctgtcccacacaccatc

SEQ ID NO: 489707 - DNA, 150 bp, Homo sapiens
ggctcggtacctgaacattcgtgtcctttgaaggatacttgaggagggacgggcggtgtgtacgcgcttcagggccctgttcaactaatgcgctctactctcagtttgagctgcgtaaactccacgcttcgacgccttgaatgtttcata

SEQ ID NO: 489708 - DNA, 1277 bp, Homo sapiens
atccttattgacacttatttcctgttctagttaatctgtcttatatcctatagatacgtccatcctaatggatgtgatgtgtaacttcattctttaatgtttctcttgttctctagagaaatactgaaactattacagatttttgagtttctcggaaggaacctaatgggctactgtcatttgtgccatgggtcatgcccgattgtgaactagtagatagttacctatgtgcatgtggtctagtgtttaatgtacacggtgttttgacgtaaatatattaagtcttgatatatccgtcatcatatgcatgattttctcatatgattgcattatccttatgtatcatattcttatctaggaaagcgcgcacgagatatgagtgatgttgtgcaagtggttcgtggggagacaaattcgttgtagccaataaagatgggctgttgtatctcaatctctatgtaaggtccttatctacaggcattatttccttatctcccttatgagtatactgcaagtagcatcgggcgtcctattatggcaccctcctataaacgattcggacaatcatatctatcaaccgttgttagagcgctgtccagtgccgagtcgcgctgtttatagatctgcggctaggaaaggagggcgtatcccacgtctggacggggcatgctacggtgaaggtaacaacttccccatgggagggtgtttctcaccaattctaccagctatttttttgaaacaaaagaggcttcaaccgcggagatctacttacacaacacaccccagccaacggtcgttgggaccgccacatatctcgcacatcactctgcggcgaacatttcgcacgaatgtacccaccaaccgacttacttaacgaatccctccggctgtagttaaaacatagtgcgcacccaacgtcaagtcagtacaaattgtctggcaccaacgcgcatctctcacatagttcgctcccttattgcgacacacacggcatatccgttttgtggcccttcccttaaggaaaaccttttcccaatttttgtaacaccgctaggagtataatttccccgccaacattcttcataagggaggtgaatacatgcgacagccaacttcctgcatttgagggagacacaaatcttgtgtcacagagttttctgtcgagcaacggttgcggccatatcccggaaacacaagttgtgtcttctctcaacaggacaaaatcttccccacgtgaaataacatttggctttctaccagctgagcgcgggcagaca

SEQ ID NO: 489709 - DNA, 275 bp, Homo sapiens
  misc_feature (6)..(6): n is a, c, g, or t
ggacgngcacgaaaggcctttaaactacctgtcctggaagtcctacctgatgtggctgggacaatctgcggaatgtggacagggggacgtgttatggagtttagttactccaactgctgtacaacagaggatggacatgctatcatccctgatgaaagcttcaccattccccagaaacagagcaacctgtagatgaactcagatatcctggaatcctgggcaaattaccatagtagcacctactactccatcaacacagaactctctcttttttc

SEQ ID NO: 489710 - DNA, 105 bp, Homo sapiens
ccggtacccatctgcgtccatcagtatgacagttgttcaagactagtaggttttgtttgtgtatctttttataacttattaaatggctgatgggagaagactgcg

SEQ ID NO: 489711 - DNA, 533 bp, Homo sapiens
attcgcggccgcgtcgactgaaacagcccaagggaatatcacccatgccgatctctttaccggagaggtaaggttgcgtcgccaaggcctgatccaccgtctgcaatacgtcgatgcaagcctggcgaccagcgttgatggtgtcccagttctgcttttcggcaggggtgcgaagtacgccccagaacacagtcctgaaagggtcggcgagggtcgaggtggtccagtccatccacttttcggcgttggcgcgggcttgcaggtcgctcgggtaccagttcgaatccggcgcatcttggcggccagatagcgcacgatggtgttggactcccagagcacaaagtcgccatcttcaatcatcggcacgcggccattggggttcagcgcgcggtattgcggcgtgtcgaccacaccaaaagccccgcccgcatcaattgcctcatagtccaggccgagctcctcggcgcaccacagtgctttcctgacgtttgacgaatttttacgaccccagattttcagcatgggccggcccg

SEQ ID NO: 489712 - DNA, 1307 bp, Homo sapiens
tgtgaggaattaacagtctttatggggctcaaaccaggagtccgggggtctggaggacctcggtgttatttggtcaattttcttctccaacgttcttctcggcctgtttccggtagcctcatgagctggtttcttcttccgggtaaggggatctatggctatatctctattcctctatctcctccagggtgggctggacactggcctgggaactatcacaggcacaacctcctggagacgccagggcggccccaagatagggcaaatcttatcctgtggtaggagcttacaagacggcaagagaccttggaggggcacgcagagaaccacacatacgcggctatattacctagggtccgcaagagggccggggggtatacgccgtacaacaagactctgtgagagaagagggtcccagaaaggagtgcctggggccctacgccctgggatctatggcgagggggccaggacatacacctgacggcaacgggttcccgggacaagaaaaagaagtagcgggctggggggggggccccctggagaacggggcgctatggggggccctccgggggagacagggggttgggcgcgtgtaaccacaccggaggtttgagcgaaggaacgagaaagggcccacgtgtgaacatgatcgacagctagggatgaacctggggaaacaaaacatgcgccacacagaaaacatgagcctacgacgcgccgtcaaacaacagagaggtgataaaagaaaccaccaaacaacactaatcccggaggcaccccacacgagagacaaccgatggtagcaaaaagccacacaatgcgggcccggcccaagggcggggccaccaagggaaagaatgggcccttaaaaaaaccaagcaaaagagcaacccagggacaccggtgagacaccatcgcgcgcaaaatcacaccctccgggggaccaggagcattcgggccgacgacaggaaggaacagcaacatcgcgtccggaaggagtatagtagagcaagacaaacagaaaacgaagaaatactaaggcagagaatacaataagagacacatatatatatgcacaagcacaagacagaggcagacaaagagaggagaccgacacagacagggaagcggagggagacagacagacgaaggaagcggaacagagaccaagagcacaatcacgagccgaaagggagcgacgaacatacgggaggaggccccgcgaagaaaacaaaacgaggaatggaaaagggagacggaccacggagggacaacccacgccggcgagaaagggagacgagggaaga

SEQ ID NO: 489713 - DNA, 252 bp, Homo sapiens
cgtgatgtatcccaacaccatccaggttcagcaccaaatgtaagaagtaaagaaagagaaaagaaacatgaaaagtggctcaacagtcaaagacaagtttattttggagaataaacctgagaggggcttctggacaatttttttttttttgggttaggagtgcttgcccctatggactaagagtttttatgggtttaagggtgagagagtttatcacaggcttggaatgtttctgtgtggggcgataacata

SEQ ID NO: 489714 - DNA, 380 bp, Homo sapiens
  misc_feature (31)..(31): n is a, c, g, or t
  misc_feature (34)..(34): n is a, c, g, or t
  misc_feature (244)..(244): n is a, c, g, or t
  misc_feature (281)..(281): n is a, c, g, or t
  misc_feature (323)..(323): n is a, c, g, or t
  misc_feature (327)..(327): n is a, c, g, or t
  misc_feature (358)..(358): n is a, c, g, or t
  misc_feature (360)..(360): n is a, c, g, or t
tcgtgccgaattcggcacgaggtttttttgnggnagtttctttctgtgtagcccgctgtcctggaacttgctatgcacctttagctcagtacgcctgcctctgcttccccagtgctgggattaaaggtgtgtgcttccaagcctgcctaagatactggtttaagcttttggatgcttattgtctgctgcattataaatccataggtgtaaattggaagagcttgttacattataaacacactgnccacattggaagcttctcaggtggtcatgcttgtgtngacaaaggcttagccttggaacttggagtggatcttccctgnccgntcttccgagtgcttaaattgtgggtgttgtncntttcatattactgggaaaaa

SEQ ID NO: 489715 - DNA, 880 bp, Homo sapiens
gagggagggagggaggccacgtcccgggcacgccagccagccagccccgcccccagattcgtctcgccccagtgggccgcctcggagtcgggtgggtcttccatcccggaggacccgatgtgctgatggggcaaccgccaacggttgtggcgttaaaacccaagccgcagccgtgtgctcgccgagctcccggagcttgggtgggggtgcccacgctgaaaggagagtgatggagtgcccagtgatggaaaacttgctcacttttttacctcagggaattagagaacttttgaaccagacaaaaggaatttcaaagactactaagtgtgaatgtttctcttggcttcacaaataaaaaaaaaatataaataattcttctattttcaaaatttcttttaaagcacaacaccaggcattagctcaggctcttagtagagaaaagagaattctcgaggaattacaagtgaaaagatgctatggcaaaaagaagtcgagacctggaatttggagaaccacatttttcgcctaaaggctaaatttacttggataaggaagcttatagacatagaaagctctcatgaacaataactttgataactgccactggcaatgggcagtctttcttgagtccatcagagtcctttctactgtcagtagccaagaagaacgaattcgtacaccgggccacgtggatgcgtctcccattgccgggtccctcacttccatgtgtgcacgctacgatacggcaaatggcggtggccctttatcaagattctgatttcccttgatacaaaaacttttaatagggatgccagggtttcagaacacccagtgtgtgtgatcacactttttggggtcccaacgcccaccatgacttcgg

SEQ ID NO: 489716 - DNA, 349 bp, Homo sapiens
tgagatggagtctcgctctgtcagccaggctggagtgcagtggcgtgatctcggctcactgcaacttccgcctcccaagtttaagcaattctcgtgcctcagcctcccaagtagctgggattacaggtgtgtgccaccacgcccagctagttgttgttttaagactgagtctcactccagcccgggctgagtgcaggtggtgtgatcttggctcactgtaacctccaccttctgggttcaagcaattctcctgtctcagcttcccgagtaactgggattacaggcacccgccaccacacccggctaatttttgtatttttggtagagacggggtttcgtcgacgcggcc

SEQ ID NO: 489717 - DNA, 165 bp, Homo sapiens
aatacattattagaaaatcattatttctgggtaacattttgatgcttaccattcgtgttatattttgtttgtctgcatgtctatatcaccagacagatgcttatcttctattacttcttaaacactaaaaattgtttgatgaatgaataaatgaacaagtaaatg

SEQ ID NO: 489718 - DNA, 381 bp, Homo sapiens
cactcctgacctcgtccaccctccttctcctcccaaagtgctgggattacatgcgtgagccaccgcgcctggccctggtgcccttttaaaaacaggaagagggagagagtgatcttgctctagcaacacatgagaagaggcaacgaaccaattggtgctgaaatggatagaggtagcacgagtgaaaactgaagcagaggcatcaggaagacgcatcctcagaagctgtaagacagcatggcgtgggagacggcccctctgtttcgtctcctcaagttccgtggcagactagtaagactgagtttgacaccttgggagagacacgtctgccaagtttgtcatccattaaattcacattaaatgataagagttgaccacaaa

SEQ ID NO: 489719 - DNA, 214 bp, Homo sapiens
ccgcgcatactctggcctctcgctctctgctagcggcgtgcactgcccacgtcaggcgtgagctctcgagatggccagagaagtgtggggctgggttgtgctgcagcaggggtggggtctcggcgttgggactcctggccagtggactttgccaaacagcctacaggggagtaggcacccggaatgtttgttctacgatctcggtgcagcaagg

SEQ ID NO: 489720 - DNA, 1740 bp, Homo sapiens
  misc_feature (887)..(887): n is a, c, g, or t
cggcaccagtgttgctctcctgggacgtcattctctgtttatgccaccttgtggggtcggcgatgtctatgtggttggctccaccctcatcatgtggggcactaccggctgctctttcttcaatctcgttttgttgcgggcgttttctcttttttctggtggggggtgggcggcggtgtggtatcacaggcatgtttgtctttccaccgtcagtgatttcctccctcgttggtggggatcacacccctccccacacgtggtggttgtcctctctctctgtactttatttgaccctcctctgtgcttcttgacttacaccccacctgatgtggggttccccccgctgattggtgtctccttgttctgcctcactcctcacatagtgtaggaccttggtgttggtgtatctaatgactggctctccacaccactgagcgctccctctctgctgtagggtgaagttgattctctcatcgtggggcgcccgttgtctcactcaccatggctatgaaggtggcattgtcttgagatgattccacctgcgtgtatataccacaccgatcgttggtgtgcgtacaccaatcctgtttgggtgcccacacgacacaccacctgctgggagccacccacgttcgtcttgtgttggtgcgtctcccacacaaccagaagggcttgtctatcctaacggggtcctcttccccccgcatctttgtgtggagtacctccccaccggcgtgtggggggtcggcgcccccccttgtggactacttcgttctgtgtgtttgtttttgtcggtctgtcggccccccctctttttccaccggcggggagtagatctgggctcccctcccccccctcggtgatatgggagggcacaacatcgtgtntcgccccctcgttttttctacccctcctcgttttcatcagccctcttctgtgagagggcccttcggttctttgcgagcactctctctctcccctcataggagtggttctccctctgcggtgggccgctctctctcagcgcgctgagattgttgtggcgccgcgcgggggtggtgtttgtggcgtcctcgggactacttctcttgtgtgtgttacagcacctcttttaccaccctctgttctcgccctcacagcacaggtccacgagagagagaggagagcgcccacagcgtggtcacagagggctctgagagatgtggtgcccactggccggtctcttagtagcacactctgtggccgcgatgcgcacatggtgcacaacattttattctgtgccccctctcgtgataaggggcgcacacagagagagagagagagaggagagagcgcacaacacccacacgtctggggtttcccctggagaccacatatgtgggtggtcgccacaccaccctcaccgcacatgatacgtctcttccacaagcactctcccacgacgccaccacacaatgtcacgcgagatatttgtggctgagaggagaccacgccctttatagtggatattggagttggatggagcttaaagttcacaagctactcttcctcgagagctcttcttctgcacagagattcccacagagcccaccagagagttgagatttgtgcgtgacacttctctggcccccactcttttacaggatttcctttttcctcccccccctcccagtgatttttagaggtagatttttttgaaactaaaattaaaaccccagttccccccccttgttttaaata

SEQ ID NO: 489721 - DNA, 629 bp, Homo sapiens
  misc_feature (367)..(368): n is a, c, g, or t
  misc_feature (377)..(377): n is a, c, g, or t
  misc_feature (412)..(412): n is a, c, g, or t
  misc_feature (425)..(425): n is a, c, g, or t
  misc_feature (437)..(437): n is a, c, g, or t
gctgatcaagaggatccccttcagcacattagtcaaactatcctgaatatgggaagggatgcacagactcgagttttccccaaacccaattgaatttactctggtaaatttggcaaagaaggtgccttataggtactttcagccattgggcttggggccccggggctgtgcaggaaagtacatcgccagggtgatgatgaaagccatcctcgtaacacttctgagacgattccacgtgaagacatggcagggacagggtgtggagagcatacagaagatacacgactggtcctggcacccagatgagactaaaaacatgcggggaatgatctttaccccaagaaactcagacaggtgtcgggaacannagagaaggngggtcagtacccactcgggagcatttctcatcagnagtcacatacaantcatccatcctngccaatagtgtcatcctcacagtgaacactcaggggcccagggcatttaataggcatacctcctatgggtggtcaccaagctaggtgctatgggtcatctgctcctggtcacaccagagaaccaggctacaagagaaaaagcggggccaagagtttgagggagaatagtcggtgaagaaccgtatccataag

SEQ ID NO: 489722 - DNA, 351 bp, Homo sapiens
  misc_feature (112)..(112): n is a, c, g, or t
ttgttttataaatagaataaataagttgtgatatggtcacgaatgatttgttgaagctacatcttattgtgaaatgtttttaatcagagtactacaactgatcagcttttgntgttttgtcttggctatatacttgtgactcataaagattatgttgcaaacaggataaatcccacatgcatttattttccagtgagttgtataaccttattttttgttaaaggttgtatgttaaatcaatgtaccattcttatatcacttcttagaaagaaagttcgattttgaaattgtatcatttcctcaaaatgaagggcagtgcttagttaaataaaagattgatgatatctttta

SEQ ID NO: 489723 - DNA, 735 bp, Homo sapiens
ggacgcgtgggtcgacgcatagtcgtgccgagattgcgtaggtcgtcaccacgcgtccggcttcctgagaattcccatattaataaagaagaaaattatctgccattttttcctacaataataatgctgaatcttaatttagagaggtacaagggtatggtaatgcttgtagaatctttattatctcaacaatctaaaacatgatgtatatttccatagattatgactagtgccacttaaatgccaatgaaacaagaatataacatttcaatagaaatttgtatttcattttcaattacttggtaaattcgtgtgtatttagtacactgattagtatagtaacatttctgctttgaatgcagatgcaatataatataatagattattaaaagtgaagttaactcttaacatagtaatctatagctatatatatacaaaatatattaaatataggagtatatgtgagtactataaacaacagatacataaatataccacatatacacctgatagtcaaaataaggtacagaaatgaaatatatgtcaattatgccgaaataatactctataatgtgacactcaaacatgtactacactaaggataaataacaataatgatgcaaaataaagtagaacacaacaaaaattacaaaataatagatatataaaacactaaaaaataaatcaaaaaaaaaacatatacatataaaaataatcacaaaaatcccagataac

SEQ ID NO: 489724 - DNA, 122 bp, Homo sapiens
agacgactccccctactgttctcgactcgtacgcccctactgacccgaccttacacgtacctttactaccacacactgtactaacacacgtgcgcacacctaccacgtatcctatcaccact

SEQ ID NO: 489725 - DNA, 1250 bp, Homo sapiens
tggtgtgttcttgggctttttatttcaaaattggcgagcaaaagacagagaagaaaaaaaaatcaagggaagcaccagggggtctgggcctggaagaacgggaagaagatccggagaatcgggggccaagggtggttatccttggaccggcacagacaagggatgtactgggcggggacctgagacacccgggagaacagaggggcgtctggggggcacaaagatagcctgggtgtcgggccctatacgggtctctaggggagatgtgtgtgccgaaacacaacattgggggggcgcacaagaagaccacaagacgccgcccgtgtgggcctctttatattatgcgcgtatatctgcgcgctctctcagaggtgagagtgtcacactggggagagggagagggcgacgatgtgcgctggcgctgtgcgacacagacagatggctcaccagggtgtacagggggagaggattctgggggaacgcaccacacgctctgggccggttttatacacacagcgcggggagaaaactaattgcacaacatgcggtgggggcactcccgggaaatttcacccgaacagcgggggaacttcttccccttatcaaaaacatcctcctatctctgggaaaaagcgcgcgagagaggtattcagctctccaaggggcccccaattttcacacagaggttgggggaatctcggtgggaaaacgacgtcaccacaggggaacatatcggggaacccagcgagacatcacggaggatcgcaaacttggggaggcaaaagaacactatggagccaaaaagccgagaggtctgccacggggaattcccacaaaaagaatttatcacccgagacaccagacgggcgaccacccttccctttaccacagggggggcagccccacaaccaccaaaaaactgggagcgcacacaacgagggagagaatccatgcaggcaggagcaaccacaaccatacacccgcgagggaaacatttacaacgccccacaagaggagtctctgtaggagacagtcacaaatagcgatcacaccgagtgccacacaaacctaccgtggagtcatggaacaccacacacacatcccaagaggagacaagggagaataaccaacccgaagcaagtcgcacgacgaggggggaaggaacacaaccaaagagagtatccagaggacacgccccaaccattctacggggagggtacccacgatagaacaaacaagacgagtgctgc

SEQ ID NO: 489726 - DNA, 787 bp, Homo sapiens
ggggcgctgggggcgctgcgtgccgctgcagcgccagttgtccacctggtcgtgtgcacctgtggaggaggaggtggatttcaggcttcccgtagactggaagaatctggctcaaaacctggcttgcctcgcagggtgctgatgctggatggcagctgaggccgcccgacgcatggcttcctggctgagacatggcatgggccaatggattggcacgccctgttgctgtgcatgtggccctgtgctgatggatgctgctgaaccctgcggcctgcagttcccatgtgctgtctgctgtggctgctgatgcactgcctgggaccgctgcggttgctgccgggtggcgggtggtgtggctgtgggccctcggccttttgcacaaaagtaggggacgcagggggctggggcgggcacaatttcgcgccaaatttgaccggcgcgttctgcttgtaacgatgctgggctcgagaggtcctcccgctgctgtcatggttggttcgctagaactgcatcgtcgctgtgtcccagaacatgggcatcggcaatgaacgggggacctgccctggcaccgtcaggaatgaattcacgatatttccagaggaattgaccacggactcttcagtagaagggtaaacagaatctggtgattatgggtaagaagacctggttcctccattcctgagaaaatcgacctttaaagggtagaattaattaagttctcagcggagaactccagaactccaaaaggagctcattttctttccagaagtctagatgatgccttaga

SEQ ID NO: 489727 - DNA, 263 bp, Homo sapiens
  misc_feature (192)..(193): n is a, c, g, or t
taagagaaaaaaagggaattttcaaggggggttggttgggaaaaaaaagtttttgaaaaggcaatttttgggggggggggggggcccaaaaaaccccacaacccaaaaggggccctatcttattttggggggggggaaggggttttttaaaaccccctaaaaaattaaccccggggtgaggaaaaaaaactnnaaaagaaaggaaaaaacctcccccccctattcccttggaaaacctttaaaaaaaaattttaaaatttttt

SEQ ID NO: 489728 - DNA, 980 bp, Homo sapiens
ttgctatcgaacaatgctcattattggtaaggctatcatagaattgtgtgtgttctgttcatgtttcactgatagtgaagctgaggtcaagacaatctagttgtgctgcatgaagagtctgtggtctttgcttgatcacgctataattcgatttcttgtcgcgaaagtcatagaatgtctccatgatcgatactggtgataatacgtagtacctctcattacgttcctgtctgactagttagatgagtcactgtcggatcatcagctcgaacttcaagtagcttggatcttcgaatttgctctccttgcgccttttactggaatctattgctgtcgagaattcattgcatgtgcatccaaggtagctgccagtatgtttgccgttactgtctttgcagatagcatgtttcactacatggcacggagtcatatgattatagccactgaggtctgtgtagcaatctacattgaaccgcggtagtcctgagagtaacactgcagacacagtcagctaaatagatacgaaagtgtctgggcattaatttcaccctatggtacctcggacactaagtcagactactgtcgctcagacaagtccaagttgatgacacagtgtctagtcatctcgatacgctgagtgcgttgtagacaccgacaggcaatgggatatcggccaggtgcatacgatgaatattgtcgctacactccggcagtcgtcgtatatctctacgcatctggtagacgtcggcatgtgtacatggtatgttatttcacagaagtggtatgtgcgcacatctgggagtttgttatatcctctcgtcgagcagtcattagcaggtctgcccgattcatctgcgcgttgtggcgcttacggaaatttccccgataatgttcgaatgtgctttaaggcatccatgttcaccttactgacgcagacataagaaccttaagattgcatgctgtaagttttaagttccggc

SEQ ID NO: 489729 - DNA, 196 bp, Homo sapiens
ataaagtcggttcattcaatggaatcatcagaggtctagattattgcatcattcatttgaacaccaatttgtcaaacatgatgtgtgtgagtgccagatggatcatcttttcatccaaatcgttcacattggggaaataatcatgaggagtttcccaaattaaatcatggggggggatgggattggcaaagggggg

SEQ ID NO: 489730 - DNA, 95 bp, Homo sapiens
ggagaccatcagctcatccaggaggcccttgtctttgacaacaagcacacgaactacacgatggagcacattcgtcttggatgggacctccttct

SEQ ID NO: 489731 - DNA, 330 bp, Homo sapiens
atgaaagcgacattacactaattccacagcaagtacaaccgaacatgaattcactattacaaacaacgatacactaacatactggcacacttgcgaggaactggatgcattcctagacatagacatatacaatctaccaagatcgaatcaggaagaaatacgaaacctgaacagactgatactgagtaaagacctttaatcagtactaaagtctcccaacaaatttttagtccgggacatggctggcttcactggcaaatactaccaaacactcatcagaagaactaacatcaatatctccccaactcattctacaaggccaaaattacc

SEQ ID NO: 489732 - DNA, 503 bp, Homo sapiens
  misc_feature (499)..(499): n is a, c, g, or t
aaatagtttctgggctatgcacccgatttttcctgtgatgcaggaagtcatgcctttactgtaaaacacgaaaaccaaatggaaggaaaaaatgggggacgaaaggagggtgactgaaaagatgaacaagaacgtccaacaactgccaccacgcaggtgtttctaaaatcactttataggtaactacaaacccgatcccaacgtttaccctaacacttcccctcccaggtcctcctcggtggtccgcccgcttggcacctcctccagctccccaggcccgggggttcgggcgggggcgggggagaggcggggcccgggacgttcccggcgtctgggctctctcctccggcgccaagcccagcacgccggcgcccagccgtcccgaccccgctagctgggcaaggccgagtcccaggtgccagctgtgggcccgggaactcgacagccgacttggcggcagtctcaagggaggcggcggcaggcgcctggcggaggcggncgca

SEQ ID NO: 489733 - DNA, 130 bp, Homo sapiens
gacgctctctctgttggggggttgactctctctggtggggtgtggttgcactaagcagctgtggggaagggggaggttgttgcgctcaggtgggagccatgggtcgtgtggcttgccagtcccacaagaa

SEQ ID NO: 489734 - DNA, 155 bp, Homo sapiens
gtatccccgggaatcttggtcatcactcgtaccatttctatccgtgaagttggcccttggtccgctcacaatcgagacagtgggcggctgacggccttctaacggtcttcttcttcatcgccggcctcgagctcaagcgagagttcgttgaggga

SEQ ID NO: 489735 - DNA, 549 bp, Homo sapiens
gggattggagtcatgtgagctggtggagctggcctgaatcccttggagggagtgtcgaggcgcacagcctctcgagaggctgagcatcaacaggactactacagtgactgggatcactacagctcgttttcaatatttaacaaagttgctcagagtctgtctggcaatggatgctggaagttggctgagtcactggggctgtctgccgcaccaactgcacagaacatgctatgtatcggcttggcttctcccagcatactgaatggacataagtcagaacgtttcaagagacaagagaacgcctcacattccttaaactgtggaccaggaagtggggagagggtcacttcaatcatactctattgcagccacaatgactttcaacaaatcggcgtagagggcatgtttaaaagctaccacaatattggacccaatgtttaagcattttatttcaaatcatttatatgcattggctcttcataattagtagctccacgacatttattaaatggaataaatgcaatctgctaggattaaagaaaaaaaaaa

SEQ ID NO: 489736 - DNA, 241 bp, Homo sapiens
tgctgcagagcagctcggtgttatgcttacaccttgcacagggctgaaacaggagaatggcccagccagccagtccctcctcctctgtctgcaatggttgtttgtttttgaggcagagtctcactctgtcacccaggctggagtgcagtggcacaatcagctcactgcaacttctgcctcccggattcaagcaattctcctgcctcagcctcctgagtagctgggattacaggtgcctgca

SEQ ID NO: 489737 - DNA, 129 bp, Homo sapiens
ccacaactccccaatctaactcaagcatttctttattctgacttcaactcaacaagcagagcttaactccttcagccggggacaatcaaaaatctgaagcaggacaatcggggagagagagatcactct

SEQ ID NO: 489738 - DNA, 347 bp, Homo sapiens
  misc_feature (1)..(1): n is a, c, g, or t
  misc_feature (12)..(13): n is a, c, g, or t
  misc_feature (49)..(49): n is a, c, g, or t
  misc_feature (206)..(206): n is a, c, g, or t
ngggggggttgnntgtggctgggaatcgagagaagactggagagagtanttgttgtgtattctgtaaacactgtctgcctagtgtgatgtgatatagtctaggcctcgcatgctgctgggacagaaaagacccgacattgcttcagaacccgttcagaacagactggctttttttacatggaactgaattaccacatgaacactgncatcttatctcatgaaagtaaagagaaccaagaccatttcacactctgatctgatatttcttgtctcgtctgttgagctgctctaacacatcttggcttgggaatggagtcaagctccaggggaaaggttaacaagtcatc

SEQ ID NO: 489739 - DNA, 841 bp, Homo sapiens
  misc_feature (59)..(59): n is a, c, g, or t
  misc_feature (98)..(99): n is a, c, g, or t
  misc_feature (122)..(122): n is a, c, g, or t
  misc_feature (130)..(130): n is a, c, g, or t
  misc_feature (153)..(153): n is a, c, g, or t
  misc_feature (158)..(158): n is a, c, g, or t
  misc_feature (170)..(170): n is a, c, g, or t
  misc_feature (172)..(172): n is a, c, g, or t
  misc_feature (174)..(174): n is a, c, g, or t
  misc_feature (177)..(178): n is a, c, g, or t
  misc_feature (188)..(188): n is a, c, g, or t
  misc_feature (201)..(202): n is a, c, g, or t
  misc_feature (206)..(206): n is a, c, g, or t
  misc_feature (211)..(211): n is a, c, g, or t
  misc_feature (215)..(215): n is a, c, g, or t
  misc_feature (217)..(217): n is a, c, g, or t
  misc_feature (224)..(224): n is a, c, g, or t
  misc_feature (235)..(235): n is a, c, g, or t
  misc_feature (258)..(259): n is a, c, g, or t
  misc_feature (263)..(265): n is a, c, g, or t
  misc_feature (281)..(281): n is a, c, g, or t
  misc_feature (283)..(283): n is a, c, g, or t
  misc_feature (295)..(295): n is a, c, g, or t
  misc_feature (305)..(305): n is a, c, g, or t
  misc_feature (318)..(318): n is a, c, g, or t
  misc_feature (324)..(324): n is a, c, g, or t
  misc_feature (331)..(331): n is a, c, g, or t
  misc_feature (352)..(352): n is a, c, g, or t
  misc_feature (370)..(370): n is a, c, g, or t
  misc_feature (372)..(372): n is a, c, g, or t
  misc_feature (454)..(454): n is a, c, g, or t
  misc_feature (465)..(465): n is a, c, g, or t
  misc_feature (496)..(496): n is a, c, g, or t
  misc_feature (697)..(697): n is a, c, g, or t
  misc_feature (720)..(720): n is a, c, g, or t
  misc_feature (724)..(724): n is a, c, g, or t
  misc_feature (766)..(766): n is a, c, g, or t
  misc_feature (772)..(772): n is a, c, g, or t
  misc_feature (830)..(830): n is a, c, g, or t
aagtttatttgttacctaagtagttttacagcataattctataatttgtcactaatggnagatttatctaagccatacaaaagtcgtttaatggaaanntcccagttatttaaacgttttcntataaggnacatgatgcacactatgggatcnatgcntcatcttcaaantntnggnnggtgtattantttctcatatttnntgtnttatntaantnttttttncaacctatcancttctgagattctgaagagttannattnnngtctaatgatgacaancngcctcacctatntctccccccngccaggccacccncctacnccccgcngactgagcccccctgactcangggcaggcctcgaccccncnacactggcctcatgcattactctaaatcaaagccttcgatatacatgactcaggatcaggaataacagagaagttctcagcnggctccatgtnctctctactgtacctgacaacagtataagcnacaactcaagtgaattaccggaccaaaattatgataacagaaaaactcattaaaagctctttaaagcaaaaatctcaacttaagtgaaaaatgtttaatattcttctttggaactgtaaatgacctttcatttaattttctaagattttaacctgaacttggacaagaaagaaagggaaaaggaaaaataatttgtattanatttgccttttcatatttcagtnagcncctagatgtttcagtaaataattcttactgccttttctccantgtgtncaaacatcacaaaatgcttaattatctacacgtatcaaactgtaaagcagccccagtnccaccatccgt

SEQ ID NO: 489740 - DNA, 407 bp, Homo sapiens
  misc_feature (39)..(39): n is a, c, g, or t
cctgggtcgtaaagaataggggcaagcacaggcacattnggggtcaattttgttaattttctctacttatctatcttatctatctatctatctatgtatctatctatctatcatctatctatctaaaaggagacaggatctcactctgttgcccaggctggagtgcagtggcatgatcacagctcacggcagcctcaaactcctgggcttaagcaatcctcctgccccagcctctggagtagctgggattgcaggtgtgcgccaccatgcccaggtaattgttgtatttttagtggagacagggtttcaccatgttggtcaggctggtttcaaactcctgacctcaaatgatctgcccacctcgacctcccaaagtgctgggattacaggtgcgagccaccgcacct

SEQ ID NO: 489741 - DNA, 1700 bp, Homo sapiens
tcaggctcctggaaaggaccgtccacccctccgcgctggcggatgtggacgcggaactcagcggagtaaacgcgattgagagcagtgtgtggattacactatcactggaaaaactacgaacttgacgcaacgaacggaaacagactggaacgactgcagacccttgcgttcctgattagatggaacacactgtacaggtcccagacaactggaacacacgaaaactgaaataaactcagcacgttatgacggcagagcactaagagaactatggacaacaatcaggtgactgatcccacgaaagtgaactcgacagggaagcaagagcactgcatgagatgcaagacgcaggcgggctctcctgcacggcaggcgacgctaccagccgcgagagacgataacagatggccactcgcaggcactcaccgcctgaccacccgcagtgacgacccccagacatacaaggacacacggacgaagacgagacaaacaacaacaacattccatgagcaccacacccaccctgccgcactcgcgctggactgcaaggcataacgcacgactgccgcgagcctagccatggcggaagataccatacgccgacgacaacaaaccacataatgagcgcgacacgacaccgcatgccactagaagcattacacaaccccagcacgcgcaccaacgcgagagccaccagaggactgaaaacgcaagataccatgtccagcgaacagacctacaccgggcaccacactaccgcggaaaacagcgaaacaccgaacacaacggagcaaaaaaaagcgaacagagaacaatgaaaccccaaggacacccgaccgaacaacacaaacacatcacagaactacacaccccaaacacgccagggatacgcaccacccaggccacggccaaatagacacgcgaacagcacccacctggcaacacagcgacactaacacaagagaacaccaccaacagcgacaaaccacaagccgcaacgcagccgcaaacctcggcgagcacaacccgagcccggcggcaccacaaactcacggaggaacacagaccaacacaacacgcacgcgagaccacgaaaaaccgcgcacaagacacccagcgaaccagccacggccccccgcccaccaccaccgacgaaacacaccacacacacgagccgaacgagacatcatgtccgccagacgagccacaacagcggacaatcgccaactgcacgccagcagacacatacaacacgacgcaccccaacgacgaaaagcggcgaaaacacaagcccaagcccaccatccacgacaaagacacaagaccaagatacacacgaaagaacgcgacggatgggacgggcaggccgcacgacggcgcccgtagaagggacgcgtgcaagcagtgcgcacagaccggagggcgacgacagcgggagggagagcagaaggcagacgagacggccacggagcggaagcagcacaagagagggacggcgtgaagaggcaaacagaccggagccagggaaggaaagcagccgcagatgacgcgagaaccgcgggggcggcgcagacgcgcggacgaccggacgcgcgagcgcgcagggagcgggcgcgaaggcgagacggagaggagacagacgaggcccagagccatcaccagccaacgaaaagggagagagacagcgagggagagagcga

SEQ ID NO: 489742 - DNA, 113 bp, Homo sapiens
tgtggatagacatgggccttcggcaggaagaaggagacatactttgcagttctgataaaacagctatgaatctggcaccactactccctctattgtccacgggtagcgggctg

SEQ ID NO: 489743 - DNA, 1196 bp, Homo sapiens
  misc_feature (43)..(44): n is a, c, g, or t
  misc_feature (48)..(48): n is a, c, g, or t
  misc_feature (50)..(52): n is a, c, g, or t
  misc_feature (57)..(58): n is a, c, g, or t
acaaaaaaaaacaacaaacacagaaggcaaaactagctaggtnnagcntnnnttttnntcggcggccgggaagatggcggacattcagactgagcgtgcctaccaaaagcagccgaccatctttcaaaacaagaagagggtcctgctgggagaaactggcaaggagaagctcccgcggtactacaagaacatcggtctgggcttcaagacacccaaggaggctattgagggcacctacattgacaagaaatgccccttcactggtaatgtgtccattcgagggcggatcctctctggcgtggtgaccaagatgaagatgcagaggaccattgtcatccgccgagactatctgcactacatccgcaagtacaaccgcttcgagaagcgccacaagaacatgtctgtacacctgtccccctgcttcagggacgtccagatcggtgacatcgtcacagtgggcgagtgccggcctctgagcaagacagtgcgcttcaacgtgctcaaggtcaccaaggctgccggcaccaagaagcagttccagaagttctgaggctggacatcggcccgctccccacaatgaaataaagttattttctcattcccagaaaaaaaaaaaaaaaaaaaaaaaaaacaaaaaaaaaaaaaaaaaaaaaaacaaaaagaaaaaaaaagagagcgagggaaacaaaacagaagagagacagggaacaacggcgcaacagagagacacgacaacaacaagaaagagacaacgagagggaacaataacgaggccacacataaagagcgaaacacaaaaccaaaaaacaacagatcaacagcgaaaaaataaagcggcgacaaagaacgagtacaagacaaaagacgaaagcgagagagaaaagagaaagaagtaaaaacaggcgagaaataaaatccagagcgaaagtggacgataaaacacaaaaaccaaaagagcagggaagaagagcgaaagagcacacaacaagacaagaggaggaaagcaggaaaacagaagaagaaggagacacagccggcgacacatacaacagccgacaacaacaccgcaaactcccgcgcgacacagacacaagacaaggaaaacaacagagaggcaggcgcagagaaagaaaaaagaagcagaaggagagaagagagaagaaggcaagcgggcccggcagacgagacaagagaaa

SEQ ID NO: 489744 - DNA, 246 bp, Homo sapiens
ctgtgtgtggaggttgcagactgctgtttatgaattgtggaggcgtcccacaataaggagtcttaagaaggagtattgtgctgcttgctcaagcgtgtgcttgactcctggaaactgcctgctccctctcccagaacagctagtttggggctggggagctcacgcgaaagaggtttccaggatgcagattaagtcatgcaggcctttaccggcgttgatgtggctcatgtttcaggcagacttggg

SEQ ID NO: 489745 - DNA, 1271 bp, Homo sapiens
tcgagatagagtctgtgctctgtcgcccaggctggagtgcagcggcacaatctgtggctcacgtgtgtgacctttggcctcccgggttcaaggggattctccgtgcctcagccgcccaagtagctgggacttacaggtatgcgtcaccacgccgtggcatacttctggagactttcaactagacgacagggctttcaccagtgttgggccagggctagctcatattaactcttattatttggagacgggagcctggactcggatcattccaggccggaagtgcagttggacacgactctggggcctcgataacaacccatcggacttccacaggggttcaagttgattactcccttggccttacagccgtcacttggagatacgcttggggttaaacagggggcgccgcgccaaccattgggcccagcttagaattctacggtcactcttacaaaggtacagacacacccggggcgttctcacccattggtgggcgacaaaggcctggggatcactcagaaggcatcctcatagaacgccttccagagtagaacatctggccaccggcactatcgcgggaccctattcgccccagatgcgaatacctgggggagactttacaaccattgtggccatattagagcgccccaacatcattttcggagcgggacataacttcaaaacctggcatcggggtgcaccccccaagaagatctatttgtgggccattacttataccaagaacgctcacaacttgttggcaacaatagacaaaacggtagggcccctatattaacaccagtatcgattcgacatgtatcacccacatctctatatacgatatccgtatggcacagaaaagcgggcatagcgtcatccctcaccaagaccagttccgcttgggtgtacccccccccccccgaagggtggcctctgcgcgacacgtagttcgcacacatgatatagtcacaggcggcccggaaacacttccaccagtgggccatcgaacagcggggacaaacgagcactagcccagcgacgccatcaccccaaaggaggctatttacacacagcgcaacaaatcttgcgtgtgccacactacaacaggacacttcacccccggaacagatacaacgccgcgtggggcgaacccctacaaacaggacgggacaagcccctacaacccaaaaaaacgaagagagcaccgtgtgcgacacaaaacattatactagcagggggacgagctgagctgacgaggatacagcacacca

SEQ ID NO: 489746 - DNA, 604 bp, Homo sapiens
  misc_feature (43)..(44): n is a, c, g, or t
  misc_feature (48)..(48): n is a, c, g, or t
  misc_feature (50)..(52): n is a, c, g, or t
  misc_feature (57)..(58): n is a, c, g, or t
acaaaaaaaaacaacaaacacagaaggcaaaactagctaggtnnagcntnnnttttnntcggcggccgggaagatggcggacattcagactgagcgtgcctaccaaaagcagccgaccatctttcaaaacaagaagagggtcctgctgggagaaactggcaaggagaagctcccgcggtactacaagaacatcggtctgggcttcaagacacccaaggaggctattgagggcacctacattgacaagaaatgccccttcactggtaatgtgtccattcgagggcggatcctctctggcgtggtgaccaagatgaagatgcagaggaccattgtcatccgccgagactatctgcactacatccgcaagtacaaccgcttcgagaagcgccacaagaacatgtctgtacacctgtccccctgcttcagggacgtccagatcggtgacatcgtcacagtgggcgagtgccggcctctgagcaagacagtgcgcttcaacgtgctcaaggtcaccaaggctgccggcaccaagaagcagttccagaagttctgaggctggacatcggcccgctccccacaatgaaataaagttattttctcattccca

SEQ ID NO: 489747 - DNA, 1232 bp, Homo sapiens
  misc_feature (43)..(44): n is a, c, g, or t
  misc_feature (48)..(48): n is a, c, g, or t
  misc_feature (50)..(52): n is a, c, g, or t
  misc_feature (57)..(58): n is a, c, g, or t
  misc_feature (506)..(506): n is a, c, g, or t
  misc_feature (514)..(514): n is a, c, g, or t
  misc_feature (517)..(517): n is a, c, g, or t
  misc_feature (521)..(521): n is a, c, g, or t
  misc_feature (529)..(529): n is a, c, g, or t
acaaaaaaaaacaacaaacacagaaggcaaaactagctaggtnnagcntnnnttttnntcggcggccgggaagatggcggacattcagactgagcgtgcctaccaaaagcagccgaccatctttcaaaacaagaagagggtcctgctgggagaaactggcaaggagaagctcccgcggtactacaagaacatcggtctgggcttcaagacacccaaggaggctattgagggcacctacattgacaagaaatgccccttcactggtaatgtgtccattcgagggcggatcctctctggcgtggtgaccaagatgaagatgcagaggaccattgtcatccgccgagactatctgcactacatccgcaagtacaaccgcttcgagaagcgccacaagaacatgtctgtacacctgtccccctgcttcagggacgtccagatcggtgacatcgtcacagtgggcgagtgccggcctctgagcaagacagtgcgcttcaacgtgctcaagntcaccaangcngccngcaccaanaagcagttccaggtcaccaaggctgccggcaccaagaagcagttccagaagttctgaggctggacatcggcccgctccccacaatgaaataaagttattttctcattcccagaaaaaaaaaaaaaaaaaaaaaaaaaacaaaaaaaaaaaaaaaaaaaaaaacaaaaagaaaaaaaaagagagcgagggaaacaaaacagaagagagacagggaacaacggcgcaacagagagacacgacaacaacaagaaagagacaacgagagggaacaataacgaggccacacataaagagcgaaacacaaaaccaaaaaacaacagatcaacagcgaaaaaataaagcggcgacaaagaacgagtacaagacaaaagacgaaagcgagagagaaaagagaaagaagtaaaaacaggcgagaaataaaatccagagcgaaagtggacgataaaacacaaaaaccaaaagagcagggaagaagagcgaaagagcacacaacaagacaagaggaggaaagcaggaaaacagaagaagaaggagacacagccggcgacacatacaacagccgacaacaacaccgcaaactcccgcgcgacacagacacaagacaaggaaaacaacagagaggcaggcgcagagaaagaaaaaagaagcagaaggagagaagagagaagaaggcaagcgggcccggcagacgagacaagagaaa

SEQ ID NO: 489748 - DNA, 971 bp, Homo sapiens
  misc_feature (43)..(44): n is a, c, g, or t
  misc_feature (48)..(48): n is a, c, g, or t
  misc_feature (50)..(52): n is a, c, g, or t
  misc_feature (57)..(58): n is a, c, g, or t
acaaaaaaaaacaacaaacacagaaggcaaaactagctaggtnnagcntnnnttttnntcggcggccgggaagatggcggacattcagactgagcgtgcctaccaaaagcagccgaccatctttcaaaacaagaagagggtcctgctgggagaaactggcaaggagaagctcccgcggtactacaagaacatcggtctgggcttcaagacacccaaggaggctattgagggcacctacattgacaagaaatgccccttcactggtaatgtgtccattcgagggcggatcctctctggcgtggtgaccaagatgaagatgcagaggaccattgtcatccgccgagactatctgcactacatccgcaagtacaaccgcttcgagaagcgccacaagaacatgtctgtacacctgtccccctgcttcagggacgtccagatcggtgacatcgtcacagtgggcgagtgccggcctctgagcaagacagtgcgcttcaacgtgctcaaggtcaccaatggactggcccggcaacacaaagacaagcaatgttaccatgaaagtaacatagagagatggacacatcggtgcccgaaataccacaacaaatgagaataaaagtttaatagtacctcaatacccccacaagcaaagcagaaaaacaaaacagaaaaacagggcaaatcaaatagataagggcaatggaagcagaaaacagagtggatactatgaaaagagcaatctggtgtagacacagcgaccacccagaccgaacgcagtgaccagcagaccaacaggtggcccaaatgcaggcgccgcccccaatatgagaggacgccgcgaacaaaaacgagaaaaactgcacagaggcaaaaacgggcaatacggatcagcgccaaaaggaaacagaccaaaccaacagcaccaaccaatcaagagcgctaaagaagaagcgcagcataacccgagaaaacca

SEQ ID NO: 489749 - DNA, 290 bp, Homo sapiens
tagtcaggctcggtacctgtcagacgctgaactatgtgcactacatccgcaagtacaaccgcttcgagaagcgccacaagaacatgtctgtacacctgtccccctgcttcagggacgtccagatcggtgacatcgtcacagtgggcgagtgccggcctctgagcaagacagtgcgcttcaacgtgctcaaggtcaccaaggctgccggcaccaagaagcagttccagaagttctgaggctggacatcggcccgctccccacaatgaaataaagttattttctcattccca

SEQ ID NO: 489750 - DNA, 270 bp, Homo sapiens
ggtttctaaggcacaagtagggtgggggacagtcaaatggtagcctggcctccctctctctttgatagaactgggtgctcctggctgggcttagcttgaaacacaagcgaaaaagaaagaagccattcttccccaaactccaagtggagacaccacagggagttcagcccccctcctaaagccaccatgcctccctccctgagcacagtgctcagtgaaaaggctagccagcctttccagaccctctccataggcagtgacgttcctcat

SEQ ID NO: 489751 - DNA, 1388 bp, Homo sapiens
taagaaaaatcttatatatctctcagaaaaaaaaaaacccccaaaaaccaaagagttttcccacccaaacgagggggagggcaaaggggaagagggggcgaggggttggtggaccactccagcgccgcgggccccagagcccgagggggtttggggccagccaccaaagaggggtatagtggggcatagagggcccccacaaaacaataaagcagggtagtggggagcgtgtgtatatgtggggagagcgaaagaggggcggtggcacaagccgggcggcgaagacgcggaagaacaggggaagagtgacaaaaacagcgaaggtccaccagcagggagaaaacagcccgagagagagcgaggcggcggacccatattcatcaaaaacaattctactctagggggagacacacaaaaacccccacggtggagaacccaactctctctctttggcgcacacaatactaaccagcgaaaaaagagagagaacgttggagcacgcaagctcatgcgcgggagaacagcgtaggacaaatttgagacaggcgtggtgagcgcgcccccacacgcagggagaggaacactgtgtgagaacaaaaaagaatctcccaggtgcaaaaaaatctcccacacatcctgtgaaccccatacaaggaatcccccggagaaatcacccgacaaaaatcttttatatgggcccccccaaaagagtgtggcatccaccccacaattataaaggtaacacacaagtgtgtaacgcgcgagtatatagtggccacacccgcagtgcaccccacgacatacaaccgtgagatgtaaaatggattggaaacaaacacggattccccccgggggacacagcggcgaccccaaagcaacgagacgggacaaaaacccccgaagaaagtacaaaaaaacaaggaggaccgaaaaccggggagtccctcggagacaggataggccaaaatacagagggcccccaaacacacatgatggtcgtgccgcgaaacgtccccacaaaaaactaaaaaaaagcggacggaatagcacgaggactcgacaccagacaccgctgcgaccgcagagggcacccacagcggagaccaagcggggaacagaaagcccccgaacgcgcggactttacaagagggcccgagaaaacaccctccggggccaggagcctacaaaaggactctctggtaacaatctgccaacaaagtttacaaaagcgggtagaacctcgcaaatcctatctcccgatatctcggaatcccaatacgacgatctatagcagcatatgctagcgcccctctgactaagcgacatgattgcattgtgtattgctgcagttttcttactttgtctacacctcaaagcaaccacgagca

SEQ ID NO: 489752 - DNA, 174 bp, Homo sapiens
tatactactggagaactctctgtgctagtaaccacgtactcctgatcaaatatcactctcctaggtgcaggactcaacatactagtcacagccctatactaccctctacatatttaccacaacgcaataggagctcactcacccaccacattaacaacataaaaccctcattca

SEQ ID NO: 489753 - DNA, 158 bp, Homo sapiens
  misc_feature (145)..(145): n is a, c, g, or t
tcggcgtaccatataggtgggacgatctcagaacttccccttggatgctgtgatctccagagactcgattagcttttatatttatgtagttgcaaatctggtaactcatggatacttccttggcttggtggcttggaagggcagntatcaaatatatg

SEQ ID NO: 489754 - DNA, 109 bp, Homo sapiens
gctcatgtctgcgcttctggcttctgcttcctgtctgcccagtgggggtgagggggatcctcttttcagactcacaaccctgtagtttatacactttccgcttcctgct

SEQ ID NO: 489755 - DNA, 605 bp, Homo sapiens
  misc_feature (1)..(1): n is a, c, g, or t
ntgagatagacggatatgcatctgtgctcgcaccatagctctagatacttgttcagtgctcattggcaggaagcacaatcctagcgttgacgtcacagtcaagttctccatgagtcgcatatgcctaggaagccatggataaaggctaagtgtacacacgtgtggccttgatgtctataggatctcagtattactgcctgtacgaccctagtacctacagtctgtgttcggaaagacctttatataggcatccaataggcactctgccagcacatttccgctaccttccatctgttatcagtttaagctctcgcttggactctttaagttggagcacattccccttcactgtgtcacctgccctacgagagggtagtgcagggcatgtagccagacataccgttgtagttggtagcattcagcatggagtggaggtgcgggctggtgcagtcctgagtcagaactctctcgctgtccagtcagccgtgctgctaggcaaggtgcatcgtggtatttcctcgaaagtcctgtagctcaggatcacagtctgctctcagaagtgcagcagcaattcctgcatggtcggcgatcacatcccagtgtag

SEQ ID NO: 489756 - DNA, 285 bp, Homo sapiens
gctataatccacatcagatcagaataccttaccagttacaaaacattataataaatcttgtcatatctatgtctgtaaacccattctttgttgatagcctccacatttatatgttttagtcattgtagctgtgtgtcttacctatgacattatttttatatcccttcatttgtggatcttaagatgttgcagaaggttcattcctgtaccccaatacagattcacttcctttagctgccttttctagcaccaatatgctttaaaaaaaaatgcgcaaacaacaag

SEQ ID NO: 489757 - DNA, 123 bp, Homo sapiens
aagggcaggattcagaaagacacgtacatagagaatagagaagctcatactccaggaaagcgccaggagctaggtcaccaagatacgagcacatacctaggaatagccctgtaagccacctgc

SEQ ID NO: 489758 - DNA, 900 bp, Homo sapiens
taaatcatgaggttatccgcggatatagcggtcgcatgctgtggtctagtattaaatattacacctagatgcggtcgatgcaaaactgtcgctctgttaatcatcgagtttcacacttgtggccgactatgcctttgatgtgggtgttgaagtctaggaggtgtaagttagctgttgtttcctttatgatcactgcaagattgctgatgcctgacatgcgaggatagagtgaaagggtgggaagtcattggaatgcgattgtaacacatcattactcctggtggttcatgcaattctcctgtggtaaatactccgtgagatcgctgggactatagggatatgcgataggagagcctaatttattgtatattataagttaggagagggtgtttgcaacatgtttgaccgggtgagtgggcctcgatctactatcacatcgtgaccacgaccgtgagttggtctcccaaatgtgcacggcggttcctggcgtgagacattggggcctgagatgatagggtcctttgcaaatcgatgaaagacactgagatagcccaaatttcaggcctaggtaacgcctaagaaatcggggaaccggaagattggcgcccgaagccaggcggagccaattcggtgcaacgtctgcccggcacggaagcggagcacgaactcgggcagcgcaccaaccgacttggagactcggaggttccgactgcccgtctacaccaccccccaaattgcgccgtccggcgccaaaaaacacgggatacacgggggcccgccgcccgaatgtggagaccacaacatacacaccaccgcgcagcggcaacacgagagggaacacaccgacaacagcccccccaacgaccccaccggcacacagccgcaacgccaggacgcaaa

SEQ ID NO: 489759 - DNA, 159 bp, Homo sapiens
cgaatgtccccttgaggctctgaaaatctgtccgaatagaaaagcttcgttgctgagcctctcgagaaaaagctggttgttgggaatcgcagtacgtgttttttttcgaattccttggcgttttccaccagtttttgaattactggagagattttttca

SEQ ID NO: 489760 - DNA, 103 bp, Homo sapiens
aagcagacaccaggcaagacgcgcgaaagcgggaagagactgttacctattggccatcggtgagcgaacgacgagcgcagcgaagctaggagcgaggaagcgg

SEQ ID NO: 489761 - DNA, 128 bp, Homo sapiens
  misc_feature (91)..(91): n is a, c, g, or t
tcgagctcgtaccgagatgggagactcccaggtttctgacttaagcaacttgtggctggtggtgccattcacagtggtggcgattcaaggnaaaggacttggtgtcgttggggagaaaagctttggtt

SEQ ID NO: 489762 - DNA, 423 bp, Homo sapiens
ctatgcctgcctcaaagggactgcgttatgcggaacacaaacgaggtcctggtacctcgaggctcttgcccaagtgtttctgagcgggcttgtgatatgcacgtggccgacatgctggttaaggtgaacgcacttatcaaggatcgggaaggttatgctcctgggacagaattccaccggtgcaacgagatgtctgaatactggaggactctgtggccgcaactttacctgtttccaggacaccctcccacatgatgtcacctccccatgatccacgccaagtggaagccactggaccacaggagagtgagagtttggaaggtgtccaaatttaatgtagacattatcttttggctctgaagaagcaaacatgactagagacgcacctgcgtgcagtgtccagaagcgggctgtgcgttcccc

SEQ ID NO: 489763 - DNA, 107 bp, Homo sapiens
gcgtcccatcaggggattttatacattgacctcttgtggttataaaatagcagtgaacgacgtgtcacaaatgacgctggtttgatgggactgatgggagaagactg

SEQ ID NO: 489764 - DNA, 192 bp, Homo sapiens
ggtcatccaaggattagtgttcctttgtttagagggggtatactggtggctccccggcatgacccctcaaaaacgaaggggagatgttgcaatgagccatgggagcgccagactggcaaggcttctttggcagtctgagaacctcaggtcccccagtgcctggcggtgctggccgggcaggagcgggctgac

SEQ ID NO: 489765 - DNA, 161 bp, Homo sapiens
gtttcaccgtgttagccaggatgtctcgatctcctgacctcgtgatctgcccgccttggctcccaaattgctgggattacaggtgtgagccaccgtgcccagccgcttctttaagtcaagtaaacatgctgagattcaagcccttttcttcctccagtctc

SEQ ID NO: 489766 - DNA, 100 bp, Homo sapiens
gatccaggcgagtcttacacacaggaaacaagtgtctgcaaagcccaggggtgtgtttccctctgcgtacagtgttatctgagtaactatctagaaaata

SEQ ID NO: 489767 - DNA, 136 bp, Homo sapiens
gtgaggagctgtacagcatacctaacaggcagatccctaacaggacgctcctaaccagacaggaaacttttgacgctgggctgcaggccttccagcaggaaggcattgccaacatcactggcctccaaagatcagc

SEQ ID NO: 489768 - DNA, 526 bp, Homo sapiens
ccatgtgggccaggcgtggtcctgaactcctgacctcaggtgatccacccacctcggctcccaaaaggctgggattacaggtgtgatccaccgcgcccaggcgggttgcccatttttatagttatttctggatagtatgctaaccaaggggtggattattcatgcctcccctttttagacaatatagggtaactttctgacgttgccatggcattggtaaactgtcatagtgctggtgggagtgtagcagtgaggacaaccagaggttactctcgtggccatcttgattggggtgggttttagccggcttctttactgtaacccgtttggtcagcaaggtctttatgacctgtaccttgtgctgacctcctgtctcatcctgtgacttagaatgccttaaccatctgggaatgcagcccactaggtttcagccttattttacccagctcctattcaagatggaatggctctggttcatacgcctctgacgcttggaaggggtgtgggtgtcagctcgcccatggga

SEQ ID NO: 489769 - DNA, 322 bp, Homo sapiens
ttaatccctttggccctccccctatcctttttttttcaaacctgggtgaggggacccacccttttcccctgaaagtggccgatgccaagggtgagagtgaccccgaccggccccctgtggggggtgaaacctggggggttcctttagtgatgggggtgggtagaattgctgaatccgcccatcaaggcctttttcctggggtccccttccccggggatgggcagagcccgatgggatggcccgcttttaaaataatcgggaaacccccatgccctgggctggcttttttaattttttaataaaatggccttttttccaatta

SEQ ID NO: 489770 - DNA, 351 bp, Homo sapiens
  misc_feature (216)..(216): n is a, c, g, or t
  misc_feature (240)..(240): n is a, c, g, or t
agaaatgataggaataagagtgagctgttttaaaaagcttattaaaatgaatttaaggctaggtgtagtgggttatatttataattttaatactttgggaggttaaggaaggaggattgtttgaggtcaggagtttgagactggcttaggtagcaaagtgagaccctgtctttgaaaaaatagacaaaattagctgggggtggtggagtcactacntgtagtcctagttacttggtaggntgaggtgggagcatcacttgagcccaggaggtcgaggatgcagtgagcgaagttcgcaccactgaactccagcctgggtgacagagccagaacctgtctcaaaaaaaaaaa

SEQ ID NO: 489771 - DNA, 133 bp, Homo sapiens
agatggccgtttctagaggctccacctcatgggcgagctgtgcgaggagaaaaaagatgaaggttctcctaaattttacgacacataagagaaatatcaattaaatataacttgtgggcttagaatcataatt

SEQ ID NO: 489772 - DNA, 416 bp, Homo sapiens
aaccccacgatcactggggacaggagaaactttgcccaagatgacccctgtgtggggcagctgagcagccgtggagcctcagggagcagcacggtctgaggtggcacagctggtgaaagaatgatgctcgagttgctgcaactgaagctctgccccaggggtgcttggagatttcgaagggatgcattctgagccgagaatgtccactttgctgccgtgggggaaggacacattgtactccaccgccctgtagctcaggtagactaccttctgctgccggtcctgcattcctcctccgctgcggtgtccataggggaatgagagacgcaggtggggatgggcaccctcactgcttccctggaccttggtttcgttggggttccgtgcagagatgcccctggcctctcctcctccct

SEQ ID NO: 489773 - DNA, 466 bp, Homo sapiens
  misc_feature (173)..(173): n is a, c, g, or t
  misc_feature (181)..(181): n is a, c, g, or t
  misc_feature (209)..(209): n is a, c, g, or t
  misc_feature (212)..(212): n is a, c, g, or t
  misc_feature (221)..(221): n is a, c, g, or t
  misc_feature (252)..(252): n is a, c, g, or t
gtgtctagaatcctttggggcctttccccgatcatcctctggcaatatgcctgtatctctgtgaaagctacatgaacagttctgtagcagagatcacaatgttgttgagcagcaacagatggtgaaatgtgacctcgccatgtaaatacatggttgctgctgttgtaccgtgntgacgtgnttcccaaagatgtcaatgctgccattgncancatcaagancaagcgtaccatccagtttgtggattggtgncccactggcttcaaggttggcatcaactaccagcctcccactgtggtgcctggtggagacctggccaaggtacagagagctgtgtgcatgctgagcaacaccacagccattgctgaggcctgggctcgcctggagcacaagtttgacctgatgtatgccaaacgtggctttgtgcactgggacgttggggaggggatggaggaaggtgagtttt

SEQ ID NO: 489774 - DNA, 550 bp, Homo sapiens
gaactcctgaagttgtacttgtgtataattgcccgcgtcgtgcatagcgcaaagaacggattaggctgttttcttcttgtaaagctactgtatgcctcagctactgagtgtaaggtgtgtcaggctctagttgtacgaacgcaatacttgtccgagttttgcttgcatcgcttttctccggtgtttgtactacacacctcgtgcattgtggaactccgatgacagaaaacggtgccatccctgaaccacggcttggccactggcgtatacttgctggacaaccgcaacgaagcgaattataacgactaagatccttgggctactggtgtttagatcgttatcgttcccttcttctaacgttgcccttttttcctggttgtgggttaacttggcgttttcatcttgttgttgtcacgagtttaaaccggaactcgcaagctttcttgtcatttacttttgccggttgcggtctgtcaaattggccccttgccctgcgttttaaagtactataagcttgccttgggttgcgtcccctatcttgcgacttatg

SEQ ID NO: 489775 - DNA, 1477 bp, Homo sapiens
gtgctagtgatgaccaatatctgctgcgacggtgtcagagaccgattttaccactcggcgtgttctagaccaccttagaggctaggaatattccgcggcggccccacctattacaggagctactctgttggggcaccaagcggcgccccccaaagtgggtacaagggtccttttgattctccggaacacacgtggtggtgtccccacggggcataatagactcttcacccaccacagggggttgcttgctatgggcattccaaagcacttgtaggaagtcgtttgccccccgaccaagcccccccctggggggggctcctaacacatagttcccatccgaggccgttgtgtccatgggaacctactcaaaccctgcgggtttaacaaatcctccacggggcatataggtttcctgtaaagcaccttgttggggcctttttcccccctcgggagacaacgtgttcccccacttgatggggccaaatagaactctggagaggaaggccttttcttacacagttgtgaagaaaggtcaacacacgggggggaccccacacccatgttacgtggcttctccccccccgtaccccacagtgttccccgcgaaattggaaggggaaggaatcccgaagaagggggctttttcccgccctatatttctcggctgtgccacaggggaatattccaccacatttgcgcgcttccaacagttgacctttaaataccccaccagcgcccccaattttcgcggggaaaggcccacaacggagtttgatacaggagagattttcaccaagggagatgaaagcttctttttggcaccttttcctgagagacagcgctctataggacacactaactcttgttgaaaagacacaaaccccccttagggggagcctctccacgcccttgttctgtgcgcgccacttgagccccccacccctctgtgacacaccccccccacatctggggtgagaagccccccaccctcggggcccatagtgttcctcgaactaccctgggtgttcctctcctggctgtctcccctggggccttgggtagccgcctcttcacccaagataggccggaaagagaagctctgttctttcctttcttttaagggaagggctccaagagaggccacaagtcccacgagaaccccactggcgcacagctttcaaagcacccaaaggaaaagagaaattcacagagacccaccacgccacaagaccctccctcgagagggtttgttgggccttcttctggagagctgagagcaccacttgtggagcaccacggcttacacccctcttcgtggaacacggcgaggcttctggtgcttaactgcaccacgcctgagacacgaacacgtttctcggggccggcacgtgctgggcccttttaagctcccttggcacactttcccagctggcattttgccccttgaccaccagaataaaaattttagctgccccca

SEQ ID NO: 489776 - DNA, 262 bp, Homo sapiens
ccgtctgatagtcagacgagaagaccatgtcgtctctaaaaactctcaggctgggacagtgactcacgctatatactcccagcacttagggaggctgaggcaggcgtatcacttgaggccaggagttcaaaaccaggctgattaacatggcaaaaccccatctctaccagaaatacaaaaaattagcttggcgtgctagttgggcgcctgtagtcccagcagcttggtaggctgaggctggagaatggtgtgaaccctggag

SEQ ID NO: 489777 - DNA, 104 bp, Homo sapiens
  misc_feature (35)..(35): n is a, c, g, or t
  misc_feature (73)..(73): n is a, c, g, or t
  misc_feature (82)..(82): n is a, c, g, or t
tggtctcaatctgctcgacgttacccgaccacttnatcaacaacatcggcatcgttggggttgccctgctcgnatgcctcgngattttctgtgcgctgcggaag

SEQ ID NO: 489778 - DNA, 618 bp, Homo sapiens
  misc_feature (598)..(598): n is a, c, g, or t
ctagaggatccgccaggtagatttaattaaacgtaaaaagcttctgcacagcagagtaaacagaaaacctacagaatgggtgaaaatattgcaaactgtgcatctgacaaaggactaacatccagaatctacaaggaactcaaacaattcaaaaagaaaaaaagaacccctttaaaaagagggcaaaggacatgaacagacatttctctaaagacatacaaatggccaacaagcatatgtaaaaatgttccacatccctaatcatcagagaaaggcaaattaaaaccatgagacaccatcttatacccactggaatggcaattattaaaaagtcaaaaagcaaaagatgttggcaagaacgtagaaaaacgggaatgcttacatacactggtgggaatgtaaattaggatgtcctctatggaaaacagtatagagatctatcaaggaactaaaaatagaactaccattccatccagcaatcccactactgaatatatacttgaaggaaaaaaatcatcagaaagacacctgcactcatatgtttatcacagcactatccataatggcaaagatatggaataaacctaagtgtcatcantggatgatggataacaaaaa

SEQ ID NO: 489779 - DNA, 150 bp, Homo sapiens
gcactctgcctgataaagcatatgtgtatgttctaatactttacactttaagtggggtaggagggaggcttacaaaggaagtggctgctggtcccggcagggagcgatgagcgtccaagaaattgtgcgaagggcttataattgtgagca

SEQ ID NO: 489780 - DNA, 417 bp, Homo sapiens
  misc_feature (95)..(95): n is a, c, g, or t
  misc_feature (118)..(118): n is a, c, g, or t
  misc_feature (211)..(211): n is a, c, g, or t
  misc_feature (227)..(227): n is a, c, g, or t
  misc_feature (238)..(238): n is a, c, g, or t
  misc_feature (241)..(241): n is a, c, g, or t
  misc_feature (254)..(254): n is a, c, g, or t
  misc_feature (293)..(293): n is a, c, g, or t
  misc_feature (319)..(320): n is a, c, g, or t
  misc_feature (369)..(369): n is a, c, g, or t
  misc_feature (392)..(392): n is a, c, g, or t
  misc_feature (401)..(401): n is a, c, g, or t
tggagcccccccatggcttttttccaaggccggcccccaaacaggagccctttttttgaggtgcttttctggcgctatcctggcagcctcatccntaaggccctcggtttgttggggntggggccccccagagttcccccctaccctgcaaccccaggtggggacataatggagctttgagtggtggtggacagtgcccctccccccttcntttttccccccaacanaaaagaccagngantcccgcaaagggncaaggttcctccctttcctgcaaagtagggatttgggcnccaagaccttccctcaacaaaggacnntgagcccaacggagttttgggatgggaggggtgggagcatgggaagggnggcatcccccccccaaaaagaantgaataaanattgttgagcaaagga

SEQ ID NO: 489781 - DNA, 263 bp, Homo sapiens
aagggaaggggttgcctcaaaagtcacagcttagttgggcacagtggctcatgccgataatcccagcaattcagaaagctgaggcaggaggattacttgaggccagactgggcaatatagcaagaccccatctctaaaaaataggcatggtggtgcatgcctgtattcccagctactcaggaggttgaggtgggaggatcacttgagcccagaagttcaaggctgcaatgagccatgattacaccacggcactacaaccttgg

SEQ ID NO: 489782 - DNA, 308 bp, Homo sapiens
accaggcgagcgtccagacaggcgcagccacgggtctgaccagtgtcctagccatcggctgtgcttgtcattcagggagctcgattgatttgtagtatttcttctatttattctcacagcatactaagatgctaagaactgcttttgaaacagattcatgacatattaagatccacttttttcaagactaatcaagctctgagtttggcataggctcccagttccctctcatccttctctctgttcctgccactttgacatggcttgtttggcagacggactggcaagagcgtgggagtgatggcagg

SEQ ID NO: 489783 - DNA, 627 bp, Homo sapiens
aaaaaaaaaaaaaaaaaaaaaaaaaaaaaaaaaaaaaaaaaaaaaaaaaaaaaaaaaaaaaaaaaaaaaaaaaaaaaaaaaaaaagagagggggggcgcgccctaaaaattctctctctctctcggagggggccccatttccgcgctcccccacatttttttaaaaaaggggcgcctcattaatatgggatgtgttattatattatgaaaataaaggaggggtgggtgcgtatgttattataaaaacgaaatagtaggtggagggagaacaaatagtggcgcagcgatgggagactattgatggatagaaaagaagccatcttatatatgtgtggcgggcgggaggaacaaataagttgtggtggaaacatcattcttgtgtaggaagaatagttatatatagcagcagaattatagtgggaagagatatatataatattaatattatttaggaaggagagtgtatatatgtgggtgatgaaaaaaaaatcgcgtggatgtatattgtgtgatagtggtagcggagaagaaaaatattgtggagtcatattgagtgagattatattatttatttttatatacattattttttattatcgcgggggcgctaatgatataataatcggc

SEQ ID NO: 489784 - DNA, 123 bp, Homo sapiens
tccacgttctggcgacggtacgtcttactacctcactcaccccacctcgtgccgaccacccttttacacgtggacacctcctccacacggcacttctacaacacgactgttacacacacccta

SEQ ID NO: 489785 - DNA, 719 bp, Homo sapiens
  misc_feature (22)..(22): n is a, c, g, or t
  misc_feature (89)..(89): n is a, c, g, or t
  misc_feature (144)..(144): n is a, c, g, or t
  misc_feature (146)..(146): n is a, c, g, or t
  misc_feature (175)..(175): n is a, c, g, or t
  misc_feature (179)..(179): n is a, c, g, or t
  misc_feature (273)..(279): n is a, c, g, or t
  misc_feature (281)..(281): n is a, c, g, or t
  misc_feature (284)..(284): n is a, c, g, or t
  misc_feature (286)..(288): n is a, c, g, or t
  misc_feature (295)..(295): n is a, c, g, or t
  misc_feature (309)..(309): n is a, c, g, or t
  misc_feature (321)..(321): n is a, c, g, or t
  misc_feature (333)..(333): n is a, c, g, or t
  misc_feature (336)..(337): n is a, c, g, or t
  misc_feature (352)..(352): n is a, c, g, or t
  misc_feature (367)..(368): n is a, c, g, or t
  misc_feature (378)..(378): n is a, c, g, or t
  misc_feature (385)..(385): n is a, c, g, or t
  misc_feature (394)..(394): n is a, c, g, or t
  misc_feature (396)..(397): n is a, c, g, or t
  misc_feature (408)..(408): n is a, c, g, or t
  misc_feature (411)..(411): n is a, c, g, or t
  misc_feature (413)..(413): n is a, c, g, or t
  misc_feature (415)..(415): n is a, c, g, or t
  misc_feature (421)..(421): n is a, c, g, or t
  misc_feature (426)..(426): n is a, c, g, or t
  misc_feature (452)..(452): n is a, c, g, or t
  misc_feature (461)..(461): n is a, c, g, or t
  misc_feature (480)..(480): n is a, c, g, or t
  misc_feature (487)..(487): n is a, c, g, or t
  misc_feature (538)..(538): n is a, c, g, or t
  misc_feature (564)..(564): n is a, c, g, or t
  misc_feature (570)..(570): n is a, c, g, or t
  misc_feature (630)..(630): n is a, c, g, or t
  misc_feature (639)..(639): n is a, c, g, or t
  misc_feature (671)..(671): n is a, c, g, or t
cgccaaggcaagaaaatttttntagccttgggcctatcaggaatagcacaaaaaaggaaaaattaaggagcaaacacaaatgagaggancaaaattgggaaaaaaaaaaaaaaaaaaaaaaaaaaaaaaaaggggggagacaanangggaaaaacggaggaaggaaaggcaagcngccncctacccgcctggctgcagagagcggggacagaggccaagaggggcccaccagtcgccccccagcccagccagccaccctgagcaggccgggcnnnnnnngnggncnnngggacanccgtccggcccggnagacgggaacangggccactcccngannacaggaagccggacngtatgccaatctcannaagactaccnactaacncccccaatncnnaaataaacaanaanananaaatanctccnccataataaaactctcatggaaaaanggaaggccnggggcctcgagccgcctgncttcccngcatcacacgtcatcaaactacaaactcacgaggaagtcggcagccaaganctcacttcactcacacgcgaaacacncctggntgaccaggctctctgggaagcccagggccttcaacctctctatagcttctttctcctgcngcgtcaccnggatgtagtacaactgcagggcctcctctccnatggagcccacctccccctccacatctgaaaagtccgccagcacccca

SEQ ID NO: 489786 - DNA, 483 bp, Homo sapiens
  misc_feature (21)..(21): n is a, c, g, or t
  misc_feature (46)..(46): n is a, c, g, or t
  misc_feature (129)..(129): n is a, c, g, or t
  misc_feature (149)..(149): n is a, c, g, or t
  misc_feature (201)..(201): n is a, c, g, or t
  misc_feature (204)..(204): n is a, c, g, or t
  misc_feature (237)..(237): n is a, c, g, or t
  misc_feature (322)..(322): n is a, c, g, or t
  misc_feature (333)..(333): n is a, c, g, or t
attgtgggttctccccagatngatatttatgttagtaagattgagnccggtaaaagctttccacatcctcacattgtagggttttctccagatgaatatcttatgttagtaaggttgaggaccagtaangccttaccacatcttcacantgtaagaaactctctagtatgaatttcttatgttgagtaattgtgaagcatnccnaatgatttgcccggtttttacatttgaaaggtntctttccagtatgtcttatcttatttctatttacatttggaaatttatgaaagactttcacatatttatcacactgaaaatcttnctgtcagtagntgtcaaacactggtaagtccattataacctcctttgtacaccttacatgcatccacacttttatggtcttttcttagctgtaaattctcatgtccatattttccatatgttctcagtatcactttttgctcgtgccgaattcctgcagcc

SEQ ID NO: 489787 - DNA, 96 bp, Homo sapiens
agcggaggcagatttgcctgctgagggtggagacccacgagcggaggcctcctgcagtgttccgcacagcaaaccgcacgctatggctgacagccg

SEQ ID NO: 489788 - DNA, 787 bp, Homo sapiens
taggactattctctacaaaccacaaagacattggaacacgataccgtattattcggcgcatgagctggagtccgtagcgcacagcatctaagcctccttattcgagccgagctgggccagaccaggcaacacttctagagtaacagaccacatctacaacgattatcgttcacagcccatgcatttgtaataattcttcttcatagtaatacccatcataatcggaggctttggcaactgactagttcccctaataatcggtgcccccgaatatgtgcgtttcgccctgtcataaacaactataagcttctgactcttacgcttccctctctcctactcctgctcgcatctgctatagtggatggccggagcaggaactacgtgttgaatcagtcataccctcccttagcatggaactactcgcagcctgtgagcgctccgtagacctaacgcatcttctccttacacctaggcaggtgtctcctctagtcttaggggccatcagattgtcatcagcaacaattatcaagtatagaaaccgcccgtgagcatatcccgagataccaaaacgcccctcttcggtctgatccgtcctaatcagcagagagtccctacttctccgtatactctatccagtcactagactgctggcatcacctatactactagcagaccgtgacctcaacaacaacttcttcgaccccgacggaggaggagaccccatgtctataccaacagcctatagtgatttaccggtcacctgaagtttatattgcttatcctaaca

SEQ ID NO: 489789 - DNA, 257 bp, Homo sapiens
gggtgtctatggggctctcaccaaagccccagtgcccggagcccagaactccagccagagcagaagagatgtccaggctacagacacgagtattgaagaactgggtagagtcaagctcagttagtagagatgactcggccagggagtctaggggccgggagctgctctcaaaaaagattctggttccatctcccggccaaattttagtttttatttttttatttgaacttactaatcatgtaataaagtgaccagtg

SEQ ID NO: 489790 - DNA, 139 bp, Homo sapiens
  misc_feature (8)..(8): n is a, c, g, or t
  misc_feature (40)..(40): n is a, c, g, or t
  misc_feature (81)..(81): n is a, c, g, or t
  misc_feature (94)..(94): n is a, c, g, or t
ggatcacntgagcccagagttccagaccagcctgggtatnatggaggcccctcttacaaaaacgaaaaagccaggcatggngttgcaacgactngaaggctgaggtgggaggatcacctaacccagggaggttgaggct

SEQ ID NO: 489791 - DNA, 161 bp, Homo sapiens
tcggacaaagggggaaggccccccaaagggggaaggacccacaaagggggaaggacccacaaaagggaaagggcccacaaagggggacggccacaataagggggatggacccaccaagggggaaggcaccccaaaaggggatggaccccaaaagggggagg

SEQ ID NO: 489792 - DNA, 1458 bp, Homo sapiens
cgtggtggtgggtgcctgtaatcttagctaatcgggaggctgaggcagggagaaattgcttgaacccgggaggcgcgaggtgtgcagtgagccgagattgcgccattgtagctccggactgcgggaacagcgagtgaaacatcctctcgacgacatagcacgtagtaaacctgtatactcatcgtaacttgttgtgcgtacctttcgggacgtacaagacactgtgatgcacagcattgccgtggcggacgcctgggcccccaactcgaggtagcgtgagcactcgggccgaaaacgcgagggaccaaaagggcaaccccggtcgcgaccacccagaacaggggtgaggcctcaatctaccccgatcgaagagccgacccgcgggcagcggcgacgtaacacgaggcagaatgtgttcggctaaaccaccaagcacgcaataacaatcgagtcaacagagcccaagcaaccggacttccgtcaacacgcgagagcccagctcagatacaaccacaaggtgcgcctcggcctcaacccggagccgaaccgcaagcaagtgagtccgcccagtagccccccacgcacgagacacacgcgagggccacgcaacacagaacacaccaggccgcgaacatgagcacgggccaccccccaaaagcagaccaacccccacgaagagaaggcgagaaacacccggatcttctccgaaccccagacgtaacggcgcactagtgcgtccctcctgggggacccgcaggcacctacaaagcccacacccccctcaactccacgccgcccagcaacagcaggacccaccagccacccgcaggcaaaacaccggcccaaccggcaccaaagagaacaggcccacaacaccaccgaccaacccctgcgctcacccacgcaaaggacccgtcgcacgcacacaccggaggcctcacggctaaaccaaggcggccactggtccacaagcgacccagacggccaaagagccgcccgcaggcacaaccagcagacaactaaaccaccacgcacgccgcccacacagagcgcacccagtcacacacgcaccccagcgcaacagccacccgacccaggccccgcccacgcctgcccgaaaacgccaatctgagcacccacaccatatggcacgaccgacgaatatggaacctccgcaacagatcgcgcgcgagacgagtaatccaacacagacaggagacacaacaccaaggagggacaacacacgaaagtaaattcgccaccccaccaagtaggcgagacacaaaccacccccccgcaacatcccggcaaacagaagccaccgccctccacaacgcacaaaacagacggagcaccgcgggaccgaccaaaaacacaactcgagcccacgaccacccacagcagaggcaccacgcccaacctcccctagccagcaaaggcgacaaacaatcggacgag

SEQ ID NO: 489793 - DNA, 223 bp, Homo sapiens
aatccatctacacagatacaggggaccttactacagtatgactctcatgatactcatccaacatattaaaaagtaatataagctctatcatcaaaataatatcaaaatccaaacatatatagaagaatctactgttacacccgcatgatacgcactaccaacataatggggccttcttctacctcctatagcttatatcctattcccacagtgcgttggccta

SEQ ID NO: 489794 - DNA, 422 bp, Homo sapiens
  misc_feature (77)..(77): n is a, c, g, or t
tcccacgactaccgcagggacgagggggggtctaaggatgaactggctctgagaggagaagtggagcagcaccaggnagcttctgccagcccgattacatgtgaccaggggcgctaaggaaactgttcccttaatggcgagatgagagaattatggggtcccaccatccatgggaaatgaggggggatctgcagaggctggaggtgcagcctaagaggactgactcaaattcagctgttaaagattccccaaagcatctgagacaccatctggggtgcagcacaacagaagacgtttaagatgggaccagaaagaagaatgtatagctcttctctaaataaacgaatggtctgccccaagccttcaggaaggagaatggtctatggtgactggggaaagttctctttgcaggctaagagatc

SEQ ID NO: 489795 - DNA, 226 bp, Homo sapiens
tgactggacagaggggctgcgtttcagattcaagcctggattcatacccagtgcccggctgagcagtcctatgtaagcctcagtggaacagatagccaatcatgataccctccagcccagtctgttatttatttatatatttatttatgttgacacagggtctttctctgtctcccaggctggagtgcagtagtgccatcttggctcattgcaacacggtctctca

SEQ ID NO: 489796 - DNA, 568 bp, Homo sapiens
ggaagcaccagcggctgctgtggaccctggaatccctggtgactgggcgggctgttcgagaggttcgagacggggactgtccagctggcccaggcagctgctccactaccatgcaatccaggcatccacccaggaggaggcactggcaggctgggagcccatgggagtaattggcctcatcctgccacccgactattctccttccttgagatgatgtggaggatttgccctgtccctggctgtgggctgctgccggtggtggccctcgttgccccgctggcctccccaggcgccctcgtccttccttggcccagactggcgggggagctgggccccttcccggtgaatccttgagtgtgctcgagttggtcctgtcgtcccatggtgtcgcctatccttggcctctcgcaagacctggtaatccggacggtggccgttcctgcggagcgcccggtaggaagggcgtgcctcttcgacggagcctggcgggagagtgtgcggagctgggcctggggctggggacggagtcgctgtgtgctgctgcacgggacactgtggcaggtcactc

SEQ ID NO: 489797 - DNA, 217 bp, Homo sapiens
tgatgatactctcatagaagctataaatcagtgcagtctgggcaaattatttaagcttcattcaatccaagtttaagttagctcaaactttgactcagtaattccatttctaggagcttatgagtcgactgttgcacactgtgcacaaagcacatatgtacagtgaatgtttacagctagggtcttctcgtaaacaaattgtctatggtccaccaac

SEQ ID NO: 489798 - DNA, 923 bp, Homo sapiens
gtgcgtgccgctggagatgagagttcggagcccttgattgctgagtgcgtatatataccgttccctgggcaggacataggggctggcgaacgtgaagggcggaaacgtgagtccacgtcatgtgtgtggcagagacaccccttctgatgatcattttgacaagatatcctcaaaacgattggacggcatcatgactagtcgccatgaaaggagtgaccgagttaaagatgacgtggcaaccggagctgtttgaagcacgttgggtactgggtgggcccgaatcatgcagagaactgcggacatcttaacgaagtagtgagcaatttcaaacgggactgactgtcaccctgacctggctaaaggtggccccgaggcacggactgacccagatggccgtgagagggacagggcctctccaggtgtatgtaccaacgatgacgttgagacactccgtacgaagatgtacttgacgacgacgagccaagcagtgtgtcatgctatgcagacctggccctactggtgcacgccctgtgaagtgagaggttttacaggaagctgagtggcactatcatgggatcaacggtgctgggaggagcattctgggaacatgtccgtataccattcaatggataggactgcccaaatggagtgatgggggagactagttgcctagctgaacgtgtaagaaggtggaagagaagggatagtgaaagcgttgtgaagttgaagacgatctaactttgtcgaccactggtgatacaattaagtgaaaaaatcctgttgatactaggtagaattcctaatatataaattttcccttaaatcgtaagatttgaggtgaccaagtttaggtaaggtgagtcattttaatggcacagtgatttcgtaacaggtggttaagttcaagatattctataggtgcc

SEQ ID NO: 489799 - DNA, 372 bp, Homo sapiens
  misc_feature (231)..(231): n is a, c, g, or t
ccccctaatcccagtctgaattccaccctaaactaacctagatcctgcaaagacctcctatttccccaactaaagtcacattctgaggtttcagggtagacatgaagttttgggggacacccactcaaccccattgcagaaccccattagcagtcacttccccgttccctcaacgccccctacccccgggcaatcagtaatcctactttctgtctgtttggatttgtctantctgaacatttcatataaatggaatcatagaatatgtggtcttttgtgactggcttctttcacttaacatgttttcaagatttatgttgtagcatgaatcagtactttattactatttatggaataaaaatcagttgtatg

SEQ ID NO: 489800 - DNA, 1421 bp, Homo sapiens
ggagatcaagaggtttaaagtctaacttgctaagatatattagcataactatgtctatggtcatggtgggtcatctaaagccaagtctagtcattagaaagataagacatcaaacacgtgtagaatcgatccgcagaacagaaagagagagtcatgagtacagaggaatataagcgaggaggagccagcatgagaaaaggtataaggtaagatcaaaagaaaaagcgtgatccaccacacggcctcagacgaggaaccacacagcgagaacaccaccgcaaagactcaaggtaacgacaagccagcaaacgaacagccccgggaccaacaaacaccgccaaccacaccaacacaaccgccccccgaagcaccagactcaagccggaaccacgccccaccaaagacacaacacgcacaagacccaccaacgcacacgacagacccggaacacagcaaacaacacagaacacaccaacacacccagtccaccacaacacaccgcaggcaaacaccgggtcaccccacacccacaccacacacccgccacccacagacgcaaaccaaccaccaccaccagccgcccagaccccaaccccagacaaccagcacacacatcccaccgcacacacaccacagcggaaccaagcacacagaaacccacaccagagcaccaacacaaccacaccgccaaaaacgcacacccaaacaacacacacaacaacacaacaagaccaccacaccggctcagcccaccgcgggacaacacacgacaagaaccccaacacacacacgcccgcgcaaacaccccccccccaagacacgacaaacaaaacgcacagccgaagcacaacacggcacagggaaagcaccacacacacccgacaaaagacacaagagaacgcaacacaccccgagcgagcccggcacgacgcgagggaccgagcgaccaggagacgagccagcaaaggacgaccaccgcgcagcggaaggacggcaaggaaaaggggacacggagaggaggagaaagaaaagaagccgaagcagaaccgcacaagcccacgccgagaccagcggcgccgggcaccgagaagcagaccagccccagcaggccaccgcggcccaaagagcgaagaagcgcagacgccgcggggccaggcaaacgacgcacggacgagcagggacggcgagcggacgaacgacacagagaagaaagagcgaggcgacaccagacggcgagggccgagcagcgaagagcagacgaaaccgcccaagagcggcaaggcccaaggacagagaagcggcagcggaagcacgcaccgacaacaaagagcagccaaggcacgcagcaccaccgacaccgcacggagacgacacgcccacgacaagacgcggcgaccgacgcccaacacgacacagacagg

SEQ ID NO: 489801 - DNA, 1746 bp, Homo sapiens
  misc_feature (1011)..(1011): n is a, c, g, or t
tcgcgcaaggggttggccgccaaaacacaggtgtcgtgaaaactacccctataaaagccaaaatgtgggaaaggaaaagacctcattactcaacattgtgctcgctcattgggacacgttaaatttcgggcaagttccaccacttatcgggccactcgtgattctataaagtgcgggggcactcgacaaaagacaccttatgtgcaacaatattggcagaaagaggagagctgtgcgtgagagaagtgggacaagaggggctctccttctcagagtgttatgccccgtgggactcgtggggagaataaacacgtgcacaaagcgtgacacctgtttgcacacgtgtgggtctactccaacgcaatgtgaaaatatctctccctgtgtgtgtggggaacatgtgtgtgagagagcacagcgacaaaagtaataccctatgtgggtgacctctatctcattgtgtgtatgttgccccacaggagacacaacaagaagacgcttgtttctctcaaacaaacacatgtgacttcacgcagggggggagccactctctatcagagggactgttgacctgtggtgtggcgtggttacccctgtgaaactgatggctgtggccactagggcagtgcggagttgaatgaggggtgacaacatactgtgtagacaagcgctgtgggtatctactctctcgccaaaagcaacaatgtggtggtacaagataaccccacgaagaaaaggctatgtgccgcacttatgcggtgggggactattaacaccaccagcgtgtggcgggtgtgttgcacaaacacaaaactaaaaacatgtgtggcgtcagcgtgggtctatacaacccaacaaggtggggggtgcatatccccccaacgagttggaaggtcgacagcccactattaaaagaggctcgatagcagaagaacagcacatcatttgcaaggcgcaaacacgctgggtgctaacgcgggacatgctcaaggacaacctttatgcacaacntgcacaaggcaacaccagttgggggccgataaacaaaacccgccgcagcaacaacaatgattaagcgctaattgtgggttgtgccacaacatacacgtggaggtgtgggcacactggggcgtgaaaacaaacgcaatttgctgttggacaccccacaggggtggtgacaaaagtgcgccgtgagggactaacgagggacagggcaaaaggcatcccccgcggcaaaggacatgtggcaaacccgcgccgcgtgggaacaaccacacgccggtaattagagagccccatggaaagtggcagatcaccaaaaccaacaaaaagtggctgcacatgatgagaacagacgacgtgtaccccgaggccctcctacagggaggtgttcacaccaacaaggtgggggaattgaggcgacacggttcaactgtagggtcgcaactgtgcacatccgttggtgtattcacacccgcgagaatggagagcaacccatcagctaaacaacagataacaagaagcgcaaaaagtcgtacagaagcacgacaatcaatctagtatgaacactcgtcgaaagatgtggagtcaccaacgaatgtgtctcgatgactgtagcagcgtggcatgaaccacgccaccgacaggctgatcatatcaatcaaacaaccatgatatcgtgacgttcgtcgctccgcaccttgtcgcctcatctcgctcgtccttctgatcgatatgcgggggcat

SEQ ID NO: 489802 - DNA, 698 bp, Homo sapiens
atgccaagtgaagtgcgtgtatttcgataactgtgtacttctggtgactgtacagttgaaatactattttttatcaagttggtataaaaatgcagaatttgttttactcttttttttttttcttttaaaagcctatgctggattagcccacacaagaacaactctcaatgggtctgctcttatggggggaaaggcggcatactgctccactaactagcaagtgtcctcccaacacgcgtggcatttgcactgcctggaagaaaaaccacctcttcccatctccataactcctggcagcagacacctcccactcttgggcctcccagcgacgggaagaggcatcccgtgacctctcggaaacaacaacatgggcacaacctggggacacaccaaaaacgccctgggggggggtattacgaacaaaaccacaactctgggttctccatagggagcccttctactctcaccctgtcacgcaactatttcgcagcccaatacgaagctgtaaacgatccccgtttgaagcccagggaaacatcggctaggaggacccggggaaccccataaactacatggcgcttcacccaacgggggctcagggcaacaatcgggagaatcatacaacgcagaatgcacaacggcgaatggtccccgggtccaacaagaagcacggaggcgaccaactaccagaaaggcgg

SEQ ID NO: 489803 - DNA, 534 bp, Homo sapiens
actgctgcacttacattacagttgctatttgtgtgctaatggtggtgatggggggcagatataagaatatacatttgtatttgtttaaaaacattggaacaatatataagaaaaatggagtatgtatcagtcaggagacaaaaaccatggaaatctgaacagggaatctgaatagagacctcgaaagcaacactttccaacaggactttctgcaatgaaggatatgttctataactttactatccaatgtacctgtatggctatgaaacacttgaaatgtagctagtgcaactaagaaactgaatttttaattttacttcatgttaacttgtatttaaatagaagtgacacatttggcaagtggtcgccacattagatagagcagctccaaagaatacagacggagcagatgttgggagtagctgctgcctctaaggctgagtgtacccaaggaagggacaaggttaggagagtcctttccccaacccatcccaaggttgagatgcagacctcattggggagtgtgtggctata

SEQ ID NO: 489804 - DNA, 141 bp, Homo sapiens
atgctggtcagtgattatagggagagtcaggccatcagaggaatgaagtggctaagggtgctccagtcccaatagccacaagtgaattctgttgaacagggagttctagcatctcacagaccaagtggagcctcagtgatg

SEQ ID NO: 489805 - DNA, 1691 bp, Homo sapiens
tccccttggaccataaattttaattgggacaggtcatggaaaaaagccgggggttaagggttccctttccttctcccatctcccttcttacccagaaagacacccctccaaaggacagcaaaagccccagagcctgctgcctcagaggaccttggaggcagacaaattggtggtagtgactcttccgtgtcccctcgaagcagagcgtgcggatagggtggcaactcctcctgtgcctcacagccgcaacttgtggagtgctccagtgaacgcccgtgtggtataacctccgtgaatctacgtgccgctctcactatatcagctctcgcacattcgccccagctgtggtgattctcaatatcaccgatgtgaactcaggcgccccgtggaaatagtgacgccccaagacagtgagatctctcacaaaaaggcggcagcccactcacgaatatatcctgtgcccgagttgtgtgttgtctctctctcccaagagggacaggtatttcacaagatgacctcgagagcagtgtgatagagcagtgcaagactttcaaaactctctcaaaaagaacccactttgtaaaaggtgtgttggcccgcccgaacatgagtactccaagatataaacccctgcaggaacacgtggtgctacaattcagtgagaagccgttggcactacacgatgtagtgagccacaaggggagaacccctccacgcggggtattacaaaatatcattataccagctaccccggggcgtgtgggtttgaaaaccccaagggcctttaaaggacaaatcccattttacaccgagaataacagtggacacatcggggcgcaagttgaagccctctcaatatattgatgcgcagctacttcacgaccatgatttgttccaagagtccaagagagcaaatcctatgtgagagcgagaagaaagcacggtggaaaggcacccgaggaaagacgtgggataattcacacacctttctccaacagatctatggacacgtagtgtgcccaccccccaagtgttttgttgatgccccccctatcaaagaggacacaggaaatttcccccaccaccagcaaagaggggaccacacacatcacaagagataagacgcaacaggacactacacctacacagagagaccacttaggaaacaagtggagactctacccaggagataggacaccaagtagaccaagaggggataccaaacgaatacacacaagacaccccttgtacagagcagccacggaaaaaaaatactaacgacccaccagacgacaaagatgagaaaaaaagcagtagtagagcgcgacaacaaaacgtgtgtgtgagaacgagatctctgtgcggccacacaagcgggtatagtgacgcagcagtgaagaggacacagcggtgcggacttcaagagtgatggcaccacaaactgtatcgccagagcgataggtgagttacaaccaaagagaatgaagtgcaagacaagacgacaactcaagatatatagagaagcgtgaactaacataagaagcagctagactaaggcccaatagagacaggagagacgaaaggatagttaactgaacacgaagactgaccgtcaacattcaaatacgtaagcgccgaccgacttcacatacccatcacttctcatctaactaagtcgtaaggagaaggag

SEQ ID NO: 489806 - DNA, 199 bp, Homo sapiens
atttgtggaatgtactgtggaattagaaaaaacctgaatttagaggttcggcaaattcacaataacatgaaatggggtgggggaaatggatgacgggctcttttcagattaagcagaaaaaacttttcatgccccgagataacaccaaccctaacgccaaaaaatttatggcaggagaatcttcctattcctggagcgc

SEQ ID NO: 489807 - DNA, 101 bp, Homo sapiens
attcgtcagagcaaacacagatcgctcttagccctggagctgatgaatagctttgatttttggttaaaatttgtgagtccaccgctttctgatcaatcttg

SEQ ID NO: 489808 - DNA, 497 bp, Homo sapiens
  misc_feature (8)..(8): n is a, c, g, or t
tccccgcngccgcttaaactaggtaaccccggctgctgaccttcgggcgatttttgtcaatcccacactttttttataacaatgagaatcgggtacacctgcgatttcacattttcttttggtatcttaacattgagattaattccgacgcggcgcagttcttgtcgcacgatgtcgctacaccgagagtgcaggagggtgcgatcactccggcgtctgccacgatcattgtcgaatgatagcatacatgttttcaacgcgcctcgcgggttgacacgcgctcttgcgtcacatatttctaacgccgtgcccattttgtatataattgggcgacactagttggaccgaagtatctggtgaattgccataaaacccgatctgcggcgtgttgaggcagcatgagaaattggagagtctatcaactttgatacacccttttgggaaacacaaatatgtgcaaggtgacacctattttgtgaaaaccgtttgtggtgggg

SEQ ID NO: 489809 - DNA, 226 bp, Homo sapiens
tctttattatttaaattttttatttggattcgtggggatataatatggggatatatttatgccctatatggcatcttttgactcaggccccccatatgtaggaatttccttatgggtaataagggatccctcccctctagcctttattttttggattacccataggggaattatatgcttttattcctttttaaatgggccatttaattgtttttggctcccggga

SEQ ID NO: 489810 - DNA, 148 bp, Homo sapiens
  misc_feature (45)..(45): n is a, c, g, or t
  misc_feature (100)..(100): n is a, c, g, or t
  misc_feature (114)..(114): n is a, c, g, or t
  misc_feature (138)..(138): n is a, c, g, or t
tgcaggattcggcacgaggtttggtaaggcaaacacgaagatggncaagaacaaactcgtagggactccaaaccccagtactcctctgtccaacactgtncctcagttcatagncagagagccatatgagctcacagngcctgcactt

SEQ ID NO: 489811 - DNA, 1219 bp, Homo sapiens
tccaccagttgtcaaatgatcctttattggaaatgtttccctttgtgcttaactggcctgggcatttccacagcaccacgtggttgagtgtcatcgagtgattgtcagtgaggatgtgggggccatcaacatttacagcccacgtgacgtgggacagttccccgaggattctctttataagtggttccagaagaagtttctcgtggcctaaggatctcgggtgccgcatctctgtgtctcgagcaatgtgtgtgacaattcttcattcaaagggtgatttttcccacgtggtgtttaatgtgttttctcgtgttctcttctcgtgtcctctggggtggtctcctttgagaggcgctttgtgatgacttcaggggcaaaaagcgcgcaaaaggggccacaaccctctatcaaatgtcggtgggacctgtgatcgtgtctctgacatgtgcgctcagttttcactgtgtgtaatctccttcgaggccctttcacagttcaccccggtgtgcctgtttggcacatttgttcatctcacacaaccttttttcttgtggaagaacagagaccacaggggggggccagatctctttgtgggggcgccacggggcaagaaggtgttggcacccgacttttcactctcgcggtgccacctcgaggttatagcgatcttggcatctgcgtgggggggctcgaaccttcggacggctattggtggcaggccggtctggttgtccggaatgaacccggtattcgggaacgaccgaaaggggacacgtctttggcggaacccttaagtttcattaggaatttcgggggaaaggggggggccccggccccctttttttttttcatccatgtccattacaacctgcaggcgttacgtgtctacatcatcaatttattctttcctcatgcttctcatgccctataatctatatcataacgagatcacatacgagcacacaccaccccccacgcaatcaatagcaacatccacaaggaacccaagaaacgacacgacgggggggggggcagcctcaacatcccgccaccggccaacgaggagacaacggggcgatcgaacaaacaccccccccggagggtacaccacacggtggggcgccaccacaagaccccgcaaaaactacaccccagaaggcagggggagagccatactgcaccgcgcaggtacaaccaggcccccagcaagcgaatccgg

SEQ ID NO: 489812 - DNA, 182 bp, Homo sapiens
  misc_feature (116)..(116): n is a, c, g, or t
aaatggcatcattataagctatgagttgaaatgttctgtcaaatgtgtctcacatctacacgtggcttggaggcttttatggggccctgtccaggtaaaaaaaaaatggtatgtanagcttagatttccctattgtgacaaacccatggtgtgtttgtaataataaacccaaagacccttta

SEQ ID NO: 489813 - DNA, 352 bp, Homo sapiens
cacgagggcgacgatcagtggaagccggtggtcacccacatgcggatccgggctggattgaccgggcaggaggcaagagacatcctgcttttcctgcaggggagcaactgaaatgagggccttggcggcagtagcgatcggcgggttcctggacggtgttgggggaacggaccttgcggcaagccatggcaagtcggtctacgagcagacgtgcatcgcctgtcatggccgatgggaaggggtcggttcccggcgccccggatctgacgcgcaagagcggtcccctcgccaagccagacgacgttctcttcaagaatgtcaagaacggcttccagacgccgggatcgccgat

SEQ ID NO: 489814 - DNA, 428 bp, Homo sapiens
  misc_feature (92)..(92): n is a, c, g, or t
  misc_feature (112)..(112): n is a, c, g, or t
  misc_feature (115)..(116): n is a, c, g, or t
  misc_feature (122)..(123): n is a, c, g, or t
  misc_feature (128)..(128): n is a, c, g, or t
  misc_feature (134)..(135): n is a, c, g, or t
  misc_feature (138)..(138): n is a, c, g, or t
  misc_feature (141)..(141): n is a, c, g, or t
caggaaataaagaactttgttatcctctgtcttaaggcgccttgtaacagtcttcgacccagacggatacaatctagagtcagccatttgtnagccaggctagtctgtgctntgnntgtaanngagantgaacnntgntcncactgagagtgtcagctccttcccgtagagcaggcatgatgattgtactcacctctgacaccattgtgagtgccacattccttcccacgtccttgtcactgtaagagatgcccacctgagcaccaaccccaggttatcttcccctttgtcttccagccccccagaaacagctacgactcaacctacccaatcatttcatcatcagattgccactgtctctagttcaggtctcttggaactggcactcagaaatctcataataaatcctcttgaggcttctcatacac

SEQ ID NO: 489815 - DNA, 487 bp, Homo sapiens
  misc_feature (151)..(151): n is a, c, g, or t
  misc_feature (171)..(171): n is a, c, g, or t
  misc_feature (174)..(175): n is a, c, g, or t
  misc_feature (181)..(182): n is a, c, g, or t
  misc_feature (187)..(187): n is a, c, g, or t
  misc_feature (193)..(194): n is a, c, g, or t
  misc_feature (197)..(197): n is a, c, g, or t
  misc_feature (200)..(200): n is a, c, g, or t
tcatatgctccgtcccatataggtgggacgactgagatgatgcactcgagcacaggaaatcaaaaattcgtcaacctctgctcttagaggcgcctgatcacacggccttccgaggtcagtatgggtactaccttgcattagcccatttgtnagccaggctagtctgtgctntgnntgtaanngagantgaacnntgntcncactgagagtgtcagctccttcccgtagagcaggcatgatgattgtactcacctctgacaccattgtgagtgccacattccttcccacgtccttgtcactgtaagagatgcccacctgagcaccaaccccaggttatcttcccctttgtcttccagccccccagaaacagctacgactcaacctacccaatcatttcatcatcagattgccactgtctctagttcaggtctcttggaactggcactcagaaatctcataataaatcctcttgaggcttctcatacac

SEQ ID NO: 489816 - DNA, 454 bp, Homo sapiens
aaaaaaagggagatgggttttccacagttaccacgaggagataaaggccggacagctacgcttcacgacacttgcatatcctgtcctgtgacttgtagctaaaagcatcttaactgatccacaccagcccgccttccctcccaggccacccacactctcagcctcggtggacgtgtgctgctgtgtcaggaacgctccttcctgcagcacggcctcgaccccaggtgactcctgtggtcaccagctccctggtctcacagagagcttggtggccctctttactctctcccggatctgcttcctgaggcgccaacccaccattttacaacccactttctcaagcctcctacaccgctccttcctccttcagagcctgtggccggcctcggtctctcagcctggatgctgagcatgtaagaggaaatgaaaggaatctgccagaaccgtttcccac

SEQ ID NO: 489817 - DNA, 427 bp, Homo sapiens
ggcactgcttagaagaggccagtatcccaaagcatccagtaggcaacacagacataagtgtctccagcctggaaccagaaagtcacacctctctagaggtgtgggaaatcgagagaggaaaaaggcctggtggcctcacattctacttcatcaagcctacccgctgatcttaagagagaacacataaatgagccttggctttaacaccttctcaaagcaggcaagctcctgccttcaagaggcatgttctttagcccacatatggaggctccagtccccaggaccaatgtgtacattttctaaagcacactgactttggatggggctactgtttcccagcctgctgtgaaaaccaaaatactatgccatgactaccatggccattgttctaaaagctggattatggctttgctgtgggaaggagcgg

SEQ ID NO: 489818 - DNA, 381 bp, Homo sapiens
  misc_feature (30)..(30): n is a, c, g, or t
ccaggtggaggtagggccagtttggctcangcagctccacccccaggttcaaggattttccgcccagcctccgagaggtgggattcaggcatgtccccccccccggcaatttttgatttttggagagacgggggttcccccaggggggccgggctttttttgaacccctgcccccaggtaagggggtccccccccttggcttcccaaaggggtggaattacaggggtgagccccccgctcagctgacggggcccccctttagaacgggggttttttaggtcagcttcccattattgcccaggtaatttgcccttttaccagactaaaaaagaaaagctatatgccattttcaataaatcccttaaaaagttgggaaaatta

SEQ ID NO: 489819 - DNA, 155 bp, Homo sapiens
ggatgctgtgtctgagcggtaatgcagcatcaccgaacgcgaagaagtggagatgattcggccacctctggtggtcgcaggaaatggtgaccaagaacatgcccgaatcttgatacacaggggactctggtgctattgaaacttctaaaactagg

SEQ ID NO: 489820 - DNA, 116 bp, Homo sapiens
  misc_feature (41)..(41): n is a, c, g, or t
  misc_feature (70)..(70): n is a, c, g, or t
ttcttgaggtgttcctacttgtaagtgaggaagttgctccnactattttcaaaatgaccccaagttgaanaatgcccggtgttaagggcatcagtgggactcacaacatctccctg

SEQ ID NO: 489821 - DNA, 271 bp, Homo sapiens
ctcgataaggccaacacgaccactgcctccctgcccccacacctgcacccaaacagacacatcaacgcaccccactcacagacaccccttaccccacccccactgtgcagagaccaaccatgacacccatcaccaccaccaccacggtgaccccaaccccaacacccaccggcacacagaccccaacaacgacacccatcagcaccaccaccacggtgaccccaaccccaacacccaccggcacacagaccccaagatcgacacccatcac

SEQ ID NO: 489822 - DNA, 1568 bp, Homo sapiens
  misc_feature (1018)..(1018): n is a, c, g, or t
tgcatcgttagttttccgcctgccgactcggcccccgttatattggtttttgtgtgtggggcctacacaacgattggtgtgttttttgaggggcccgcctccgctccgtttgttctgtcgctgcgctagatgtgttgtcgcgcgccctgtcgtacatctcttggtgtagtggccgccttttgtagttgggatccccgtgggggggttggctctgtgggggtctgtgttgttgtgtgcaccaggtggacgcgcggggggaaggaaacccccagccggcctgtattgttggtagacttctctttgagggcttgtggggagacccacgctcctccgctgaccgttttttctctccctccctccccgatttttgttctggttcgccgtctcttgtgggagagaggtgggttacaggcgggcaaggttgttgagaaggggcgcccctgggcagtgctaggcacacccgcctggtggtttttggtttgttctccctgggttcacgtgagcgttcgcaccctctgtctcgtccaacgtggtggtgtcgttggcgtgtctttacgcccaagaccagagccttgctgtttgtgggcacttcgggtggcgccacgaccccagagggcaggaggggcctgtcgtggggacagctttcctccttgggggggaaggaccccccgcgaaagcgccagaaagaaccccctcgggacagtggtgtttcgtcccccccttgtgggggagaacacgtcccacacgaaataaggcgccccagaattaaagccgcgcgcctctggtgtctcagagacgttgtgagaaggaaaatcttgtttgaacactcttccacgcacaaaggtgtagaggccactctcccttcatagagtgtccccccacagtgtgccctcaccttcgcctctcctcgcgcacaagacccccaacgggatataacacgctctcgtgaaagacaccacagtggcccccacaaaaaacacacggcgtctcccacagaacgcccgccacagcacacagntttggggggagaaaagagagagagccccacagagaaggtatgtccccccttctcgctctcgctcagatctcgtggcgcgccggtctccccacgcgcctccgcccccacacatgtcctttgtgagagccccccacgtttctccacgcgtcacgcccctgtgttttctcctgggtgagagaggtctcctgcacggtcacatgggccccctgtggggaacccccaacagggcacaaggccccacatgggagagggaaagggagcacaacagggcacatcccttgggcgcacaacctgtcgcaccctcttctttgtccacacttaattcttcttccgctttccacccttctctgttttcacaaaggctccttcctatggagtggaatcgggtgctaggagcacaactgcacgtccacactccacccacggtcttccctggcccctgtgttttattttcacgagacacatgagaaataactcgtaccacgtgtaaaacttatttaagcgttctttaatggttgtagattggaaataaagtatgtcatatggacca

SEQ ID NO: 489823 - DNA, 175 bp, Homo sapiens
ctcgataaggccaacacgaccactgcctccctgcccccacacctgcacccaaacagacacatcaacgcaccccactcacagacaccccttaccccacctttacggtacagagtctcaagaacggtaacttgttatggaaaagatgaacgttattgagtatctagtaccctatact

SEQ ID NO: 489824 - DNA, 410 bp, Homo sapiens
cttacccatcgcacagcctatcgccccaggctggtatgacttgagtgggtgacggtggtgaccagtgtcgctgagctggcgcagatcactttgcggatcacggctcaatgccggcttggctggcaatgatctggctgaacatctgggcctggttgagtaacttgccgatcaacgccgctttgttgagcaacgaagttcttgctgctgggccttgaacgcggcgatcaactcgtcgcgcttactgtcgaagacggcaacttgctcgggctgggtcgcaatggcgtgcaggccctgcaagcgctccatcacactggcttccaaggcgctgatcctagtctccaggtctgctgcttttccggactggccgagggtggcattgatctctacctggttgtgcgattagggttagt

SEQ ID NO: 489825 - DNA, 374 bp, Homo sapiens
  misc_feature (24)..(24): n is a, c, g, or t
  misc_feature (45)..(45): n is a, c, g, or t
  misc_feature (85)..(87): n is a, c, g, or t
  misc_feature (111)..(111): n is a, c, g, or t
  misc_feature (137)..(137): n is a, c, g, or t
  misc_feature (143)..(143): n is a, c, g, or t
  misc_feature (172)..(172): n is a, c, g, or t
  misc_feature (177)..(177): n is a, c, g, or t
  misc_feature (232)..(232): n is a, c, g, or t
  misc_feature (239)..(239): n is a, c, g, or t
  misc_feature (300)..(300): n is a, c, g, or t
  misc_feature (311)..(311): n is a, c, g, or t
  misc_feature (324)..(324): n is a, c, g, or t
  misc_feature (339)..(339): n is a, c, g, or t
  misc_feature (347)..(347): n is a, c, g, or t
  misc_feature (349)..(349): n is a, c, g, or t
  misc_feature (354)..(354): n is a, c, g, or t
  misc_feature (369)..(371): n is a, c, g, or t
ccaagaagtgagagaagccccttntcctgcagtgcccctctaccncccccctactgacaaagaacatggtgctatatggcatggnnnaaatgttcagtttgctatggcttntattttcccctcaaattcaagtgttnccaatntgacagcatcaagaggtggggactttaanagatncaactaggccatgagggattctcttagggctgggatgaaggcccataataaaagnggtttcngggagcatcctgctagcttgccttctgtatgtgagaacacagcaagaaagccctagtcaanaagtgccagcnccttgatcttagncttcccatcctccanaactgtgngnaatanatttctgttccttannnatt

SEQ ID NO: 489826 - DNA, 155 bp, Homo sapiens
ctgcaattagtactgtagcacgaaaatagtccacacattgaaattaggactatattattttattttgggccacagttacttgaaacagaattaagtcacaactcaaaaatgactctaatgtgcatgtgcacttggcatgcaaaattttcaaacca

SEQ ID NO: 489827 - DNA, 1000 bp, Homo sapiens
  misc_feature (73)..(73): n is a, c, g, or t
  misc_feature (176)..(176): n is a, c, g, or t
  misc_feature (203)..(203): n is a, c, g, or t
  misc_feature (292)..(293): n is a, c, g, or t
  misc_feature (330)..(330): n is a, c, g, or t
  misc_feature (405)..(405): n is a, c, g, or t
  misc_feature (443)..(443): n is a, c, g, or t
  misc_feature (471)..(471): n is a, c, g, or t
  misc_feature (485)..(485): n is a, c, g, or t
  misc_feature (494)..(494): n is a, c, g, or t
  misc_feature (507)..(507): n is a, c, g, or t
  misc_feature (509)..(509): n is a, c, g, or t
  misc_feature (578)..(578): n is a, c, g, or t
  misc_feature (583)..(584): n is a, c, g, or t
  misc_feature (597)..(597): n is a, c, g, or t
  misc_feature (600)..(600): n is a, c, g, or t
  misc_feature (605)..(608): n is a, c, g, or t
  misc_feature (661)..(661): n is a, c, g, or t
  misc_feature (673)..(673): n is a, c, g, or t
  misc_feature (693)..(693): n is a, c, g, or t
  misc_feature (703)..(703): n is a, c, g, or t
  misc_feature (707)..(707): n is a, c, g, or t
  misc_feature (711)..(713): n is a, c, g, or t
  misc_feature (719)..(719): n is a, c, g, or t
  misc_feature (721)..(721): n is a, c, g, or t
  misc_feature (727)..(727): n is a, c, g, or t
  misc_feature (734)..(734): n is a, c, g, or t
  misc_feature (739)..(741): n is a, c, g, or t
  misc_feature (767)..(767): n is a, c, g, or t
  misc_feature (770)..(770): n is a, c, g, or t
  misc_feature (782)..(782): n is a, c, g, or t
  misc_feature (789)..(789): n is a, c, g, or t
  misc_feature (797)..(797): n is a, c, g, or t
  misc_feature (835)..(835): n is a, c, g, or t
  misc_feature (877)..(877): n is a, c, g, or t
  misc_feature (895)..(895): n is a, c, g, or t
  misc_feature (899)..(899): n is a, c, g, or t
  misc_feature (918)..(918): n is a, c, g, or t
  misc_feature (984)..(984): n is a, c, g, or t
gtataaacgtctgcctgacaaatgcaaatctattttctttatgtaactcaatagttccacttatctgaatggntgtaccttcatgcacacgggcagcaggcactgattgctcaaacagggaagtgaggcttcaccctagtgtggcttcaccttaggcacagagcactatctaactncccagatctgtgccacccacacaaganctggggacacagcagcagacaccgatgctgtctctaagttcatcacagggacagcttaaaatcagaataatagggaactgctgattaanncccaagtgcatgggcattctagaaagaagagcaagcngttccactctctgggaagttcatgggcttgcagtgggagtttaaggtatcatctttgctggaacagatggttaanaacaccaaactttttttttaaaaaaacgatactactgnctttagcagcaatcacaaacaaaggggntgataaacgagggntacatttcngtcacagcaaagnangattatgtgcttttccgtgctgcagaccggaagactgatttgatttcctgaatgaggaaggctccttgnccttnnctgaattgagggnatngcttnnnncagccaagggagaagacgggcaaagaggacatccggaggacagaggaaggtgnaaggaccgccanaggaaggtgacagaaaaganagggaagagncaantgtnnncagccncngtcaantgatgcntcatnnntctccctgcaggctgcagcaccagcngcnacagctacagcngtgagancaggctgnatccagatctgcaggcgggtgagcaggtggagcccagngaagagatgttcctgctgcaggcaattatgcaaagtgaagangtgattgctttccttttnaaanacaaccctattggaaaaanctttttcctccaggaccctagggaaatgggggttgatgggaactcagggccttcgtagatgaaaangcctgtattggcgcac

SEQ ID NO: 489828 - DNA, 253 bp, Homo sapiens
taactatcagaggactgctgtgagaaatgctaactcctgtgaaaacactgggcacagtctctgaaacacaagtgctccaaaaaaagcaaaaaaaggccaggtgcagtggctcacacctgtaatcccagtactttagggggccggaggtaggcacatcacttgaggccaggagttcaagaccagcccggccaacatggtgaaaccccatctccactaaaaatacaaaaaaaatggccaggcgtggtagcatgcg

SEQ ID NO: 489829 - DNA, 120 bp, Homo sapiens
gtgacggagtgccaaagtggaggagaccatcgccgtgcgatgcctggataagaatctccttgcagctgagaaccgagagctgaagctggtggctcccaccctgcggtctgaactcacggc

SEQ ID NO: 489830 - DNA, 197 bp, Homo sapiens
gggggggggggggggtttccccttttttttccccctttcgggggctgggggggccctttttttttcccccccggaaaaaaggatttgggaataaatttggtttttcccaaatttcctttggggggggtgggggtttttttaataaggccctttccggggttttgggggggccattaaacccctgggcccctccccca

SEQ ID NO: 489831 - DNA, 146 bp, Homo sapiens
gcagcacttggtggtgcctaagccattggcctggaccgttatcttcttgggctcgtttactcacaggtttgtgaccctcctatgttcttgcttaagcgacccttcggtgtcacttggccccaggagagacgggccaggttttatct

SEQ ID NO: 489832 - DNA, 160 bp, Homo sapiens
gggtcatctccagggggtggtcaaagtcccagcctggttacccttgaagaactttctctggggctgtgggggtgcagggccactaggctgaagtgggtttcatggaggtccatggccacatggcaaggtcgggaaacacgtcctggcccatgggcactgg

SEQ ID NO: 489833 - DNA, 750 bp, Homo sapiens
tgctgaaaagtggctgaaggtaagtggtatgcagagtaccttcttgggcttatgcaaaatggagatgatcctgctacagttctgggaagttggagaacgggcaaagcagagagccgacgaatcgggaacagcctggagaaattcttgccagcggtgccctttagccctcaccccagcaaattcaagccacaattgctgggtgcctccagctgcaagaaaggatgtgagattcgagtttggttctataaccgcagctatgatggagcagtcgaccaatccgaatgatgcgttccccacgggagattgtggggaacagccgggcctccttgcccaggagctaccacgtgtgctttcacctgggtctggggctccctagtggatatccccctactatactacgtctctactctgcaggggttgcccactcctctgcccctagccacctactctgggcctcctctagattttagggctgaggggcttgcccttcacggctacgcttggtagaggggagaagaagggataacccaggtatgtcctagggttcatttgagggcttttagatattaatttctcattcacgtataagaagattaaggatactatagtagagaatgggaataagaaattgattcaagaaaaacatgagagagaaagaatgaagatttattaaaaataatgatgattttcacaattgatatttaaataaaaatgaattccaacgggcaattacagtattatagagactga

SEQ ID NO: 489834 - DNA, 684 bp, Homo sapiens
agcgggcggcgaggcggcggcggcggccggggcggtccccgcggcgggaggagcccagccggggtctcgggccacaggagccggcgcgggctggacggagggagtcgctagtaaggagcgtcaatgagcctcccggcgcccgtcgctcagcgcgtccgatatcccctgggggcggcatgcaaggctgccgggccagaatcgggactcctagaaagaggggaggcagtacggatggaatgacagcgtggtgtcgtgaggtggatgctctgatagagagcttgatcggagatccttactagggaggtacctgaccctgtgagacggcgataggcaaggtcgacgtcttttcactacgtctgaagaaaggttgtccatgagtgagagcatcatggtgattatggtattgattccgagagagacctgattgacgtagtcgaccgttggcaggtggcgccggagccagggtggtgtaattgcccgtccgtgccaggaagacgtcatgaacggatggttgccccttgtgttggaaaacaaggacgtttctatgtgactcagacatgtattggacacgaaagaactcgcgtgtacgagcgccgaaggatattttcgactaaccgcactactgcgtggcggagagtgcccggtgaactaaggaggtgcaggaaactgaaagaacaacactgg

SEQ ID NO: 489835 - DNA, 109 bp, Homo sapiens
cagcggcttcgttctcgaaggcttggtcttgaggtgggggtcacttcgtctttggcgggtcgaaggtagatgcagtacccaaggaaaagggccccgcatacaccggcgg

SEQ ID NO: 489836 - DNA, 402 bp, Homo sapiens
aacttgtgcatcttactagtgtcctatggttaaacacgcatacacgtatttggtttaaaacagttaaacatatgcgatgacatcatatatactgattagcacttgataatctccccctcatgcaatagtatttggaccatcatttcatatcagcacatatgagagcaacctcattattgtctccaatggttgcacagatttacattgcctggatgtatcaaattatttaaccaggaacatttcacttctagtctttcactgttaaacaatgctggggaaacaaaaaaaccccttctatatgtgtcactggacccataagcaagagtactcttaaatacacctagaatatgacgtgctaggtcaccaaatatgtgcccttttctattacggaaaagctaaatc

SEQ ID NO: 489837 - DNA, 115 bp, Homo sapiens
cacaacggcgtgcggtggtgcgcgtgtggcaggccaacatcggcaagaccatcatcgcccatgtgccgatcaccaacggcgaagtgcaggagaccggtgatttcgaactcgacgg

SEQ ID NO: 489838 - DNA, 227 bp, Homo sapiens
gatcttcctgcctcagcctctcaaagtgctgggattacaggcgtgagcctttctgagcgttttttcatcatggaaaggatgtcaaattttgtcaaatgctttttgtgcatttattgagatgatgatatgttgtttatcttttatgctgttaatgtgacatatcacaattactgatttttgtatgttgaatcattcttgcatcccagggataaatctccttaatcatg

SEQ ID NO: 489839 - DNA, 274 bp, Homo sapiens
atcccgcgcgttgttgatgaggttatgatttgctctcagaatgtaccacggctggatgagaacactaaggagaaaagcaccggatgtaaagcctctattccggcatacatcttctccctcattttcatcttcaccatctacagatagagcagcatactttcttgcagaacttaatctctcgaagctggattttcctccggtttctttggctcaggtgccgactctcgcagtcttgatcctttttgccatctttcctatctcacaacgcgacttg

SEQ ID NO: 489840 - DNA, 396 bp, Homo sapiens
gctataatcagcaggcacagcatcctccagtgaaagtgagcccattcggggtggcatgtcactccctggaataaacaccacacttagaaacaaatgcatttcgtcaggatagcacagtgacatggtgcactgtgaaacctgaggccactgtgtcaaactgtgcactggttgtgacatagggagagccaaaaattatgtcctcactggtaatagagctttcaatgtgctcgatcctctcaccactgaagctctgtagagcaagctcagagccacaaacactcccaacattgacccttctgggggtagctgtctgtggcacccacagggcaagagctggagatccccattaggattgtccatccacacttgaaggcacaaaactgcagggattggggc

SEQ ID NO: 489841 - DNA, 1069 bp, Homo sapiens
ggacgagatgaagaataccagtgaccttcctgacaccgggtcgcatgtcgatgctgcctacggacagatacgatcccgggtcggcccgccaccagtcagtcctactgattgagtgcgatgaacaagcgcctgaagagtgcactagctgctggacagattaaaacggcgaatatggctgtatgtagagcaaatgcatgacaacaatggcattgaactgccgccagatatgtttcgctggcatacaacacatgtgcttgcttcgcatggactgcagacgtaactgcaggcagcttaggcatggtgccctcttacttgatgcaattgctgataaccatacgggtagcgcgcaaaagtggggaagagaagtgcgttacaaagctcgcagttcgtgagcgggacggcttgcaagtgcaatccaaatcgctctttcatactaaacatattggccgatggaatcgctcggttttagcacagcgatgacagaagttaagagcaaaagacagttcgatcgccttcgctcgaagacccttggttcccccaagtgccctccacggttgatgtcacacgcgtcgcctgctcgttgtattttttatcccgaaggaactaaaaacttcggcatggttatgcctctttcctttgaagctttaattccctcgtacagtccaaaggagtttgtaagccccaaaattggaaatctagtgaccccaacaaatagcaaagaccaatttctttcctaatcgcgatattcacatttgtgttagaggcaaatcctgcacggtttcgggagggtcgtgataccgccttgcaacgaatggaatgttccaccatttggttggagtcacctctttgggtatgacggaaatggtggcgtacggggcgtaaagcatctgtgaagggccaaaattccgaactatgagttttttccggcacacatggaggctgtttagcggaatatgtaccgaattccggcgttttttttctggccaaaaccatattggcctaagttaaatgcgctttttgcgcttaaaggaaaagaaacgcagaaacgctctgcgttggtaacaattgg

SEQ ID NO: 489842 - DNA, 946 bp, Homo sapiens
  misc_feature (419)..(419): n is a, c, g, or t
  misc_feature (546)..(546): n is a, c, g, or t
agagttaggcgagaggtaaagggaagcattaagttttgcatggaagatcactttaggagatccttggtttagattttcggtcttgaatggactacagtagatgcagaacttgagtgatatatagaagtctgaatagacgttgtcgagacttgcttggcagaatgaagatctaacagaggaagacctttctttgaaagagaatgctcgcaagatattacagatattaagaattcagcaaatataaagaaagagaatgagaattaaaatgcaatcaacaattgttgggagcaacttaaggagcaggaagatcaaagatttgttagcacttctcagtgttgggagaggtggaggacgaaatgatgaaacgttgatcatgggtctcatggcgtgtcccaatgagagagaagtcatgtgtgccnatgcagaagaagagggggagtgtgtctatatcttgcttctcattgtaatagacatatacgcgccagtgagaggagtaagcgcttaagattgatttttgtggaacatggatcgagagagagtgcgtcntttttcgaggggggagacatgaagcggagaggtttatcttagtcaaagagagtgtgtctcgctgtggagtgacagggaggaaatgacacactttgttgcatgttttcggtgggggggtgtaaccgggttgattaagggaacttggaaacaggaagaaaaagaagtttgggtttaaaaaaacccttgtgcggtaaacccacataaggccccaacattcttggggggaaccaaaggcgaggtttttttaaaacccaaacacaattgaccttggcaagcaaccaggggaaaaggattggggcccaggccaacactttcttggaacttgggattgggccaaggtctgggtgtaccggtcttctcatttccgcctttttcttgttaggcagattaagggtcattg

SEQ ID NO: 489843 - DNA, 176 bp, Homo sapiens
actcctgactcttgtgtggaagatgacaaggacgcgcttggtgcaaattctgttgtatgcgctgcgggggcaacccgcttggatgagatactcatacgaggaacgtcaggtctttttcctaaagcaaatccgtgtaaacttgagacaacataaacctatagggagatcttgacaca

SEQ ID NO: 489844 - DNA, 377 bp, Homo sapiens
  misc_feature (24)..(24): n is a, c, g, or t
  misc_feature (32)..(32): n is a, c, g, or t
  misc_feature (109)..(109): n is a, c, g, or t
ccgaggatacgggaataagacccntcctggancaggggaggtgaccaaacgatactaatatttgatctagaaagttaatgtgccagaatactgcacacagtggctcacncctgtaatcccgcgctttgagaggttgaggagggaggatcactgaagtgagaagtttgagacctcctgggcaacatagcaagactctgtctctacaaaaaaattaaaattggccaggcatggtcttgcttgcctgtaatgccagctgcttgggagactgagcctagaagttggaggaggattgcttgagcccaggagtttgaggctgcagtgagctatgattgcgccactgtactgcatcctgggcaacagagtgacaacctgtcttt

SEQ ID NO: 489845 - DNA, 120 bp, Homo sapiens
  misc_feature (62)..(62): n is a, c, g, or t
  misc_feature (66)..(66): n is a, c, g, or t
  misc_feature (87)..(87): n is a, c, g, or t
ccaaggcctggctaagtcgcgagccaggtttaaccgttgcgtcaccgggacccgaagccccncgantcctgggggccgtgctcactnccaaatgttaataaagcccgcgtctgtgccaaa

SEQ ID NO: 489846 - DNA, 338 bp, Homo sapiens
  misc_feature (25)..(25): n is a, c, g, or t
  misc_feature (212)..(212): n is a, c, g, or t
cctcatagtctcgttagttaagaanaagagatttaaggaaataatagtatagaggaaagagttgagagatagaagagaataggagaactgggaaaagacttagctgcacatacggtgatgtgagagcctgtcacaatattaaacgagaggcactaagagaaataaatatttacagtccagcctaatgccttaactctttactccccataaancccttatgtggtcaggtgctgcagctcacgcctgtaatcccagctctttgggaggcctaggcaggagaatcacttgagaccaggagttgaggagcagcctggacaacatagcaagaccccatctct

SEQ ID NO: 489847 - DNA, 190 bp, Homo sapiens
ccaattttttttgggggccgggccccccaaaaccttgggggaagaaattaaacggggggggggggggggggttttgggggggaaaaccacaaaaggggcccccctttttttttttttccccatttttttaaaaaaaaggaaactttgggggaagcccccccccctttttaaaaaaggaaaaaagggggta

SEQ ID NO: 489848 - DNA, 549 bp, Homo sapiens
agcggcttttctggtcaaaatggctggtcacacgcacgtgccgttctcagcatcaggcaacgtgcgcgtggcatcctattacaaaatggctattacaatgctgcaggattcaactcctctggggttcctgcgagatgatacactagtacgaggatgcaagatgtagaaacgatagccataagaagacttcctgagaacctttataatgacaggatgtttcgcattgaagagggcactggatcctgaacttgaagcatcagatcttgcctaaagagcagtggaccaaatagtcaccgaggaagaatttctaccttgaatcgtatctgaacagaggttattcgggaacgctaacgacagagaagactgggccaagaacgtaatcatgtagttgaagtctgttggatgcagctgttctgaagcatggttgaaacttgatagacaatagcaaactttccaagacttaattctggtctgcacagatgtagccacgtattagaattacatgtctattgttactacctcagcatgcagggtactcccagcgcaggg

SEQ ID NO: 489849 - DNA, 478 bp, Homo sapiens
gctagtactcatgatccttgtagtacgctgatagttctatctgtcttttgttttttgggtccggagactcacactatcgccgggtggagtgcagtggtgcgatctcagttcattgcaacttctacctccctggttcaaatgattctcctgcctcaccctccggagtagctgggactacaggcatgcaccaccgtgcccaactaattttttggtatttttagtaaagatagggtttggccatgtgggccaggttagtctcaaactcctgacctcaagtgatccgtccatctcagcctcccaaagtgctgggattacaggcttgagccaccgtgcccagccagaatggctattactcaaagtaacaaaataacagatgctgatgaagctatagggacatggaaacacttataccctgttggtcgaaatgtaaatcagtttatccactgtggaacgcagttcagagatttctcaaagaact

SEQ ID NO: 489850 - DNA, 212 bp, Homo sapiens
  misc_feature (72)..(73): n is a, c, g, or t
  misc_feature (147)..(147): n is a, c, g, or t
gttgccatcgcgtctccgcctgcagcatctgtccgatctttcctgtttcccccactccattcccttcctatnnatcccacagccagaggaagtggatggcctccttgggcggccccacctttaccctaccccaggtgcagacatctngaggagagagtcggagagcagaaaccacttggctccagacaattccctacaggctttgggcctgg

SEQ ID NO: 489851 - DNA, 140 bp, Homo sapiens
agactgacgagtctgctcaggaattctctggatcctaggctcatctccacaggggtagaacacacagacagctagagaccatgggacccctctcagacccctccctgtcactcaggcacatcacctgagaatgggctcct

SEQ ID NO: 489852 - DNA, 247 bp, Homo sapiens
atctgcctacattgagtatcctcagtcccttcccaaataaacaccagcctgtcattagaacataaccactaattacaccttttataatacacaatatttttatgtaatggggaagcactaacaaatatcaataaccttttcctcagtgcctcatggtatcctaaatatagtatacaaaggtctcaatactaggcatacctatatttaacttaccttcaaaacaaccagtaaagaacaagttactaca

SEQ ID NO: 489853 - DNA, 903 bp, Homo sapiens
  misc_feature (903)..(903): n is a, c, g, or t
ggacgcggccaaagacagcacagacagattgacctattggggtgtttcgcgagtgtgagagggaagcgccgggctgtatttctagacctgcccttcgccgtggttcgtgggcgccttgtggacccccgggccccttgccggcctgcaagtcgggaaaatgtggcggctgtgcttcccttgtgcttaacggcttggtggggttgggaccgtgcctgggttggttgcccaaatgggctgggcaatgaatgaaagctctccccttgggtggccggggaatggcttggttgttgcgatacaagggcgggggggcggggcccgggagggaaggggaggggacacagaagggggaggcgacggttggggccaccggggtggtccgggcattcggacccttgggggagacccaaccctaaccttccttgaggtcaggggttgttccaagggacacgggcgccgggttggagaattcattcggcccaagggaattccaggggggcaaaccgcgggaatttcaaccgccggtccttaattgttgcggcctttacaacctctcgtggaaggggagagacccgttctggattgtggaccggactgctccggccaaaagaaaaacaaggttcatcttcaaaaaccccggagaaacaggggtctgggagaaggccagagcgggcttcaatcggggcggaacgttgagaatggacgccggctttggtggcaacgcggggaacatcaaggttcttcggtcggttccagggtgttgaaaagggaaacttaaaaccattaattcaacgtggatatgggggggtggcaaacaaaaggattttgtcttgaagaatttctgcatggttctcggtaacaaaaccacacagaaaaaaaaatgtggggggggggcacaggaaattn

SEQ ID NO: 489854 - DNA, 266 bp, Homo sapiens
tcgagcttggtacctcctgcctgggcataagagctagactctgtctcaataaaacaaaaaacaaagaaacaagaaacaaaaattgctgaccaggcccgggttttggtggctcatgcctgttagtcccagccactttggaaggctgaggcaaagggtttacttaagctcaggagtttgagatcattcagcctgggcacggtggcgaaactccgtctctacaaattttagccaggttgtggtggcgggttacttgtggccccagttcc

SEQ ID NO: 489855 - DNA, 531 bp, Homo sapiens
caacatgccctgagtcagataactaaaatacctcttagtctaggtagatactttcactggataggtagaggcctttcctacagggtctgagaaggccacggcagtcatttcttcccttctgtcagacacaattcctcagttaagccttcccacctcaatatagtctgataacagatgagcctttattagtcaaatcagccaaacagtttttcaagctcttagtattcagtgaaaccttcatatcccttacagtcctccatcttcaagaaaagtagaatggactgaagatcttttaaaaacacacctcaccaagctcagccaccaaaaaggactggactacacttttatcactttcccttctcagaattcaggcctgtcctcggaatgctgcaggtacagccatttaagctcctgtatagacgtccttttattaggcccagtctcattccagacaccagagcaacttggactgtgccccagaaaacttgtcatcctagtatcttctgtctagtcatactccattcacggtct

SEQ ID NO: 489856 - DNA, 137 bp, Homo sapiens
  misc_feature (24)..(24): n is a, c, g, or t
aagctcccaacaagagaaagtatntcattttacacaaaacagattcacatgtgccaaaaagaaagacccaaagaaacaaaaacaaaacctaatgctgacactgatggtccagtacccttgaaccagtgggcccaaag

SEQ ID NO: 489857 - DNA, 728 bp, Homo sapiens
tggcagattaaggcttgtttaatttaaatgggctgatctatgtaatcacagagtgccagtatgtccagacaaatgggggaggtttaatttctggtgtctcttccctccttgtggattaaaggctcttgtgatatgattctcccatcctttctgtgtgcctgtgggaggcggctcattataagggcagcatatgacgtgcattcctgtggtcttataggacctgtgggggccctcagcctgtggctcagcacaggagacttcttgtgacgtgggcactgtgggtgcgtagcctttctcacagcgctgtgtgcgtgagacagtggtgttctccgagtgggagaaactcccgacttgtgggtgtttgtgtgaaaacacacaattctccccctattcaacactattcgagtgatatacggaggcgtaggggaataacaagtggtgggcgaactcgacactcaatcacatatagaaatttcagggggaatacatctttcgtagagccaggccgtggcgcacaagaaactccattacatttcatcccttctactccagttgtgtgaccatttcttcgtgggcatctgcgggacagcgtggtcgtgtctcccccttatccaggcatataccctattgaccccaatgtgtgcccgtgcgcccaattcggagggggggcccaagggtgttatatactcgcgggcaaatagaagacccgcgggcaaagtgggcacggg

SEQ ID NO: 489858 - DNA, 277 bp, Homo sapiens
aaatactcaagtatttatgggtaaaaagaaaccatattcatgatttgctctcaaactatgcatatatatatataaaaattcccacacatccacagaatggaggacaatctggatgacagtatacaggaaatctttgtattatttttacaacttttctgtgagtctgaaattacactaaatttttttattttttacttttaaagtcagtcacatcatttcttaacctgcctcaagcccctcaataacttcccatctcactcaataaagtcctctgcct

SEQ ID NO: 489859 - DNA, 494 bp, Homo sapiens
  misc_feature (40)..(40): n is a, c, g, or t
  misc_feature (47)..(47): n is a, c, g, or t
  misc_feature (65)..(65): n is a, c, g, or t
  misc_feature (105)..(105): n is a, c, g, or t
aaatggagtattttaatcctgggcgaaccactgaaaaacnggacggnaaaaatatctctcccccnaacttttggaatagccagccatagtggcactgaagtcccnggagcccaagcagcccggttcaaattcccagcacccctgcttacctagcctatacaacttgggcaagttacttagtctctctgtgcctctcctcatctgtaaaataccatacagttgttgtaagaactaaattagttaatatgtataaagcatttagaaacagcactaggtgctgtatatgcccagttgttagtaacaatgttattataacaaaataaagttttccaaaagaacacatgataatgattcttagattgaagtttagatgctttgggaaaactttaatagggaataggaagttaaaacagcatatttgtccctctttccccacagtacccttcaaaataaagtaaaaggatataggttcaaatcctagtctaggaaaaaaa

SEQ ID NO: 489860 - DNA, 119 bp, Homo sapiens
ttaaactgtactaatggaaacactcatataatactcattttattgttaattaaagatactagttgttttacatttaagtggtacatttttgtcattgtattcccatagatagtggggta

SEQ ID NO: 489861 - DNA, 829 bp, Homo sapiens
  misc_feature (56)..(56): n is a, c, g, or t
  misc_feature (798)..(798): n is a, c, g, or t
  misc_feature (816)..(816): n is a, c, g, or t
  misc_feature (818)..(818): n is a, c, g, or t
  misc_feature (825)..(825): n is a, c, g, or t
gacaaatactctgaggctctcaaagatgcccaggagaagctggagctggcagaganaaaggccaccgatgctgaagccgagtagcttctctgaacagacgcatccagctggttgaggaagagttggatcgtgcccaggagcgtctggcaacagctttgcagaagctggaggaagctgagaaggcagcagatgagagtgagagaggcatgaaagtcattgagagtcgagcccaaaagatgaagaaaaaatggaaattcaggagatccaactgaaagaggcaaagcacattgctgaagatgccgaccgcaaatatgaagaggtggcccgtaagctggtcatcattgagagcgacctggaacgtgcagaggagcgggctgagctctcagaaggcaaatgtgccgagcttgaagaagaattgaaaactgtgacgaacaacttgaagtcactggaggctcaggctgagaagtactcgcagaaggaagacagatatgaggaagagatcaaggtcctttccgacaagctgaaggaggctgagactcgggctgagtttgcggagaggtcagtaactaaattggagaaaagcattgatgacttagaagacgagctgtacgctcagaaactgaagtacaaagccatcagcgaggagctggaccacgctctcaacgatatgacttccatataagtttctttgcttcagttctcccaagactccctcgtcgagctggatgtcccacctctctgagctctgcaggtggtctattctccagcgtgaccctggttctctctgcttagcatccntgccttagagccgggcanancactgtngctt

SEQ ID NO: 489862 - DNA, 174 bp, Homo sapiens
atgaactagaagcaagctgccctccacagagcggactgcaccatgcgcaggaatgtctcgactatgtccatgtcttcctgaagcagtagagcagcccgtagattcttgagcacatgcgtcatggattgtgcgagtattgggtcacaacttgactgtagagtctagcttgaagga

SEQ ID NO: 489863 - DNA, 898 bp, Homo sapiens
  misc_feature (124)..(124): n is a, c, g, or t
cgcaggcagcagccggcctctcccactgcagccctcccgcccgcctaccgtccggcgcgatggcggggagtagctcgctggaggcggtgcgcagcgaagatccggagcctgcaggagcaggcgnacgccgctgaggagcgcgcgggcaccctgcagcgcgagctggaaccacgagacggaagctgagggagaccgctgaacgcccgcccgctcaccttctctgaacagacgcatccagctggttgaggaagagttggatcgtgcccaggagcgtctggcaacagctttgcagaagctggaggaagctgagaaggcagcagatgagagtgagagaggcatgaaagtcattgagagtcgagcccaaaagatgaagaaaaaatggaaattcaggagatccaactgaaagaggcaaagcacattgctgaagatgccgaccgcaaatatgaagaggtggcccgtaagctggtcatcattgagagcgacctggaacgtgcagaggagcgggctgagctctcagaaggcaaatgtgccgagcttgaagaagaattgaaaactgtgacgaacaacttgaagtcactggaggctcaggctgagaagtactcgcagaaggaagacagatatgaggaagagatcaaggtcctttccgacaagctgaaggaggctgagactcgggctgagtttgcggagaggtcagtaactaaattggagaaaagcattgatgacttagaagagaaagtggctcatgccaaaagaagaaaaccttagtatgcatcagatgctggatcagactttactggagtaaacaacatgtgaaacctccttagctgcgaccacattctttcattttgttttgttttgttttgttttgtttttaacacctgcttacccttaaatgcat

SEQ ID NO: 489864 - DNA, 417 bp, Homo sapiens
gtatacgagtcacaccctgggctgagcagagcctttttgttagagagatctttgttacatatttgtttctgcatgccctgctttattaaaaaaaacttcagctaaaaataaatacaaaattaaaacttattaacacattgtagcaaaattaaatgtcattaaaagtaaaatgaggccaggcgtgcagtggctcacgcctgtaatcccagcactttggaaggccaaggttggcggatcacttgaggtcacttgagctcttctttggaggactttgagaccagcctggccaacatggtgaaaacccatctcactaaaaatgcagaagttagctgggtgtggtggcagatacctgtagtcctagctacttgggaggctgtggcaggagactcgcttgaacccaggaggtagaggtagtaa

SEQ ID NO: 489865 - DNA, 107 bp, Homo sapiens
aagatcccctcacagatgcgccgcatcgaatgcatcatttaccaccgcgatccgagcgctgattggcaggcagatagccctctgctgggggcacgcgggctccccgt

SEQ ID NO: 489866 - DNA, 335 bp, Homo sapiens
gcgcattgacccatgtgtgggtttctcatctgccgtcccttggagtgtgaattcttacgtgcaggaacactcagcatacacatcgtatgcgaagggcccagagaagccagacccagatacgaaaaaatagcctatttactttaattaaaccaaacattccattttaaatgtggggattgggaaccactagttcgggcagatggtattcttcagactatagaaggagcttccagttgaattcaccagtggacaaaatgaggaaaacaggttaacaagctttctctgtctttacatacaatgtcagatcagttatgggacaatagtattgtataaag

SEQ ID NO: 489867 - DNA, 614 bp, Homo sapiens
agactgcacacgggacgtgatggacggctcactatgcaatcgctgtgacttagaacaagatgtaagggacctgagctaagtatgtcagcagaccccccaaagcaaggactgtgagacaaatctggactcttgatcagatctgagtttatcattaatgtgtcacttgaatggagctttagaatcttgaaaatcgtgttccttactcagcagacacactcccacccacacccacagccacacatacattggggccctcagcctgaggtgccatccagccttatgtagggtcatggtacaagatcagactccatggcacacgattacaataggacagaagtgaaagtagtttttcttgtttatatattatcaagcaggcatctgatgacctgtggacattagaaataccagcaggcatttccaaggggtaggtgcacaggtcaccagaactcaactacagtgatcttcccttagatccttttctactgcaggtgaatagctcaaaagcacaaggcatgcctttcagtccaggctaaccccctgtagcctctaagcaattaacacagaagaaacggccttcctcccttcagcactggggacaccagtggccgagtgtt

SEQ ID NO: 489868 - DNA, 304 bp, Homo sapiens
tcccctttagtgtcaacgtgtagtatacaggtttgtgctatagaggacaagatgtcgtctgtgctgtggtccccgaggtcaaacagtgtttgtgacttccagaaagcttacaagctgactgaagaggaggccctggatgtcagcgaccactttccagttgaatttaaactacagtcttcaagggccttcaccaacagcacaacatctgtcactcttaggaagaaaacgaagagcaaacgctcctagaccctagggtctcatcttattaaccatttcttgcctctcaatgaaatgtctcttacag

SEQ ID NO: 489869 - DNA, 166 bp, Homo sapiens
ctcagtggccgtgtgttagcaagatatctaccattcgacataaaaataaggcaggcaacatagctttaacacaccattgatgtatgctattacacttttccagtggaagataacaaagcccatatcaaatttaacaacagaggaaaaactcgattttcagccactt

SEQ ID NO: 489870 - DNA, 139 bp, Homo sapiens
ataccgctgagtatcgcttcgaacagcagaactttgatcgctgagtaggctatcgtggggggattattgctccaccaaacattgctcagccattcgcggcggccattaacgtggtgggtgagcacagcctacggccgat

SEQ ID NO: 489871 - DNA, 1282 bp, Homo sapiens
ggataaagtatgatacgtagcggataaccgatgcgtcacttgctagagagtactaggatagtcgcgcacacgtcatgtcctccctattatgcctagaaggaataatagtatcgctgttcattatagctactctacataacgcctacaagcaaccagtccctgcatataaaccgattatgtgcctatggccattacgtagttctttggcgcgcgcgtgtcggaagcaggcgtgatggtgccatagtcgcgctactacgatcttcaattctccgaatgacatagtgtgcctagacctacggtaccataggcctataagctgactccgaatggtaggaaataatctgtcaccaacaatgaatattgacatagcaactagactatggactttccagaacggcacatgaatttcgaatcaaggagaagcacctcgaggagcctgaatttagtgagcatcgtcccgctactaattttctaaccaatatcaaacaagatactatgggagctgttccctgaatcctttaatccattccgtaacccttaaatagaacctcctcatcgctcaaatgacgtcacgtaaccttggactccctgctcgcgctacgacaatccatgggtggaagggcgaaacggccagacttggtcgcagttggaggccatctatctggggagaaatgaatttctagcgtctctcattactggatctccctaaggaatactcctgtaatgtggtggacatggcggagcaccagtagagagctaatgcatatgttaggatcttctatcgacaaccaagttaatggccgaagcttgggtatcatcaacccgatgagggcaaacgagcagaaccggcttgaacgcaggcactattactgtcctattgctaacaagcctaggttagggctccggttccccgtatggcatcgggacttagattgaacgtacaacaaaagcgcatagggatcagctaagcagtgctacaagttcagccactcactgtgggccaagaaactatcaaaactcctgaggccacaaatttaaatatggagtaaggttacacaaaaaggcggaagagagtaaagaaagccgttttacgggaccgcggatatgaatccgaaaaagccaagggcgaaagcccatcggtgggtacagagagctggccggaggacacctgaaaagcagggggacaggagaataaggcgtcaagcagacagcacacccgagaaaagagggcaacgctcgtggaaagcgtgagggaaacgaaccagcgcacgagcagaagaaa

SEQ ID NO: 489872 - DNA, 321 bp, Homo sapiens
acggttgaactaccctgacatggttcagctctgtatccacacccaaatctcatgtcaaattgtaattcccagtgttgcgggagggacctggatgggaggtgataggctcatgggggccgacttcccccttgctgttctcgtgatattgagtgagcgcttgtgggatctggttgtttaaaagcgtgcagccctcccacttcactctctctgtctctcctgctccaacatggccagacgtgcctgcttccccttcgccttctgccgtgattgtcagtttcctgaggcctccccagccatgcttccagtacaacctgccggtgg

SEQ ID NO: 489873 - DNA, 95 bp, Homo sapiens
ggtcgactcaaactctactcccactaatagcttttcgaagtccttgagagaggatgatgatgcgactgtgagtgcgttcgtagtttgagtttgct

SEQ ID NO: 489874 - DNA, 420 bp, Homo sapiens
  misc_feature (251)..(251): n is a, c, g, or t
gcgtcgaccaatgccatacaatactccttccgtggcctccaactgctcttaaacgctagtaaaaccaaatgcatgcttttcaaccgatcgctgcctgcacccgcatccccgactagcatcaccaccctggatggttccgaccttgaatatgtggacatctataagtacctaggtgtctgactagactgcaaactctccttccagactcatatcaaacatctccaattgaaaatcaaatcaagagtcggctntctaatcctcaacaaaacctccttcactcacgccgccaagcttaccctagtaaaactgactatcctaccgatcctcgacttcggcgatgtcatctacaaaattgcttccaacactctactcagcaaactggatgcagtttatcacagtgccatccgttttgtcactaaa

SEQ ID NO: 489875 - DNA, 403 bp, Homo sapiens
  misc_feature (57)..(57): n is a, c, g, or t
  misc_feature (304)..(304): n is a, c, g, or t
  misc_feature (312)..(312): n is a, c, g, or t
agattcactgtttagaagtttagtcccctgcagaatttaaaatagaaggtctcaatncagagaaaacccaaggccatttctgtgcttcatcatcatatccaaaccaaaactgggaaatcaggctgggcacggtgggtcacacctgtaatcccagcacttcgggaagctgaggcaggcggatcacttgaggtcaggagttcgagaccaacctggcctacacggtgtaaacctgtcactaataaaaatacaaaaaaaaattagctgggcatggtggcagatgcctgtaataccacctactcagganactgacgnagaatcatttgaacccagtaggtgaaggctgcagtgagctgagattgagccactgcactccagcctggacgacagagtgagactccatctc

SEQ ID NO: 489876 - DNA, 235 bp, Homo sapiens
catatggaagcacaactccaattcacacacatatgcgaaacacttatccagagtttccacaaaaacctagaaaacaaggagaactagataacgaagagaaatcggaacacattcacagctttatcaatgtcacatctgaacgtaaaaggggctgtcacaatactatatacttaatgcataaaatctcaacaattaaaacacctacctttagtctccagcattcactgatcaccct

SEQ ID NO: 489877 - DNA, 253 bp, Homo sapiens
cgaacgatatacagagatacccattcatgcagggaggcaactaatactcatgacaagtattttaccagtgaaataggctcacggaggttgacatataaatctatgacattattcctgtggggaagtatatttccaactttcaaacaagtaatttgttaagtaaactttcacgaactaaagtttgtcgtggctatttttagaattttgctactggaagggtgctttgtcattataacctgtaaatgaattgaat

SEQ ID NO: 489878 - DNA, 185 bp, Homo sapiens
ggggaaaccccctttttaaaaaaaatgccaaaaattagcaggatgttggggcccgggcctgtagtcccacctccttgggggggttaggcaggaaaatcgctttaaaccgggaggggggggtttcggtgaactgagatcgccccagggccctccagcctggggaacagaggggggcccccttccca

SEQ ID NO: 489879 - DNA, 154 bp, Homo sapiens
ccccggatagggcctagagactggcggcgcagatgagcgacgaaccgattccgatggatgccagtacgctggggcgttaaacccgaatcggttatgggtgcggaaattgttgaagggtaaagcggttaaggcggggtaatctgctctcgcagtg

SEQ ID NO: 489880 - DNA, 263 bp, Homo sapiens
aagtcatcctcagacgtctatgtcagcgcctcccctttccaccatgtctttcagggctgagaggcaggcagagccctgagaggtgacatttccagcattctcgtgtgcacagagggaggcctctagccccagatcagtctcctagcggaagccctaggagatagcaatgagatatggaagagctgccgctttagcctgcaagtcagaagaataaaacacacaggcttagggcaggcacagtggctcacgcctgtaatccagca

SEQ ID NO: 489881 - DNA, 181 bp, Homo sapiens
cgagagaaacttaggtatagcaaagtagccctggtccagcctgaggatcactagtactcccttgaagtggtcatcaacccatatacctacaccaaccactagtagggctagtactgtcatccctgaccctatctgtacacacagacgcctatgggtagacgtgctagctaccactacctag

SEQ ID NO: 489882 - DNA, 489 bp, Homo sapiens
atggaattgaatagagaacccagaaataaatccacacacctacagctatcaaatcttcaacaaagttgacaaaaataagcattgggacaagaactccctactcaataaatggtgctgtgatagttgactagccatatgtagaagaatgatacttgatccgtactagcagcatatacaaaaattaattcaacatggattaaagatttaaatataagacctcaaactgtaagagtcctagaagaaaacctaggaaacacaattctggacgtcagcctttggaaataatttatgactaggtcctcaaaagcaattgaaacaaaactaaaaattgacaagtggaacctagttaaactaaaaaactacacagcaaaagaaactatcaacagagtaaacagcttacagaatgggagaaaatatttgcaaactatgcatctgacaaaagtataaccactctaaagaatctatacagaacttaatagagcaagcaaa

SEQ ID NO: 489883 - DNA, 298 bp, Homo sapiens
  misc_feature (140)..(140): n is a, c, g, or t
  misc_feature (181)..(181): n is a, c, g, or t
  misc_feature (248)..(248): n is a, c, g, or t
  misc_feature (261)..(261): n is a, c, g, or t
  misc_feature (288)..(288): n is a, c, g, or t
aaaaacatatgaaaaaacctcatcagttgggcgcggtggctcacgcctgtaatcccagcactttgggaagctgaggcagttgtggtggtgggggcctgtaatctaatatccagaatctacaaggaacttaagcagatttncaagaaaaataaaccatcagaaagtgggcaaaggatatgancagacacttcgcaaaagaggccatttatgtctgtggtctcagctactcgagaggctgagacaggagntttgcttgccctnggacgtggatgttgcagtgagccaagnttgcgccact

SEQ ID NO: 489884 - DNA, 288 bp, Homo sapiens
  misc_feature (199)..(199): n is a, c, g, or t
aattcgtgagaccagaagctcttgcagaactcatgattgatgaagcactgttccaggcagtgaggacgcagtggcctatggaagacgctcttgcggaactcatgattgatgaagcactgctccaggcagcaaggatgcagtggcctatggaagacgctcttgcagaattcatgattgatgaagcactgttccaggcagngagcacgcagtggcctatgaaagatgctcttgcggaactcataattgatcaagcactgttccaggcagcgaggacgcagtggcctatgg

SEQ ID NO: 489885 - DNA, 940 bp, Homo sapiens
ggtaagaggtggcggtggagacgctacgctggcgtaagaggtggcggtggagacgctacgctggcgtaagaggtggcggtggagacgtttcgctggcgtaaggtggcggtggagacgttacgctggcgggcacgatacaactgcagctgcaataaactggtccttatacctgcttgggcttctaacccagaagtccagaacaacaagtggatcactgcaatcggactgatgtgcttcgggaacgtctgaccgtcccgctacagctagcaatcacctgaccgaaacttcgcgtatctggcaactgtgtcactcaccggacgacccttcgccttttagccttctgtacctttatttgcccgtagctgctcagtgacacgatcgtgaacgtggcaggttacagagttctaaaaggcactgaagcccgtcatcattccctatgcattgcacagagatccgagatacttccccaagcccgacggagttccagcctgagcggatcttccccgcagcaatgcacaagggcgccatccatatgcctacgtgcccttctctgcatggccccaggaacctggataggtccaacagtttgctgtgatggaaacgaccgaccatcctcccgtgcatcctgaggcacttccggatcggcatccacccacaacagaaaagcactggccccaaaacggcacgccgctactccgccccagcgtacagggccatctgcgtccggctcacgcacgcgcaacgcacatcaacgtcacgcctccatcgggcgggccctaaccccacgcacgcccccactaacaagaccccgccccccccaccccggcccacgagccaacacacgaccccaaaccaaccccacgacccagtgacgccaccccgcacacgagaaccgcgcgacaccgccccacaaacacgcaacgacgcccgcacgcgaaag

SEQ ID NO: 489886 - DNA, 201 bp, Homo sapiens
gctggtaccgcgctgtgggacgcgctcgcgcaagctggtgctggcgcgcgacgcatgggcgaaaagccgctgtactacggttactcgggcgccgagctggtgttcgcctcggaactcaagggcctgatgccgatccccgggttcggccgcaacctgaaccgcaatgcgttggcgtcgttcatgcggcacaactacattccg

SEQ ID NO: 489887 - DNA, 405 bp, Homo sapiens
taacctaatcccgggaccccaccttttgatagtgacaggaggcagacaaatcctaggcagacagggacaggttcccagtgaaaccccacctccgagccaaagacagtttaaagcctgaaagccaagctacaaattaaatcctcagcctggattgagaacccatcttcccatttggctgctttcctctgattgatccccacccttcacctattttacatgtacctatcttttcgtaattcattttgtacactggcatgcccacctttgagtggtacctttgtctcagccttttctgcataatcagaagccaatcagcatgcactcccccattctgagcccataaatgccccggacccagccacactaggagagaaaccacctgacttcaggtcgggaaccacccgt

SEQ ID NO: 489888 - DNA, 164 bp, Homo sapiens
cggatctgagatatctcccagggaggttcacttcccggactttccttttcccagaaggaggaggggaaaaatgaccaagttccaggaggcaagttacattcaagggatgtggcttttgcccttcactgagggaggaccttggccttcttgaactttgcccaaag

SEQ ID NO: 489889 - DNA, 398 bp, Homo sapiens
aatcagagattcagtccctcggtggcaccagacacatttcaagtgcccagaagccccatgtggctagtggctctcatgggatgttgccacaatacatcctttccactactcactacgaaagttctgctgggacaggacctagtgctgctctagacactacggttgcctgcggccatggcaaccacttggccccttacctagctttacttagctcccatagcacacatatgatctatacaccgtattatgtctctgagcaccctcggttcatcacatttattgtgatctccggtgtctagaacagttcctggtctgccactaagcaccccgaacacgatattcagaatgactgacattgcctgaatccgcattgctttgcatgaagcctaacacgtagt

SEQ ID NO: 489890 - DNA, 220 bp, Homo sapiens
cagggagaattgcttgaacccaggaggcggaggttacggtgagccgagatcgtgccattgcactccagcctgggcaacaagaccgaaacaccaaaaaaaaaaaaaaaaaaggaaaaaaaattaaattaaaattaattgcaaaagagtaatagctttaaatggggaaatggggattaattaattttttttttttggaaacaaggggaaccccgggggaccc

SEQ ID NO: 489891 - DNA, 818 bp, Homo sapiens
  misc_feature (46)..(46): n is a, c, g, or t
  misc_feature (50)..(50): n is a, c, g, or t
  misc_feature (64)..(64): n is a, c, g, or t
  misc_feature (238)..(238): n is a, c, g, or t
  misc_feature (263)..(263): n is a, c, g, or t
  misc_feature (284)..(284): n is a, c, g, or t
  misc_feature (288)..(288): n is a, c, g, or t
  misc_feature (291)..(291): n is a, c, g, or t
  misc_feature (296)..(296): n is a, c, g, or t
  misc_feature (310)..(310): n is a, c, g, or t
  misc_feature (330)..(331): n is a, c, g, or t
  misc_feature (355)..(355): n is a, c, g, or t
  misc_feature (380)..(380): n is a, c, g, or t
  misc_feature (429)..(429): n is a, c, g, or t
ccccaggctctctacctgctcagtggagagcggggagttgtgtccncctngccgacgtcgctanccgtggggctgtcctgggaaggcggacggcgagcgcccggtgtccgcactcggccgcctgccgtgcccgtctgcgcccgtgtcatcctcactcgggacgcagggaccgtttttaaatcacaggggcgtgtgtcagcctgccctaggacttcatgtctatatatttccccattcnctgccccgactatctgagatcggcnagatgactgaggtgatgatgnacanccngcccntggaggagatcggnctcagcccccgcaaggatgnnctttcctaccagatcttcccaganccgtcagattttgaccgctgctgcnaactgaaggaccgtctctccatagtggtggacccacagaaggggaggtngagagcggggagctccggtggacccctgaggagtacctggtccaggaggatgagcaagaataactgcgaagagacagcgacaggaaaatcaagagcagtaggaagtcccctgtggactcccatgggtcataccagacagcatctgtacctgaactgtgttttatcccaatcatgacggaagaagagagtgagccgcaattgttctgaaaattgtcgaaacgaagggctatctgtaatatgcaccatgggagaatcaccggaggtatgggtattctttcttacttatactgggacctattatgtattaaagagagacacttgggcgaaactattgggaccccctgtgagaaattggggaggggccatttgaaaaaaggagatggtttaaa

SEQ ID NO: 489892 - DNA, 136 bp, Homo sapiens
tcaaagggaatggtataatcatgcaaagctttgggactgggctttttttcatcagcatcaggcccttatccaggtggttgcatcattatgggtggaattatgtcccacccaaaactactgcacgcaacgggggcgg

SEQ ID NO: 489893 - DNA, 460 bp, Homo sapiens
tgcgcggggtcatatagagagaaaggcaggtgggaaacgtggggagtgagaaagagtgagagagcgatataggagagggagaagggaaacgggcggatgggacacggctgcgggtactagagtggcagagaacagaggagaaagaaaagagtgaagggcagaaaccaacggagagtaatggaagccaaataggggggtgttgaagatactaataagcaggaactcgtgaataacggggctgacacgggtcccagagggtaatggtatacactaagcaatgcggaattacaaacaatattatgggtaaaagataattagggctgataacttgcgcgtagtgggccgggccggtgaaagtgcgctgtagagggtgacataaaccgtgcaggggtgcagaaagaataatagtgtataacgaaaattggatgagataattatggcctggacaaataaacctttg

SEQ ID NO: 489894 - DNA, 1301 bp, Homo sapiens
gctcctccgagctcgctgttctgtcctgggttttttacgttttaatttccagtgacttgaactgccatgtcctctgaagaagtgaaagctcttctgtggtgagtggctcaactttaacacctgactgatgcagtgcactggaatgaccacttcagcagtttctggacctatctctgagtgtggtctgttgtcaatggaccgggagactcagctgtgtccagtgagtttttggtttcatcaccttcaccaacccagagcatgcttcagttgccatgatgagccatgaactggagagtactctggattgtgtctgtcagatcctgtgtgtgatcatgcaggcaagtctgctctggggaaccagaggaggtggctttggggcccatgggcgtggtcgcagctactctagaggtggtggggaccagggctatgtggagtggcaggtattatgacagtctgaactggagggctctggatatggatatgtgacgttccagcagactatcatgtgcagaaaccagtggtggttatgacctgctactcacgcagtgccatcacagcagacaacttatgcacacactgaaatgcataccattgcacctactactcgatacccactgaatactctcctgatccagtgatcgtccttacaaatggctgtatccttaccatgtccaggcaccttactacctgacagcactctataaatacccataactcactatacacaccatttcttgtttctccacttttgccccttgtccaatgcaagcttgacagcacattctatacacacatccccatctttctctatttcaaacattcttttcactgtcctcacttacacactcaattcatctgacccgtcttgtgtaccaaaccgccatctggcttatctctattactatacttcatcgcactcttcgactacgaatcgtagtgccctaggactcatcagtggcggcatttcacgtagagcttgtatttcatgtccgatcttcattctaccctcctacccctccatccaccaaccatcctcctcctaccagacaccactataacacccctactaccgcactagtgtacatctaactccaccaactcaccgtgactgcctcagacaacactaaactacacattcacacatcttagcacacccccgcctacgacacatcacacctcacacctagcattccatatctcactcacctacttactttcacctaacttctcctgttcatcacttttacacactactccttacttcaactcctctcttacgctctctcaacgcctatcttact

SEQ ID NO: 489895 - DNA, 490 bp, Homo sapiens
cacaaacctatgctccagtgtgtccagcagcagcaccagatttctccctctgtacgtctctctctctggttggtcctgtctatcgctacagatgagcaagaagcatccatggactgcccagggtttacgtttcccatacctctgctgtgtgagatctggagaacagaacacatccagtcagtagctcacaccccccgatcacaattctcagccttcacattgtgcaggaaaacagctggtcacggcaggctgctgacaatccatttataagccactaagcaagttatgacagctagacagggtcatttctgtagtcactgtgttatatgttacagcatatactgatcacctcactggtctaggaagtgagaatgatactttcagttcaaatcttcagtgtccggatgtcatatcaaacaggaagacactctaccactttgctgcttgtattagccaaagcaactgcgggtgtcagagcaactgaccaccc

SEQ ID NO: 489896 - DNA, 123 bp, Homo sapiens
  misc_feature (52)..(52): n is a, c, g, or t
attctgaaaattcttacaggttgaatacctaaaatttgtcactgacttgtgnttcctgaaactatgacacatgaatatgtgggctaagaaatattcctcttgataaataaacaattaacaaat

SEQ ID NO: 489897 - DNA, 1086 bp, Homo sapiens
aaacacataattccgaatcagcataaccaaccacagcctaattattagcatcatccctctactattttctaaccaaatcaacaacaacctatttagctgtccccaaccttttcctccgaccccctaacaaccccctcctaatactaactacctgactcctaccactcacaatcatggcaagccaacgccacttatccagatgaaccactaactcacaaaatatactctaactctctatactaatctccctacaaatctccttaactttctaacattcacagtccacagacctaatcatatttatatcttccttcgaacccaccactcatccccacccttgcctctcatcacccggctccagagcaaccagccaagaccaacctgaaacgcacgcacatacttcctacttctccaaccccatagctaacgctacacaattccatcctacatcaatccgcacctacctttctacacatcatacattgcatccttccgctcatctcaaccattacatacatagcctcactctcacctgcccaacgcacttatcatacactacctgatccccacacacacttactatcgactactcctcacaataactagtcttccatccgataacagaactcccatctacacgccgagacgtcctccttactgactctccactctgcccatagatcgacacagccccaacgggcgggatcaactagataacgtgaccgcagggtagcaccttcagacgtcgggcacgccgatgggactaactccgactccgccctagtcacgcatccaccagtgaacaagacatcaggctcaccacagtcgttgtgctagtcgcttgcactgcgttgtctatcccgcgggcatggaccatcgactagagactcaagcacgacgccgccactaaacgtcccccatatcaactctgcacggcctacaccagcccgagccagactccacgctgacgagcacaccaaccgctacacaacgggcgcgctatgttcgggcaaacccacgctgcggtgccgagccacaagacgacagtaagcacgctacggccagagcacacgcactcctgacagt

SEQ ID NO: 489898 - DNA, 181 bp, Homo sapiens
gggggggaaaaattttgaaaattaatttttttttaaaaaaccaaaaaaggcctttgggcaatgtatttttgtaaaagcttttcaaaaaatctgtctttgggagggcttttgctgcccccccccaatttataaaatgctattaaaaggtttaaaaaaaaagtttttattttttaaagggcca

SEQ ID NO: 489899 - DNA, 844 bp, Homo sapiens
  misc_feature (3)..(3): n is a, c, g, or t
agncgaaaaaaccagatagacagggaaacccaacagcgcacaaagggtgggggctcacggggcccagccgaattcgcacagtggttctggacgcataagtgtaaagatccggacctgggcgccaacgccgcagtaccgggtcccgccgggttgcgcgccccggccaatgcccgtgcccccttgtgggggccacgggtcacacacaagtcgctgccttacagaaacagtggtcgcccgtctggtccacaagttcggcagggcccccatctctaaagtctggagcccccccggataaggggccccgccacgccccactggtgcgagaggtggtccaccagtaccgcaccccctggggacgccgtcgcgctcgccgaacaatcagccacacgaccaagaggggctatccaaaacacatggccccaacaaggcatggtcgccagaggggcacatacagcccccaacagatgttcgcccgataagatccaagagcgcgaacagcaatccttgacccctatacacgtggcccccgccctccttaccacggtggggggacacccgtttgctaagcaaggcattgttacgcactggcgccccatgcatgttagtcagtcaaaacaagcgtggtaagaggcacaaagcggcttgcgtgtaccctccaaagtaggacaaagaggatcatttattgtgaggcccccacgtggcggtttacctattgtgcgcgtcgagagcccggttcttactgataagggtgtttcaaacgaagcccatttttgttgagcgacgcacgtgccccaattaccccagagtgttgggaacccgtcaaaaatcaaaaggaaacaaaaac

SEQ ID NO: 489900 - DNA, 206 bp, Homo sapiens
aaaacatagaaaatggattccaaacaatgatggtatttaaaatatactacatttcaaattagtacagagattatggaaaacagtatggaggtccctcaaaaaactaaaactaggatctacaagtatgatccaacaatcccactgcatgggtatatactcctaaagaataggatatccagtatactgaagacgatatcatgtatacc

SEQ ID NO: 489901 - DNA, 163 bp, Homo sapiens
gtgtgtacgacgtaagtagtacagaaaggaagtagtacagaaaggaagtaatacaggaaggaagtagtgcaggaaggaagtggtacaggaaggaagtggtacaggaaggaagtagtgccaggaaggaagcaagtataggcaaggcaagtaggtgaaggcaagg

SEQ ID NO: 489902 - DNA, 288 bp, Homo sapiens
cgtataatctatacatgatttaaatataggtttagtttgtccgtcagagggaggaacgaataaattatatgtgaattaactttcttccttattacaatgtattacttccatggccagaaaaaaaagaaatacttctttgttttgtttttgttatgagacagtgtctcgctctgtatgcccaggctgtaactcggtggtacaatcacagctcaatgcagcctccatctcctgggctcaagccatcctcccgcctcagcctcccaagcagctgggactacttgcatcact

SEQ ID NO: 489903 - DNA, 355 bp, Homo sapiens
  misc_feature (9)..(9): n is a, c, g, or t
  misc_feature (21)..(21): n is a, c, g, or t
  misc_feature (40)..(40): n is a, c, g, or t
  misc_feature (122)..(122): n is a, c, g, or t
  misc_feature (133)..(133): n is a, c, g, or t
  misc_feature (204)..(204): n is a, c, g, or t
  misc_feature (263)..(263): n is a, c, g, or t
  misc_feature (269)..(269): n is a, c, g, or t
atcttagancccttttattcnaaatccctcctgataagtnaaagaagccagtcttaaacagctacatactgaaccaggcatggtggctcatgcctgtggttgcagcactttgggaggctgangcgggtggatngcttgaggtcgggagttccgggccggcctggccagcatgacgaagccccatctctaccaaaaatacggaanttggctgggtgtggtggcgggcgcctgtggtcccagctgcttgggaggctgaggcgganagaatngcttgaacccaggaggcagaggttgcagtgagcggagatggcgccactgcactccagctagggggacagagtgagactttgtcttc

SEQ ID NO: 489904 - DNA, 289 bp, Homo sapiens
tttgaaaacctgcttccctgggtttttcaattttttttttaaacaacccttaatactgccagaccacaattcagacagggggctttttgtttataaagaacaaggaaggggtcctggaatttcccttgtcctttgaaacttttgctggccaagggtaaaagtgagggcatgccttttgctcacccccaaaaccccccctggggtcccctgggccttcaaaccagtggaaagacccaacgctttttgttttatttagccaaaatttggttatgctttccccaaacctgga

SEQ ID NO: 489905 - DNA, 379 bp, Homo sapiens
  misc_feature (183)..(183): n is a, c, g, or t
  misc_feature (195)..(195): n is a, c, g, or t
  misc_feature (204)..(204): n is a, c, g, or t
  misc_feature (243)..(243): n is a, c, g, or t
  misc_feature (272)..(272): n is a, c, g, or t
ggatgcgggctctcgaactcatggcttgcctcattggtcacaatcgtggacaccgtcatgccctctgatcaggaccagcctccagttcttctgagagtgtgacagtgtccacccggctctgcagcacttaggggaggggacacatggtggttccatgggcttcctgggtcgccactctccggntgccctaaaggngatggatcnggtgcttggccctgcagtccccgcgcttgagacttaagncgcatgtggcacaccgctccttccagcantagtcgcgttactgttacctgtttaggcctagaagtttaccctcatctgtaaatgtgatttaaaatctaagccatgaatatgctttatttattaaaagagttatgcg

SEQ ID NO: 489906 - DNA, 179 bp, Homo sapiens
ggatcaccaagcacatggtatgcaatcatcactgatatcagcatcctattaaaatattatctgctatcttgtcccacttcttgctctagtcagcaacaaccaagtagtgcttccataaaattctctccaagtcttccttccctactgttaggactgaggtgtcggcgttccagaatggt

SEQ ID NO: 489907 - DNA, 1574 bp, Homo sapiens
taaaaaagggaaacaaaaaaatctgagcaatttattattatttttgattatattggaaacagagtctcactgtgtcacccaggcgtggagtgtgcaggtggcggtgggtgttcagctctcacagcaacctctccacctctcccaggtttcaagtgtgaactcttcggtgccttcagcctacggaacagctgtgggacaacaggcttcccgtccacccatgtgccgtggcataacttattttatttatattgtgtgtggtgccaccagagagagtattatcactatctctgtgtgatcccacacacgcgtggagagaactgtgacagcagggagacacacacacacaccaatatgttcacacgtgtggcagcccctctcatgagagcagtgagtgggcctctacgacctctctcccccacagagatagacgccgggggacactgtgcgccgagcggcgcctctcacacacacactccgagtggcgcccacagagcacccaacagacaagtgtgagagaagatactctaaccagcgtgtgccgcctcacagtgtgcgcgcgagagacataaaagctgccccaacaggccgaggagagaaagaaaaagacactctatagagaggagacagtgtgagagagaggggcgagacacaacactcctgctgagacaaaacacatgttataccccccgcagcagtggggagggaccagacaccaccaacagtcgcgtcccctccatagagccgccacacagcagaggctgagagagagacgagagtcgtccgcgtcacgacccccccaagaagaagagagcacgagcagagaagaggcgcacacactataacagaagaaaagtggcggcactaataacaccaccagcggcgcaccatatctcagagagcagcaaatcttctccccaacagagagagagcaccgtgtcgccccacacgacgaaccagcaacgggcacacaatgtcgcgcctcttcaaaaaacctctgtactacaccaccacaaaaaaactgtgtcgtcgacaaaaaaacaccaaacagaaggaggcggagccccatctgtggcggcaacgaacacccctccccagggggagccaacaaccacagcgcgccctacgagcacaactgcgtccccacaaacagacggggcggccacccaacagggaagaaaaagcaaacctccccattgatgaagaagaagaatcctacttgcagagggaagaaggcgggcgacaacaagacaacagccccacacggtgagcgccaatcagtcggagcccgcaacccaagcgagcctcccctgcaccaacaccctcttactacgaccaagcatcgccccaaaacacacggtggcggtgccactgcaacaaacaacaacccccccctaaagacaacagctactccccggcagggcgcgcggccacccaacgcaacccccacctcggtgcataatagtgcgtagagccacccacaccagcgcccgctccccccacaccccccccactgatataggcgaagagaaaacacaagtgacggcacacgatcacctgcgtcggcagatacgaaa

SEQ ID NO: 489908 - DNA, 186 bp, Homo sapiens
atgagtcatcccagtctttgatgacagtacctagactgagcatatttggtggtcactatgggcaagatcagaattcatgaacagatctttcccaccatttctcgacaccgtatcaggtagtctggacatgagccatcgtctgtactcatccggcataacatacatgtataaaatgcacaccatcta

SEQ ID NO: 489909 - DNA, 508 bp, Homo sapiens
  misc_feature (442)..(442): n is a, c, g, or t
tgggatggagtctggctctgttgcccaggctgctcactgcaacctccgcctcccgggttcaagcgattctcctgcctcagccttccaagtagctgggactacggatgtgcactactacgcccggcttatttttgtatttttggtctagatggggttttgccatgttggccaggctgatctcaaactcctgaccttaggtgatcttcccgccttggcctcctagggtgctgggattgcaggcgtgacacccggctggctggctctttttactttagattgtatctgcctggatttggacaatgccaaattttttatgtaatcaccatttggtttggggactggagagctctttcattttctaccagttcaaaccaccattagagtctttcagttaattccccaattggtagcaaggtagaatcagcagggatagcttaatttncctatgggattccgtttgggaaaggcagtctatagcaggcagataaataatgtggtggaatcattc

SEQ ID NO: 489910 - DNA, 197 bp, Homo sapiens
ggccgcagtgcagctgcatgccgcaggctgactcttagaggtatcccgcaagtagactcattttcagattcttaacttgatgaatacaaagaaagagatactaaggtcttcctattaactagcaatccagtgtcttctcagaaacaaccagccttcaaggctacaagtggcaagggcaagccagcgaagatcgtcat

SEQ ID NO: 489911 - DNA, 607 bp, Homo sapiens
tccttcattacccctttattacaagtcacgccctttatagaagtttttgtggacttcacgtgaaaaatatcaattgttctcccagaataaaaacacacgagcacataagagtagtatagtgcttcccaggtgtttcgcccccaaaacacggcgggcggcccaagttaaaagctctctctaaaagcggccgtgactggggcaggccgggtttgccacaacggtctcgcgggcctctctaggcacccgtgtgttgtgggcgcccgcctgtgccctcctctcgcgggggcccgcggacggcgcggggggcatgccacgcagttctccttgagggccctccgaggccacggggggagaccccgagtgcccgcgggccacaaagtcccctgaagcgcacgaggcagaaaacacccccttttgtgggacgcgggagcccgataactcaggtgggccctccacggaggcagaaccacggcatcagtgttgaccagaaccacccccccacaaatacaccgcggtgagcgcacacataagcggcccgtgggcccacagggtggattcccctttcgagaagccccgacagcaataaaagcgggcctttacacagaac

SEQ ID NO: 489912 - DNA, 119 bp, Homo sapiens
cacgcctgtaaatatagaaggatatgaagatcaggtcttaattacaagagcacggtgacctgggtaatacgctagatttttagataccaagataacaaaatttcctttacaattttgac

SEQ ID NO: 489913 - DNA, 335 bp, Homo sapiens
  misc_feature (3)..(3): n is a, c, g, or t
  misc_feature (21)..(21): n is a, c, g, or t
  misc_feature (104)..(104): n is a, c, g, or t
  misc_feature (119)..(119): n is a, c, g, or t
ggnagggatcactggtactcnaccctgggcaacagagcgagaccctgtctaaaaaaataaaataaaatagactgcagcataggatggtgatttggagtgtaaancctggagccagactncccaggtttgaatcctggctttgctattctccacgttgggcaatttataaataaagtaaaacatttccgatccttggtttccttaattgtaaataaaaatagtaataacagccgggttcaggtgcttatgcctgtaatcccggcactttgggaggctgaggcaggtggatcacttgagcccaggagtttgagaccagcctgggcaacatgggaaga

SEQ ID NO: 489914 - DNA, 413 bp, Homo sapiens
  misc_feature (17)..(17): n is a, c, g, or t
  misc_feature (73)..(73): n is a, c, g, or t
  misc_feature (89)..(89): n is a, c, g, or t
  misc_feature (114)..(114): n is a, c, g, or t
  misc_feature (120)..(120): n is a, c, g, or t
  misc_feature (126)..(126): n is a, c, g, or t
  misc_feature (159)..(159): n is a, c, g, or t
  misc_feature (190)..(191): n is a, c, g, or t
  misc_feature (193)..(193): n is a, c, g, or t
  misc_feature (222)..(222): n is a, c, g, or t
  misc_feature (266)..(266): n is a, c, g, or t
cagtctctgggcctgcnggtgtctggcgttgcggtggtacctcagctccatccccggggaagtagagactganaatgtgggtacaatangcacagaggttgtgcagcccacgcnggtggncctgcngcttcccactgggcagctttgcctgcagcagcngggccaagtagctgacgacgaaggcgtcccnngnggccggggcatctccaaaggggagctttngggggcgcaggggctgggagagcagggtcagagactcccgagcntctgggtacagctccttctgcagctcttcctcgtcctcaggcctgtgctccccagtgagcagctgtagccgttccatgtactgccgctgcatgcggccagggaggaagaagtggaggggaaagggcatagcctctgcataccacttc

SEQ ID NO: 489915 - DNA, 312 bp, Homo sapiens
  misc_feature (10)..(11): n is a, c, g, or t
  misc_feature (23)..(23): n is a, c, g, or t
  misc_feature (58)..(58): n is a, c, g, or t
  misc_feature (77)..(77): n is a, c, g, or t
  misc_feature (130)..(130): n is a, c, g, or t
  misc_feature (206)..(206): n is a, c, g, or t
  misc_feature (291)..(291): n is a, c, g, or t
  misc_feature (301)..(301): n is a, c, g, or t
gagacaaggnntcgctgttgccnaggctagagcgcaggggcacaatcaccacacactnccgcttcaatctcctgggntcaaatgatccttccacctcagcctcccatgtggctgggactataggtgcatnccaccacacccagctaattaaaaaaattttttgtgtggagtctatgttgcccaggctggtctcttaactcctaggntcaagtgatcctcccacctcagcctcccaaagtgcttggatgacaggtgcgagccactacacctgggcccacattttttaaaagnggacactgtnccactaccata

SEQ ID NO: 489916 - DNA, 589 bp, Homo sapiens
taaaatttccatcttaaaggaaatgacttgggaaataacgtactttcccatgaccccaatactacagttttgcggagctcaccagtaagatacacagaattacattccggtaattaatatgaagtgccacacatgtgttcaagccagtaattggtcacatgtggcaaacaaaattcaagaaagcaaccatcaaacaaaaagagacccatagcttcagacagggcaaactcccgaggatagcatatgcagaaacagccgtggcgtgctaacagcgaaagggtatccgggcaataaccaagtgatagagggcgtgccaagagacgtggtcccaaataccagcaccgagaaaccgagccacctccatacagtggtgtgcagcaccgtggccaccatataaaattggtggcagccagtataatcaaagtggtctctcgtgaggatagagttgggcccctggtgtcttagagaatctccctttgggagctatacgcgtgagaaccacagccaattcttgtgggcccccaatttaaaaaataccggtaaaaggcccttcttccaggtcccatacaataagcctctgggtcagaaa

SEQ ID NO: 489917 - DNA, 194 bp, Homo sapiens
accacgagcgtactgcggtgggagagcagcaagtcggggaaacgagctgctcgggctgccctgaacccctgtgccccggcaggtagggtctgtgctgatgaaggggttggggatggctcatgcgtcctgcggcggattagcacacggatgtgccctggataccatgagtcccagctgccgggtgtcctccgtgg

SEQ ID NO: 489918 - DNA, 186 bp, Homo sapiens
gccccccccctttttgcccccaggtttttttgttgtgagggaccccccagggggtgatttaaaaaggtttattttttcatttccaaaaggaaaaaattgggctttttttttaagactttgagattcccaatcaccagctttaaaaaaaaaaggagcagtttggcttccggaaggaaaagggggcca

SEQ ID NO: 489919 - DNA, 1731 bp, Homo sapiens
agtgtgtgtgtgttgtttggtgttgggtgtgtggttgttgctgtgtggtgtgtgtatactaggtatgattatgtatattatgtgttggtgtgtgtgtgtctccttctgctagttgttgttgttctccggcaacacacgctgatataacagtatccgcgggtgtggatgttcctagtaccaacacgtatcaagtgtgggttatgaggggtaacacaccggtgtgttgtgatacctgctgcgagatggggagtttcccacaacacagtgggtgtgtgactcccactagtgtagctcccaggtcgcggtgggttaataaaaccagtccgcggctccccccagggtgatgccgtgatggtgatcctgcgggccgcggtataaagaggtgtgatccacaagacccccggtgggtggggggcacccaaaaatggtcgcgccacaacgtaaggaaccccccagtgtagccgactcctcccaaatggtgggtgcgtccgccgggaacacccccccgggttgtacgcaaagtgtccgctgttgtcgcggggaaaaaagttcttcagtgtcacccgggggggaaacccagagccgccactaggcgccctcggcccacaaagagtgtccccgtggggaaaacaccccgcggtggggaaatagtgttccccaaaaaagatctcagggcggtgtgtaataggaaaaccgtgatgtgtgaggtcccccccccccgcgaatagaagcatcaccaagtcacccggtggtgtgtctcggaagacaaccccgcgttcacaaggccgtgagtaaggtcccacacgtgcccccccgccccctgtgagacgtgtgtgctgcgcagtgtggagggtggtacccgtgtgagggggaaaccaccagacacgaaccaccgcttggggacacgcagaggcccgagaagggcccccccggtggagataggtccctcccccacacacggtgggaacaacggtgcgaaaggggacccccccgtgatgataaaaaatacagctgggtctcgaccgcaccactagagaagagtgatcataaaaacaccgggggtggctccacacaaaagatagccgtgtggggcctcacacaaagatagggtagtagagaaagtgtcggcgtgtgtgtgtgcgacccgctcacagaacagggtgctgcgctgtgaggtcaacacagccacagagagtgtctcaccccggatagactcgtctgcgcccacagaggtgtgtatatagatgagagacacccagaggaaaaagagtgtctccgctggctccccctgcgtccgccacacacacacccgcaccgtaacaacacagagggggtgggcccacacaaagagtggagagttgaagagggtgacagagcgcacaccacagtccacagagtgtcaccacaaagtgtaagagaagaggtgtgtgtagacgtctgtggccgtgggtgagacgtgggtgtgtggtcaccacgtgaagatagtgtcaccacacaccgagtgcacaccgtgtggtgtgatgtacaccagcagtccaccgctggacaggtgtccaacagtgtgtgtgtggggcgtccagtgtcgctctctagaaagaaacgcctgcgccagaaagtgtgtccggcgccctgtagaagatagctcactagcaccccacccgatgggcacagcccccgccccgtagtaggtaaggcaccggggaagtaaggtcggaggtgcccaccgggtag

SEQ ID NO: 489920 - DNA, 228 bp, Homo sapiens
  misc_feature (27)..(27): n is a, c, g, or t
  misc_feature (79)..(79): n is a, c, g, or t
  misc_feature (124)..(124): n is a, c, g, or t
  misc_feature (193)..(193): n is a, c, g, or t
gccaggcgattccttatgctgcctgtnatggcctatgcctcctccctttcctttctctttgtcactactatagctaggnttcctttcctacattggttttctactatgttgaccaactcctgtntgttttttatcttcctttcttaaacacattgttacttgttccaggtcagctgttatttcatcctttttnttttctttttatccccctctaccactctgcttggt

SEQ ID NO: 489921 - DNA, 131 bp, Homo sapiens
aaccgagtgtagtgcactccaagacacataattgtcagatcacaaagttgaaatgaaggaagaagtggaaaaactttgtgatcggcttgaactggcaaggcttacagtgcttgaatgaaacactcacatca

SEQ ID NO: 489922 - DNA, 308 bp, Homo sapiens
taccgactcttagaacctcttcagatccatgatttgcaaatcctttctcccattctatagactgcttttcactttctttgttttttttggagacggagtttggctttggtggccaaagcgggagggcaagggcgggatctgggttcacaaaaacttccgcctccgaaattaaggcaattctgtggcctaaacttccaagggggcggggataacgggcgggggccaccacgcccagttaatttggtatttttggcagagacggggtttctcaatgttggcaaggcgggtttaaaactccggacctaagg

SEQ ID NO: 489923 - DNA, 950 bp, Homo sapiens
  misc_feature (48)..(48): n is a, c, g, or t
  misc_feature (84)..(84): n is a, c, g, or t
  misc_feature (91)..(91): n is a, c, g, or t
  misc_feature (97)..(97): n is a, c, g, or t
  misc_feature (117)..(118): n is a, c, g, or t
  misc_feature (122)..(122): n is a, c, g, or t
  misc_feature (147)..(147): n is a, c, g, or t
  misc_feature (176)..(176): n is a, c, g, or t
  misc_feature (179)..(180): n is a, c, g, or t
  misc_feature (195)..(195): n is a, c, g, or t
  misc_feature (212)..(212): n is a, c, g, or t
  misc_feature (225)..(225): n is a, c, g, or t
  misc_feature (233)..(233): n is a, c, g, or t
  misc_feature (243)..(244): n is a, c, g, or t
  misc_feature (249)..(249): n is a, c, g, or t
  misc_feature (266)..(266): n is a, c, g, or t
  misc_feature (268)..(271): n is a, c, g, or t
  misc_feature (300)..(300): n is a, c, g, or t
  misc_feature (366)..(366): n is a, c, g, or t
ccgaacacgagagctacagtccatggccgaccaagaaaagatctcccnagctgcccttaagaagaccctcttagacagagtgangctggantccccnacagtctccacactgacccnnaaangcccaggaaagcccctcacaagaancctggccctgggaggcaagaaggactaangcnncatctgtcccctctntgattcagaccccttanttgagaccccctnccccaaangccacccccnngcccngctcccaccattccccncnnnngcttgcaaggagaaagcatgcttaggaanttttcaggtccttgtgataaaacctccttaaatctgttcagaccaagcaatgcgagcttcctctcntgtcccatgttggaagttgctctgaaggggtggtagatgctggaagccagacacaaccctgcgtacgctgctcagttggtggagactggggctgggactggagtcagcccagctgggaggaggggctggagaggatctgcagctaaaacccaaagcaagattaatgtgatgccagagcaaaatggtgaagataaaacaagaaacagactttctctaaattgataaatgggaaataagtgatcaacttaacattgtcacaattaatcacaagtatacaagattatactagatttatatttaactcttacttcataaatataccatttaaacactattatttaatgctaagtttaactactttaataaaatgtatttttaaataaaaaaaaaataaaaaaaccttcacaaaattaacccaatacccaattctccctatattcagtcagattacaattcactaaccatcatgttacaacatcctaactattctaacataatatctaataaccccgtaccgatcaccttgccaccacttatccaccttaattctatattcatatcttaatccgtaatatttattaaat

SEQ ID NO: 489924 - DNA, 108 bp, Homo sapiens
ttgttgttttactgttctttgtctataaaaagcaggtctagacaccctcttctagcaataaacctcaggtaggctgggaatggtagcacatgcctgtaacctcagcac

SEQ ID NO: 489925 - DNA, 803 bp, Homo sapiens
ccatctcgttccagctacgtgtaaggacctggtggttcacgaggctgggcttcgacacccgtgtaactgtgctgggccactgtgcagcggggagggacgccctctgcgcttcgagccggatcctgtagcagctaagatgggcatggaggcaggtgatggcgctgctggaatgccacgacctgacacgcgcggcttgcggatggtcaccgctctcggggaacctagtcagtgcggctgccccgtcatggagtgcgtgcagatgacctaagggaatgtgcaggagagagcgctagtggagtgacaagaggtttgagctgaggccagcgccagctccgtgtgtggtgagcttcggagagacaactggaacattttacaaagctcctcgtcgccaccagaagtcctcgctcctaaggatgaaagttctaaacttactgctccttgggccacttcctgaagtgttggggtgtgcctccaggacgtgtctatggcctagttgaaaattgccgaggcgctgatggctggcatacgagtcggtagactggactcgggcatcatcccatgggacaacaacaagtaatatctgtaggttgacactgataggctatcgaatggccataagccaaggggtcacgagtgcagaagacacgtatgcgctgagcacgagacgtggccggcatggttggtggcagtggtaggctccatgctgggagaccaagagagaccctgaccaagggccgacgctggaggtccacttgtcgtgacgaacatcccgatatctatggtatatcacgcgctggtggtgg

SEQ ID NO: 489926 - DNA, 115 bp, Homo sapiens
acgctctctctgatggggagacgtgacttcccttttccatgcacagcatgacggccagccagcccaggacggcagcgcgatgcccattacctgtagccccacagagagagcgtcg

SEQ ID NO: 489927 - DNA, 234 bp, Homo sapiens
tttcaattcgtctaatagttaccgaattccatcttctgcccccttgaatactgccagaggatacgagatgtaagtggctaattcattcgacttcagtcccctgggaccccttctgtagcctaaagtatggctggcaaatggacttgagaagatgggcttgaataacatcatagtcatggttgatccctgcatgaactcattggaattggtgtagcatgtaaggcactcaagctt

SEQ ID NO: 489928 - DNA, 1614 bp, Homo sapiens
gggcgcccgggcgggccgggggccgtggcggaggaggagcgctgcagcggtggagacgtcgggaccgagcggctcacctacgctggagttcagtgcatgcgagtacgtgcggccccatgatcggctggatggtctgctgtgcctgtttcgagccggtcccgttcatgccccgtatccgcccaataggctcgaccattaccctcctgagccctcgtcggcgtcaccgcagtgtgaggcatgaggagcaggtcggaatggcatggtcaggtgcacggtgactctggtcgcgacgaacatcatgcaccatatcatttctcaagaaggtgtaccagtgggcccatgctgcgtccacgtcgaacaggcttgcgtgtgcattcgattctggcggatcatgcatgtctgggattcccgtggcttgatgccatcgcgacccaagcgagctctaaactctctaaaccagcataagtgggcaactttgacctcttacacagggcaggtaatagtagggagacaagcctagcttgacatcgctccacatgggcacgcacacgagcccttcacacctgggcgtcgaagtaggatctacactccttgtggatctctacttatccgtgagcgaaacgaaagcgacatcttcttcagcgcgggacgatggagtggccccttgcttacctactttctaaccggggcccaccgtaaacttccacgcttcagacacacgcctacttttggggcccttgacttggtgggacaccgtggttctcaagggcgacttaccaaatgcggtaatttggagaagagttcaggcaatggggaagtccatggagtacttccgacgagggagaattgaccgcttttatacgaccaaggggaccaattgggaaagcgcccaaggagataagccgtccaggcaaaagctttgaagtacactacacggggggtacgcataaaagcgccggccaagggcatttaccatctttaaggcaccacccctgagaccgaaaatgcaaccggcccaaagaaaggtcttaccgaagcctcccaagaatgagaagcaatcacagctgccttgaggccctcagagtgtatccccgggggaaacgaacacttaaaccccaagcaccctagacggaacgcgagtattgagcactaggaccccttggggaaggtagtaaccaaatccggggcttaggttgaaggggttgcttggaaccatctccccctaagccgaccgggtgcgcatggactaagcgcacccaagccctggaccaacccagcggatcttcaacactacaccacatgaccacaggggcacaaagtccaaaaaaagcgttgggcaggaactggcacggagacaaacaaccgacgaacgggtcacaacgctcgctagcccacggacatctaacaacacaccaaaaaagggggggacgcaaacggcacccaagccacaagcacaccgcacaacgggttatacccaccccaaacggacggcagcaaccaggacccgcaaacaggaggccgacacagcgcaccagcaccagagcccacgacagaaaatccgcgcacaccgagcgcggccgaccacaacaaaacgagtctaggcgacgcaccaac

SEQ ID NO: 489929 - DNA, 127 bp, Homo sapiens
tcgccgaaaatcatcaggatttttcaacatactatcttcttttttttttttctttctgagactttatctcactgcatcacccaggctggagtgcagtggtgcgatcatgactcacggcagtctcgac

SEQ ID NO: 489930 - DNA, 856 bp, Homo sapiens
  misc_feature (7)..(7): n is a, c, g, or t
  misc_feature (62)..(62): n is a, c, g, or t
  misc_feature (84)..(84): n is a, c, g, or t
  misc_feature (122)..(122): n is a, c, g, or t
  misc_feature (158)..(158): n is a, c, g, or t
  misc_feature (187)..(187): n is a, c, g, or t
  misc_feature (223)..(223): n is a, c, g, or t
  misc_feature (293)..(296): n is a, c, g, or t
  misc_feature (307)..(307): n is a, c, g, or t
  misc_feature (314)..(314): n is a, c, g, or t
  misc_feature (318)..(318): n is a, c, g, or t
  misc_feature (321)..(321): n is a, c, g, or t
  misc_feature (326)..(326): n is a, c, g, or t
  misc_feature (329)..(329): n is a, c, g, or t
  misc_feature (336)..(336): n is a, c, g, or t
  misc_feature (348)..(348): n is a, c, g, or t
  misc_feature (360)..(360): n is a, c, g, or t
  misc_feature (362)..(362): n is a, c, g, or t
  misc_feature (376)..(376): n is a, c, g, or t
  misc_feature (386)..(386): n is a, c, g, or t
  misc_feature (403)..(403): n is a, c, g, or t
  misc_feature (405)..(405): n is a, c, g, or t
  misc_feature (408)..(408): n is a, c, g, or t
  misc_feature (413)..(413): n is a, c, g, or t
  misc_feature (416)..(417): n is a, c, g, or t
  misc_feature (422)..(422): n is a, c, g, or t
  misc_feature (460)..(461): n is a, c, g, or t
  misc_feature (464)..(464): n is a, c, g, or t
  misc_feature (479)..(479): n is a, c, g, or t
  misc_feature (481)..(482): n is a, c, g, or t
  misc_feature (485)..(486): n is a, c, g, or t
  misc_feature (488)..(488): n is a, c, g, or t
  misc_feature (491)..(491): n is a, c, g, or t
  misc_feature (523)..(523): n is a, c, g, or t
  misc_feature (527)..(527): n is a, c, g, or t
  misc_feature (530)..(530): n is a, c, g, or t
  misc_feature (538)..(538): n is a, c, g, or t
  misc_feature (610)..(611): n is a, c, g, or t
  misc_feature (619)..(619): n is a, c, g, or t
  misc_feature (622)..(622): n is a, c, g, or t
  misc_feature (624)..(624): n is a, c, g, or t
  misc_feature (673)..(673): n is a, c, g, or t
  misc_feature (849)..(849): n is a, c, g, or t
ttttatnctgaacatgtagtatttatctttattagcaattttattcataatataagcatgcntcaatcatccaaaagctatctncctatctatataaattgatatacatgctactgcattgncttcttaatagaatcatatggtaagtgttataatgnctaatcaacctacttctgataattttggngtaaacaaaaatgatatttaatttttattaaatcangtttacctatcaaattcccttttagaaaaacactgcaagtttagtcttaccaagattgcaagtgaatttnnnnattatggggcngtaaatnaaanggntttangtngaaatgngtactgagattngccatatcacanangtcctatcatgggnaatgggaagncttatttttaatatatntnggngtccnttnnctttnggcatggggcccaagagagggggggcttgggggggggnngcnaaagggcagtattcngnnganngnggnttaattttatatctaacaaaaacatagaaacnggcnagncatattcnagtcaattgggcacattgtatgggatacaaaaataaatgagaaaaaaaaccagttctacaaaaatgctttgnnattataanacngnaccacattaaataaaaatgcatttgtgggaaagcggcgggcgatggggnaatgaaagttagcaggataaatcataagcaaaacatttagaacaaatgtatgaacacattgtggttatcaccattacaaatgtatacaacaccttacaaaaatcttaaataaaaatgtaaaaatatttactggcagtgaatacgggcccaggctaattataccaacgggtaggtgntactggg

SEQ ID NO: 489931 - DNA, 178 bp, Homo sapiens
cgtggacctgcgactgcaggcatacgcgcttcatcccccgccgatcctgcagactgggcatccgctaggacgaggctctcgcaagctgctgggcggcgtgacgatcgcccagggaggcgtcctgcccaacatccaggccgtgctgctgcccaagaagaccagcgccgtcgcctacgca

SEQ ID NO: 489932 - DNA, 639 bp, Homo sapiens
ggtgagtaggtgagtttattaggaggtacacacagggcactaatcaggatggcccaaaagatccggcctcccccagcttctaaaatgctttcacccaaatcccctgaactgggcctgcggaaaatgagcaaagagacggcttttcatggcacggacataaagggcgaatccccgggtaccaacacaagggggcgcttcccgagaaaaaaaaaaaaagcccgtccaaagctaaaaaaaaggagcaaccccggacacaggtgttccctgtgcaaaatggataacccgtcacaagtggtaaagtactttcaacatttttcggccccggaaacaatcccaacaaccgccaccgaaattcccaacaaaaatacccgggtaaaacctcaaaccggggaactggtcaaaataaaactcacccgatatctctggaataaagctccaccccctggcatagaaagtcacggccagccagggaaatttaaactagacccacaataagttggcgaaacacggccaaaaatgatctcctggacaaaaccgtataccgcttaaaagttcccacaacaaaaccccgcccgaacactaaaacagaaagccccggggggcccaaagagggaaccacaccccaatcaaaccgtgtgc

SEQ ID NO: 489933 - DNA, 160 bp, Homo sapiens
gatacattcgtgttcacatatatcctagctcatctgcaatgcgctatttcatggcacatcattggaatacaggaagtagtccctgcacctggccgagtgagtctcgccattcacatagattggaagagtgacctgtgcatcttgtgaaatcattgtagtg

SEQ ID NO: 489934 - DNA, 926 bp, Homo sapiens
atggagggatatggcactaagaaatagtgaagggccctgtgctcagcgggaccgctcctcacaagaaattcttcttcttcgatgatgatgaaggggaatgggattgtggagtggcttgggcccgaagtgagctcaacgtatttggcagttccgcaggagcatgccaagcgggcgggatggccagctgtgttccctgtccccttccttcatgaaggcatctcgcatggctaggtgcatgtgagatgtcattggtgcccgattacacatagatcagtttgcctgcgatcgattgcgacggtgggtgccgatcgtgtctgcttcctcatcacgcagcaggctgttctgcatggggcgccggggggctgatcttggtcccgatgcagcgtgttcacggctgcctgtcgagtcgcgcggggcctggcatggtttcgctcgcatgcagtggagtgagtcatcgttgccgggcagcccctctgccgctttctctgttcgcttatagcttgtcctcgggtctcgtccagacgctcgtctggggtcattgtggggagatgcgctgcctggaactgtgcaagctgcttgtgctcgggagcctcttgttcgcttctgtggacttatttccccagctgataccgtatagagaaaatgtgttgagttccagggtggacagatgtatgcccacgggcctcattgacgggcaccatggtgggatgcatcgagctccaaatgtttccaggactaagggttgcccctgtagagaaggaaggaaaaaccaattgaaccaggggcaagacattggcttttacctttcttgggcgggtttagagagaaccccctggaaggaaaaacaaaacttgggtgggggcacttctgcggtggtggcgcaggaccgttggaaagcataacaggagacaggactaaaattaaag

SEQ ID NO: 489935 - DNA, 521 bp, Homo sapiens
aaaaataaaatgtactaaaaataaatgcttgtgtggcatgattggtaaatgatgcacaaaaataggttcttttttccttcaaggcaaaatcagtcagaaagcaggttttttcttcttcaaaccattctacataattagaaaaaacccccccaccacccaacacacaaccacaaacaccaccccccaaggagaagatgaggagggccagaaagctggcaagtaataaaccacttctctttgttactgcagatgttgatgttctccgtgttctcaggaggtgagctccccactccgtgaggagagaggtgatgatccccgacagttcgaagatggctcaagagcagagggaggttgtcgccggcgaggtcgcagcaggctgagtctgtcggttaacagcttgggttctggtgagcctttccatatcgaatgctacgttatcagtacatggcaaattcggcacaattcccagggccttcaatatattaagttttgcacataggacaggtacaatgttcactaag

SEQ ID NO: 489936 - DNA, 394 bp, Homo sapiens
  misc_feature (232)..(232): n is a, c, g, or t
  misc_feature (279)..(279): n is a, c, g, or t
  misc_feature (294)..(294): n is a, c, g, or t
  misc_feature (374)..(374): n is a, c, g, or t
  misc_feature (379)..(379): n is a, c, g, or t
gctgacctgcaccatgacggttgtcaagaacaagcgccttacgacaggcgggaacccagggagccaagaagcaaagtggttgatccatttgctaagaaagattggtatgatgtgacgagcaccgtgctactgttcacgtgatacacgaagatacttggacacagagcgctcgctcagccaggcacccgaacggaagcctaagagtatgcgatactgactcggtcatcaaggntgtgcgtgctagtttggatacgtgaggatctttgctgaattctatgntagcacagtgaatgnaaggattcgtcattcttcatgtacaacacttgcacacgcctgtaattgacatgtacagcaatgatttccaatgggattanacaanatcctgtgcgcgtgg

SEQ ID NO: 489937 - DNA, 307 bp, Homo sapiens
tggagttcgccggagtaacaacttgcctgcggttcgctgggtaggaggaccttaatattgacgctgattgccatcgcaacaggagggcggtatcgtccccaggttctcggagctcacagcctagaagctgggctttgctggtcttgtaccgtagatctcatttgggacaacttaggataaaatgctggtcatcgagcagtgtacgaacccagagctgtaaccatttttaatagaggaggaaataagatgatcattgaggaggctaaacgatcccttcacgatgctttgtgtgtcatccggaacctca

SEQ ID NO: 489938 - DNA, 248 bp, Homo sapiens
tgatgacccagccagcaattccctgtatagcttcaggacatttgaagttcacattgtgcttctaccaccatcctaatacttacttccaattcattcccctgagatcggctggttgttttcatctctgtaaccaagtcagagccatgtctcactgtcactgcaggctgacctgcccacacaactcccctcatactggcgagtcgaatccacgttagccaagcctgacaagtttgacgatcggtatccaa

SEQ ID NO: 489939 - DNA, 440 bp, Homo sapiens
  misc_feature (64)..(64): n is a, c, g, or t
ctttaaggatcaagttgcttcagaccaaaaaaaaggagaactgcctcataccttgtctacacanccttgtacaggctcctaacctgtgatgagtaaagatgtcactttctaacaggtccaggagccccaagttatcttgggacctcaagaagagaggaatttacccaactcataggtattggagggtacaaacccattgctgggcttgactttaaaaagtcttttctgatattccttatggaacagaattccatcagagccaattttaaaagcatatgtgaaaaataattattcttgctgtactttatgcaaataatcaggccaagtataagactaaagtttattttgcaaacaatcctattatgatttgtttttaacaaaaatgaagactggagagtttcaaaacttatcacacttgtcattaaattctagttttatta

SEQ ID NO: 489940 - DNA, 126 bp, Homo sapiens
tagctcggtacccggttaagacatcagtagtagacttccctggtggtccagtggttaagaatctgctcgccaaagcatgggactcaggtttgacccctggtcttggaagattctgcatgctgcagg

SEQ ID NO: 489941 - DNA, 198 bp, Homo sapiens
  misc_feature (42)..(42): n is a, c, g, or t
tagcaggactcttcgacgggtctgttattattcatctctcanttggaaatgtgagactgaaagggtagagacttttatctgtttcattgagttaaattcccatacctagaacaatacctgacatttagcaggcatccacgaaatatctgtcacataaaccagataatgatgttttctggcagcaattacagagtccct

SEQ ID NO: 489942 - DNA, 143 bp, Homo sapiens
gtaccgtcgatcctcctgctctagctcccaagtggctggggttataggcatgtgccaccacacctggctaattaaaagaaaaaaaaattcgtagaggggggatctaggtatgttgtccaggcttatttcgaactcctaacctc

SEQ ID NO: 489943 - DNA, 453 bp, Homo sapiens
gccagaggaccccccaggcgcttgttggagagctacaggagaagctgctttgaagctacttaacttcattcttgatatactggtcctcatttctttgccttcataactttaaaaggatccaaaatctggtcatcttgggctttcctttcttcctgggtttcaattctttctttgtgccccatacgtggtgggctgccccatatttgtatatgatgtctggcttcttgccaggcttgtccggacatacttctggtgggcactgtgcggaaacttgaggatgaaatcagtgagctgcatagcactttgaaaaggcatgggcttgtctcctcacttggaggtgccaggtccatcgaccaaagccctggttcttgatccaataacattctacgatcgcgcaccaattttccgggcatgaaggtcccacaggagacataggccaccccgggcaacctc

SEQ ID NO: 489944 - DNA, 250 bp, Homo sapiens
  misc_feature (2)..(2): n is a, c, g, or t
  misc_feature (8)..(8): n is a, c, g, or t
  misc_feature (12)..(12): n is a, c, g, or t
  misc_feature (17)..(17): n is a, c, g, or t
  misc_feature (19)..(19): n is a, c, g, or t
  misc_feature (26)..(26): n is a, c, g, or t
  misc_feature (94)..(94): n is a, c, g, or t
  misc_feature (96)..(96): n is a, c, g, or t
  misc_feature (119)..(119): n is a, c, g, or t
  misc_feature (128)..(128): n is a, c, g, or t
  misc_feature (148)..(148): n is a, c, g, or t
  misc_feature (152)..(152): n is a, c, g, or t
  misc_feature (170)..(170): n is a, c, g, or t
  misc_feature (179)..(179): n is a, c, g, or t
  misc_feature (182)..(182): n is a, c, g, or t
  misc_feature (234)..(234): n is a, c, g, or t
angaaacngggntcttntngggattngagaaaatctctatgaagcggcctagagattagtagcaggtgcaagacagaatcagcctccagtcttngntcagagataaggagataatgggnaccccattnacctctcctgttgtatatcncagnctttgcagtaatgcaggnctcaagcanatntgcctgagcagtgagtaataggagcagactgtaactcagagaaggagtggtnaggtgtacagagctag

SEQ ID NO: 489945 - DNA, 720 bp, Homo sapiens
  misc_feature (608)..(608): n is a, c, g, or t
  misc_feature (615)..(615): n is a, c, g, or t
cgaccctcatctagaacatcagctcctccccgggtctgcagctgcacgaccctcaatctagaacatcagctcctccccgggtctgcagctgcacgaccctcaatctagaacatcagctcctccccgggtctgcagctgcacgaccctcaatctagaacatcagctcctccccgggtctgcagctgcacgaccctcaatctagaacatcagctcctccccgggtctgcagctgcacgacctcaatctagaacatcagctcctccccgggtctgcagctgcacgacctcaatctagaacatcagctcctccccgggtctgcagctgcacgaccctcaatctagaacatcagctcctccccgggtctgcagctgcacgaccctcaatctagaacatcagctcctccccgggtctgcagctgcacgaccctcaatctagaacatcagctcctccccgggtctgcagctgcacgaccctcaatctagaacatcagctcctccccgggtctgcagctgcacgaccctcaatctagaacatcagctcctccccgggtctgcagctgcacgaccctcatctagaacatcagctcctccccgggtctgcaagctgangacctcnaatctaaacatcagctcctacccgggtctgcaagctgcacgagcctcaatctagaacatcagtcctccccgggttctagagctgaagagccttcaggttagaaca

SEQ ID NO: 489946 - DNA, 894 bp, Homo sapiens
  misc_feature (9)..(9): n is a, c, g, or t
  misc_feature (82)..(82): n is a, c, g, or t
  misc_feature (115)..(115): n is a, c, g, or t
  misc_feature (138)..(138): n is a, c, g, or t
  misc_feature (235)..(235): n is a, c, g, or t
  misc_feature (248)..(248): n is a, c, g, or t
  misc_feature (257)..(257): n is a, c, g, or t
  misc_feature (259)..(260): n is a, c, g, or t
  misc_feature (268)..(268): n is a, c, g, or t
  misc_feature (279)..(279): n is a, c, g, or t
  misc_feature (282)..(282): n is a, c, g, or t
  misc_feature (288)..(288): n is a, c, g, or t
  misc_feature (302)..(302): n is a, c, g, or t
  misc_feature (313)..(313): n is a, c, g, or t
  misc_feature (316)..(316): n is a, c, g, or t
  misc_feature (318)..(319): n is a, c, g, or t
  misc_feature (322)..(322): n is a, c, g, or t
  misc_feature (325)..(325): n is a, c, g, or t
  misc_feature (346)..(346): n is a, c, g, or t
  misc_feature (366)..(366): n is a, c, g, or t
  misc_feature (369)..(369): n is a, c, g, or t
  misc_feature (384)..(384): n is a, c, g, or t
  misc_feature (394)..(394): n is a, c, g, or t
  misc_feature (396)..(396): n is a, c, g, or t
  misc_feature (406)..(406): n is a, c, g, or t
  misc_feature (411)..(411): n is a, c, g, or t
  misc_feature (413)..(414): n is a, c, g, or t
  misc_feature (416)..(416): n is a, c, g, or t
  misc_feature (423)..(424): n is a, c, g, or t
  misc_feature (430)..(430): n is a, c, g, or t
  misc_feature (441)..(441): n is a, c, g, or t
  misc_feature (449)..(449): n is a, c, g, or t
  misc_feature (454)..(454): n is a, c, g, or t
  misc_feature (463)..(463): n is a, c, g, or t
  misc_feature (469)..(469): n is a, c, g, or t
  misc_feature (475)..(475): n is a, c, g, or t
  misc_feature (490)..(490): n is a, c, g, or t
  misc_feature (493)..(493): n is a, c, g, or t
  misc_feature (505)..(506): n is a, c, g, or t
  misc_feature (509)..(509): n is a, c, g, or t
  misc_feature (513)..(513): n is a, c, g, or t
  misc_feature (539)..(539): n is a, c, g, or t
  misc_feature (551)..(551): n is a, c, g, or t
  misc_feature (554)..(554): n is a, c, g, or t
  misc_feature (558)..(558): n is a, c, g, or t
  misc_feature (561)..(561): n is a, c, g, or t
  misc_feature (564)..(565): n is a, c, g, or t
  misc_feature (578)..(578): n is a, c, g, or t
  misc_feature (589)..(589): n is a, c, g, or t
  misc_feature (595)..(595): n is a, c, g, or t
  misc_feature (605)..(605): n is a, c, g, or t
  misc_feature (628)..(628): n is a, c, g, or t
  misc_feature (632)..(632): n is a, c, g, or t
  misc_feature (639)..(639): n is a, c, g, or t
  misc_feature (641)..(642): n is a, c, g, or t
  misc_feature (689)..(689): n is a, c, g, or t
  misc_feature (716)..(716): n is a, c, g, or t
  misc_feature (768)..(768): n is a, c, g, or t
  misc_feature (815)..(815): n is a, c, g, or t
  misc_feature (829)..(831): n is a, c, g, or t
acgcaagangggactgcgccctggggtgagacacccattcctcggcgatctgaggaagctcatcacagatgactttgtgaancagaagtacctggaatacaagaagatccccaanagaaacccacctgagtatgaatncctctggggcctgcgagcccgccatgagaccagcaagatgagggtcctgagattcatcgcccagaatcagaaccgagacccccgggaatggaaggancatttcttggagnctgtggatnannattaaaanaaaaaaaaaanagnaaaagncaagaaggaaaaanaaagggcccanaananngcnaanaaaaaaaaagagggaaaaaancgatgaatggacggaggaanaanggaagaaaaaaaaanaagagcaaananacaagggaanagganannanattaaanncgaaanaaagggaacangaaacccnaaagnaaaaaaggnaccaanaaaaanatcagaaaaaaaaantanaataagaaaaannganacanaaacaaggaagggcacaagaaggaanaaaaatagagcnaanaganaanaannacaaaaaaaaaanagaaggaggcnagcaanaagcagaacntaagatggaccccaaaaaacagntaanaaaaaananngaaccagaaaaagactgccagagctggcgccagcttcttctcctggntccagcaccgttgacgaactgcagcgntcttactggccaagccagagcgcctcctctcagattccttctcgacacagcnccctaggcggcttcttcctgtcagtcggaggtggcatgcaagatgangctctctttgcatnnnccatgctttcattttgtgcttttccttgtgttttcaatgttttgggtatcaagtgttagcatt

SEQ ID NO: 489947 - DNA, 1510 bp, Homo sapiens
catagcgctaggggtatgctatcgttccgcaccgcggccctcttggtttccttagagacgggcgcgtcatcctgtctgattattctgctcgcggggagtataatatttcgcagcgggacctgtttcaccctctgcgcttttgtgggcccaccgagagcgaccgtgggtgccacaagaacaccggggtgttgcccgtgtgcccggtttttccgcgggggttttcgcgaccccacaccgctccgtcggctcctggtgttaattccccccccctgcccccccccgggtaatgtgtgtttcccctggggggggatgggtgcccacacccctggaggaggggttgtacaccagggattctcttttggagaagaaagatgggggccttttccccccggtgagtggccttcctcggggagttttctcaccgtgaggtgttcgcccaaaagaagttctggggggttagggagccctcgtctcctgggtggatccaattattggggtctccccgccgcctcccgtggtgacctccttctaagagagcgacaccccacagaggacttgtggaggtggcccaaaatggggcacactacttttcgccggggggttcctatcgtgcgacagcccgccccaccctccccctcggggggttttccaaccggaggtttgtgtcccctgggcctcctcgggcccttctcccggggtttttctctgggggagatataccccccggcgggggtcccccccgccccgccccccgccccccccgccgttttatatttgtggggtaattttgtttatggatatagagaacccgcgggtggtttaccccccccctcgggcggggcccctcccgagagctctcctcggagaatcttcacgaggggataccccacccgcgcccctctcggcctctcccccacaaatgtgtccgcgggagtataacacacgcggggagaaccccaccccccccacacgtgtcacataaaggaccacaagcgcccgcgcccctcgggggagagacccccactctccctctctggggagggatcttctcgcgccccccccgtgtcccgccgcccactatccccacactgtggccccacacgtgtgtgtgaggtgttaagtgctctctcccctctgtgagaaagtgggatatcttcctggttccccacccccaagccctctccacagagtggaggcgcccaaccgcgtcttggggcccacacacaccgcggcttgccacgccctctcattgaggggaccccccgcgggacccctccctctgctgtggaggtgtcttcttctttgagatattcttgtggcccactaggaattgtctatgtgagtagtaaattattttttgttttttaaaccacactaagtgtttatgggtataatttagttaacccacgcacggagatgagaaaacttaaaatggggagactatattttggtcacaaaagagaggcccgggtttgtgtaccgtatccaattaaccccccttggtgggtta

SEQ ID NO: 489948 - DNA, 419 bp, Homo sapiens
tttccgagttagggtcggcaatattggggaataccgcagaaggttctgctgcagagcaatacctaaagtggttcttccatcagttaaggttaaaactccggtagagtcagttcttgcgaaagggggtaatatgctggaaatacccaaggccagggccccaacagtggcgtgccattaaggcattatctcggtaatcccattaagcagaagatccgtctcgagccccattagtgcctaggccctaaggatcccgagttgccacgtatggaatgaagcataaaagggataggctacgcgatggccgtgtttctagtaccatgtgcccagaatgttaaggcattcacatgtcatggcgatggttcatcgcgtaatggtgatgcagcacttcagatagccgctcgaacagccgcatattgtag

SEQ ID NO: 489949 - DNA, 221 bp, Homo sapiens
  misc_feature (171)..(171): n is a, c, g, or t
  misc_feature (181)..(181): n is a, c, g, or t
cgaccctcatctagaacatcagctcctccccgggtctgcagctgcacgaccctcaatctagaacatcagctcctccccgggtctgcagctgcacgaccctcaatctagaacatcagctcctccccgagctaaaacacctctcccacctggttctccagctccacgagtttnacagaacagncacactggctccttcattgttttcagcttcacaacctaag

SEQ ID NO: 489950 - DNA, 291 bp, Homo sapiens
gcacgaggaatgtcttgggataattgcctgaatcaattattgttatgatagttgccaaatgataattttctaattccattattccttctgcatttgtttgttggcattctactgttaggaagagtctttccagctgagcacagtggcttatgcctgtaatctcagccctttgggagccagtgggaaaattgcttgggcccaggagttcaaggttacagtgagctatgatggcactactgctctccagccagtgcactcactctgcacaacagagtgagaccctgtcactta

SEQ ID NO: 489951 - DNA, 1013 bp, Homo sapiens
tggtagtccaatactttttcctttataaatccatactggtactcccagggctctagctactgtaactttaaaattgggctggggcaccctgtgtgtgttcctaggtactaccagtaatgtttcctgaccttgcgccaagccgccaggcaacgtccagttatagactccaaattacagattggccagacaccttcgactggcactcgacccggtggtcctttccccattagtagtggcccagttgcaggtgtggtgggcgtgctcccccttcgtgcctcaccccaatttccaccccacggtccaggatttatctccgggggccccaattattggccccttctggaccacattcctctccccccactctaggggaatgctctagtgttcagatgttgggggagaaacagtgcccccatgtgggttctctgggcgaacgaatgtgcgtcctgtggtccccatgccagaagattgttggctctgtggccgctttggaatttgggcgggtgggttatgcgacctcttgtcgggctggttgcccccacagtgcttatttgtgttggggcagacagaaattgcgtcttgtctgtctagacctataatcgccaactactaccagagcagtttggggcaaccccaaaatgccccccaatgggctcagattcgccccccaaaaaaaagacgcccatggtttggtcatcatgcactttgaggggcaaagatgggcaccccccctttgtggtcgtctccgtccatcgtggtctatatatgtgatttgggggcaacaagcccgctgtgctgcgctgctaacaagacggacactggtgtcttttagacccctcagcatgttgttggggcgcacctctccgagctatacagccctccccctgggccgggagaagaggggcgtcacatatatagtcggccacacaccacgactgacgcccgcggccctgtgtgtaggagctcctccaccaacgccgcctgttactgtgtagcacacaccacgggggtgc

SEQ ID NO: 489952 - DNA, 151 bp, Homo sapiens
gcagcatgctgaggtgcataatgtctgcctggcctgtagtgatgcttttttgatcattctgttcaggcggcatcagggtgtgattgcttcctgtacgagtcgttccttaacctctcatttaatggatccattcatttatgatgtttaactg

SEQ ID NO: 489953 - DNA, 403 bp, Homo sapiens
  misc_feature (157)..(157): n is a, c, g, or t
  misc_feature (220)..(220): n is a, c, g, or t
  misc_feature (357)..(357): n is a, c, g, or t
  misc_feature (383)..(383): n is a, c, g, or t
  misc_feature (394)..(394): n is a, c, g, or t
ccctggaggctaggcatgttcaacatggtggctcccatctcccctttttctttatcaacccacatgtacagtaaggagcaggcaaccgtggcgcccagcccaggtagagaagccatttgtggcccaggttcggtggcacacgccctataatcccaanactttgggaggctgaggcgggcagatcacctgaggtcagaagttcaagaccagcctggccaanacgttgaaatggtgtctctactaaaaatacaaaaattagctgggtgtagtggcaggcgtctgtaatcccagctactcaggaggctgaggcatgagaatctgttgaacttgggaggtggaggttgcagtgagccgagntcacaccactgcactccagcctgggnaataggagtgnacctccatc

SEQ ID NO: 489954 - DNA, 275 bp, Homo sapiens
ctgcatggtgctaacaaagagccttctgtgagtcatctccttccatgggctgaaggaattatggcaagggtccagctcatcctggctttaaaaaaacaaaaccccagtggccttgtctgaagtggctggatgctgtggctggtggcaacgatggctcagtgctcaccaggttcatcatgtggtgtaatctaaaaagcggaattatcctttgaggagtccatcagagtcaggcctgatttcacaacagggaagtgatggatctagagcttggaaca

SEQ ID NO: 489955 - DNA, 108 bp, Homo sapiens
tgcttgaggatcggggcgcagttggcattgcgtgtgggcactgcgccggggcgtgtgcccagaactgaaccctggattgatgtcccaggcactatacgaccccatgcg

SEQ ID NO: 489956 - DNA, 553 bp, Homo sapiens
gagcgggtcggcggggtgcggagccgagcgggcgtgggaggtgtgctgggtcgcgcctgtgcctggggccgaggcggcgcgcggcagctgacagctgagtcggctcgcggactcccaggaccccctcaggctgcctcggcaccgaacctaggacctggggacattgccatgcaccacggaagctctattgacgcacccggagcttgctagcctagatacagggacagcgcacagatccatagcatcggcacataatcggactacttgactgacacctatacggatgcaaacctgaagactacagcagcacggaatagacaggaaggccatccaattcgccacgtcgggaccacgacccggctgagacccaaggattaataccgttatcataagagaaacaagcatacacgcgcttgacatattcgaggtcataacacagtgggactagaagaagatgcggcaggggcacgcatgaatgcttcccaaggcagttgttagatacaaaaagggaattaggggctatacagaaacgtaattgagacgcctagatatg

SEQ ID NO: 489957 - DNA, 161 bp, Homo sapiens
gagaacgaggacgtgaggaggacggaagtaggtgagagagagtgaagacgagaaggaaaggacctggatgagagggaggtgtgagcagaagcatcctttccatgttcaactatggacttgcaaggactggtacaacctactctggaggtctccagggtaat

SEQ ID NO: 489958 - DNA, 450 bp, Homo sapiens
agcgagcgccacggtatctataaatttaggtgttcttcctgagagacttctacatggcaccgtcacagatgatgggatcagagtcaaagagcttcacgactcaactcagtgaacctgtgaaggaacgtacgaggtcagaagtgtgggaagccaccgtgtttacccgtatactttattggtcttcgccttgcgtgaggtttgtcagccgggacgaccaggaaaacaggtcgtacagctgctccagcaaggaggaggtgtagagcatcttccactggtaggacttaatcaactcgtacaatttcctggtcaagctcacattgacctgcagggattcatcgaacacccgggcgcagattaccatgagaagggttgttggtggaacagtccacatacaaaatcttccgaaagatgtcagactgatccttcatccgcatgcgtcccgttaagttg

SEQ ID NO: 489959 - DNA, 209 bp, Homo sapiens
gatctatgtaatcactgaggccagtttgtacagacaaggtggaaggtttaattctgggtctctcctccttggataaggtcttgatgatctcttctttctgggcctggaggctgctcttcatggtgcttgcgtgcttccttggtcttagacctgcgggcctacagccgggtcagcacaggagctcctggcggggcctaatctggcgggga

SEQ ID NO: 489960 - DNA, 592 bp, Homo sapiens
tatcatatactcgtgacaccctagatgactcctactaaaaaagctcctagaactgataaagtgaatacacgcaaagtgtcagcgagacaaaattattgtactctacatcagtagctctgttatacccctagaagcgaccaagcttagaatcaaaccaacatcataaccgctttttggtgagctgcaaaactaaactaaactaaaataaaatacttgggaatagacctaaccaaggaggtgaaagatgtctacaaggaaaacaactttagtatttttaatgggttaaaatgagaggcagcaggtacagcagaagaagtcagtgcgtgggcatccgcatccaatgggtactgcacctttgatggtaaggcttaggttttgacttactaaattactaggtacgattattttctagtttttgtcattaaaccttaaaactactaagtaaccccttccatttcttgttaaatattgtacaatttcatactctcatttatgctgcctgacgttagagtgtttgtttctatttggtgactaccttaaataatacctataaagagtaaactgttagtagtgtttttgctgtaattaaatg

SEQ ID NO: 489961 - DNA, 367 bp, Homo sapiens
aggaccacaccctagaagctgacaggacattagaaatataagataggacagaccactgtttcctacttcctgaaggacagacagacatagggattgaaaagggggcccggcaaacagggaaagaggtggcaggcctggtgaccttaaagcatgtgtatgagattgcccgcatcacagctcaggatgaggcatttgccctgcaggatgtacccctgtcgtctgttgtccgctccatcatcgggtctgcccgttctctgggcattcgcgtggtgaaggacctcagttcagaagagcttgcagctttccagaaggaccgagccatcttcctggctgctcagaaggaggcagatttggctgcccaagaaga

SEQ ID NO: 489962 - DNA, 155 bp, Homo sapiens
gtagatcggctcggcccgattcctaattacgcaatcgggatgcattttacatgctgcgatggtatccactgcattcaatgacactgcatggaatcaactgcatcaatcgtgacgcattttaccatgctgcatggaaaaatgcgtcacgattgatg

SEQ ID NO: 489963 - DNA, 341 bp, Homo sapiens
gcgcctggaagggggctctgcagcctgaacccccagttaccccagggctcccaccgactgtcccggcctccgcggctgcacgtcggcccccgcagctcagcaccctctgccccgggcccgcagccccagccggccgtacctgcgtgtcagcgagatagttgaggaagaaggaggagagctcttcgtccagcagcgcgccgcagtcgttccccgccatcttccagccgcggctgcagcgtgcggcggagtcaaccgcgagccggcccggggggagggagccagcgagcgagcaagggaggagggaggagggagtgaggccggcgggaggcggagggcggagc

SEQ ID NO: 489964 - DNA, 577 bp, Homo sapiens
  misc_feature (205)..(205): n is a, c, g, or t
  misc_feature (259)..(259): n is a, c, g, or t
catcatttctaaattgacatgtgggtggccagtgttattatctagttttcttgatctaagtacaaattacctttttaataaaaaaaaatgtgattgttgcagactctcagaaatcatatttttttaatgaagaaatacactgtggttgatggcatttaaaaaaatgttttgaattacagaatattttttccaaagccaatatgantgtagcaattgatagctaatgataataaacatttactgagtgattactatgtgnccgctttgcgccgcctttgttccacatccaccctgtgaggtaggagctgaaatcagtcctgtcttacaaagagcagatgggtcattagaatttaagccattttctctgaggtcacacaactagcaggcatcggggctagattcaattccaggctgttggtgtggctacagagctcctgttcctgatagtaatacagccccgagaaaatgtagttgagtaagcccagcaaagactatgcctccatgtgtttaaattaagaaacttttgtgttgattttatgccaacatgcttgataaaaatagacaaagtatgtaatgt

SEQ ID NO: 489965 - DNA, 128 bp, Homo sapiens
ctccaaccaaataagacttccactcgatgatgcttctataattttgcctttaacagaaactttcaaaagggaaggatttttttttatgggggagaagggttaaggaggtcaaggccccacttccttcc

SEQ ID NO: 489966 - DNA, 752 bp, Homo sapiens
  misc_feature (337)..(337): n is a, c, g, or t
  misc_feature (352)..(352): n is a, c, g, or t
  misc_feature (424)..(424): n is a, c, g, or t
ggttttggggatttttccattgttgatttcttccgggacgacaagacctttgtgaacatgggtgtggttgggtttgtatcattgggtttttaggtttttttgtgtgggcacccatattttccaggtaggataggggggggaaccggagggtttttttcctccggtcccaatatttttggttttcccccgggggttgaaggttttttttggtttgccccactccggggagcaaaattaaatatttgcgcgcagtttttggggcccggggttttttttttttttccggtgggggggcgggggggggattgtattagcaaatttttcattagaattggtnttaccggaagggtantaggttgtggttcctttcccatatgttttatcaatggggggggtttttgccatcaaggggggtttttttccntgttttccccttttttcggggaaccccctgggccaaacctaggccaaattcctttttcctttattttttatggggggaattttaatttttttcccccaaaattttttgggcctttcgggaatgccccgaggtttttggggtttccccgtgggataccccccatggaaaatcttttttttttgggggtttttttttttttttaacgggggtaattttattattttttttgttttgggaggcttttgttttgaagggaaagtttttttttttaaaagacccttcctttaacttggggtggttttttggttgccccccccctttcccccca

SEQ ID NO: 489967 - DNA, 275 bp, Homo sapiens
tttatttatttatttattttttgagacggagttttgctgtgttgcccaggctggatgctatgttgctcagagtggagtgcagtggcacgatgtcagctcactgcaacctccgcctccctggttcaagaaattctgcctcagcctctggagtagctggaattataggcgcctgccatcgtgcttggctaatttttaaacttttttgatgagttggggtcttactatgttgcccaggcttggaagtgattcttccttggactcccaaagtcctggga

SEQ ID NO: 489968 - DNA, 247 bp, Homo sapiens
ttaacatcacttcatcagataaagcacacttcaggatgacttaaataatctgccatgtttctgttatcctcacaactgtacccttacacaatgcatctctacctagaaaacgtatttcagatggctataagagtacagtctgagccggtcacggtggctgacgcctgtaatcccagcactctgggagggcggggcagattgatcacgaggtcaggagattgagaccattgtggctaatatggtgaaa

SEQ ID NO: 489969 - DNA, 216 bp, Homo sapiens
ctgaccatgattactggacttctcaggcggtacatggacatttgcaaacaccactgaccaagatctggagcggtctaggacaagccccagcagggcgaacactcagctcagcactgtctctgcaggaactgcaggcccactttcttattgggaaccaggacaatgcggccacactcttcaactcccccgtctccggggccagaaccacaaatatcg

SEQ ID NO: 489970 - DNA, 265 bp, Homo sapiens
  misc_feature (38)..(38): n is a, c, g, or t
caccattagtgaacgcattgtggcgcatggatcctgantgttgcagtggagtcatgcagcgaggcccaaggcatcccgattgaatgcagtggattccatgcattgtgattgaatgcagtgaactccatgcagcgtggtaaaatgaatcccgattgaatgcagtggattccatgaagcgtgattgaatgcactgtattccatgaagtgtgaagtaatggaacgttcacttaatgccgctagcgccgttcacttaatgccgctagcg

SEQ ID NO: 489971 - DNA, 477 bp, Homo sapiens
catttaccatggtattttgggtaaaataggaggggagagttaaatatactggtatttgcatattattgcaaaaataaatcacataggataaagtatagcctaacaagcttggttatctagagaaaatggaaagaaatggggtgaaaatgataaaagtaatgggaagaaacatcacttttctgcctggccctttttatataattctgaactaactttgacttggttacctgtcaaatacaagcaattggatatttgtgtccccccaaaatttgtatgttgaatttgtcatttcaatatgatggtatttggtggtggggcttttgagtgtaattaagtcatgagggtggagcccttaggaatgggatttgtacccttataagaataagctataaaagtcctagctactcagaaggccgaggcaggagaattcttgagtccaggagtttggctggacaacatagcaagtcccttctcaaa

SEQ ID NO: 489972 - DNA, 185 bp, Homo sapiens
ctgtctactggactctacaatacacttccccttggtccatgcctggccagtggaccatgcactaaatgtgctagacagacgtccgagagcaagtcttactcttggtggctcacctctgctcaaagcacactccctagggaagtaacccacaccaacaatgcatcctgtaaagaaggggctcctct

SEQ ID NO: 489973 - DNA, 761 bp, Homo sapiens
gggaggtctggatagggtcagaagtaatgggattctttgctgctttcctctactacaggctgtttgggtcttctatggaagatgaagcttaggctcttaaactccttattcctgggcagtgatagctccagtttctttcagagaccgaaatatgttcaccacgccttcccgcgactatccgcagaagaagacatacttaatgtttctagagcaacactttggtttaacctaagtgaatctatcgtgtatttgctgcctgagtagtgtctacttctgtggcccacaaaattgttctgatgctcaagttctgtctttagaacacagcagctttctcattatctgaggtattcgacttagtgatacaaacttagctttaaaactccaacaaaatatagtcataatgatcttcagagctcccccacctaacttttggtgttggttatgctgtctggaactatacacggctaacttgggatagcggtgtaatgatatatcactttgcgtcacttactagttagaactatcgtaatccttctctagcgtggcccgtaactggttctgacgtacagtgcttaggaatgctgaagaagtccaagaaacatcctgctcctaacacctcctctagattttcaaccgacgtcgacgaacaggattgcgggcttcgtcaccaggaccatagggactcgggtcgcagatggctcacacctgcttaacccagcacttcgggaggctgaggtgggcagatccacttgagctcacga

SEQ ID NO: 489974 - DNA, 231 bp, Homo sapiens
  misc_feature (142)..(142): n is a, c, g, or t
  misc_feature (151)..(151): n is a, c, g, or t
  misc_feature (214)..(214): n is a, c, g, or t
tccaggatctcgtataagcgtttcccaagtcgatttggacatttttgcaaaaagttcttacctgaagtgtgattctaatggtgactgtacagtaatggaacaggaacggaaaattttacaacatgacgacaaatctttcgtntagttgaangagagtgctaataatgactattagtggtcgggaacatagaagacggtattactacggaaccgnctaaaaaactagaagac

SEQ ID NO: 489975 - DNA, 560 bp, Homo sapiens
  misc_feature (82)..(82): n is a, c, g, or t
  misc_feature (138)..(140): n is a, c, g, or t
  misc_feature (492)..(492): n is a, c, g, or t
gggggggggcggcggcgcggggccggggaggaaggggaggggggagagctttagtagctgcaaattttcctctgataggggnaaatataccctctattgtactttgttgtggaagtggggcatttccacgagactatnnnattttagatgcctacggggggcgcaataaaaaaaaacctcttctttcaccaggatggaaaagaaacaatgtaaaaagagtttagcacggaaagagttgtgtctgtgctttaaaggattagcatattgggggcgttgataaggaaggaattccatgtgagaagggggagaaaactgagagatgaaacaacgggggggggggagaatgtttatttgtccccccctctactataatatttatgatcgtatctgttggccgagaggaacatgttggaggaactatgaagcaggtgtaagaagatgatgttgtctctacgggagacgcagcgagcgggaggggtggcgcgggcgggngacgagaagatagtggggcgagagagaggacgcgcccacgaatgcagcgtgcgggcgctagacgggtg

SEQ ID NO: 489976 - DNA, 990 bp, Homo sapiens
gtaccgtaagggaaaattgaaaagaaattgaaaggagaggagatgagataaaatgagatgaaatgagatgatggatgaaactgagatgaaacgagatgaaatgaaataatgaaatgatactgaaataactgaaacttgtaactgagatgatatgagatgaaataatgagataaaactgatgagatgagatgaacgatgagactgaaactgactgaaactgaaatgacgactgaaaaactgactgagatgaaaaactgagatgaacactgaaataactgaaactgacgatgaaatgaaactgaaatactgaacaggaaacttactgaaactgtaatgactgaaacttgaaactgagatgagttgaaactgatgagatgtaatggtgaaactgaaatgatgaaatgagatgagatgaaatgagatgaaactaatgacgatgaaatgagactaatgagatgagatgaaatcatgagatgaaactgatgaactgcacactgaactgatggatgaaattatgagcatgaaagatgaacatgtaatgagatgaaatgacataatgaaataatgaaatgagatgacaacttaacaataatgacacatgaaataactgaaatgaacatgaaatggcaactgactgagactgcgcacagcacctgcatgcgcactgccactggcacgcaccctgcctgcagacttgacgtctcccacatgcccatgcacactggactgcacactgccgcatgcccctcctcacgcacgcactgaactgccccttacatggaaccgacacgcggcaccacaacgggcacctcctggcaactgggacaaggaaccaaggctgccgacgcgcacggaaccgcgcaccagcccacctgacacagaccgaacacgacgaaccacacacaacgaagacgaaggacgaagcccacgcaccgaaccccgagccccaccacgaaccccaaccacgaccaccaacaccccacccccccg

SEQ ID NO: 489977 - DNA, 431 bp, Homo sapiens
  misc_feature (49)..(49): n is a, c, g, or t
  misc_feature (58)..(58): n is a, c, g, or t
  misc_feature (91)..(91): n is a, c, g, or t
  misc_feature (252)..(252): n is a, c, g, or t
gccatggtgacgcaggcactccccaacaacccttgctacactttggacntatgatgangctcgatccaagatgttggttggcgcctgatangttgtcccatctctgttactgcttgtgtgacgcagatccgttccaggcctcggcagtgatcatgtcctatcacctatactagcatgtgacaccaccctaatcatttgagcctgggaatagcccctcaactaccttccttctttaaacactcttcagagaantctgcattctatttctcatgtataaaactaggaatcctccaaccaggctcctgtgatagagttcttttaagcccaagattttttatttgagggttttttgttttttaaaaaaaaattgaacaaagactactaatgactttgtttgaattatccacatgaaaataaagagccatagttcc

SEQ ID NO: 489978 - DNA, 358 bp, Homo sapiens
gaagctgaggttggcaggtgaccaaaggaatgcttcctaccctcattgccttcagtttaacttgcagccaccttctgaaaacatatctttaatagaatttgaaaacttggctattgatagagataaattgttaaaatcacttgaaaaaattgcagtgagctatgtgaaaggaactgaacactaccagactaagtgggatagtgagcttccgtagctaaacttgttcttgccaaaaaaactcatgcgacaaatataaccctccgaaaaaaaaaccatatttgctaactggaaattgcggattgacatatgctcacaaagactaaggtctaactgcgaggttattgaatatgagatggac

SEQ ID NO: 489979 - DNA, 584 bp, Homo sapiens
  misc_feature (36)..(36): n is a, c, g, or t
  misc_feature (41)..(41): n is a, c, g, or t
  misc_feature (43)..(43): n is a, c, g, or t
  misc_feature (229)..(229): n is a, c, g, or t
  misc_feature (528)..(528): n is a, c, g, or t
  misc_feature (580)..(580): n is a, c, g, or t
cgaggaggagaaaaggcgctgctggacaagcgcacncggcnanggcagccttcgaaaagatgcaggagaagcggcaaatggaaagaatcctgaagaaggcatcaaaaacccacaaacagagagtggaggacttcaaccgacacctggatacactcactgagcactatgacattcccaaagtcagctggaccaagtaacctgcccctggtgcaaaaaggcagaaggccanggttgacagtgttttgtcttgtccctccgtgttttctagaatgttttacacctggctggtgaatctgctgagaccaggttttctgagacttgattaaagtcagggtgtcctttcactggggttttggttttggggtagttccctttcctgtttggacagcaacattgtagattgatatgctgaggtcatttctgggtgaaggccttggaaggatggccccctccaacccccatttgcggcatctgtctttcacttacaccacaatgccaggacagaaagctcacgtggaccaccacagnagtttcccacagtgctgctctaatttttgggccaccttggacatcagattgntctg

SEQ ID NO: 489980 - DNA, 260 bp, Homo sapiens
gtctgccactgtcttctgggattaaaggaaggatcaggcagcgcaagctcaggcctgtactcctagcaccttgggaggcttggcaggcagatcacttgagctcaggaggcagccagatcacttgagctcaggagtgcgagaccagcctgggcaacatggcaaaatgctgtctttacaagaaatacaaaaattagccaggtgtggtggtgccacctgtagtctcagctacctggggggctgaggtgggagaatctcttgag

SEQ ID NO: 489981 - DNA, 386 bp, Homo sapiens
  misc_feature (324)..(324): n is a, c, g, or t
  misc_feature (342)..(342): n is a, c, g, or t
  misc_feature (372)..(372): n is a, c, g, or t
ggaagtcctttccaaactagcttcaggtaaaaagagaatttgcctcatataactgtaaagacaaggtttagcacaggcttcaggcttagataggtattgatacttggcatcttagcaggactgacttctcttaccatctgcttctgggctggcttctttcacagtctccacgttgtggcaaggtggccaaagtagcttttattcctgttcctccatgtgtcccagcattattgcaaatgttgtattgtttgtcattgtctgagtccctgaaccagttaggaatgttatgtgcatagtcttgggattatgttggacttcatttgnctctatctgtgtcaggantgaggcccgacctgggagcactcagactgnagatttgacagagt

SEQ ID NO: 489982 - DNA, 583 bp, Homo sapiens
  misc_feature (128)..(128): n is a, c, g, or t
  misc_feature (137)..(137): n is a, c, g, or t
  misc_feature (156)..(156): n is a, c, g, or t
  misc_feature (163)..(163): n is a, c, g, or t
  misc_feature (181)..(181): n is a, c, g, or t
  misc_feature (190)..(191): n is a, c, g, or t
  misc_feature (213)..(213): n is a, c, g, or t
  misc_feature (220)..(220): n is a, c, g, or t
  misc_feature (278)..(278): n is a, c, g, or t
  misc_feature (288)..(288): n is a, c, g, or t
  misc_feature (294)..(294): n is a, c, g, or t
  misc_feature (387)..(387): n is a, c, g, or t
  misc_feature (407)..(407): n is a, c, g, or t
  misc_feature (527)..(527): n is a, c, g, or t
ctgatgatatcatcagggcttgcgggcctggtgggaggtgagggagggaatccgtcaggagcgggggcagacacacgtacatgtatgcgtgggttaaccatgacactgccacctccacttccacctcncacaccatngctgaacatgaaacttccntttccanaatcatcaggtgcgcacnctggactannggtgggaatcacgtgcgtaganaggctanagctttggatgcctccctttctgcaaccccgctcaaccccgctgcagccacattagcnctggccagcnctccanggcctttgtccatgctccagtgctgtgccagccagttcgcctcccgtgccaatgccctgaagcacatggctggaatcccggagaagagtctcntgaagagtctctacttctcntttccttttttttttttggcgagggagtctcgctctgtggcccaggctggagggcagtggcaccatctcggctcacggcaagctccgcctccggggttcacgccattctccgggctcagnctcctgagtagctgggcacggtggctcatgcctgtaatcccagcactttgggaggc

SEQ ID NO: 489983 - DNA, 323 bp, Homo sapiens
ggatgactggtgggtctagggcgaatgcagatgctgagtcagtaagcctgggtgaggcctgtgatctggcgatttctaaccagctccggggggatgcagagggcctagccacagaacacacttgcaatagcaagggtctagggcatccctgatccaactagaactttcctggggtgatgggaaatgtctgcatatctggtgctattggtatatgttacggtcgcgcactaggcctccgtgaggactagtggagcgtgtgggaaagtgtggtctccatgcaagccggagcaaggataattcgaaaatgtgtattgcacatattc

SEQ ID NO: 489984 - DNA, 770 bp, Homo sapiens
  misc_feature (305)..(305): n is a, c, g, or t
  misc_feature (361)..(361): n is a, c, g, or t
  misc_feature (409)..(409): n is a, c, g, or t
  misc_feature (447)..(447): n is a, c, g, or t
  misc_feature (457)..(457): n is a, c, g, or t
  misc_feature (486)..(486): n is a, c, g, or t
  misc_feature (512)..(512): n is a, c, g, or t
  misc_feature (558)..(558): n is a, c, g, or t
  misc_feature (563)..(564): n is a, c, g, or t
  misc_feature (566)..(566): n is a, c, g, or t
  misc_feature (568)..(568): n is a, c, g, or t
  misc_feature (585)..(586): n is a, c, g, or t
  misc_feature (590)..(590): n is a, c, g, or t
  misc_feature (599)..(599): n is a, c, g, or t
  misc_feature (615)..(616): n is a, c, g, or t
  misc_feature (618)..(618): n is a, c, g, or t
  misc_feature (627)..(627): n is a, c, g, or t
  misc_feature (634)..(634): n is a, c, g, or t
  misc_feature (643)..(643): n is a, c, g, or t
  misc_feature (655)..(655): n is a, c, g, or t
  misc_feature (661)..(662): n is a, c, g, or t
  misc_feature (670)..(670): n is a, c, g, or t
  misc_feature (684)..(684): n is a, c, g, or t
  misc_feature (689)..(689): n is a, c, g, or t
gcaggaggattgcttaaggccagtagttcgagaccaaaggttatccaggtactcagaagagcagagcttcatctgtgtcttactcagactggagggaataccagcctccccgagacagtcctacttggagggactatatgccaaagctcattcacacaaggctgctgtgccaccttctccctgttgcaccgggcccacgcacatacacacatacacagtcactgactcactctcacccctctagccttaaatccagaatctagactgaatatggactgaatgggtcagattggggaaatgtgttnctggggacagctgagggaccagagagaggcagggcctggggcttcccaggaaggantggagggtgaagatgttcctagcgagggaagcagacctgaggacaggnagccaggtagacctgacactccgtaataaaggttaaanttcttggggnttttcacttagattatagggaaagttaanaccaaagtttagctgggcatggtggngggcacctgtggtccaggtacttgagaggctgaggaagagggtcgnttggnncnangaggtcaaggtgcgtgnngcgnagtatgcantgactcaagccaggtnnangagcaaganctgtttnaaaaaaacngggaacccgttntataanncagaaatngcgggtgtgggcangctgnatccaggtatcggagctaggacgaggatgttaacgggttgagttgcgcagccgatggtcatgacaagctgggaaagatctt

SEQ ID NO: 489985 - DNA, 148 bp, Homo sapiens
agcttttcctgggccaagggaggagccgctcattcccccaacaaaactgtgttttatttgccaggaaagaccagcctccctcctgggaactgtttggcaggtaggctgggccccccagtgctgttaaaataaaaagcctcgtgccgga

SEQ ID NO: 489986 - DNA, 435 bp, Homo sapiens
  misc_feature (29)..(29): n is a, c, g, or t
  misc_feature (86)..(86): n is a, c, g, or t
gtgaaagacagttccattttcctttagantcacagccttggcaaaatcccccttccctttaccagggaaatcccttcctttaggantgaaaggtaggggtcctttcccccaaaaaagtcctgccctcatttgaaaaaactgtctttccatatgggtaaggggggccccccccccctttttgccctcccgggacattgattggtcctgttttgggcaggtttagtgagctgtaaaattgaatcaatgtgaacccagggaactggggaaggctgagccccctctttggtgttgcggtaaaataacccccagggctggtgaaagtcccccaatggcaggatatttggtttcaaagtaaggactaggggcccccccatgcctgactatcaatcaaaatgtttgtaacttaaaatttttaatgaaggataatgaatttta

SEQ ID NO: 489987 - DNA, 109 bp, Homo sapiens
acgcgagtgatgtgggtgtagtcgggactatatgtgagatacttctcagatgtaggtgaggatcagaaagctgtagtgctggcacggtggtcatgctgtaatcccagca

SEQ ID NO: 489988 - DNA, 564 bp, Homo sapiens
gcctcagcccctttgaatatgcatggccccagaggaaatggatctacttttaagtattaacacaagacaaaagtcaccaaggccactgagttatgattgcagaaaaaaccatcactctcaacgtgctgctctaagggaaaaggaagcaataaaatttgatcgattcaacttttaagtacacgtgaggtccaggaaatataattcttaagccataatgttgaattaacatatttcattgcacttaattttcttagaatggtgcaacttgggatgttccagacacagaagcaagacaactgcatgacgtggcagggggacactgaaataaacacagtaggaaagccagctctccttttacagatgtaaacagtcaccggatttataaaagcagtaaatttggcctgctcagtcataaaaaagccttaaccattcaatatgtggaaattcagttatttacacaagaaccaggccgggtttcaagtcttaccaaaaaccattttttaccttaggccattttggccctggaaattttggttgttcttaaacccaaaattttttgagttt

SEQ ID NO: 489989 - DNA, 737 bp, Homo sapiens
  misc_feature (467)..(467): n is a, c, g, or t
  misc_feature (484)..(484): n is a, c, g, or t
  misc_feature (496)..(496): n is a, c, g, or t
  misc_feature (499)..(499): n is a, c, g, or t
  misc_feature (510)..(510): n is a, c, g, or t
  misc_feature (514)..(514): n is a, c, g, or t
  misc_feature (517)..(517): n is a, c, g, or t
  misc_feature (528)..(528): n is a, c, g, or t
  misc_feature (543)..(544): n is a, c, g, or t
  misc_feature (554)..(554): n is a, c, g, or t
  misc_feature (656)..(656): n is a, c, g, or t
  misc_feature (663)..(664): n is a, c, g, or t
  misc_feature (672)..(672): n is a, c, g, or t
  misc_feature (683)..(684): n is a, c, g, or t
gaacagcggcggcaggaggagaacgacaagctgcgccacgagtttgcccagcatcgccaacgccttccaccagtggatccaagagaccaggacatacctcctcgatgggtcctgtatggtggaagagtcggggacccttcgagatcccagtcttgaagctaccaaatcgcaatgcaccatggaaatccgagccatgatgaagtcagtctctactaagagatcgacggtacctgggggccgccatggaggaggccctcatcctggactacaagtacacggagcacagctccgtgggcctctgcccagtcatgtggcgacctatgcatggaacacagcgtggtgtcgatgtctgctatgtcagcacaatcctggatgcagcagatccaggccaggaacacaacatggtgtgactgaggaggcccgtcaaatgaattcagcatgatgttttagacactttgcacaagganaagtctggcaggctganccatcaggagtncanatcttgcctgngctnccntgggctatganctgcccatggtgganncaaggggaanctgaccctgagttcgaggcaatcctggacacggtggatccgaacagagatggccatgtctccttgcaagaatacatggctttcatgatcagccgcgaaactnagaacgnnaagtccancgaggagattnngagcgccttccggccctcagctcagagggaaagccttacgtgaccaaggagga

SEQ ID NO: 489990 - DNA, 175 bp, Homo sapiens
  misc_feature (24)..(24): n is a, c, g, or t
gatctacaggatccttcgcatctngctcccatcagaaagaaatatatatttctatagtataacctccacactatggaatattatgtgatatgatttgtcactgtgctccacccaaatctcatctcaaattgtaatccccacatgctgggggaggggcctgatgggagaagatgcg

SEQ ID NO: 489991 - DNA, 310 bp, Homo sapiens
gacccgacacagaaactctccctcccagataagcaagacaaagaaacacagaataagagtccatctatgtcctcagcgaatggcgctaagagatgatttaaaaaaactctgatctatatagaaggcacacatggtcccaaccaaaccactggcccataagaggataagacctcctctgctcatgaaaaccctcatcagtaaaccataaataaaaaccctgacaattttactaccacttggcaacccgctcgggacccctctctgtgatggagagctgttattttcttttgcatattaaactcctgctcca

SEQ ID NO: 489992 - DNA, 497 bp, Homo sapiens
aggacttgaagacacagacagtacaggtgtggtcctgcctcgagaggttacagtctaggtggagaacggcaccaggacacatgcgagctgagagaaacagtccagtgcagtttgtaacaggagctggaaggtgtctggggtcagaccccaatactccaagtacactaagcacttcagtgcctccaggggctcaacgttagtgccaggaaagacaactactcccagtcccatatgagcccacgtgtcatgccctgtccatagcctctactgccaccatcttagaatgtctgactccttgttccgctgctaatcaaagtgcaatgaactggggagggatggggtggatgaggaaggtcgctggaccgatttgaggggccagtgtctccctcctagaaagatctactcccccatcatatacccctaacacagagataaccccactcaaggggtgctgtgccaacacatgggaccctcacccccacagctagaggaggggc

SEQ ID NO: 489993 - DNA, 295 bp, Homo sapiens
tcactgatgaatagtgtcccgggtacattgagtcacaggtcataggatacgaccagagcgcataggaggtccttaaggttaagagagtataccagtggcacaagtagtgttcaggctcggtagcattgatagcaatccggcagcgtgagcacagtgcggcataggacgcctcttggatatccagaggcgtaagtgtgctgcgaaacacatccggaggcagtgctaggtcactcttgagctgggtggacgtacgccattggcaatctgataaggactgttcttcctgaggtcagag

SEQ ID NO: 489994 - DNA, 462 bp, Homo sapiens
  misc_feature (9)..(9): n is a, c, g, or t
  misc_feature (65)..(67): n is a, c, g, or t
  misc_feature (102)..(102): n is a, c, g, or t
  misc_feature (104)..(107): n is a, c, g, or t
  misc_feature (136)..(136): n is a, c, g, or t
  misc_feature (140)..(141): n is a, c, g, or t
  misc_feature (208)..(208): n is a, c, g, or t
  misc_feature (218)..(218): n is a, c, g, or t
  misc_feature (228)..(229): n is a, c, g, or t
  misc_feature (233)..(233): n is a, c, g, or t
  misc_feature (243)..(243): n is a, c, g, or t
  misc_feature (252)..(252): n is a, c, g, or t
  misc_feature (254)..(256): n is a, c, g, or t
  misc_feature (269)..(269): n is a, c, g, or t
  misc_feature (277)..(280): n is a, c, g, or t
  misc_feature (285)..(285): n is a, c, g, or t
  misc_feature (292)..(292): n is a, c, g, or t
  misc_feature (298)..(298): n is a, c, g, or t
  misc_feature (362)..(362): n is a, c, g, or t
  misc_feature (388)..(389): n is a, c, g, or t
  misc_feature (402)..(402): n is a, c, g, or t
  misc_feature (456)..(456): n is a, c, g, or t
cccactttnttccatcgcccttcccaacctcttcttctaccccctcccctcccattccatttccnnnctctccaccactctctccctcccccatcccatctntnnnnacccatcacctcatatcacccccacaacnctcnntcccctccatccccacacaactccctccaacttcctcccctcttctccttctactccaccccctttngcaacacctncacaccacgnnctcnacacaaatcncacctctcntnnnccaccttcacacnccacctcnnnngtccnggaaacnggttcngccatcacccaggcacctcccaagcagtcactgaggccacggaccctccacccacgtcatcggnccacctccctctcactcctccccttnntcctcacctacanaccacttcacttcccctttcctcatcctcactatgtcctcatatttggctgtcngggcaa

SEQ ID NO: 489995 - DNA, 124 bp, Homo sapiens
taggtaagcgccgcaggatgttaggaagcaagacgtcctggaaatgaacgcatgtatgctctatggtggggaggggggagggctgcctgaaaaccatccatctgtggaaacgagaagcggcgaa

SEQ ID NO: 489996 - DNA, 122 bp, Homo sapiens
gcggttccgaggctcccccgccactctctctctgcccaggttctgctggtgggaagggatgggacccctctctgctgcccccttcttcccttcaacaacttgaccatctcttgatgttcttg

SEQ ID NO: 489997 - DNA, 464 bp, Homo sapiens
tgtggagacgggggtctcacctggtggggatgggccgccaaccccagggactgggcccagcaagtccggcaggagcctggggggatggggaaccccagcggggattcctcggccagcagccctgccgatcccggggcccccggcagctccagcaagtggaactcgagcaataccagtatcttggggaggaggtccctctacggtcatggagaccagattctcccctcgcagcagcaccagaccgaggactcgcttctcttccctttcggctggtggggagttcttgggcttgatctttctgaactcatcacagtcacagaggatcaaattcaggtgctggtcaaaagcctggaaggtgccaatgaagatccggccgtccggcgggatgcacctcatccggtaatcaatatggtgcagcatctggctgctcttgcccaccgtcaggggggcggttctgatggctc

SEQ ID NO: 489998 - DNA, 908 bp, Homo sapiens
ggctgccgcgagcgtggacgcaggcggatctctgaagagctgggtcgccagcctctcccgcgcacgttgcctggctccagcacctacttggtcccgcgcgctccctcgtgtcgcccctcggagcagcagccgccgcggtcgccgtacccggaaagaagtcagagacgccgcgaggtcgccgcaccgcatgcccaaagaataaccggtaaccggaggtacaaacagacgcaggggtacagactgagaatgactctgaaaaaagagaactggtattcaaacgaggatggtcaggagtatgctcaggtattcaaaatgttgggaaatggacggttagaagcaattgtgtttcgatggtgtacaagaggttatgtcaccatcagaggaaaccttgagaacacaacggtttgataaataacctcggacatttatttgggttggtctccgagactaccaggataaacaaagctgatgtaattttaaaataccaattggcaagacgaaggctagaagtctgaaggcaataacggggagcttcaggagcattgctagaattcaatgaaactgatacatttggtccctggagatgatgatgaaattcagttttgctgaccttgccgatgatgcatggacgcattttggtggccctcttacattgaacttcgacattttacatccctctttgctgaaggattgtcctacaccttgggtttggtcctgccacgacgactttaatttcttagcttgaatgccttggtaagcaaactgggtggtcaaacaatttgggtttccacggcacaaggcgatactgtaagagtagcccctgtttttggaggcggcgcggagaccgtctttacacaaaaaccgccttgcgtcccccacggggggaaatcggccggcacacgcgtgga

SEQ ID NO: 489999 - DNA, 175 bp, Homo sapiens
  misc_feature (175)..(175): n is a, c, g, or t
cccagagcacagagggtgagtagcctatcacgtgcagtaggaggagataggacggtagtacacgagtctgaggaggtgttgcgctctattggtgcaaacaaaatattctagtatcacagttcccagcctgtccagaaccctggtcctgaattttcatatccttgtttgcctgtgn

SEQ ID NO: 490000 - DNA, 276 bp, Homo sapiens
gggggggtttttttttttgccccggggggtttccgggttctggggtcaaatgggccccccccccccgctttccaagggcccgggccagttggggtttttttccctcccctcttgcccccccaaggggtttttccccttttaaaaaatggcctttctaaattgggtttgttgggggggcagtttttttaaccgggaaattgtaattcccccccaaaagttttttttccccggtccccctgacttatttccccaaaaagggggggtttggggggccca

SEQ ID NO: 490001 - DNA, 385 bp, Homo sapiens
ttttaagaaaagataaccccccttttttttttttataaaaccaaaattagtttcaaatatttttgccattgggatttttttttccccatttcccagcaaagctaagggtattttaatcattatttttgccggtcataaaaaaacttttagctgaaatggccgaaaactgtgaaccatgctatggaagctgaatcccggccgctagcccagtttactttttccctttttaatcggctgatgttactctcccttgatggggttaaccccttttaaaggtaaaaaagccagccagtttgaatatttgtaaacttgtttttttttgggaaatttaggacttaggggtcctctgttgctattgttttttatatatcccaaagaaaaccca

SEQ ID NO: 490002 - DNA, 186 bp, Homo sapiens
ccctaaaaaaaaaaaaggtttctttggggaaaagggaaatttaaaaattcccggggggggaaaacttttttatttccccccttacccccccccagacttccttcaaaatcaggggcaaaaattttttaccggttttaattattggctttcaagcccgggagaagaaaaccccaactttttttttta

SEQ ID NO: 490003 - DNA, 133 bp, Homo sapiens
acaaggacaaggacggatacaaacccgacgttaagatcgaatacgtgaatgagacgggccggaaactcacacccaaggaggcttcccggcagctgtcgcaccgcttccatggcaagggatcccgccaagattg

SEQ ID NO: 490004 - DNA, 109 bp, Homo sapiens
tcacactagtcgctagaaaacatgcttcaatattctatctaatgaaaacgacaccatgcagaacaataagctaatcctctggatgtgcggtatttctcttcaactgcta

SEQ ID NO: 490005 - DNA, 238 bp, Homo sapiens
ctgaccacctcggcacaggtcatgttctttcctgacccattgccattccccttgctgccctgtgaccctctgtctgtccatccatcttcatcaaccactcgcagcggacccctgctcactccctccgatccccgctccatccgtccgcccacacatgggcccatctgactgtcgcctgcctgtagctagccctgccgtgagcagtctatccctacccagccctgcccatcacttctgc

SEQ ID NO: 490006 - DNA, 987 bp, Homo sapiens
  misc_feature (327)..(327): n is a, c, g, or t
tggaaacttataaaatccctcaaaaacggttttttatacaagtgattttggattcaccaatgggcttatcggtaggatttctggtagcaagcgcgggcaccagggcctccaaatctttttgggactacgcagcgacaaggtggtcagctaaccagcacgggtccggtacataactgggatagacggatcgtcttagagatactacctttctttgcgaagcctacataccactaatatttctgggtacataaggccaccagggcttctggaccagtggcctgcacggaatacgcaataaatctcttgggccacctgtgaccaccaccnctttttacacggaccacggatgtgtcataccaccagaaaattcgtctccttatgccagaaaacgcaaacacgtggcctccaccagcttgggctcgtgatcagctgtgccgcgggcatcaaatcatactcccaaggggctcggccccgtttacactctgtgatcttgaatacccatagtgccccgggatttgagcccagtgccgcaccacacgcttgttccgccatgatactacacatatgaccgtaccggaagaacacttgacaacgcggatcgtgcaccggggcaccccctttggacaccgggctatagggcctcgcagaagcctgtttggcaaccttaagcaacacaactttcaacccggccgctccgggtcgcgccactccaaattagctccggggattgccggaacacaaaacgcaggcgttatcttgacagcggtgcgccccccagtcggcctccaactaagccttgtattccccgtggaaacccacagaatatatatcttcgggattcacacaacaagcgtgagttaacaaaatacttgacccgggggtgccatcccattattctagggcgacgtcgctttattataacttattcggcatcaacagcccacgggcttcacacccctggcatttacctgacggcgtgcgaaacac

SEQ ID NO: 490007 - DNA, 305 bp, Homo sapiens
gatcatactttagatatgagttaaataaaatctattaaaattatgagaacttatggacacaaaagaaggaaacaacgacactggggtcttcttgagggtggaggttgggaggagggagaggagcagaaaagataaatattgggtagtgagcttaattcctgggtgatgaaatgatctgtatgacaaacctctgtgacatgagtttatatatgtaacacaccttcacatgtaccctcaaacctacaataaaagttaaaaaagattgcaacctaaaataaatggataaataaaatctgttaaaaaaa

SEQ ID NO: 490008 - DNA, 172 bp, Homo sapiens
ccgacagccacggacgctggcatagcacaccctacaagtcatttctgcaaggtgccattagtcatgtgccacctgaaacaagaacaatctgcacaccccagagtcgtactcagaaacatctattccctggatacaatttacacgtcattgcgacaacattactacagtccta

SEQ ID NO: 490009 - DNA, 121 bp, Homo sapiens
tacagccgatgaatatatagttaaatgtctgcggcgtagcttaggtctagaggtgtcagcctgagtaatacggcgaaatcagatgcatgaagcctccattttatggcaaataccagctcct

SEQ ID NO: 490010 - DNA, 267 bp, Homo sapiens
gttgaaactagcctgggcaacatagcaagacctcatctcaaaaaaaaaaaaaaattggtcttgggaacgggattgtcagaggcagggttgtcaggtgtgttgaccccaaggctgaaaagccatatttgtgagacatgaggccctctagaaagctgttgtggaaaatgggcccagggctctgagccattcggggatttggagcacctatttcatgacagccactgggggcaaggactgggggagagagaggtgctaaacgttctgggc

SEQ ID NO: 490011 - DNA, 243 bp, Homo sapiens
ttttttttaaaaaaaaaaaaagaagaagaagaaagaaagaaagaaaatagagccctccataacccttagagtgccttttaattatttgggtcttacccaaaaattaggggaaattcccgtttagtgggagggtttcctgttactacgatttggatttcccctttaaataaactatattagttttgcttgctttttccaaaatattatatttttccttttaaaagctgttcctgctcttatttg

SEQ ID NO: 490012 - DNA, 199 bp, Homo sapiens
gaaagttaactccaaaattctttctagaataagctgaaacagggaagtggtctgtggtgtccagccactcaacaggtccccaaggttgtacactgagtttgacatttggtatcgcttgacaggacgcaggtgcaacaatgctttactaataagaataagccaaagaaaaccagcaatttccacccacaaagtgcaccca

SEQ ID NO: 490013 - DNA, 211 bp, Homo sapiens
  misc_feature (182)..(182): n is a, c, g, or t
ggcgctctttcttactttgtcgagctacccggctgaggtgtactagctcgggcctttcctgaggaaacgtgccgtcttgacgcctctacctgttgcactgtcacagacggtacaacgtcggtctcgagtatggatgtacatgcttggctgatggagcgcctatctgcatgcttgatcggtcncatcgtaatatcgacttgctatcatacat

SEQ ID NO: 490014 - DNA, 1358 bp, Homo sapiens
cagatggtctcactgctcttcggtgccatgaaaaaaatcactgctggatgagaaatccttacaaatgtaaacagtgtggaaaagcctttatatattaccagctctttttctaactcctacgaaaggactcacacgtgtgagagaaagcttatgaatgtaagcgatgtgggaaaggcttcagattgtcccgatgtgaacgtttctggaaggtcgactgtatgaaaaaccttcaatacctcggcacgacgaacatcctcttttgtagtgtatggggaagtcgttgtgcgaagagccattgcatcttgtcttcgacgttcaacgcccatttgccgagaatagcacctggtggtaaacaacgcacaacgacgggggcaagtttctaaaccttctcatgaagaggtgattacggagaagttgttcgggggaagcgcctttctaacgtcagtcataaggatttccggtgattgaaagggtgcgacaagatatatggaaacttcgatttctttgggaggaaaaaaaccccggtaatggaaacataggtcacaaacagagtgttgggttacaaaggccgtgtcaaaatttgcttaccacagggtttaacacgttccagccttgccacgcacagatgtacgtttccacccacctgggagcgaaggactacgagaccgtctacagaaactggtgacccaggcacagtggctgggttcaaagccccattgtcccttttaacttcccatgcgtccaccatgtcccgaaagttcccagttgaatcgccaggtaagcccccaattacttacggacgcaagcgacacaaccgccgtgaactggcaaattggcccaaacacccaagcctggcttgcgctaccgggcgttccctttcccacttcttttaaccttgtcccacgttcccaaccccttgtacaggcaacccgggccaccccgtacaacacggaaacggttccacccaactttgggcaaggtttgcacacatcccgcccactagcattggcacagctcgctcacaggccaacagttggtttgggggccacacaaccggccgttttacgcacacttgcgtggtagcgaaaccactctgccgcccttgacagcaagggttacgcagcctaacaccagacagcgttgccacttacgctggcgaccgacatagcgaccaccctctcttcccaggctggcttagtaaccgcgagtggccgcggactaacaacgcgcccgttactcacgcttgcttacacgcttcacaacggcgtccttatggacaccgtctgccccgggcacacggggcactctccagctgacgtatgcgactctgcgacaagcccccctacagcgacaccgct

SEQ ID NO: 490015 - DNA, 457 bp, Homo sapiens
gcagctggcaaagaaggctgtgacatcaatgctatcatctttcacacaaagaaaaagttgtctagtgtgcgcaactccaaaacagacttgggtgaaatatatggtagcgtctcctacagtaaaaaagtcaagaacatgtaacaactgtggcttatctaggaatggaattggacatagcccaagaacagaaagaaccttgcaggggtaggcaggtttcacattgcacatcatggcagggttaagtgctatatctaattggtgcctcactggacttgtccaattaatgaagttgatacatatatgcatcatagtaggtcaagtaataagcatcacattcaagttacactgtctctcatgtcatcatatagctataggttacctagtgtatagctatttaatactaatttcccataagcaatttgggtttagtgcacagcatactacatcccgggttgat

SEQ ID NO: 490016 - DNA, 83 bp, Homo sapiens
tgtgcggctatgagcggtgcggcgcggctctcatcgaggcggcggcggcggcggcggcggctccggcagcatcgcccccgccc

SEQ ID NO: 490017 - DNA, 905 bp, Homo sapiens
tctcagctcagtgcaagctccgctcccgggttcactgccattgtgctgcgtcagtctcccgagtatgctgggagccatcgtcgtcccagtctaataggactttgcaagtcagtattactacgatttcacattagagtgtgggacatgtgatggtaaagtgccgcgtgataggctaaaatacgtgaatagtatacagttgtctatgtgcattgaagcatgatgctgtcccgtgatgaggatgaaggaaagtagatattcgttttcagctgtaggattcatggagagctgttttgtctacttgttctaccccagatttaacctcatacattgcttgtatagatactaagccatcttgaaggagctagagagggagggtagaagacaggaagggggatctatgtggtaacctaagaggaagtgtttctgttgtgtggaatgatctgtgtgtgtggtggtttgattgttttgcttagagagaatcaaaagagggggcaaaagtgagaataccaggagatgggtctagtagatgttgaagctgtgtttacagctagttaatgctctactgtctttgttcaagagacgattgttcactggccaggtcgtttttggtctgagcgctatggccagcaacttataaatcatgcctgtgtagatgtcgaggggtctgtggcatgtatctaaggggttactctgaatgcggaattgataagtcgataagtctggtaagtgaaaccaaggttattctaatggccagcggggggggttgtaattggaaaggatagggtccttggccaatggaaacaggtttaaaccgggaagacgcggggcaatggaaaggattgtggaaaaggggtgaggaggggcctttaaaagtgggggaacccaaaaacaggggggaggtgggg

SEQ ID NO: 490018 - DNA, 668 bp, Homo sapiens
  misc_feature (395)..(395): n is a, c, g, or t
gagtctcgctcttcgcccaggctggagtgcagtggcgtgatctcagctcactgcaagctccgtctcccgggttcacaccattctctggcctcaggctcccgagtagctgggactgcaggtgcccgtcaccacgcctggctaattttttgtattttttgtatttttttttttttttcagtagtgacagagtttcaccgcgttagccaggatggtctcgatctcctgacctcgtgatccgcccgcctcggcctcccaaagtgctaggattacaggggtgagccactgcgcccagcctgcttctttgtgttttatcttgcattgcattactgtggagagaagcaattcatttaaaatatctggctgatgcaaaggcataagaaggacacaatggactntggaaacttggggggaagagtgggagtggtgccagggattaaagactacaaatttgcgcccgggctcctgctccgggatgagggcatcaaaaacttccaaataccccctaagaacttacttatgccaccaaatcccccttgtccttaataacctacagaaacctaaacggtaatactggccgcccttccaacttcgcctcggaaacccctcgctcccaatctaatcgctgccacctatcccttctgcagttcgctctaccccaatcgcccgcc

SEQ ID NO: 490019 - DNA, 1204 bp, Homo sapiens
  misc_feature (309)..(309): n is a, c, g, or t
agcggcgtgagcgccgcggcgccgcagccatgaccgggagtacgaggagtgcgtacaaggactaccccgcgcttcagggcgaccatagacgaggtggagacggacgtggtggagatgaggccaaactggacaagcctgtgtgaagcttttagctggtagctgaatggggagaatgcgaagagaggccgattgtacttgggcgacctaggatggcatgcgaaattgactatgcgagacccgactgaccttgagtcgcctgctattagccaatatcagggctggccatgcatgtggcggataaatttcagnggtaaagagcatcgaagatctggccgatgaatgatggggggaaatacgaatccgatttagataccttagatgatgtaaaatctcctagtgaatgccagatcaatcattgggtgctacctttaatttgtgggacaaatatagtagaggtaactttagtttatgcagaaaaggttggaagtaatcaattatagagcaagaaaacatggagagatcttgagaggcaatgcgcctatatagatgtattgtgcccagtagcctcctatatctacgtggagccccagcgaggaagcggttgattcccatcctgaatcctcacagccgcgacagccgatagtgagatatcttgcccaacccgggtctaattgtacggaaaactgtatataatgggcccaggagaaccacgtgttggatcttggcgaatagctcgggtaaaaaaaaggcggttaaggtgcaaccctaaattgcttccggagaggcttaaccctttgcataatcatcgggctcggtaatctcatttcaatttctaatactcgtttccagttttacattgctttgttcttacccaagttaactcgagttggagggaattcggcgaacaataaaattaaattcagttggtaaacccttatgcgtaatttgggaacaggtaataatatgccaacttgctattttatagtgggtttgtcttgaaaactaatatggtgcgcggaaaagcgggctctttctctgaccgcgcgggcatccaatgaacaagcctattgtgagactgtgtatccaggcggctcaagggaatttgggtcacccataaggcggtttgatttgtgccgagatatggcgtcgtcgcttttgtatttggctagggttttctatggtttggtcttgcgcgacactgggt

SEQ ID NO: 490020 - DNA, 461 bp, Homo sapiens
tgtgtgccctctgctgttgcctggtctggccttctacttttgctggtctgagccctcggcttctgcctggttgggcccctcacttttccctggttgggttgatctaccttttacctggttctggcccctccgcttttgctggattgggtccttctgctttttgcttggtttggggtccctctgccttttcccttgattaggggtccctctgtctttttgccctggtaaggggtaccctctgcctttctgccctggtttggggctccttcagcctttttgctttgattctgagtcccctccgcctttttgccctgagtagtgccagtggctggtgtgttgcccttgccacccactgggtgcacatccaccatcggcacctccttgggagcagttacaagatggcagccttcgaagtgagaacctggatggaatcacaacagagctgaaagctgggttccact

SEQ ID NO: 490021 - DNA, 410 bp, Homo sapiens
tggactctgtatattatttgcaaatgtatatgaatggtctcatgcagcagataatcttttgagataggccttcttgacccagcacaattcccttgagagccacccagattttttgcatgtatcaatagtttgctcctttttattaatgagcaatattccagtggcatggttgtaccagtttgtttaaccatttatctgttgaaatacatctgggttgtttccaatgtttggctattacgaattgagctgctacgaacattcatgtacaagttcctacacaaaaataagtcttaaattatctgaaatacattgcccaagagtacaattactaggtcatatggtaagtctatttttagtcttaacaggaactgacaaactattttccagagtggctacaccattttacgttc

SEQ ID NO: 490022 - DNA, 1429 bp, Homo sapiens
cgcaatattcaaaatgtctacatgcaactcactacacacctctgtacacacaataaaaagaaccccataccaattagcacactccaacatactacacctacaaacccacctccatcatcctcttttataacacacaaactacacactacacaaacaacataaaagtatatatcacaacacaatccacatacgacagaccaacacaactaaacatcacacctcccacacacacaaccatggaaaggacccgcatgagaagcccaacccaccaaacgaaccaccaccactaaatggagagcggacaacgcacaacacgcaccgcgcacctacgcggcgaccgacgacacacggcaacgcacaaacgcgaaggcgcggacgcgagcatacgaacccccaccctggccacctgcacgccccgcgcgaacaagccatccatacttcacccttacatacacaaacgtcatcctcccatatcacaacattacaaccctaacacacatcccctccccaacaacacacccaccactcccacccacccacccaaacaaacattatccacccacctcacactcaactcccacccacaaaatacgcaacccacccacagccctcaccctcacctcacacccaatactcccataacacactacctctagcataacactctcattatactaaataacaaacaatcatacaatatcactatcatccctcacatagtaccgaatacacctcaacaattaccacacctcactcccaaatacaaaactatataaacaaaacaaaaaatatacaataatatccctaatacatttagtaaacattattctacatcacatacccatcgcaccatataactctaatcatcacaacaaacaatcatacatacacccactcaccaccataactttaccccaaatccacaataccatacacaccaatttacaacaacaccacacaaccaacatccgatctcatcacactctccacatctactaactcttactcctctctccctatccttcacccgtatccagacctctccaacaacaacccaacatcacttaccctacccactaaatcacccccaccacaagccacacacacatacaccacaacatacatcacagaacattcatcctataccactcaccttaactcctgcccatcctgcataccacgccatctaacccacacacaccccgccacctctactacctattctctcaatctcaccataccatactcctcctcccaacaactaccccatccccaattcgtcattcctcacattttcacagcacctcatctaaacactaccactcccacttctaaactctatcacagaccatactaaactacacactatacatcaaccaatccactcacctcctaccacacacatcacatacacactcctcaaacttcc

SEQ ID NO: 490023 - DNA, 294 bp, Homo sapiens
tttttttgggggggggggaaaaaaaaaaaaaatttgggcctttggcccttttttttggtttttaaaaggggcccctttttcccccccttttttaaaaaggttgggggcccctttttaaattttcccccccccgggaaaattttttttgtttttaggggggcccaatttttcccctttttgggccggttcttccccccctgggttttttccccccctttggttccccttcccgggttttttcccatggggaaaaaaatccccttttttaaggggcctttttggttttccccctta

SEQ ID NO: 490024 - DNA, 394 bp, Homo sapiens
  misc_feature (194)..(194): n is a, c, g, or t
  misc_feature (319)..(319): n is a, c, g, or t
  misc_feature (373)..(373): n is a, c, g, or t
  misc_feature (389)..(389): n is a, c, g, or t
tcttccctgcccttcccagggactaagaggctggtgtctggctggattccctggaggtctgggaatggggagggcagaggcaggaagctcagcagcccaggcatccccggagccggacactttgcataccctctccagccccggactccttgctggttgctgaaagattcccattggaactcagaccctgtggnccaactgttgcctcctgccatcctctctggctggcaagcacttggtgttccagggaccctccttcagttgggggttcttaattcccccttcccattcacaagccggccttcgtttgcctttcctngcattgcaggctttgcttcctgttttcaaccctgttgggccaaaagcccttttnggttttttcccaaaantgcat

SEQ ID NO: 490025 - DNA, 191 bp, Homo sapiens
catcatgacctccaggcatcaaaggatccttccatctcagaacatcaggattagctgggacaacagagcacataccatcatgcccaggtaaatataagtataaaatggtagagactgggattacatcattgttgctctaggctgctctctacatatctagagctccagacgatccaacactcctcagacct

SEQ ID NO: 490026 - DNA, 180 bp, Homo sapiens
cgtgtcctttgattcctttctcctgaatcacagtctggagtatacagtagctgctcttggcctccacactggggatgccgctgcactcccacttgttccagggcttccagtggattcttccgaggccctgatgtgagaaacttccccattggtgtgcaccaagagcaggcctcacatggt

SEQ ID NO: 490027 - DNA, 806 bp, Homo sapiens
aattcattgacgtgccggggcgttaattgatacattacgtgtgccgtgggctgacaattatacattgccccgccgggcaggaggctagtagtagggccctcggtggggccacctatcctagtacagtgcccgagggacggtagggacagttgcccctgcgccaagggagcccactagccatcccccgctggctggcgctgcagtcgcgcaccctgtgttagcctagctagactatgcttatagtctagtattaggaagctagctatctgtattaggccacagcgcctagtagtatcctagggctagataggccacagagctagacactatgagggtatatgagtatccagacttgcagaccctgggcatccgctatacttcctaccgcgccacggctgctgtgcttccagaggtggcatgatgcctcccggggccacggtggggtagaaggatggcgagccggacataccattgtaaggatgtattttttttaaaacagcaataattagccattttaaaggagggatgtacctgtgtagtgtgcatgtgcacgtgtttgagcgtgtgtgtgtagtgtgcaagtgggttcttggatatgtgtagtgtgagcatgttgtgcatagtgtgaagcctgtgcacgtgcatgttgtaggtgcataagcatgtacacgcgtgagcatgcatgtgcgtgtacacgtgtataggtgtacattgtgctgattggtggaccatgcgtgacccgtgtaagatgtccgtgtttcccatttccgttcctcatgcgcccgggaagaaacatcccgtttcat

SEQ ID NO: 490028 - DNA, 165 bp, Homo sapiens
ctcgctccgctctccgtgaactgatcgccagttggctgatcagcaaatccatggagcggctcacctagccaattggtgcgcgtacttgatcacatgggcaggaaaaaattcttcataaaaagcagtgggaatgccgaggatacttatctcgatgcaatcgggcag

SEQ ID NO: 490029 - DNA, 318 bp, Homo sapiens
cgagtggatcttctagggaataacgccgggtaatgcctgttggggctcagcgccccctaagttgcggggtaggggttagcctgaagtgttcaaagcctcagatatatttgctatgcacaggtggtgttttgagcccttggtatgtcctttgtcgtgttacatcgccccaccatgggtatacggaatgtgtcatgattagtagacctagcaagaggctcgttatggagtgcaagtgacatcacgtgcttagccccacgctcattaagatggtttatcccccccgtctcagttctcatgcacagagttcttctatatgct

SEQ ID NO: 490030 - DNA, 580 bp, Homo sapiens
  misc_feature (44)..(44): n is a, c, g, or t
  misc_feature (51)..(51): n is a, c, g, or t
  misc_feature (53)..(53): n is a, c, g, or t
  misc_feature (55)..(55): n is a, c, g, or t
  misc_feature (62)..(62): n is a, c, g, or t
  misc_feature (580)..(580): n is a, c, g, or t
agaagaagtgagagaacaatagggagagtacagcaccatggagnatcattngnanaggcagngaggcattgagaagaaaaacgggaataaggagattaaggttgaggagagataagaagagaagatatggagagggaggaaagaaaaaggagatgagaggagaatgaagaagagagggaaaggaggaggaagaggaagagaataaataagggagaagagaagaaagagagaagaagaggaggaagagaagtgaggatgagaggagagaaagaaggaagagaggaaaagagagatgaaagaaagagaaagaagagagataaggaagagagaggaaaggagaatgaagaaaggaagagaggagaagaggaaagaggagagaagagaagggaagaaagtgggaagaaaagagagagggaaggagaagaaggtaaaagagaggaaggaggagatgaaggagaagaagagaaagagagaggaggaagagagagaaagagaagagagagagaagaagagaaaaaggagagagagggagagagaaggatatagggaaagggaggagagagagaaggagagggagagn

SEQ ID NO: 490031 - DNA, 944 bp, Homo sapiens
  misc_feature (927)..(927): n is a, c, g, or t
ggaactcacaccatatgtgtcctgttccagtgcgcgggtctgtggagagccgggtgtgatcgtgggtcgccggagggcaatcgagctgagcggagacctaagagtcagccgggagacagtgggtctgtgagagaccgaagtagtaggggctggggccacgatgcgcgcattgaacatgcaatggggaagaatcagaataacaagagcgaggagagagctaaggatgactgttgatcttgatgcccttggttgcaggaaatagaaggagcgtggtgatgcttaaagaagaggagcctcggtatagtcatgcagggaaagagattagaggagtaaataaaagcaggacttcgttgaggatgatgtcctgaaagaagtggaaggaatggtcttggaagtctcaaggcagtcatcagtctgactagagaagtgttgcaggtgatggcaagagagatcaatgaagtaggaattcgcctcaggagatgagagtggagaaatcggcccatgaggggctgcataacaggagttttgatgatatgataggcgaagaattgggtagataaagattccaaatcaaaaaaagaatgcaaaacgaaagtggaaatgtactctgggagtggctgatgatgatgattttaacaaagttcctaaaaaagttaagggaaggtcaaaatcaatagagggatgggtcagggaggtggggtacagtacaaattaagagcgtcaggaataatttttgtgaagtgggtggatcatgactttgaggctaaagggaaagtctgaacagcagtcattgaggggtaggattaggccttaattaacggcaaaaggaaggggcgaaacggtcaaaccattgagggataaattattgcgataacatatgggagtagggtggctcccccttatatttgcaggcatatataaaatatntaatgtatatcatactc

SEQ ID NO: 490032 - DNA, 213 bp, Homo sapiens
tcttaacatcgagaccgtcaacgcaatgatccaagacaatggatggcattcacgtcctgaccagcagagtgttgatctttgcacggaaagacagctggaagattggcgcaccctgtctgactacgatcatccagaacagagtctaccctgccacctggttgctccggtctcagagggtgggaatgcagactcttcgtagaagacccatgacat

SEQ ID NO: 490033 - DNA, 162 bp, Homo sapiens
ccacatttgcaggaacatttatactgcttataataacaatattttcacagttttgatttttataagtctgtcatcatgtgctaattttgtgttattttataaattcttctttaaagccattattacgttaaacgattaagactcataatcttatggtaatct

SEQ ID NO: 490034 - DNA, 376 bp, Homo sapiens
gcttcccacccttttgaactggacggtcctttcggtgtccctaaagtggttggtaaggttcttgaatttgattccctcactggtgagggtcctggaaaagttttcaggaaaaacccttaatttatggagaccgttgcggaaaaagggctgcaggaataccgccaaaagcccccggaggagttaaatgtggaagttggttttgcccctacggggggattttagttcaggtcccccccaaattaggtgcagccccccaaaaaaaggtttggacgtcaccaagtaaacaggccccagccttcaggcccccaaatccggccagcctttccccggtttggatcctgcactttaacactcgactttgctggtcatgggaaga

SEQ ID NO: 490035 - DNA, 273 bp, Homo sapiens
  misc_feature (273)..(273): n is a, c, g, or t
taagtaattacaatttttttaataagtatggtggtcctttccataggtcggaaattttcctcctggaggggaagcaagtcttctggttgggcccatttggattcccttgatttatcacagggtatatcctttcatatagtaggctaataaaaagctttggtctacacacctggcataatcatagtggggggtaaggtcaggtggagatagtttccatccataatggaacatccaaaatctggatcagttaagaaatttcggtgcccatttcan

SEQ ID NO: 490036 - DNA, 282 bp, Homo sapiens
tactaggtgggtgggtttgttctttgagatggagtctagcgtgtgtgggccaggcacgagcgcggctcatggcaacctctgcctcccgggttcaacgcgattctcctgtctcagcctcccgagtagctgggactacaggcgcccaccaccacacccagctaaattttgtatttttagtagagatggggtttcaccatatgggtcaggctggtcttgaacttctgacctcaggtgttctgcccaccttggcctcgcaaagtgctgggattacaagcatgagcc

SEQ ID NO: 490037 - DNA, 163 bp, Homo sapiens
ggggggcccccttttttgggggggggggggggtttttttttccccccgggcccccccccggggtctatttttttttttaatgtggggggggtttttttattccccctttttttttgcggggggggtttgggggggggctttaaaggttttttttttcccccca

SEQ ID NO: 490038 - DNA, 369 bp, Homo sapiens
cttataggaacatcgtaaaaactcactcctaggaggcaaatcattacccgctactttgaacatttcaagtcttagaccacttgacagcatgtatagctagtggacgtagtagccagccatcttcaacagtccagccctcgcatcgcattgcctgtcgccaattgatacctcaggttatgcttttagtaagtatcagcataggtaagcgcatgcttcaatcagggatagtcgcaagcgtataggatatgaccttgtgtgacaatttcgtgacagctatgcttattaatcctatgcagaaggttcatatacagcaacaataagtatgttgcatatcaactttgtgtgcaagatcagaaagcatcacatttt

SEQ ID NO: 490039 - DNA, 284 bp, Homo sapiens
taaagagccaaccaaggcgctggacacggcctcctcgtgatagtggagaatgaggacggggacttcatggtgtacgagtgccctggcctggcccctaccggggaaataggaggtgcgcaagcctactgtacgaccacgccgcactgtacctgcgcccctaccggcccccagctacaccgcctgcacttgccatgacctggaggcagactgacgcccaactactccccgacctacgaggccccctggaaggcgcaggccctggagcttcccactcaaaacatgtt

SEQ ID NO: 490040 - DNA, 131 bp, Homo sapiens
catagctggtccctatctgcttttagagcaatggtgagtgtacatgaagccaggctttccaatgtccccagaatgatagcaggaaccaggctgggcacagtgtgctcatgcctgtagttccatgcactttg

SEQ ID NO: 490041 - DNA, 200 bp, Homo sapiens
tgtagagatggggtttcactatgttgcccaggctggtctcaaactcctgacctcaactgatcttccctccttggcctcccaaagtgctgggattacaggcatgagccgctgcctctggcctataccaatgatttttaagtgcaattagttattatctccctgtttcacttatatttgtcttacccttctgtcgtcttctc

SEQ ID NO: 490042 - DNA, 871 bp, Homo sapiens
ggcgaggactaagcgtcgtaatagtgaactgtggccgaagccgccttggttaaccgcgcgagattgtgtggcaagtcttttgaaacagatggtcaccatgtggagatattagcagtcgcgtatgtgcatgtcatgcattgtgaagaatggtacagagggaaacaacaagtgaagaggataattgagtatgaataaaattgcattgccatcgaggagcaaaactttgtagatgatgccttctggtaaatagccaggagttatccgaaagcagagcagcgacagatagtcatcaatcaaaatccccagatagtcaagatcatgcatggacccagccacgcatgagacaaaagctctgccgtaaccagtatggacatttgttctgaactattcgtaaaatcgactcgctcttgtagcagctacagtgctccatcgcagagctaggtgaaccctcctgcttggccgacgttcaccacggtgctcagtagatcaggacatcaatgtgagtgccctgaaacgagctccaaatggacacgtatgcaattcaccccgaaaggccttttggctgagtgccgattaagcaaatggcagtgaagctagtcatacaagaagcggcacggtgcgaaaccacaggtacaacaagacaccaccacgaaccattgaaccccaggattattctctaagactacgatagccgcaccgtatggaaacaaaaggggcgttgggggcactcctgcaacattccactccttgaggaattcctcgtaggtgcactggacccgaagtaaacacaccacggccttggaccagccttgcgtttccccctcaaaaggtccccttccgtgggcctgggctacctcttcgcaactcgaaa

SEQ ID NO: 490043 - DNA, 263 bp, Homo sapiens
tgcgtgaacaccgtctctagtaaaatagaaaaatgagctgggcgtggcggcgggcacctataaccccagcgggctcaggaggctgaagcacaagaatcgcttgaacccaggaggcagaggttgcattgacgccgagattgtgccactgcactccagcttgggtgatatagcgagactcagtctcaaaaacaaaacaaaacaatcttcatatgtaccggtatcctttctcaatcctgatttcattataatgttacctttttccc

SEQ ID NO: 490044 - DNA, 629 bp, Homo sapiens
gcaaagaggaagagaggaaagattttctacaaaagcaacagccatgaagaacaaggaggaaaggtgtgggaagaacattctaggcataagaacagtataatcagaatgtaagtgtgaaatgtatttgggaacctcaagaaactaagtatggcttgagtataaagtgaaaatggtgcatgagtaggcagtggtagtatagagagtgccacagaaactcttggttgcctacccaacatacaccctcacttcttgttaaggaaggcactctcagtaggtctcacctcagtcccaggggatagttatgattaaaccagtcactttaactccatttttcttttccagtcattagtctgtgggtagccatatgacctagctctggccagtaaactggaagagaaagtctattggagaattctggaaagattgtctttcctagttaagagagtgtgtatgtgagttaatctctggaaagaaggctctttttttatttcctccatccattccttttacttccgtgctgtggtacactgtagagtgtgatgttcaaagcaatgacagtcaacttgtaatcatgactaaaaggtggtccactgagaatagcaaagagcgaagaaagggtctggatcctg

SEQ ID NO: 490045 - DNA, 343 bp, Homo sapiens
tacaaagattattctacgctaccaactcagtaatgtttttaagacagtacatttgcttggaactctggagaaatgtgttgcagagatagatgaatggcagattgaatttcatttatacactaattaccttgtgatctctgcacagttacctaacggtttgagtctggagttacatttcatgatgctatggcagatcctgagatggacttagtggtgatgcttttgtaatcttcttgtgtgtagtgtgtagagatctttataagatcaaagtactgattaactattaagtacaactttgagattttagcttttaactcttcagaagcgcgagtgtgaagataga

SEQ ID NO: 490046 - DNA, 729 bp, Homo sapiens
agcgggtggagctgccagagtaaagcaaagagaaaggtaagcaggcccgttggaacgtggttgtgactagacgcccagcgaagtgtggagcaagcctggggtcttgccctggctctctgtctcgcatcaccgatcgggaggaactagagagctcatggatcgatagcgtgcctgtatgtagatggcgaacccccagactggagcactaagagagtcaagatcctaatgcataaactcgcaatggttctagtgacatgtggttgcgtcttctgtcaagccagcgtgatacgctgtgtcatactgcgaggcatctaaagttgaagaacgacctgacgatgtataaatctgaaggaaagaaggatattctactatttcttatattggtcgttaatcgtcaaggactctcttctcgattaaaatacacatgatcttaagaataaggttacagagcatattcctggttatcaatcgagaagaatagcgaaatcagatgtcgtgggacgtcgttttatagatggagagcgaaagatgacttcactcatatatgatagatgtggccgtcttgtctatcatcttggttagccttttcccttcctaacttatccgcatatgtagaagaagccattaggattgtatactgtgaaaagaaatgtggacaactgctctactcacgactctcaacatgatgaagactagggtaaacgtgtatctatggctactgtgggatac

SEQ ID NO: 490047 - DNA, 404 bp, Homo sapiens
  misc_feature (342)..(342): n is a, c, g, or t
  misc_feature (404)..(404): n is a, c, g, or t
ggggtcaataaagggccccccaagttggtttttgggggaaagggccccctctttggggggtttgggggggtgggggttttccctttgaaaccccccaaaaaatttttgttttttccacaaaaccccattttttttaaaaaaaaaaggggggaaaaaaattttttcctttttccccccccccccaccctaataaaaaggtggggagagaagaaaaacccccctcccctgggggagcgctttttgttaaaaaaaaaaccccccccccccccccccaaaagtggttttcccccacaataaaaaaaaattttttttttgggggggggccctttttttttttatttnagaagaagagaagaaaaaaaaggttttattataaaaaacccccccgccgcgggggggggggn

SEQ ID NO: 490048 - DNA, 155 bp, Homo sapiens
  misc_feature (124)..(124): n is a, c, g, or t
ccaggaagatgccagacctatagctaacatgtatatccaatcatatcaatttatttttgtaaactaaaaaatgttgacagacaactttgtatcaacccactctatagcgcctctctttttgtcntttcctaatccaattagtaactagctgctaa

SEQ ID NO: 490049 - DNA, 325 bp, Homo sapiens
ctaggctcctgccatcaggtgcactggtggcttcatgcaggaacaccttgctggtatgcttgggctggaagctgtgtgcgagcctagcgcatgctgcccatgtccctgttggaagcccgccagttcagcgcctgactgctgtggtaggtctcccccacagcctggctggcactggcctgtatttttgccaaagctgctgtccgtggcgacagtagcaggtcacagtgttgagcaggtggaacatgtggttgagtggcagggtcagaggtggccccactgacgttgaggcttgctccataggtggccactggccctctcgcaatgg

SEQ ID NO: 490050 - DNA, 96 bp, Homo sapiens
gggtggtggactagtgggaaggaaagcattagtgagaagtacctaatgtagcataggggttgatggcgatctgtttgccccatttttaaaagaagg

SEQ ID NO: 490051 - DNA, 257 bp, Homo sapiens
ctgagcttctgtggcccacggtcctctgactgccaccctggaggccctggccctgtggaacggcgccgggcagcattgtcaccactagtgtggatctgacgtgtgtgcccattgtccggtaccttctcaggtgagccgtctcgtcctcaggctctggggccgccaggctcttcgtcctcctcccctcttcaaaagcacaggcctccacacacacacctgcacatactcatgcatgcacatgtacacacgcagtcacc

SEQ ID NO: 490052 - DNA, 225 bp, Homo sapiens
cacttctgcagaaatagtgacgcttccccgtcaatgacaaatgtcatttcttatttgtcacctattcatgtagctcatggttcctctatgtggatacttcattacgtgaaagatgttcttagttgtactacaatatattatgctcacatatgcatcttggtcttcattatattgctgttgtcatttaaaataattttttataattcaaaaacaactgtgctcgtg

SEQ ID NO: 490053 - DNA, 185 bp, Homo sapiens
gcgagttgactgcaggaggacagtggctgatagcgctggccaagctttctgagatcgatgtggccctggagggtgtcaaaggtgcaagaacttctttgaagccaaggtccaagccttgtcatcgggcagtaagtttgaagcagagttgaaagctgagcacgatataacggaaacgggaggaggag

SEQ ID NO: 490054 - DNA, 353 bp, Homo sapiens
gcatctctattgaaaaatgtcatccagggatgcagcacttcattatttcaacaaggagttcgtttaatctctttggtttttttcgtacaatggcaggaacttgcttgccccacaaccgacctgaagctgccgaggcctgctgagtaatcgtccagacttgcttcaaacttctcactaatcatactttgtacgtccaccagaacttgtcaacaaagagatatatgcttcatcttatctcatgatttccaccagaccttttaatcggaattgcccgagcctcaactaagtatacctatatcagccagtaaaagttcagttgaagagagggtagtgtgccgtgctgttaacctctc

SEQ ID NO: 490055 - DNA, 305 bp, Homo sapiens
ttccaaagacacctgatggatcccagcagagtccagtatggcaacacagcttccgtctggacaccccttgtcctgtccacaagccagggcatctgcaatgcaaatgccctttcctgtggcagcacagatgaatcagagaggcagcagtgtcttcatgcaaaagccagtcttgtaacttcagagaggatagtgcaggaaatgacatgcgcgtgaggaacagaggtttgctgaaacctcatgtaggccccagatgtggttagttgtgaaaaccgcatggaggggatcccagatggacctgtaggcgc

SEQ ID NO: 490056 - DNA, 210 bp, Homo sapiens
gctggggctttttggccgggccttttaggaccctttgctgaacctggtgtcccccctgggctgttaggtggatgtcaaggaggggggcctggggagggactccaaaaaacgcaggcttgtgtgagcctcctgcctcggccctgacaaacggggattttttacccccctttgccctgattaattttaagcaattgaaaaattgcccttcca

SEQ ID NO: 490057 - DNA, 782 bp, Homo sapiens
tggtctttggtttccattttttctggcttccaggaaaaaaaaaatcttgggcccataagggggggattttacttcatgaagtatccttacttaaaacttgcttgtgggccgcgcaggggggctcaggccggtaatcccagccactggggaggctggagacaggagaatcgctggaacctgcagggcagatgctgcagtgagccgagatggcaccacggcactccagccggggcaacaagagcgaaactccatctcaaaaaaaaaaaaaaaaaaaaaaaaacccggaaaaatatagtccttcctccgtgggacagcgcgctctcctagagagaacaagggggcgcaacccaataatgatagaggggagagggcgaccaggggggtctccccaaaaatagggaaccgccggagtactaccggtggcaaactacgggcgaagcttaaacagaaaacaccgcgcggagagcgcgcggcctattacccccaaagaaaggccaccaaagagacaaacctctgcggacaactcttacaacatggtgctcaaaaaagaagccctcccaaaaagacctctgtgggaggccccggagtgcacctgtggggaccccccggaaaaaggaggagccgtggggcaccaaacttcctcgtgctaacggcgcgttccaccaggcggcacaaacagacatgtggggcaccaacacctaacagcggggcacaaaccacagagtgtccaggacaacaagggacgacatcgagcgggggggaacacattacccccagttggg

SEQ ID NO: 490058 - DNA, 544 bp, Homo sapiens
  misc_feature (284)..(284): n is a, c, g, or t
  misc_feature (458)..(458): n is a, c, g, or t
  misc_feature (519)..(519): n is a, c, g, or t
  misc_feature (538)..(538): n is a, c, g, or t
ttcacttaggctttttaaattggctttgacagaactctgttccatgaagaatctcagataagactgttagtcgagcccagccatgggtttgtaccctcaaatacttacgagttgggcaaattcctctcctcttgaggtcccaagataacttggggttcctggcctgttagaaagtgacattcttagccaggcgcagtggctcacacctgtaaactcagcctcccgagtatctaggattacaggcacatgccaccactccctggctaatattgtatttttagtanagacagggtttctccatgttggtcaggctggtctcaaactcctgacctcaggtgatccatctgctttggcctcccaaagtgctgggattacaggcgtgagctactgtgcctgccaattcttttatcactgttgggataaggacaggctactcaagtcagatttaaccattgcanaattcttaactttggccttgagaatggtgcacaatcaccattagccttattttctggctgnactttttgggctttggtgnatcctt

SEQ ID NO: 490059 - DNA, 341 bp, Homo sapiens
  misc_feature (12)..(12): n is a, c, g, or t
  misc_feature (27)..(27): n is a, c, g, or t
  misc_feature (286)..(286): n is a, c, g, or t
  misc_feature (289)..(289): n is a, c, g, or t
  misc_feature (322)..(322): n is a, c, g, or t
  misc_feature (334)..(334): n is a, c, g, or t
cgttgactattnaccaccactcccttncacaaccccttggcggcacactccagccacatcgcggcccgagcgttccttaacgatcgcggccaggggagcgcgaaccatcgttccacgtgcgtcagagcccttccacttccatgcgcgtaaatggccccacacatagtccgggggcgtacgcgtccgggtcacacacggtccgttaagtcgcgggggccccaaacgtggaaaggtcgaaacggcgtgtcggggaaaccgatgttaggcagcacgtgcgcgcgcaatncgngtcccaaattttggcccatagtccattttcggncatccgtcaccngtcatcc

SEQ ID NO: 490060 - DNA, 751 bp, Homo sapiens
tgatactccatcttacaaaagaatcaccaatacaagtgaattagaatacctctcatgttccaactgttatgttaattactgtcatgtatgataatgcgtggaatggtaacggggtcagtagtaactcatcgaagctttagtggccagtttaaggattttatatcctattagtctgttgggaatggtacctcttacgaacatgcaccacttattttgaaagaggcaagtcagtacatctagtgaatactcaagacgggcgaacaacattctgttaaccattttatcattatgagcttggacggttatatgtgaaatacagaaaagatctcaggtctgtctgattcatcggaacttctagatcaaacacatctcttccatgtctgcagtaattcacaagttactggaaaggaaccatgtaagagggttctgatatctaaaacctacccagttattctgtaggatcttgattttatttaaatgcacagactgctgaccccatgatcctgtgtgtacttcagagatactactttacctggatgattgtattaacatgaagcctttctgatccagtaacggtccacgtttcgtccgcgtcctcaaagtaccttcgggtaatatggtgggtaacatcgaggaaatgataagctaattatttacgtggagattcttctatattgcccaggtaatctacattcctattaaagatccacacctaacagcaaaaagtaagtaacaagcactaccgactcca

SEQ ID NO: 490061 - DNA, 628 bp, Homo sapiens
  misc_feature (1)..(1): n is a, c, g, or t
  misc_feature (61)..(61): n is a, c, g, or t
  misc_feature (95)..(100): n is a, c, g, or t
  misc_feature (185)..(185): n is a, c, g, or t
  misc_feature (187)..(187): n is a, c, g, or t
  misc_feature (223)..(223): n is a, c, g, or t
  misc_feature (230)..(230): n is a, c, g, or t
  misc_feature (272)..(272): n is a, c, g, or t
  misc_feature (289)..(289): n is a, c, g, or t
  misc_feature (297)..(297): n is a, c, g, or t
  misc_feature (309)..(309): n is a, c, g, or t
  misc_feature (314)..(314): n is a, c, g, or t
  misc_feature (316)..(316): n is a, c, g, or t
  misc_feature (321)..(322): n is a, c, g, or t
  misc_feature (348)..(348): n is a, c, g, or t
  misc_feature (353)..(353): n is a, c, g, or t
  misc_feature (402)..(402): n is a, c, g, or t
  misc_feature (413)..(413): n is a, c, g, or t
  misc_feature (444)..(444): n is a, c, g, or t
  misc_feature (449)..(449): n is a, c, g, or t
  misc_feature (456)..(456): n is a, c, g, or t
  misc_feature (509)..(509): n is a, c, g, or t
  misc_feature (530)..(530): n is a, c, g, or t
  misc_feature (542)..(542): n is a, c, g, or t
  misc_feature (545)..(545): n is a, c, g, or t
  misc_feature (622)..(622): n is a, c, g, or t
nggaggatgagcagtccctgtcctcagggatccagcgctggacgtagttggggccgttgtnccgaggccacacgatcacagtgtctctggatgcnnnnnnggggtcctctgggaagaagttgaatggccggagcaggaagcccacggagttcccaggtgtggctgtgttgggaatgtcctctgantnggggatgtgcaggaagcccaccgtcacccaggccancaggtcntcattttcaatgttctcgttgttgtgaagaaactgctaaaanccaacgggagggtcccnggggtcgntctggtggtagntgctnangctgnncagatctgactccaggtaattgatcnatgcnagggggtcccttgccccagtgcatggcaatgctccatcaatgaccagcnatgggggccanacacacatggtcggcccatggagtggatatnacaancggtagntgcgctatagtggaccccaggggttcttctagggggatggtaaagcgcaggtncttgggccaattccttttgangaggaaggccgnctngcgctccccggacgtcctgcgtctgatccagagttggctggaaaaagcggtgtctcgggctcccggggttggtgctnttttct

SEQ ID NO: 490062 - DNA, 159 bp, Homo sapiens
atcgagctccggtaccgaattcgacagttgttgcagtggcacgacagcttgagtcacaagaatggttacctcaacttggccggcctttctttggtttctctgaaccccttgccgcacctaatatgatggactttgctccaaaatagactgtagtgatgt

SEQ ID NO: 490063 - DNA, 102 bp, Homo sapiens
cgggagcgaacgtatgtccgatacagtcgtggagtatggtgagcgttccgcgctatccaatgcccttcctctaggcatgaagggagatccttctagtatgtt

SEQ ID NO: 490064 - DNA, 493 bp, Homo sapiens
ctctaagaggatatacttttaaaaccagtggcagcttgggagggagtggggattagctgagaaggggagaaggcagcatttttgaggtgacgtaaatgtttttgtatcttgattatggtggctgttatgggggtgcacatccaagtgtcaagactcatcgaactgtacacttttgttctaggtacattagacctcaataaagtagattttaaacctaaataagccaggtaacagctttgcctgggtggctgggggagaggcttgggacactttacattgatctccctcttaggcatgttcgttttggtttggttatggtccgattgtgtagtatttaatcaaaaatatatcattagcagagtcggtgatgtgcacgcctaaccggtgttaagagaaccagcggaatcgggaacaagagaccctggtgcatcctggtatagggataagaataagcgctcgctgtccaagttcataaaagagtttggcaacacga

SEQ ID NO: 490065 - DNA, 943 bp, Homo sapiens
agcaaggcctgcgagtgaggcgcagtatggacggcgtcgtgctgtcatgatgtaggagctcctgtacctagactaccatgcccggcgcagggtagaacaacgagcttatggaccgggtgcgggggctagcatagtgcgagaaagcctacctgctggcccgggagcgttcgccggcccatgctggatggctattcgccgtgtgactgtaataacggagcgacttccgcaccggcctcccgacgtttatgatgcaggcgatccgtcgtatacatgcactattcttcgaggctagattctcgaaagacatccctgaaggtggcatttcgttaattgacagacttgtcctacgaccggctagtggcgtgacgcaagttcagtaaggtcccctaacattctggagcagggagaagccaccgtaccttgggctcagtaatctagagaacgactatcagtatgtgacgcagtttagtaagacagggtcatttcgcacggtcgctaggagatagagaaaacaactgctcacggggccagaggattcacccccggagtgatctacgaggagaagcggcgaatgcacgacgcacgggggccactggcagaccagaacgcgccaggggtaacacacggtaccataaccacacgcaccagggctccaacttaagattgcgcacaaagcgtagactgagaactaatatgacagcacatacgacacaggaggcacaggccatatgacgtcgaggcggtcccagtcgatcgacatcagacccagaaatctatccattaaatgcccaatataggacaccagtaggaacccaagactaaaagcaccggggtcaaacgatgtaccacatgagaacccagtggttaaaccaacaggtatggaaatggagaaccatacccacaagcaaagatcacacgcccgcgactggcacaacacggagcg

SEQ ID NO: 490066 - DNA, 164 bp, Homo sapiens
gatccatggggtcgcatctatgggaggcacaggcatggagtgtgtcatgaccatcatactgtatcagtccagtgtgtacctgtcatagataagtgtctcccaggcaggccatggtaggggcctcgcaaggggccattggggagcacagggtcaggcttctcggg

SEQ ID NO: 490067 - DNA, 365 bp, Homo sapiens
  misc_feature (123)..(123): n is a, c, g, or t
ccccaaggaaaaaaaaaaatgggttttggaattaaattccaaatgttaccctgccccctatattttgcccatattccggtatagtgaaaggaagccctcctcggaaaaggtcccgggggctgnttttagtgataattgttcttgaaaaaaagccaggcctgccccccttcccccccctagggggtattatgtgttcccaggcaaagtgcccccccaaaaatttttttttttttttggcccatttattcggggcccttttatttttggaaaactggggcaaaaacattattctgggtatgtttttccaaaaattagggggcctattttttttaaaaggctattaaataaaaattacctatccgtta

SEQ ID NO: 490068 - DNA, 280 bp, Homo sapiens
  misc_feature (147)..(148): n is a, c, g, or t
ggggggggggggggggcccccccccctttttggggggggaagaaccaactgttttaaaggggcaggggggcttccccccccctggtgaaaaaggggaccggggttttgggtttcccttggggccccccccggggtttcctggggggnngcccttgtccccccaggggggggggcccttccataaaacaaaaaccccgggctttttggggggggttttttttttaggggccccgggtcccgggggtttagggggggggggggataaatttttttttggcca

SEQ ID NO: 490069 - DNA, 281 bp, Homo sapiens
  misc_feature (4)..(4): n is a, c, g, or t
  misc_feature (10)..(10): n is a, c, g, or t
  misc_feature (12)..(12): n is a, c, g, or t
  misc_feature (18)..(18): n is a, c, g, or t
  misc_feature (20)..(20): n is a, c, g, or t
  misc_feature (26)..(26): n is a, c, g, or t
  misc_feature (28)..(28): n is a, c, g, or t
  misc_feature (39)..(39): n is a, c, g, or t
  misc_feature (72)..(73): n is a, c, g, or t
  misc_feature (76)..(78): n is a, c, g, or t
  misc_feature (81)..(81): n is a, c, g, or t
  misc_feature (86)..(88): n is a, c, g, or t
  misc_feature (99)..(99): n is a, c, g, or t
  misc_feature (104)..(104): n is a, c, g, or t
cgcntaaaantncaccangnccgatnancactggaaccntcaaccctaacagccatcgctggcccccaccanncannnctntgatnnncccaggatccnacccnacttctgaaccccaggaccttcattatccaccccatcccagactcccaccccaggattgcccgtgagctttgcctagcaaattgtgtggttatgtgagtgttgttttaatcagagatgtacatgattgccaactgcatttcttaccatgtgaccacactgttacgatgcaatctacc

SEQ ID NO: 490070 - DNA, 815 bp, Homo sapiens
  misc_feature (28)..(28): n is a, c, g, or t
  misc_feature (70)..(71): n is a, c, g, or t
  misc_feature (100)..(100): n is a, c, g, or t
  misc_feature (102)..(102): n is a, c, g, or t
  misc_feature (104)..(104): n is a, c, g, or t
  misc_feature (130)..(130): n is a, c, g, or t
  misc_feature (134)..(134): n is a, c, g, or t
  misc_feature (138)..(138): n is a, c, g, or t
  misc_feature (144)..(144): n is a, c, g, or t
  misc_feature (151)..(151): n is a, c, g, or t
  misc_feature (162)..(162): n is a, c, g, or t
  misc_feature (174)..(174): n is a, c, g, or t
  misc_feature (179)..(180): n is a, c, g, or t
  misc_feature (206)..(206): n is a, c, g, or t
  misc_feature (215)..(215): n is a, c, g, or t
  misc_feature (221)..(221): n is a, c, g, or t
  misc_feature (223)..(225): n is a, c, g, or t
  misc_feature (232)..(232): n is a, c, g, or t
  misc_feature (246)..(246): n is a, c, g, or t
  misc_feature (253)..(253): n is a, c, g, or t
  misc_feature (264)..(264): n is a, c, g, or t
  misc_feature (273)..(273): n is a, c, g, or t
  misc_feature (323)..(323): n is a, c, g, or t
  misc_feature (349)..(349): n is a, c, g, or t
  misc_feature (359)..(359): n is a, c, g, or t
  misc_feature (471)..(471): n is a, c, g, or t
  misc_feature (578)..(578): n is a, c, g, or t
  misc_feature (792)..(792): n is a, c, g, or t
acacaggataaaaggttatatatatgtncagaggcagagtttggggctctaggttgggttctagggtgtnntcaaacaggctgaggaggttccgaggatnanangaggggaaggagccccgaggaggctntganttgntgttanttaggtncagggcatccntgggtgtgctcntgctnnggggggtggaggtgctccccacagtncgggccagntcagcntnnngggaganttaaggccctaggntgttgtnatcccagttgntggagaggntgctgttcaggagcaaactgcagggtggtgagccaggtggggtggctggngggcccaggggctgttgccagctggnagggtgagcnagcccatgccagatccagcggagcagggcaagcagggcctgccacagggcccaccctcggctcagggcctccgctgccatgcaccacagcacaccccaggcccgcggctgcntcaacacaggcagtgccagcagggcctcggccgtggcccgcagcttggggtctggctccagcatcatgacaaggacagaacgcagctcggaagacagaccggcagtnaactcagggggcaggtagccctggcgcactgtctgccagccctccccaccgtggggcagctccatgttgcatgccacttccaggatggtgaggcccagactgaacacatccgctgctgtcccataggagccctgcagcagctcgggggccatgtagcgggggtctccctcctggacctcaccagctcctgctgttcccagctccaccagcagtncgaagtcacccagcttgcagcgg

SEQ ID NO: 490071 - DNA, 366 bp, Homo sapiens
aagtctagcaagcaggccaaagatgtctcccgcatgcgctcagtcctcatctccctcaagcaggccccgctggtgcactgaagagccaccctgtggaaacactacatctgcaatatcttaatcctaatcagtgaagctcttcacagtccttggattaaataaggtgagatcctttgggccaaacccttttgccttaagaagtggtcaatggttgggaatgccaggttccctccctccaccggtgtcctccttgcaattcaggaaagaaggaagagacgaaggaggaggggaggaaagcttcccaagagtagcctcaacctgtgcttctgtgcattattctgagaataaatttctgtttcaaactgt

SEQ ID NO: 490072 - DNA, 209 bp, Homo sapiens
cagtgctaggtaagcgagctggggatttgtgaatcggggggcaccgggaggcgggaacatgcagactggcattaggctgtggatagcttggtgccaattgggtcgtggtcaaggccgtgaactgattattggtgaccgacagactgggaaactcaatgctatgacacaatcattaaccagaaacgttcaatgatggatctgatgaaaga

SEQ ID NO: 490073 - DNA, 398 bp, Homo sapiens
  misc_feature (387)..(387): n is a, c, g, or t
taaataaagtcctaaaggtagcattaaaatgacttaactggaggcaggaggatcactgaagcccaggagtttgaagctgcagtaagctaagaaggtgccactgcctgcagcctggatgacagagtgaaactttgtctcttaatagaactatggactgaagttgtgatattgagtgttatatttctcaataaaggttttttcttttaatactgtattaggtcaaattcaaggtcttaattccttgaattccaatttccttgtgaaatttcatgtgattaatttaaaattccagggatcctatctaacatcacagttgatggatataacaatgtattttgagaaatcagttttggtgaacagtacagcattactgataataggcacaancactactgctg

SEQ ID NO: 490074 - DNA, 360 bp, Homo sapiens
cgagcggccgcccgggtaggtacgcgggcgaatgtaatggaacggaatgcaatggaagggaatcatccggaatggaatggaatggaatggaatcaacccgagtgcaatgcaatggagtggaatggaatggaatggaatggaacagcacgaatggaatggaatgtaatggagagtaagggagttgaatagaatcaacccgaatgtaatggaatggaatggaacggaatggaatggaatggaatgcaatggaatggaatcaacccgagtgcaggggaatggaatggaacggaatggaatggaatggaatcatccggaatggaatggaatggaatggaatgcaaagcaatggaatcaactcga

SEQ ID NO: 490075 - DNA, 537 bp, Homo sapiens
  misc_feature (491)..(491): n is a, c, g, or t
  misc_feature (511)..(511): n is a, c, g, or t
  misc_feature (520)..(520): n is a, c, g, or t
ggaaaaaagggggaaaaaaaaaaggggggaaaaaaaaaactttttttttcgcgccaagagagagggggccccccaaaaaaaaagggggcccccccttcccccccccctttaaaacccccgccgaatattccccccccccccaggggggggggggccccccccccccatttttttttttttttttttttgaggggggaaaaccttttttgggggggaaaatgggggggggcccccggccggccccttgttttttctcccaaaaagggcaggggggccccccccccccttaaagaggggcgggggagaggggccccaagtccccccccgggggaaaaaaaccccgggaactcttcccaaaaaaaaaaacccccttggggggttccagggggaggccaaacccgaccaaccggaagcccaaaggtggggccccaaagtcccccctcctgggaaccaggcaagccaacccttggttttgccaagaggggcgggtnccatgctgagagtagatcgnccagcatgntggtcactgccctgcac

SEQ ID NO: 490076 - DNA, 145 bp, Homo sapiens
  misc_feature (17)..(17): n is a, c, g, or t
  misc_feature (135)..(135): n is a, c, g, or t
atatctagctgcagagnggagatggaggaggcttgcttgtatcccactacttttacttgtggccctccgacgggggctcttctgggttggggtgggaaaatcagtggttagagaaaaagacacagagtctcctgnttgtgcggtg

SEQ ID NO: 490077 - DNA, 198 bp, Homo sapiens
acctgctacaatcactcacacaccctcgtaaatactgctgcccagctgtcaaagcggcaaaccccgagcacacagtgggacgcaccataaaaatgagtctcaccttgtgctttcagatccatttaagcatttcagtgtacaatagtccttacatttcacctttatagtaagatcctgttgcagtgcagcacatatgca

SEQ ID NO: 490078 - DNA, 246 bp, Homo sapiens
tctagagtatcccagaaatgcccagattactgcaccatcagcaactgatagagaggcatggaacagtttctccctcatgtcctccagaactacccaacccagatttcaggttccagtcttcatcactgtgagcgaataaatttctgtatcattaagccaccaagtttgtggtgctttgttatggaagattcaggaaactaacacattacacataaattattttgaaaaatgaggtagtattatgaa

SEQ ID NO: 490079 - DNA, 668 bp, Homo sapiens
cacggtggctcacgcctgtaatacccagcactttgggaggcctaggtgggtggatcgcctgagctcgggagttcgagaccaccctggtcaacatagatgaaacccgtactctactacaaacatgcaaacaaatttagccgggcgtgtaggcacgtgcctgaagggaggcagaatcgctacgaacctgggaggtggaggttgcggtacgctgacatcgccacactgaactaccagcctgggcgacggagcgagactccagtctcaaaaaaacaagacaacaacaatggcagagaccacaccatacaccatatgaaacagcccggggcccgcacggacacaacaccagcggcaacccagagccacaaagaaacaagcagagcgcaagcggggaaatcactatgaagtgctcagagtaaatacttaacataaacctctctgtgtgcgcaccaccacaaaatggggaagaaaacacgccccaccaaggaaccaacaaaaacgcacccacgactataacgaaacaacaacacccaagcccatggcgcagagcaagcacgtcgacgcacggcacgcgggcccgctgtcaccacacccccccacagagacataccacaccgacacaaagcgactcaaacgcaccggcgcgagacaacacaccgtagggacagaca

SEQ ID NO: 490080 - DNA, 421 bp, Homo sapiens
  misc_feature (38)..(38): n is a, c, g, or t
  misc_feature (63)..(63): n is a, c, g, or t
  misc_feature (78)..(78): n is a, c, g, or t
  misc_feature (80)..(80): n is a, c, g, or t
  misc_feature (98)..(98): n is a, c, g, or t
  misc_feature (154)..(154): n is a, c, g, or t
  misc_feature (167)..(167): n is a, c, g, or t
  misc_feature (174)..(174): n is a, c, g, or t
  misc_feature (183)..(183): n is a, c, g, or t
  misc_feature (185)..(186): n is a, c, g, or t
  misc_feature (191)..(191): n is a, c, g, or t
  misc_feature (205)..(205): n is a, c, g, or t
  misc_feature (213)..(213): n is a, c, g, or t
  misc_feature (238)..(238): n is a, c, g, or t
  misc_feature (261)..(261): n is a, c, g, or t
  misc_feature (274)..(275): n is a, c, g, or t
  misc_feature (302)..(302): n is a, c, g, or t
  misc_feature (333)..(333): n is a, c, g, or t
  misc_feature (338)..(338): n is a, c, g, or t
  misc_feature (341)..(341): n is a, c, g, or t
  misc_feature (344)..(345): n is a, c, g, or t
  misc_feature (420)..(420): n is a, c, g, or t
acattagcattctataatttcaaatgcaaagccaaacngggaaaacaagtgagggcaaatatngtcagaaaatctgantntcaggccaactatttaangttagaacaatttaaaaaaaaaagtcacaaacacttgaacgcgagaccgaacaacnctcggtcggaaanaatcgtngacatttangnncgagnaagcgaaaagaganagacaggnaataatggtaaagactcgacaactncagaatcaaagccaaaacaaaanaactaaaaaaganngggaaaaaagagaaaaaagcactaganaacggtaaactgatattcgaaacaactcaanaaagnatnatnngaaaagcaaacgaaccagcaatgcgtggctaatttaggaagaaacaaatatacccgcctccaattagagaaagant

SEQ ID NO: 490081 - DNA, 108 bp, Homo sapiens
  misc_feature (8)..(8): n is a, c, g, or t
  misc_feature (13)..(13): n is a, c, g, or t
  misc_feature (95)..(95): n is a, c, g, or t
catctttnaaacnttgtttatacaccctgtaaaaaactttacacacacacacacacacagagagagagagagagagagagagagagagagagaancagacctaagatc

SEQ ID NO: 490082 - DNA, 194 bp, Homo sapiens
taccagctacctccctcagcagatgcccatgaagatatgaaattatagacagagcccgtgagaaggaaagatgaaggaaaatcggtgcgctgcattcatggcccccagaatcctaggcctacccgccgcaggactgatcattctattgccccctctattgatccccacctccaaatatctcagcacaaccgggg

SEQ ID NO: 490083 - DNA, 1053 bp, Homo sapiens
gagtgcggaaggaggaaggacagccgcgatgtctgacagtgcgtgcttcaggaattgtctggatcctaggctcatctcctacacgaggagaaccgactacagggcaggcagagatccaatggaggtcgccctctcgagcacactgtccctgcgacagagctcatcatatggaaggggctcctggtcacagggtatcacttataacatgttcttgggaaccgtgacacccgaccattgcctcgagttcacgatgtgagagacccgagccacctagaatgtttccgaggggaaggatgtgcttctacttgtgcacaaagtttgcgcccctagaactcttaagctagtgctgagcaattcattgggtagcaaagagggcaaataatcagggactcttccttacctatttgtcatttacgtcaatgatgttagataggacctggtccaagctcatatttatgaagtatggtgagtcctggccgtaattaggtggttgcagaaaggacaatcgaggcgatattaccaattgtccagtcccgcttggtttgtatcccacgaaaattgttcaacccgagtgaacggaagctgcagtgtattccttaacaaacaccttttagcacagtttcaacttaataatgaccggaagtggtggataatgggacctaagtatgcggaaaagttgatcgagggtactaatctatctaccgttaaaaatccctatttggttatccatggaaggatcttcgccgaaaggaccctcgtcctttcttgccagacatgcaatactttaaatatcccaggggacgggccgaatgggcaacctctgttgactctttggaaagccctgatgattcccctgaagtatctaccgaggaaagggaatgccttacccatggtggggtgggcatgaacatgcgtcatgagatgcctttcaccgttagttgatttcaactagtggtttcgaggcattgttcccggaaagaggcccaaaagagagaatcccatccatttcccttattttggggcatgtccaacaccaaaggtaattacttggaa

SEQ ID NO: 490084 - DNA, 171 bp, Homo sapiens
gatagtgtgaggaaggttatggtcgatatgtagggggctccaataggtgcatgagtaggtggctgagtaatgtagcggttaggcgtacggccaggctatggttgaatgagtaggctgatggtttcgataataactagtatggggataaggggtgtaggtgtgccttgtggt

SEQ ID NO: 490085 - DNA, 217 bp, Homo sapiens
aacgcagccatggctcgtggtccaagaagcatctcaagcgggtgcagctccaagcattggatgctggataaatgaccgctgtgtttgctctcgtccatccacggtccccacaggtgagagagtgtctcccctcatcattttctgaggacagactgagtatgccctgacagagatgagtaagagattgcatgcgcggttcataaaatgatggcaggtc

SEQ ID NO: 490086 - DNA, 115 bp, Homo sapiens
taggagctgtagcttacaggcgcaccaccacatctggactaatttttgtcttagtattattattagaagatggggttttgccatgttggctagagcgtggtctcagaatctccca

SEQ ID NO: 490087 - DNA, 230 bp, Homo sapiens
gccaaaataattgttcagtggcaataggcagcacatagtcagagataaccagatatacagtagtctcccgctatccttggttttactttctcaaggttcaggtaccttcagttgactgtggtcttaaaggataaatgtaaaattttccaaaataaacattcataagtgtttaattgtgttgccattctgagttgggggatatttcaccatcttgctccattccagcaggg

SEQ ID NO: 490088 - DNA, 293 bp, Homo sapiens
tcccggtcgacgggattagctaaatgcattacaattgtgaacatatctattaaatatactaaaatatagcttacaaaacactgcgaatgtttaaaatatattctggtgcagaatttttagtgtacaaacgacgtctatggaaacctgcaggttcagtcatttcatacaacctttttattgaggggagttacacgataccttagtgaggaaacccgagggccatactacaagacgaaaaagtgccccgttcctggcaatgatttcagaagaccaagaggcgatagttaccagct

SEQ ID NO: 490089 - DNA, 310 bp, Homo sapiens
ctttgacttgcaggagcacaccagggaccagggggttgagtggaacagtaaagccacacattctgtgactatataacctatctaggctaaatgtgtggactcgtacgagctttgcattgacatggcaagctgatggcgtgggtggtgggggtatcaggccgggagctttggaggaagggagcgttagaggagctgccttggaggtcagggagtcctttggactggttgtttcttggcctgagcgaatgtcggggtcccaaggaggttgtgtgtatgtcttatcacaggacaagacccacatgtgtgacct

SEQ ID NO: 490090 - DNA, 160 bp, Homo sapiens
agaacagttgaaggtctgaggtgttgagaggcaaatggggtctctgggtggatcctggtcctgtcagcaggcctggacttgttcaggatggactggtggcgttataaagggcagatcagggtgcctgtcccttggcatgtcccttaagatttccttttcc

SEQ ID NO: 490091 - DNA, 148 bp, Homo sapiens
gtcttgtgatgtaattattatacgaatgggggcttcaatcgggagtactactcgattgtcaacgtcaaggagtcgcaggacgatgggcatgaaactgtggtttgctccacaaatttcagagcattgaccgtagtatacccccggtcgt

SEQ ID NO: 490092 - DNA, 131 bp, Homo sapiens
gctttattaaggactcactaaaccaaattcttgaggagagtgactctaggcagatctccaactcttgtgcttgcactctggtagtctttaactgttaattgacatatcctaaaagcataatctccgattcc

SEQ ID NO: 490093 - DNA, 253 bp, Homo sapiens
ccgcccgattaactctgtcctggggggggtgcggaaggatagaacaacgtgagcagttagtgcacaggtatcggaaggttgagcacattaatactgctgccttagcacgggttattggtgtataggtgcactggggattcccctgtaccctcagaggaacggatcatgtctactttaaagtagaattttacacgtttcatatcttagaaaaacaatcctattgagagcatatggacaggggctaatccacgga

SEQ ID NO: 490094 - DNA, 179 bp, Homo sapiens
ccccccctaacaggtgcctctcagctcctaatgactccggctacgcatgtgattcacttccactccattcacgctcctcatactatgcctacttaaccgtagctacactaaccatactccatttatggcgcgatgtaacatgagaaagcacataccatggccagcagacaccatctgtc

SEQ ID NO: 490095 - DNA, 344 bp, Homo sapiens
gagagagactctgtctcaaaaataagataaactgaatttaaaaaataggctgggctggccgggcgtggtggctcacgcctgtaatctcagcactttgggaggccgaggcgggtggatcacgaggtcaggagatcgagaccatcttggctaacacggtgaaaccccatctctcctaaaaatacaaaaaattagccaggcgtggtggcgggcgcctgtagtcccagctactcaggaggctgaggcaggagaatggcgtgaacccgggaggcagagtttgcagtgagccgagatcgtgccactgcactccagcctgggcgacagagcgagactctgtctcagaaaaa

SEQ ID NO: 490096 - DNA, 114 bp, Homo sapiens
agttagataatgtgcttgtctactttagcccaccaagtattgtgattcccaggggtaacaagagaggagacacatacttcgtccttaacgagcgtgcatggtcattgtagatcc

SEQ ID NO: 490097 - DNA, 472 bp, Homo sapiens
ttaaaattggctggacttgctatgcctggatccattgccacaaaaaacagggcactttacctgatgtgatgacactgactggattttgctcatacctacaacagcctaaaaaccgtaggaagagtcatctaattgacactactttgctttaatcaatgggtgccctttttgctgactgagtgtatgacagtcctgaacaagaagggttctctgataacgctgtagtaacatttcatgacatatggatcatgcgattcttatgagacagatttttacagtacctctaaagcattagggacaactgtctgaaagcatcctgtaactattcttaggcccaattgctgcagcccgatgtacccactcctgttagagcataccacaccgcatatgaggtacattatcttgctacttgtagagaggtataataaccatgcttggcgagatcatggtgcatgctgagtcctagagcgag

SEQ ID NO: 490098 - DNA, 815 bp, Homo sapiens
cgtcccaacaattatatgactaccactgacatgactttccaaaaaacacataatttgaagtcaagcacaagccacccacagccataattattagcatcagtcccccgtacatatcttttgtacaccaacatcaacaagcaagcctagtttaggcgtgttccccaagccttttcctccgaccccgctaaacaaccccgcctcctaaatagctaagctagctagaatcctacccctcacaatcatggcaagccaacgccacttatccagtgaaccactatcacgaaaaaaactctacctctctatactaatctccctacaaatctccttaattataacattcacagccacagaactaatctccttcactatcttgcttcgaaagcacacttatgcccagctgggctatcatcagccgatgaggcaacaggcagaagcctgaacgccggcacatacttgctatgactacagcgctagtaggcttccctttccctaatcatcgcactagttgccacgcaggaagaccctagggctcactaagcattctataactgaatcgtcaatggcccaggaactatcaaaatctggaccaacaactgatctgactagcctgcacaagaagttccacagccaagataaccacttacaggaatccagcgatgaacgccccaaagaccaaggtggaaagccgcatcggctggatcacgcaggaagcgggcggaaggaagacatatagacagcaggaggaaaacggacaacaagcggcgagaaaacaagacctgagaccccaggacgaaaggaagaggaacaccggcacg

SEQ ID NO: 490099 - DNA, 303 bp, Homo sapiens
cccacgcagctgggataacaggtgccctgccaccatgcccagctaattcttgcattttcagtagagatggggttcaaccatgtgggccatgctcgtctccaactcctgacctcaggtaatccgtctgccttgcgctcccaaagtgctgcgatcacagactttaaccaccatgcatggatggaatacttactcttgtcgggagattgacaccactaaaatgtcagagcagaattcattatgctgtggtcaccaggagtgtctggtctgaacaccaaatacaattcagacttctctttggggtat

SEQ ID NO: 490100 - DNA, 165 bp, Homo sapiens
gctcggtaccatattggctgtgagctacaacgtagtactgtgtcgtgtatgtacgatgtctagtgatgagtttggtaaatacaatgccagtcgagtgccacctagcggtgaacagagagatgaactcctagggctcagagcacgtgagcagatcatttcatattg

SEQ ID NO: 490101 - DNA, 222 bp, Homo sapiens
ttgcagatcacggtagccctccggacactctgctctggggctcccattagctgtgtacgacgcaccaccaaggacttggcggcggccacgctagccgccaccttgagcccacaggccgcctcccagacagacactagctcacctttgcgcagtatggcagctcatcgaggacacaaggagtcctcttctgactccagatggactcgtagccttgcacaacgc

SEQ ID NO: 490102 - DNA, 308 bp, Homo sapiens
atgggtaacaacgtgaaacatgaaaaaatactccactctgcaatcaaaaccacaatgagataccatcttgcaccagtcataaagaatatcattaaaaagtcaaaaaattacagatgtggcaaggctgcggagaaaaggaaacacttaagacagtgctggtgggaatgtaaattagttaagctgctgtggaaagcagtttggagatttctcaaagaactaaaaatggaactaccattcaaccaagcaatcccagtactgggtacatacccaagagaaaacaaataattctaccaaaagacacatgctct

SEQ ID NO: 490103 - DNA, 644 bp, Homo sapiens
gttcttttgtgcctatggtacatgtgtaggacatgccactagcatgtgtggtaggtgtcctcgtattttgtttggggaaaaaatagctatccacaatgaggaagagaatttcccctcatgttatagccctaggtttctgtgctcttttctttgagtttcttctggagtagatagttaaatttgataccttcaatggtaaatgaaaattatgatggaggctgtgttaataaattccgctaatgtcacgaggcccagtgcggtatgcctttgtcccttcatgccctttcaaattctgaggtgggaaggagaaagccaacatcctaaacacgtgcttcagcccaattccatatgtaatgccacttgggagaagtattgactataaatatcattcgtcacgggaaatatagttgtaataattttacaggatattcctaggtaaatgaaggagccttcagttgtaaatttccagttacccccaaatgtatttgctacaccttttgttgtttgaagtattacctcttaaccttctttggtaatttttttcatatttgtcttatatagtcccggtttcccagataaggtcagtcctttttcaaatgtcccccttttacccatactttttcattaaattatggaaactgcca

SEQ ID NO: 490104 - DNA, 931 bp, Homo sapiens
ccagtgtctcgcctgctgaaaacataactaaatatgggcaaatgatatccgtaaagatgtccgagaagagtcgaaatgtcatcatatgcttttgttttgatggcggtcttgtcgtgggagagaacataagaagaaccacccagatgtcgtctctgtcctaccgttctcctagtttgctcatgtaatgtgccctatatgagagtagcgtaagagccagtgattctgcttatacgtaggattaggcaagcgtttgtaatgattctgctcctaagatgtcggacaagagactcgctgtgtactcgaacacgagataattgcaatcaccacatataatacgcacttccgctaaagggatagaactaaagtacgtacagcttcaccaggtattctcgccacttgtcatcccaccaataaggacttcacttgcgtggcaccttcacttgccgtctttgctgccctctgaagttaatcgctgccatacaaaatctactatgcggatgaatcagtttcctgcgtctcatgttccatgtgggatgccatgattggcagtatgatatccttggagaaaagcagtggtgtatttaagtcttggttgaagtagtgactaaggcagatcttatgtacaatagattcgggctggatagcgctaagtaggggattgcttttactgatcagagggttagtttgactgggcatatttggtagctgataagggaatagttcctgcattgccttggaaaatataaggggaaggtaagctcagtggattgaaaaaaaatagttttagaaataagagaattgaaagaagggaggacacgattgaaggggaaagcatgaaagaatgtagtgacggtgagggagtgaccggaaattaagtaggtagatgatcgccggaattcatgtataaagaattgtctgctgcaataattca

SEQ ID NO: 490105 - DNA, 225 bp, Homo sapiens
atttacaaagtcgctctgcgtttcagctctgattcaatcagtttttcaagcatctgcgcctgggtaataccttcctcatctgccagttcactcagcctgtcttttaaccgggcctggataaccgcatgaaaagccttatgagtgttgcttctgcgagctagagaagccctttgcctctctctggccggaacagggttacctttccggtatgcacgcttgttacct

SEQ ID NO: 490106 - DNA, 469 bp, Homo sapiens
gtcgctctccggatctacagactaaccccacatgctcacaatcaagtgatacatattcctgagagacccagcaataccataagaattactaaaaaaaaaaaaaaaaaaaagacttaagccccatgtattcatactaaccctattttcactttaaatagtgtaataaccttcatgaccttaattagggtattttaacggtatactttggatttggtcacaatatgatgatatcagtgatgggttgggtccagtcccagaatcttggactagttacagattggatagcacttaaatgtacatggaatagctaatgctacatggctggggcatatccagcatgttatgacctaataactattaaacttgatttacccagtcattcattattatttttccaaggataacttaggggcctcccaaaagacatcttgttttggggccactgcccagtttttagccaattaaatct

SEQ ID NO: 490107 - DNA, 406 bp, Homo sapiens
cataatacatggaaggaacagatagggtaacgtcaggtaagtaggtcacaggacagtctagactctcgctagactgtggagactagagcagagaatgtacatggtagactagtctcaggtattgacttcagtggtgcagacgtaaagaaagctgctgggctctggagatactaaggaggaatgatagacacatccagctgcctatgagacgaggagcaaggactgtgatggcgctgatcatctaaatgatcatgacactgcagacactcagcatgctgaggtcctcgcgtcgagtactcgctcgctcatgtgagacatctgagaatatattgcgtgcctggagtgtaatataagatgagatagagtgctgtagctagtctatacgctcatagagagggtttcatct

SEQ ID NO: 490108 - DNA, 865 bp, Homo sapiens
gacgactgttagggaggtctccagagccctctctctctcctgtgcaacatggcgactcttaagcgaaaaactcattgcgccagttgcggatacgaagaggcaagagttccaaacaatacaggatcactgtatgtgggtgttggacaagttgcgtatggcgtgtgctatcagcattctgggaaagtctctggctgatgaacttgctcttgattggcatgtttgggagagatagagcttaaaggagaaatgataggactctgtcagcatggcgtagcttattctcttcagtagcacctatagcattgtgttgcagatacaacgattatctcgtgtgaccgccaaattcgtaagattgtatgtggtatactgcaggagtccgtcagcaagaaggggagagtcggctcaatctggtgcagagaaactgttaactgtcttcatacattcacttattcctcagatcgtcacacgtacagtcctgattgctatcataagttgtggtattccaacccatgtggacattcttacgtatgttacctggtaaactaagtggattacccagaacaccgcgttgattggaagtggatgtaatctgggattctgctagatttcgctaccttatggctgacacaaacttggcattcatcccagcagactgccatggatggatctcgggcggaacatggcgactcaagtgtggcgtgtgtggagtggtggtgaatggtaggcaggtgatatctcgtccaggaatttgaagttccaaaaactgggaacctgacgagtgatagtgaagaattgggaaggcatttgcttaagatggtggtggcacagtgcctatagaagtaattccagctaagatgatatacca

SEQ ID NO: 490109 - DNA, 771 bp, Homo sapiens
caactatcggctacgatcaggccgcgtgttactcggccgaggagttcataatatccttagggtcgtgcctgggcgggccatgcgctgagcacggtgatggccaccactggggccctggtgcaactactacgtggactcgttcctgctgggcgccgacgccgcggatgagctgatgctgttgtgccgctatgctgcctgtgtggaccctgtgtgccagcctcccctgtgcatggctgtgctgactgctgtgcctgatgcacccctgacttcagccctgtgcagcttccatgtccaatggcgactgtgtgttttgtgctgcctcgtggaacccagtgcactgcggctgggctgccaactgctgtaccctgctgcgtgtgtaccaccaccatcaccaccacccctacgtgcacccccagtgcgcccgtggctggctggcgtgcgccggacggcaggtacatgcgctcctgtgctgtgagcccactgccctgtgtgcgctctccttcgctgggcttgccctccagccggccttatggcattaaacctgaaccgctgtacaggccagaaggggtgactgtcccacgcttgacactcacactttgtaccctgactgactatgctatgtggttctcctccaggttgatatgagaaaaaccatcccagccgacaggcgcctatctctgaaaaacaatgattagaaatgagagcggctgataacaagcccatccatagattcccaaattaccacagacagcaactggcttcatgcggcgc

SEQ ID NO: 490110 - DNA, 203 bp, Homo sapiens
cattgccagcggcgacgagcagcgcgcctggatgatggcgcgcttgcagccctaccgcgtggaaaccaccgacggcaaccccgacggcctgctcaccgcctactacgaacccttgatggacgccgcccgccagcccggcaacggcttcaacgtgcccatttaccgcacgccagcgggctttggcgcgcgcaagccctggtaca

SEQ ID NO: 490111 - DNA, 673 bp, Homo sapiens
tactcccctcgtcgaactacggattctagtcccaaagagggatgactgtaacggcaaatcaccggtgctccaggagcagatgtgatacgatcgcgtgatggaaaaacgtgggtagggaccactaagagtgcgaatagtgacaatcacatcataaaaaggaccacctcggcgagtaagatggagaataaagaactatgactcgaaagaatagtctagcctaggctgcgcaaactatgtaagcatgcacaaattcctggtctctggattatcataatgaagctatgatgtgaaacatgtcttctgttgtaatgaaaaccatcacttggagatagtttagtaatcatatgtgattactggtaaccaatgatctactagggaaatgccttttgtactttagggaagtactttttggcattttaacatgtacagacagaaaaaactgagattgatagcccctctcactggaagtgcataattttgaaaaactgctcatatgatgtacatgtactgattactgcctattttaataaacactcttgaaaaatgcatgttgccctgttgctgcctgccctattcttcctcatctccccatctattggtacccaccttgcgttttaaaatccaactttatcattgaataagtgtaagacaaatatgttctgacataagtata

SEQ ID NO: 490112 - DNA, 112 bp, Homo sapiens
agagcggccttcaggtatggtgatttttgaagaacgatctcggttctgcaacatttgtcacatgttggcgcaattctggtgatgtctctctcttatgatctctcttaatttc

SEQ ID NO: 490113 - DNA, 150 bp, Homo sapiens
  misc_feature (5)..(5): n is a, c, g, or t
tctanaactcagacaaccagaagatatttaatctatactgcttatggttaatatattgggtctagtattaataaagaaaaatgttattaaagatagcatacatagtagtaaaataaaatacaaaaagtgtgttgatttatacgctgtttg

SEQ ID NO: 490114 - DNA, 106 bp, Homo sapiens
cgtgatgagctggtacctggtgggtagaaacttgactgcactaggacacatcaaacacagccaggctttggtcttacccaggcactaaaaagctgagccctgtgct

SEQ ID NO: 490115 - DNA, 298 bp, Homo sapiens
agagctcggcccgaattaccacctcatctgcccaccactcatctggctgactgcactgacggtcacgtgattgttgatccctgagactagagccggaaatcgctcagcgatccccgagggcctctcagtgtcttttatgatcactaagacaggggcctggactgagcttcttgctggtaccaataaccgtattctttcgacaatgcatctccaaagcaggtgattctggccgatctgtcctggggacactgacaccgagggtgactgtgtcaggtcatatggaggcctcataacctgt

SEQ ID NO: 490116 - DNA, 127 bp, Homo sapiens
acactgaggggctgggacctcactggcaatggacatgctcagagaggccagtgcgattacatgcaacaggaggatcagtcaggcaacttcaactatgaggctgggcatctgtgagggctgaaagctc

SEQ ID NO: 490117 - DNA, 1311 bp, Homo sapiens
ttttgttcgctttgctgcgtctcgtgtgggtcttgtttcttattgctcctctctcgtcttttcttctttgcctttgtctttctgttctttttgttgtgcttctgcgggtctttctcttgtttgtcgttgttgttgcgatcacttctttctcccttgttgtctctttcgctctcttctttcttttgtttttttcctggtctgtcctcctcctcgtgctgttgttgtgttcttcttctttgttgtttcttcgtgtgtttttcgcttttgtttttctttctcttcggtatgtcttcttgttctctttgctttatctttcttgttttggttgtgtttgtcttttcagtggtgtttttactgtatctcttttgcttgatgtgtatgagtgattatgtggatgtgtgtgttgtgacaggatataataaaagtatacgagataggacattcaggtgcccccattctttagcggtggtctctgcgcccttcttcgagtaacccagaaaaggtctcgcgccattcgaaaaccgcgtaaaaagggaacccggttgaaaaccttaagatttggcatgcaggcttcgccccggaggcctccgcggctgtgtgaatgcgccggttatcaggttcagcggcagagagcatcctcttaacggcttgaagtcctcctgcgattaccggtcacccaggccatggaccgcccaacagctactcagctgcttaagctggccccccagtaccgacccgagaccaagccagagaagaagcagagactgttggcccgggccgagaagaaggctgctggccaaaggggacgtccccaccaagagaccccctgtccttcgagcacggagttaacaccgtcaaccacccctggtggagaacccagaaagctcagctggtggtgattgcaccacgacgtggatccccatcgagctggttgtcttctttgcctgcccctgtgtctgtaaaatgggggtccccttactgccattatcaagggaaaggccagactgggacagtcttagtcccacaggaagacctgcaccactgtctgccttcacacaggtgaactcggaagaccaaggcgctttggctaagctggtggaagctatcaggacccattaccaatgaccagatacgatgagatccgcccgtcactggggtggccaaagtcctgggtcctaaggatctgtggctcgtatcgcccagctcgaaaaggccaagggctaaagaacttgcccctaaactgggttaaatgtaccctgttgagttttctgtacataaaaataattgaaataataccaattttcccttcca

SEQ ID NO: 490118 - DNA, 1194 bp, Homo sapiens
ggcaagagtcagctgagcatccagagtttctactactgatgagtttggtttccgtgtgtacattgaacgaaggtggatgagcctggttcccagtctgcttggcgaactcccctgctgtagtggatggatgctccatcagaggctgcggtaggcaggcccacctggtagttcacccatataccagcgatgtgggggatctcaccgtgggacagaggattgcacgtctacccgtacctccgacttctgagaagactacccggtccctgcgttgctaggccggacaatcctccacgagtggtcagtgagagccagcagcatgttgcgatgcgtgctcctctggcgcgcccctgccacgcatatgcaatggatggacatctcttgcaggcttgtcctatccggcgaggatcggttgaatgatatcagtttccaagcgcattgatgcacgcaattctgactggcgctagagccaggaattcgcaggacacgggacgctgacttacgcgggcactcaattggcgcccgacgccaaccaggccttgctttacgcccacggtgcatttgcgggtacggccattccgtggggttagccccctggcctttggcccgtccatggggttgccttccccggggccccttgggtcctgggtcttccttaccccctaggcaggcattcttgcgctaatcgttgtccaagggggtcctaccccggtcatttgggtgggccccggcccttgcccttcccttgcgttgttcgcttgtggagcgtacgtgtcgcgaccgccctttcttgtgcattgcactggtcttggcccattcgattccggaagggacccttgcttccccccggtccttcccttatcttttcagctcagatcccagcccctttgcttggggttggttcccaggaaccttggatcccaatgctggtggttccctagctgcccaaccttcacttctgtccccaagttacccttggccttcggccctggggactcaaaggcctggcttcccagggaggcacttgacccactctgatgcgttgtcccccttggattcagacctcttggcaccatgggtttccctcgacctgggccctttccgcccagccgttgggtgagaccacttccatggcttgggtcccttgcggcattccttggggaccctggttttcttcctatcggaggggcttcccgg

SEQ ID NO: 490119 - DNA, 146 bp, Homo sapiens
aatccttggggctaaattaactcttttgacataaagtcaaatgccgccgaactctagcaatgtattaatctcctttattattggtgaagccttatttgagtatgtaagttcaatatgggctatgtaaaattttcactgtcatattg

SEQ ID NO: 490120 - DNA, 154 bp, Homo sapiens
ctagcggatcctacacaccagctcatctgcacactttcctggtgtaatcggagcccctgtcatggacgacttgaatatcaaggaatatcaagggagagagagctctttaaatcatgtgacccaagtccttcgtttacacagataaatgtgatgt

SEQ ID NO: 490121 - DNA, 665 bp, Homo sapiens
gagtgcgggtaagataaggtatgataccatggagaaatgaagtcataatgactatacaggcataatgctctcccagttagggagaatcctttagcaggtaagtcccaagcatagaaaaggcaaataggcaatggtgggcaagaagtttacccctttcaggacaataagatctgctagtagtactcctttgcatagcataatgtaaggtttcctttcctctcatctcaccacggaagcacctgatcaaggtgaactgagctccttctgtaattctcttccctctagccgccacgcacgttcctattccgcatcttccccacattcttatacctgcctattccgcgaacgccgccctgaccccgcctttccctggctccgcccatcagacctgcaccggcacagccctcgctcagcggggcaggaagctcatggtgtagtttcgtgggatcgtggcacagcccacgtgtctgggggacacgtcaatgtccttaggtgactgggaggacttgaggcggaagttctgcatgacggtggtgaagaagagaaagagttccattctggtcaggccttctccgaaacagttccgctttccgatggaaaagggcacaaaagcatcactcttcttaaactgccccttctcattcagcaagtgctggggattgaag

SEQ ID NO: 490122 - DNA, 596 bp, Homo sapiens
  misc_feature (14)..(14): n is a, c, g, or t
  misc_feature (23)..(23): n is a, c, g, or t
  misc_feature (142)..(142): n is a, c, g, or t
  misc_feature (187)..(187): n is a, c, g, or t
  misc_feature (378)..(378): n is a, c, g, or t
  misc_feature (409)..(409): n is a, c, g, or t
acctgtaagccacnggaagatgnagggccagatggaccccagaagtcccgtgtggatttaaggccccacataccgggttagccaaatcctaaataccgaatcctctcattggggaaatgttggtcaaaagatagagaatttncagttagacaagaggaataagtcccaagagaccctagtgtgcagncccatggtgacaaagtgcctcaacagtgtgttgtatgctggaaattgatgagagtagatttcacaaaatgaaaagtgaggtaatgcatttgttattagctcaatttagccatttcacaatgtatacacatttccaaacatggtatatacctacatgtatgcaatttttgtcaacttaaaaaaaaaaaggantcacttaagccaaacaaaacaacccatgganttctgggatggaagccatgtctattacaagagaacctccagggatgaaggaggctggggctttagcagctctccagctgcctctgccccaggcagacccacacagggccagagtttgggaatcatgcgccgggtgcagcctgcagtgctacttgtcaatgtggagtatggtctacctgtaacagaat

SEQ ID NO: 490123 - DNA, 625 bp, Homo sapiens
cgagtaatgtactctagcctggtagacgagtgagagcccatctcaggaaaaaggaaaaaaaaaaagatgtcatacagcagagttaagtggataaactgttggacacattccagaaaagctttaacattctttcaaagaaaatagaaaacacaatcctaaaatttatatgggaaccacaaaagacttagaatagtcagctatcctgagcaaaaggaatcaaactggaggaatcatattacctgacttccaattattcaacagagctacagtaaccaaaacagcacgatactggcataacaacagacacataggaacagtatagacaacccagaaacaaattcatacatctatggtgaccactttggacaaaggaatgaagaacatacactggggaaaagataatgtctttaataaatggtgctgggaaaactggatatccatatgcagaagattgaaactagacccccatctcttagcatatacaaaaatcacaattacttaaaaagttaaatctaagacctcaaactatgaaacagctaaaagaaaacatcggggaatctctccaggacattggagtgggcaaagatttcttgtgtaatacctgacaaccaggcaaccaagcaaa

SEQ ID NO: 490124 - DNA, 717 bp, Homo sapiens
  misc_feature (578)..(578): n is a, c, g, or t
caaaaaaattagcaggtgtaccaagctcacataatacatgcacttgtagattctatttatctattttctaatttgcatgcagtaaagttcactctttgtagcatacagtcctatcagcttgagcaaatgatacagttctgtaagcaccaccataatcaagacgcagttctatcacactaattcccttgaggtgccccctttgtaatcaactccttgccccacacttaaaccctgcaaccactgatgcgttcttcagtgctgatctgatgttttacctttttccacagtgtcacgtaaatggaatcacacagtatgttgcctttggggcctgacttctttcagttagtagaaggcctttaagaataatccatgttgttgcaagtatcaatatttcattttgttttattgctgagtattccctgccatatatgttattccttgttttgggcaattatgaataaggttgcttgtaaattcatgtacaggtttttatatgaatatgttttcatttaacaggcaaatacttataagtgggattgcttggtaatgtaggtttaactctataagacactaacagnttttccaaggtgtttttaaacattttacaactcccaccagtaaacgtattgagaacttcccaattgcttgtacaatctaatttaaccatttggatatttgatgcattttagtctttaaactttttattttcccctggcg

SEQ ID NO: 490125 - DNA, 731 bp, Homo sapiens
  misc_feature (731)..(731): n is a, c, g, or t
tggacggtcgtggtgctgctgataaaggccctcctgtgccttgcctgatcctggcctgcgacgcgtacgcatgtgaggaacccgattccctttcccttggagacgttttgacgtgctgatacactgacctgactccgctgtgagttcatctgttgcagactgtggctccctacaatgatatctgttggactgagaacactgttctccagctgactgccctagaagtgtgacagttcctcgatcacgcctgccgtcacatggggaccctggcacactgctagatgtggtagactcccgctaacaattcaaagaaatgtgagatgcacccccataccgtacatagtagactataacctgtgggcctttaacttgagacctgatgatttgaaagggcgagagtactatcatgggacttgtgtgcaggatgatgggatctcgacgggagccttactaagtgagccagtgagagggacagcgctcgtggggcccccttgtgcagtgtggatagtgtgctagcatacatgttgggagagacggcggtgctccctgcaataagcatggctattactatttgagcaacatgaccatgcccaaaggggaatacatgccaaacaccctgaggcatggccccacattccaaccttcccaggactgcaataccactatacgcactccatatctagacgcgcgtcaagcaacagaatgacatgctagcacagatatagcgctcn

SEQ ID NO: 490126 - DNA, 375 bp, Homo sapiens
gcgtccgactcttttccatagtagctgaaccattttacatacccaccagcaatgcataagagttccagttccggccaggcatggaggctcaggctgggcatggtggctcgcgcctgtaatctcagcactttggggggcaggggcgggcggatcacctgaggtcaggagttcgagaccagcctggccaacatggtgaaaccccatctctgctaaaaacacaaaaattggccgggcgtggtggcaggcgcctgtaatcccagctactggggaggctgaggcgggagaatcgcttgaacctgggaggcggaggttgcagtgagctgagatcgcgctgttgcactccagcctgggcaacaagagcgagacttcgtctca

SEQ ID NO: 490127 - DNA, 1109 bp, Homo sapiens
gcgtgacgcgtggggacaatgctggcagcagaggcagcagcggcatgaggcagctaccagtgactgacggagctgctgggagtgggagtgactcccccagctcgtggcccccaccctgtccctgtacctcttcccgcttgccctgagtttagaagacgcagatcgctgacaccatctgtccactcgggagtggcaccatgcggtcatgctgtggctagtggatgcggacagtgtgcatgtggagtgctctagggccacgtcccatgcagtccgtgtgtgacatgatgcctgatcgagattgtagtgcagatatcacaatttgcctcgagcgaggaatgcgaacaccccaatggcaacgacacgcggaggcacgcggcgatagatcgcatgagcgctaccatcgcggggcttgtttgcaccccttgagatgcaatcaccccctgaattacactgtgccaacctttatgcccagcaactcacgcgaactcccttgccatttgggaactttggtgccctagtgtgaccctggatgatgccccacagagcacacccaactggacctttggcgaacaacacaaagccccgctgatatggagcccacttgtgacccagtaaactacaagcctacggcatagggcaatagaccgtatacaccttgctaaccaccaatggactgcagcattgggcaccatatagagcaccctgagaggccttaacccatatgaacccccggggacgcatagaacaccatggtgattggcccaacacttgcagaatcccccctggcttttggccccaaagacacacaccaaggatcgacaaagggcacatacacccccggtcaagtaggaacaccccccttcctttggaccacgtacattccacacaccgtggcatattcaccaggacgcagatattccgaagcacacataccgaaggcctcacgtagccccagaccaaattattatccaaaagcattgggcccaaaatccataggaccaatggggacattgaccacacacccaacaaatgaccctgtgaaatcgggagcaaccaatgacgcaggatatagcgccctttacgcgatagcccacacataccccttgaag

SEQ ID NO: 490128 - DNA, 706 bp, Homo sapiens
acatgacaaaaactagcccccatctcagtcatataccaaatctctccctcattaaacgtgatgccttctccgtcagctctcatcaactctctatccatccatacgacatggactacggatggatgtgtgggattataaccaaaacacaggctatcgctaaaatcttagacagtacttcgctcaattatcccacataggatgaatattagcagttctaccgtacaaccctaacatagccatcctcaatgaaacatatgttatattcatcctaagcttagttatcgggcattggccatactactctaacattagagagctcactagactaccaatcgtacctctaactacgtagtcgtcgctaccgtgataagcaagcataacagtgagttaagacccgcttaagtgccatctcacctctccttctcccatatgtgagggcactgactccctcgttgaagctcggctttaaagcccattatcggggccataaatcgcacagcaattccacaataaacaattagcctcatcatccccaccatgatagctcatcagttatcctccttaatctctagttctacctacgccataatctatctccgacctctaatcacagctagtccgcatatctatcaatgtataagacttctgtgacaggtttgatcattctaaaacaatcccattgcctcctctacattcatcgtcctta

SEQ ID NO: 490129 - DNA, 772 bp, Homo sapiens
gatccttggccggcaaagtgtctcattctggcactgcagcaaaatccatcaccaagtaagtgtgacgcaaacgcagcagctcatggaacggaaactgaagcttgtcgtagttgacacaccatggcattttcgactacagaggtgcccaatgctgcaaacgtccaaggagattattcggctgcgattcttctgacctccccagggcctcatgctctgcgttctggtggttccactgggccgttacactgaggaagagcacaaagccacagagacgatcctgaaccatgtttgggacgagagggctagaatgtttcatgattgctcatattcacccggatagagatgacttatggtgacaccaagtgttgtcattgactacttaagggaagctccagaagactttcatagacttgatggacattttcggtgaccgctacttgtgcgttcaaacaacgaaggctagacatggcgctgagcaggaggcccagagggctcagttgctggggctgatccagcgcgtggtgagggagaacaaggcaaggctgatacactaataggatgtaccaagagtggcgcaggaggagatccagaagctaacacaagcaatgcaagaactccacagaggtggagctggagagagagaacgcgcggataagcagaggccgtctgaccgagaatatcagcaagctggcatatcctgtggagcagtgagacgcagaaatgcagcaagatggcccaagaaactcaccagacacggggaggctcactatgc

SEQ ID NO: 490130 - DNA, 419 bp, Homo sapiens
  misc_feature (3)..(3): n is a, c, g, or t
gcnttgaggaccccctcacctggcatttaacacagagatccatttatttgaaagatatttaaggaagagaacagaagtctccacctgggggttcagtgaattcttctggatcttatccaaaatcaccaaagtggtataccgctatgagtctgcaaaaagcacagtgtttttgggcttgggacccaagtccctttgaatacctggaaagctttcccaagaagaatgggcacaaacaagcccagactgtgaggcctacaagatacaaggcctatatataactcttcaatgcccagacaccaacaaacatccacaaacatcaagaccatacagaaaatcacgacctcaacatagggaccaaaaatcatgacctcaacaaagggaccaaataaggcaccagtggccaatcctggagagagata

SEQ ID NO: 490131 - DNA, 660 bp, Homo sapiens
cagttgggatgggggtagaagatgattacagcagacgagttcactgttgtgtcactcgaaaccctgtaataactgtcgagaggacctatctatactggacaatgaatgactctgcgaccgaagtgagtccccaaagggtagtgctatcatttaggcaaaggctggaatgtcatctatgatttagcaagacagctgatcttcctcgcatatattcgcggtgtgtcaagagccatgtccgttcagagctaggctgaggtaatgggagctaacaagtcgtggtaattccctatgatatctgcagaacgtagattggagtctgtcatctacacatccagagaggtctatgggaaagtgacgcatagatggcgaggaagatgttgcgagcaactccgcctgcggcgcctcgttcaatggaatcccttggtcgagagttcaagaaggcttacggatgatacatgctggttcatggtatcgccgtattctggcctgggggtccccctaaaatctcgaagtcccgtcttgtgaggctaatggtgacaacgcggtgggtttggcaatgtctactgcggtgcccaataggtttgtggaggatggcgggttggtcctgaccgaatctctgggccattcggttcttttgctttgggggatgcctttgggtct

SEQ ID NO: 490132 - DNA, 355 bp, Homo sapiens
gcgttctgtttttacgtgacaaaacgatagggaagatggtcaagaggtggcctgatgtctgctgtcagtcctgaaaagctgaacgggatggttcccctcaatcaagccaagcctgcgaccttctcctaggctcatttaaacgctaatgggaaatctggggacgcatttgacagccagagtgctactgcatttacaccacagatgtggttgcccagcgtcgcctttggaccccaggtggaatcctagcagggccctcaggatccctttgttgaataactacaagcattatttcgaattctgcatccgagacctatcctggtgtactctatcatggcatcttaatggtccactgtcc

SEQ ID NO: 490133 - DNA, 236 bp, Homo sapiens
  misc_feature (10)..(10): n is a, c, g, or t
  misc_feature (180)..(180): n is a, c, g, or t
  misc_feature (186)..(186): n is a, c, g, or t
cgaggtatanggtaaagtatatttaatggcacagtagaataaacaggctatgattacaagtccaaagattacaaatatgatgatgatatcaaatatatgcacacacaacacatccaaaaattcttggactctcttttctttttttcaccgctaaaggtagcaaacattcctctgtacctngctctnaaaacacatctacagaagcaaatgaactcatctgcaaataaaagcacata

SEQ ID NO: 490134 - DNA, 746 bp, Homo sapiens
gcaagggcctgcaaggcatcactcccagggccctcgccttctagggcaccctcagcaaaggggcaggtggggacactccaagtggggcagctctccgtacatgcgccccaccccatgagccagttcagccctactggggctgagcgggggcatcccctcctttgtacatagtctccatggcttgtccctgcccctgtaggccaccagtccccttggctgctctccctttaatgccatatggccctgcctagggcacaggccccaagctgtgtgctggggtccccagcagcaaacactggaaagtctggttttttttcgctttgtttttccccaccccttaatttacgcttgggggtacctgagtgcccccgggtgcctgcgtgttgagtgtgtgggcggcaggtcgccgtcccgggaggcctggcccaatctgggagtttgggaggggttgagggtgcccatgagtcgtgtgggggccccgacgtgggggttcggttacccttccccaccgtggaggccaggggacggtccccgggtgtagaccaggtttggggtcctccccagtgtgccctcccttgtttccctccccgagtttggcgacctttctcttattgcattgtaattcgagaaaccgatttcccctcagattccttcatgggctcctgggttgggaggggcaacttgtgtgctggctaggggtggggggattgaccccctgaggcggtgggcatggtcccgcgggttcc

SEQ ID NO: 490135 - DNA, 285 bp, Homo sapiens
cctctgcggacatccagactgagcgagtacctgatggaggataagatggaggtcgacgtacagtacgtacacatgagcctgtgggtctcacgagaccattgacgactatatcgttagatgccggtactcctggtgtaagagcatgttgaccaactgctatgaacatgactcagcgctgacattacaccaggcttgactacacaaggagctgggatgccgacgcgtatagtccataccaggcctatgcactgttcactgcagtagcatgcatcatatggcttaggc

SEQ ID NO: 490136 - DNA, 303 bp, Homo sapiens
aactgacttcgtgactgagacggccacgggaggttctggcacgagaaacaggtcatgccaggagtggaggagtggcatccccctggctgtgggctgcaggaagaaacaccctcagcatctccagagggaaggatgggctacatcacccccattgcttctgcagtccaaacaagaccctgacccaaagaccagaaggactgccactcaccgggaatacaacacgagctaataggaattgtaagaggtgccgctgttgcagctcgaggcataggcctcctggacattgccatccaggtagatttt

SEQ ID NO: 490137 - DNA, 968 bp, Homo sapiens
gacgccatctgttctgtggtagaagaagttcatgttatactcaccgaccataactcctggtgtggggaagaacatcttgttgtgttcaccaccccaaattctgctcgcgcaaaatgtttggcctgtcgcattagaaaagcgcctggtctattatatgccttttccgaaaccgtctgataggtaataatcgcctccctcttcttttgttccctaacacaagaatgtttcccagaaccttttaattgcgcccacccgggttgtatagagtgctcgcctagccgcctagtgcctcggaagcctctatgagattggctcccgcccaaaaaaatttattgtggcgcaccccccccatctttaaaacataaaagcggggccttgtgggatcaaaaagaaaaaggcgccacggtttggaaagattaatatagggaggcctcgccaccttccccgagatggggaacaccccccgggttacccccgcgctttaagaaaaatagaggatcgagcttccgcgtctagtaaagaggtatccagacgcctgttgcacccaaaaagatgggggagaggcgccactcctcttaaagacctatgctcggaggaagtgggtttaaaaattttagatgtcaatataaacccgggtattttggaatattaatatttaaaaatctgtgggaaaattccgtttcacccttgctgttattgaccccgccccactagtttcaccccgttggtggttgtggtgttcaatgttcacattttgccctctttaaaaggcacacaggggttgataaaaataaataaaggtgatcccacacgtctattaagttttgggcgccgtaatctatatgccccatcgtcaagtatttgtaattccctccgtgttttttaaaagggtttttttaacttttggaaagcccttttattggggttaatgggaaaaataaaaaattttccccccccctcccaaaaaa

SEQ ID NO: 490138 - DNA, 680 bp, Homo sapiens
  misc_feature (16)..(16): n is a, c, g, or t
  misc_feature (100)..(100): n is a, c, g, or t
  misc_feature (103)..(103): n is a, c, g, or t
  misc_feature (112)..(112): n is a, c, g, or t
  misc_feature (122)..(122): n is a, c, g, or t
  misc_feature (125)..(125): n is a, c, g, or t
  misc_feature (128)..(128): n is a, c, g, or t
  misc_feature (132)..(132): n is a, c, g, or t
  misc_feature (134)..(134): n is a, c, g, or t
  misc_feature (141)..(142): n is a, c, g, or t
  misc_feature (144)..(144): n is a, c, g, or t
  misc_feature (177)..(177): n is a, c, g, or t
  misc_feature (180)..(180): n is a, c, g, or t
  misc_feature (198)..(198): n is a, c, g, or t
  misc_feature (211)..(211): n is a, c, g, or t
  misc_feature (221)..(221): n is a, c, g, or t
  misc_feature (228)..(228): n is a, c, g, or t
  misc_feature (232)..(232): n is a, c, g, or t
  misc_feature (236)..(236): n is a, c, g, or t
  misc_feature (248)..(248): n is a, c, g, or t
  misc_feature (330)..(330): n is a, c, g, or t
  misc_feature (387)..(387): n is a, c, g, or t
  misc_feature (399)..(399): n is a, c, g, or t
  misc_feature (412)..(412): n is a, c, g, or t
  misc_feature (431)..(431): n is a, c, g, or t
  misc_feature (433)..(433): n is a, c, g, or t
  misc_feature (444)..(444): n is a, c, g, or t
  misc_feature (450)..(450): n is a, c, g, or t
  misc_feature (570)..(570): n is a, c, g, or t
  misc_feature (615)..(615): n is a, c, g, or t
  misc_feature (624)..(624): n is a, c, g, or t
  misc_feature (629)..(629): n is a, c, g, or t
  misc_feature (638)..(639): n is a, c, g, or t
  misc_feature (641)..(641): n is a, c, g, or t
  misc_feature (643)..(644): n is a, c, g, or t
  misc_feature (646)..(646): n is a, c, g, or t
  misc_feature (648)..(648): n is a, c, g, or t
  misc_feature (673)..(673): n is a, c, g, or t
aaaaacgcccctctgnttacccatgcccacccagcgccggcgccgcttgctttcggggccccttgcagaaagcgggttttttaattgaatatatttttanatntactttttntaggtttttntanaantttntntaaaaanntnttccttttttttaagcagccctttttttttttngtntccacccccctccccccnccccgaactcctnagggcccctntgcccancctntgantttttttttttntttttttttttttaccccaattatccttttttttctcctgcccccgcatcccactcccaggtttttacgagccctgggctgnaatggcccgggcctgcagggcggggtaggggagggcaggggctcagccccgaagccngctcagtacctnaggggctgctttntgctgtgtatgcgcctttntngcatccgaaanatcctntttgtggcgcttgctgcaggggggacccccccccccgtccccaggtgaaccaagggtttgctccggggcccatttccagcttggccgccgtttgtgaccttgggcaagtcacttgacctntgtgtgcctcaacttcctcctctgtaaaacggggacagtccctgnccctccctncctcncaggcatgnntnannananatgaggtaacgtgtggggtgatttngagggga

SEQ ID NO: 490139 - DNA, 353 bp, Homo sapiens
  misc_feature (13)..(13): n is a, c, g, or t
gggaatgtccccncttctgggatgggagagagtctccagcatgacacgcagattgttgaacactcaatgatggattgtggaatgccagcatagtgatggccgtcagttgagttgggtagcatatcccctgccaccgtggacctgagctcctgtactctctcgtatttccttgatcttgcatccaccttttccaatgaagaggagctcatcacttgacatagctagggaccaccagcctcagggtgagcgggggtctaactgagccagctcgtgctaattgtgtcactagagcatgctgtatgtccctcttccagttagtcagtgatcatacgtaccaggctgttggatagcga

SEQ ID NO: 490140 - DNA, 185 bp, Homo sapiens
ggctgggtttacaggcgtgagccaccatgcccagccaactggcggtttcttaaaaggttaaacctattcttcacagatgcaccatccatttcacttccagcatcattcacgcaagcatacatgcaaaacatcatgtcctccacagtgcacttcatatcatatgcacatgttccatagccagcgtt

SEQ ID NO: 490141 - DNA, 329 bp, Homo sapiens
tgtgcggtcgatagagcaggttgctgcctcccggcgttgctcgtggggttctactgctctccctttcgctccccaacaatgggtttgaactcctccgctgtttcatgtgtagacaagctcccttgtgtttgcacccgcggggtcggtgagctagcgccgcgcattccccctgcttcctctgcggagtgctcgtgcaagactgctaattttcttttcgacatgctgcagagcgcacggcgcggccgcacttgtggccgcacggttggtagggccgcaccgattgcccccccccccgggggcaaggggcccatttccccgcacacataaca

SEQ ID NO: 490142 - DNA, 115 bp, Homo sapiens
tcatggtgtaacactgtgggatttgagagtcagttatgccaacacctcactctagtgcagaacaaaatacgttatcaatcagatggacatgctggggcttacagggacccttggg

SEQ ID NO: 490143 - DNA, 276 bp, Homo sapiens
tcccaccggctttggaagacagaggcgggtgggtcacttcagcccaggagttcatcactgagcccaggggtttgagaccagcctgggcaacatggcaaagccccgtctccacacacacacccacgcaaatagaaaaaaatttagtcgggaatggtggcacagacctatggtcccagctactcgggaagctgaggtgggagggtcacctgagcccaggagtcagacgctgcagtgagccttgatgacagcactgcactccagcctgggcaacagagt

SEQ ID NO: 490144 - DNA, 128 bp, Homo sapiens
gttaataatcaacaccttcctagccttactactaataattattacattttgacttaccacacttcaacggctacatagagaattccaccccttacgagtgcggcttcgaccttatatacccgcccgcg

SEQ ID NO: 490145 - DNA, 369 bp, Homo sapiens
gtgatgctgttggtcactctgaggatccccggccgccagcttctcacagttctgggattactggttgagccactgcgcctggcagaatgtttgagtgtttttttaagtggacttcctatttattttcggtttaacatgctgaaggttatacatttttacttcatctgtcatagtgattgttgattatgataaaatcttatttctcttagcactttgccatagcttaataccttagtataacatgcgataaacaagggtccggtcattagccacagaaaggctgtcactgttttagcagaatgtcatatggaaggaacattttatgcctctataagaacagtgtatttgctttagatagtaataaactct

SEQ ID NO: 490146 - DNA, 322 bp, Homo sapiens
  misc_feature (206)..(206): n is a, c, g, or t
  misc_feature (230)..(230): n is a, c, g, or t
  misc_feature (305)..(305): n is a, c, g, or t
atgtgatggggagtagggtcaggatgagggggaagaagatagagaggaagtaaagtttaattatgccttttggggtggaggtgatgatggaggtggagattgggtggctggtgaaattggttttagtgtaataagcttttctagtcggtgtttactatggtggattgggcactatggggttattttgggagtggtaggtgactggntttactccattggaagcagatttnctggcttccttttatttttatacggaatacgaggaagaaatggtcagatggcgtgcccaggctcttcaccccccnaatcaacatagtggggt

SEQ ID NO: 490147 - DNA, 408 bp, Homo sapiens
aaattaaaaacccgtcgaccattgaacagtttgagaagtatacgggtatagttgtttgctccaaaatttccaaaacatacatccttttaatagtgtttgatatgtcctcatcagaaagttactcctttgccttttccatttttaaaaggagatattaccagtaggtggaaaggttaaggcttgtctggaacaaggaggagatattacagaataaggagagacaaagttgcaaagtgagaaggaaggagtagaggcatttgagagaacaataagatgttaattcctttgcgaattgttttggggcaaggtagaatgtattttatcataaatgattagaccctccctgaaagggttggattagtgttctcataatactgatgagttggaaacaaagtgttgtgccctaag

SEQ ID NO: 490148 - DNA, 107 bp, Homo sapiens
gcttatactgcggctggaggacagtggcgaaggtatgctatgtctcacccaccacggtacacgtaggttttgttgtggaccagcgctcgtagtacacaatgttgaag

SEQ ID NO: 490149 - DNA, 515 bp, Homo sapiens
  misc_feature (38)..(38): n is a, c, g, or t
gtgcgcgtgcctcgctaaagctgtactaagagtctcgntcatcatagctctcagcgctactctgacagctttggtaacaaccatttgcgatattcgccctcaggccgttcagaactgaccttcagcgtctcggctccagcgccatggcgccctccaggaagctcttcgctgcgggaaactggaagatgaacggtcggaagcagagtctgggggagctcatcgggactctgaacgcggccaaggagccggccgacaccgaggtggttcgtgctccccctactgcctatatcgatttcgcccggccgaagctagatcccaagattgctgtggctgcgcagaactgttacaaagtgactaatggggcttttactggggagatcacgcctggcatgatcaaagactgcggagccacgtgtctggccctggggcactccagagagaaggcatgtttttggggagtcagatgagctgattgcgcaggtggcccacgctctggcagaaggacttgggttgcg

SEQ ID NO: 490150 - DNA, 1503 bp, Homo sapiens
  misc_feature (985)..(985): n is a, c, g, or t
caaacaccttgtggggaaaacacatatacccgctttgtccgaaggaggaagaatttccgctcccctgttggtggtgccaacgcgagatgattgggtcttcctcggtggtggggtaccgcaaccacaggtagaagtatgtaagagttggggttgcgacccgttgtggggaactcttgtgtgggaaaaaattgtgggaaggggcctcctgcacaagaagccaagagggggccagaatttccccgagggggtgattagacgaccttgtcgttcagaacgacaggcacaatttttggaaggaaagaggggaaatggagaatattttcaaccgcggggggaaaaaaacctggtgtgtgttttggaaaatattgtttggtttccaaaaacgcgccgtggtgtatataaaataggcttttctacatacacgttcctctgcattaatttcccggctagggggagatttttgtagaaaaaggaagagggggcgcacacattggaaaacccccccacaacggcctttatccttgaggagtgtagaaataataatggccttcgaagacctttcgtcgtagaatgagaggggggcctctacggcgacttgtaaatgccccctaataacctctgggaagagaaagggaagatgtaaatcagggagaggtgaaaaagggccaacacaagaagattctcccgcgggagaagtgagagagaaaatgtccccccgaaatgtaggcacgcgcccacacgcgcggagattggacgactctccacacgggagagagaaagagatactctcgagcagtgagagcttcacattcataaacaaccccacaggtgtgagaaagaagagaggagagtgagaaagagattgtgtggcccacagagagagagagtttttgagacacaggcacagacggcgctctctttgcgcaacagcgctctcctctcacgggtaaaatagagagggggtgacgacacagggtggacgccntgggggagatagagagagaagaagtaagcgcgggagataacaccgcgtctctcaaaaagagcgccaacaacagagatgggcacacacaggagcccgtcacacagaggagcccgcgacacagagagagtccctgtgtggagagggtgagaagagaaggcgcgacaaaagagacccccacaagtgcgccctcacacagaggggcgccaacatgtgtcttgacgacataacacatgtcctgtgtgtgcgctcacatatgcgcacacgccggagagagagagaagagatcacacaggtcagagccacatccctggcgacatcagcactctccggagatcttttccacaagaaaggcacaggcgaagaatctggaaagggaaatgtccacaaagaagaaagaaaagagaggagagtgggagatctccaaaggctgagaggaatgccacggagggactatggaaaagacccatgtaaagaaaatgaagggggccgaggcgagttttttaagagggacaagtcca

SEQ ID NO: 490151 - DNA, 84 bp, Homo sapiens
ggatgagtgcaaatcagagtaaagtagtcattcaagatccttatcgccttcctggacctccaggaaaaccaaaagtttacgcta

SEQ ID NO: 490152 - DNA, 190 bp, Homo sapiens
ctcagtcactataatatcacatgcggatctcgttcaccctcgaccgtctcgaggggagaggcctcatttctttgtatgaactctatgccgagagctcacttcctttaacctgtctcccagtcagtcttcactatttggacgagcttcttctttgcagtccctctctaaaagactctcaaattcatactgg

SEQ ID NO: 490153 - DNA, 212 bp, Homo sapiens
actatctcaatgaactagaaatgtggttgaagtgtaccttatgacctctgagggaaggtagaaaaggtgataaagtttccgcctggctctctctctcttgggcatctgacattagaacctcgggaggaagcccaggctgtatgaagagttcatatgtaggtattctggttatcagtccacaaaggtgctagttgacaaagaccgctctaccg

SEQ ID NO: 490154 - DNA, 2071 bp, Homo sapiens
  misc_feature (840)..(840): n is a, c, g, or t
ggtgctcacactgtagcctgctcaagtcgtctctatcaattagatgctcgcataacatttgtgtgccgacagcccgggataggggaagctcctccggcagaactctcctctatcctcccggtacccacgttctcccatgcaagagatcttccctcgacgctcaggacctcagaccagctccgcgagcactccggcctctgtcgtatggactatgaagatccaacaccggtcacggacatcttcttggggagacagccttccttcaagagtacggatcaatgcccgggacgcccggcattgggcatttgccaggcacataaccaggacctccaatgtggacgcccaattgacggatcctagtggttggttctttatccttgtctctattctttccacccagacattgccattgtgactaatcatgggcaatatcccggcattcatcccgtcttttttctgtctggctggtgtcctcagagacgtcaaactgctatcacgttggacccaatgtagaggctaacgtctacggaattcggtagcatgtcctggacccagtaataattagaaaacggcgcccaagggcgcacaacaggaactcaacataccaattggcgggccgaagacacaaccatggaaaacgggcaaggggcttgaggaccctactccgggcaattaaacgaacgcccagactagcacagggagacgccaggacaaaggcgttgggaccctttcaaggcgagaccctgtgggccagacaacctcgacagcagagggttcacaacaagacaccgcacacaccccgctgcgcctccgcgcggtcgtagctacttcaatgatgcngacctcacaaacaggcgaaagcaagaccagcacacagacgacgagacgaaacgacacgagacgaaccaccagccactcagaagcatctcacccatacatagcaaccaacgaggacacaagcgcacacgacacacagcaagacaaccagcaagcaagccagcacaacaaccaacgccagccgacaacacagccggcacgcaaggagcaacagaatagtcaaaggagagagcagtaagagacgccacaagacagagagacagcggcagagatgcacacgacgagacgggtcgcacacacccagccaaggcaagacatgccaagcgagaacaagagccgaggagaaagagaagaagagagaaaaacacaaagcgagccagcaaccggagaacagagcgacaacgagagagcgcacaacacagcacgagccagaccggacagagccaggagaacgagaagcagaagcatcagacagcgagtataagcagagcagagaacgcagagaggcacaaggcgcacagcccagcgccgacgcaacgcagagaggcagcaacaaaggcacaagagagacagcgagcaaagcgacgggacagagtgagacggcgacgcagagaggaaacgagagatacgcgaagagtagagacgagagtaaagaagcggccagccagagaggacgaagagagacgagcggagcagagagacaacagcgaggaggagcaggaacgagcccaacgtggagcagcagagagcagagagcagagcacgcagcagcagcacgccgcgagagacgcagagaggaggcgaataggacggacagaaggtagcgcaagcagggagcgaggggacgagtgacaggaagcgaagaaagagcgagacgcgccagggagcgcagaacagaggacgaagaagaggacggagcgggaggaagagcagacagggagcgaagcgaagggagagaccgcaagagcagacaagcgcgacaggacaggagcggcgaaggagcgcagcgacgagccgagcagtaaggaggtaggagaagagaacagagaggagagcgcggcacgaggaccagcacagaagaccaaacgcaggctgcagcgagagacaggcaggagccagcgagcaagaagacaagacgacgccagccgaaaaggcgaagacggcaggaggcgagacaagagagagaagagagcaacgagacgagagaagagagggcagacaagagggcgaaatg

SEQ ID NO: 490155 - DNA, 376 bp, Homo sapiens
gaccctcagctcttaaagtgctgggattacagacgtgagccaacgtgccggctactctcagaatttttaaggtatagtgccaggttcctaactctagtcaccgtgttacacagtagatctcctgaacttctggctgatattttgtgttctttgaccaacatcaccctgaactcccccctcgcccagtcccccacctccagcccctagtaaccacctttacactctgcatctcttaagtcaaacttaggaagtttgactttttaagatttcatggatcagtaagatcatgaagcatttgtctttttgtgcctggcttattttacttaaccgtgtcttctaggttcctccaaattgttgcatattgcaggagttcctt

SEQ ID NO: 490156 - DNA, 165 bp, Homo sapiens
ctacttgtctgccgactgtgtgaccatgctcgtcgttccatgtgggctggctgtgtggtggggactgacggcctcctcaggaggagacatgtgatgaccccagtgcagtgggtgatggccactgtcagaccatgagagatctgcgatgtggccaaacgatagagg

SEQ ID NO: 490157 - DNA, 970 bp, Homo sapiens
ggccctctcagactatcctaatgaactctcggcactaaccttgttattcaacttccattccattacgctctttatactaggcttactaaccaaatgacataaccatctgtcacgtgatgggctaggtcccacgatactacgcctacccgggcgcagctactgatcatctgtatcaaccacacgcgtctatggaattccccatcatctccatatatcatcatctcaaaaacgtatttaatcttctcaccccagataatgcattgaatctattcttacactccaaaacctagtgatataccatacaaaaataacgtagagaggactgaaccctgatctcgttatcatactatctatatattcataaaaattgcaataattaaaccatcacttcgtattcactcactctccatcattttcacctcaactgcacatctactcatattatactagacatggaccgtacccttattagtcgcgggacgcacgtgcattataacgacattttctgactcgtagatcattttaattttatggccctcaagtacaagtctcttagcagataatggcgaagatctaccattccttattcccgataggtagttttattagtctcaaccttcaggtactcattcgatcacataggccctggacgtactcctaggcgctaatatttattgctagtctgcctaatcatgcacactaattggacggcttcaaccatttaacaatattcaaattcagggaatcctatagccctgctagcactgtattcatgttctcagtcctaatttctgttgactattctagaatgctgctcgttgctcattgatgcaggctatgttttccacacttcctagtaagccctaactgacgacaagggcttagccaaaaatctcccggggggccccacgtccccaccaatagaggaggggggcccaaaagactctggaccacgtacgcccccttaaaa

SEQ ID NO: 490158 - DNA, 178 bp, Homo sapiens
ggagtagaaaacatagacatttctaccccaattcataaatctattcataagtctttttatcatgtaaacttgtaccaaagacttatgaatagaaatgtgatttgtcttcccttctttgcacttttgaaataaagtatttatctcctgtctacagtttaataaatagcatctagtacac

SEQ ID NO: 490159 - DNA, 309 bp, Homo sapiens
atcaaaccccataaccaaatacaactttttaggaactaagtggataatcactctgtgttgtatgaacatgtgggcagtgtgtttcctacacagcttaaaagtgcaacaaaaaaagatctaggtgtcatatagagaatttctaccacagttagggtaatggtggactgacaggcagagggtcttagatgtgacttaagtaaagttcaatagaagttccagcacagatattcatgtttcgaattggaccgctcagttaaaaagttttcccattagacttcccctaatcaaattagaaattatctaattttc

SEQ ID NO: 490160 - DNA, 153 bp, Homo sapiens
  misc_feature (134)..(134): n is a, c, g, or t
tggcaggctgccagttgcaatccccatcgcggtcgtcaggatggatgaactgacgtgaaaaatcctgaccagctccattgtcgataccaggctggtccaaggtggctggacggacggcgcgggcgggttgcatncttcatcagtctgtcaccc

SEQ ID NO: 490161 - DNA, 330 bp, Homo sapiens
aggatgcctcggccatcaactgtgcacggattgagttctggattctgactcatcgtcggtggtggtagtcgcgagagccttgtgcaaggcagaagtatttgctggtcctcccaagtgggaggaaggggcccccccggaaggtgagagtaaggaccttctccagccggtgtaggtggttgtctcgagctgcgtgaccggccttccatccatgctactgtgcagggcagccaggctcctgaaatgctcctggcctgaagaactccccatagaggcagaagagggtctccacctatgtgcccaggcctttgcgatcttgcttcaaccacctgt

SEQ ID NO: 490162 - DNA, 1449 bp, Homo sapiens
  misc_feature (1238)..(1238): n is a, c, g, or t
  misc_feature (1290)..(1290): n is a, c, g, or t
caaatgaggtgatgaattaacccagcgttcggccccccgtcttgaaagaggggtggaatatgcccgaagatgatcaccacgcgcacagttgtatcctggatatttttttaaaagggtgtggacaccacacgccctttaatggttgaggtgaaccccttgtccggtgatagagggggaatcttccctccccaccaccacaaagaggtgtttttggtgttcacccgacacaaaaatataaagtcctcactggggcctctttgttgggttattaaaagaaaccctcgtactcctgcggcgcccccacacgtgtagtatcctgttatattaatgatccccccggggtttctcctctaaaaaaagtggttatatctcgccgaagaggggccctctcttgtgggttttgcgcgccggaaaaatttttttcggggggccaccccgcaggagggggggggtccttctgtccttcgggtgttagccaacatggccccgccccacccgcagcttgtcggctttttttttgggggggcgcacaaccgcttgggggttgtccaacaacctgttccgccccccttcgtcttcagcaggggcttaaaaactttttggggggaggaacaacttttatgaccacacacatcttctcctcacggggaggtcccccccctccgttatcacagccttggcccccctcgtcgctgctcccactctcgttatacgcccccgcttgtgtcgagactcttctgtttctggcgcttttggagcacacacaggaaaaaaatggagcacacctctggggagaaaggggagaaggttgtcttctccgcgctctctcccacagcgctcttttttctctccacaaatatatgtttctctctatatatagagatatcctcgggtgaatatttctggggagaaatttggagaaggaaagttgagaattttctcggtgtctctctggacacacctcacactcttgtggccacagagaattgtgtccacaaaggagaagtatatttttctctgtggtgtgtagagtatgattataatggcccccacacaagagtgtgtgtgtttgtaaaaaggtgtttggtgatactccacggcaccacttcactaccccacacgccaccactgtaactcttctcgtgcacactctcccggggcactctcggagaactcgggctcggcggcccctctgttataatgtggctatttttaaattcacagtgggaaccacattnggtcccacagttgtgtaccccacagtgtatatgctgtggtgttaatacacangtgtaatattcgtcccacagaaatgtatttaaaggctttaaggtaagaacgccacctggcgaaccctctggaagagggaatgctgattgtcttgacccaaccccccgcctgtctcttctcttgtttagttacttccgggccataaatcatctatgagtt

SEQ ID NO: 490163 - DNA, 134 bp, Homo sapiens
actaagcctgaagggcagagtgcatgtagtatccacttgacctctgaggcttaatgcatactataatgcacatagagtcctataaaagaagctagtcagacttccagcacactaaacccatgagcacatgcagg

SEQ ID NO: 490164 - DNA, 392 bp, Homo sapiens
  misc_feature (92)..(92): n is a, c, g, or t
  misc_feature (94)..(94): n is a, c, g, or t
tcccacgctgacagaggtcagcctgagccccttgcctcacaccggcccctcccacgctgacagaggtcagcctgagccccttgcgtcacacngncccctccctcgctgacagaggtcagcgtgagcccctagcctctcccggctcagctcctgccctccgatggcatctgcaggccccaaatggcctccggtcggtgggctcctctaggcccagcttgggcctcccggcggcctctgcaggcccaaaacgtcccgaagtcggcctctccaggcccagctccggcctcccggcggcctttgcaggcccaagtcgtcctcaagtcggcctggaattaggcctggaagagcagcaagtcagcctctccgggcccagctccatcctctcggcggcc

SEQ ID NO: 490165 - DNA, 195 bp, Homo sapiens
gcggccgcctactactactactactgctcgaattcaagcttctaacgatgtacggggacatgcctgtaatcccagctactcgggaggctgaggcaggagaatcgcttgaacccgggaggcggaggttgcagtgagctgagattgcgccattgcactccagcctgggcaaggagagtgaaactccatcccaaaaaa

SEQ ID NO: 490166 - DNA, 751 bp, Homo sapiens
ccgcaagatgaggcgggcgcccctgataggtcaccgctcgctgctgtgctcggtatctgccgcatgctatggcccagtgtgtgccgggccacgccgggaatcctggaagcgggaatgtcattacctctacgtatgtatgcatgtgctcaagtgtacatcctccgacccaatccatgcgacagagttcggcaagggctgtggtccaccctttttgaggcctctccgagagagtgtctgcaggcagacacggggccatctgtgggcaagtggtgctgagcatttttgcgcccgatgccggtgcaaatgctcgtgaaccaggtggcatccgccaggctcaacttggaatgttgtgtagaccatgggatatttgccgtggctttccttgaggatatccgtctggaacgggaggaaaactgggtgaatcggttgattggactgcaccaggtatgtctaaacattgtattaagtgtgcgcagtgggtaagttgaaccggaatctccttgaaaatgagggcggaaagtatcagggagtgatatagccttgtggactacataattagggaggtccgcaatactggaggaacgttttcagactatgaaatgcaagttgatgggagttgcagaatgttgacacaagttggaattccaggaacaggagtacgggctgtgtagtacagatgccttactgatgaatttgacacgtattttcgagattcagggcatttggagatgatgttgttattccgtgcaaa

SEQ ID NO: 490167 - DNA, 306 bp, Homo sapiens
ctcactcttcttttttccttcttttatccctaactccctcccctaaaccctgcttcagcacaatggactaatttctagcattctgatcataaggccctccattttcctaatgtgtttcaaggaatcttttaggaaaatatccagattattcatccactcttttgagtatctactaacaactccttttttctctagagagtatgaaggcacaggtgtcctgtctgagtcaagctaacacaatgatttgtttcatcacagctggagcagagtgaaatgtcttcgtaaacagtatttgcatctgagctt

SEQ ID NO: 490168 - DNA, 413 bp, Homo sapiens
  misc_feature (54)..(54): n is a, c, g, or t
  misc_feature (167)..(167): n is a, c, g, or t
taagaggtgagggggaagtgcttgggaaacaatgacaactgggacagcaggcantagagagaagaggaaccttgtaagtcacatgttcctcaggccagggaggaggtggttggaaactcagctgatcctggagaggtggccctcttgcaggcatgaagggctcaacntgcagaacagctgtgcaggaagcagggccttcagcacgggcctatcgtggccctgggggagctaaaggaggggggctctgaggagcttttcagccaggaaggctttttcgtgggagttcaataggtagcacagccagagggcattaaggccaggtatccttctgggagcttctaggctcaggcagaatcagtccaacatctacctcataagaccccactcttctctgctttgtctccggtcgacgc

SEQ ID NO: 490169 - DNA, 194 bp, Homo sapiens
  misc_feature (131)..(131): n is a, c, g, or t
acttcctctaggtgggtcgtcaaaaaatccagaggtgaaatgacattcgaactatggtttaatgaaaatagatgaaccaagcactccttaccatagtatgatgggggatgatgaagatgcctgtagtgacnaccgaggcactgaagccatggcgccagacatcttagccaggaaattagctggagctgaggacc

SEQ ID NO: 490170 - DNA, 474 bp, Homo sapiens
  misc_feature (49)..(49): n is a, c, g, or t
  misc_feature (81)..(81): n is a, c, g, or t
  misc_feature (86)..(86): n is a, c, g, or t
  misc_feature (95)..(95): n is a, c, g, or t
  misc_feature (106)..(106): n is a, c, g, or t
  misc_feature (115)..(115): n is a, c, g, or t
  misc_feature (137)..(138): n is a, c, g, or t
  misc_feature (161)..(162): n is a, c, g, or t
  misc_feature (167)..(167): n is a, c, g, or t
  misc_feature (172)..(173): n is a, c, g, or t
  misc_feature (212)..(212): n is a, c, g, or t
  misc_feature (215)..(215): n is a, c, g, or t
  misc_feature (278)..(278): n is a, c, g, or t
  misc_feature (316)..(316): n is a, c, g, or t
  misc_feature (326)..(330): n is a, c, g, or t
  misc_feature (348)..(348): n is a, c, g, or t
  misc_feature (355)..(355): n is a, c, g, or t
  misc_feature (366)..(366): n is a, c, g, or t
  misc_feature (378)..(378): n is a, c, g, or t
  misc_feature (405)..(405): n is a, c, g, or t
  misc_feature (473)..(473): n is a, c, g, or t
accagccccaggtcctttcccagagatgcccttgtgcctcatgaccagnttgttgaagagatccgacatcaagtgcccacnttggntcgtggctntcatttgctcntgctccttntgctgttttttttccagttttnnttcctttatgttgcgcagttggnnttgcngatgnncccagcttgggggatggactctagcagagtggcccagcnacnggaggggtcgaccacttccctgggagctccctggactgaaggagacgtgctgctgctgctgtngtcctgcctggggccttggcctacaggggcggcggttnatggtgggannnnnggggcactggacagaaantcaggancagggggtggnggagggggcggngggggtggtgtaagtaccccatcttgnaggtctgccttgagaggctcggctacctcagtgtggaaggtgggcagttctggaatggtgccaggggna

SEQ ID NO: 490171 - DNA, 156 bp, Homo sapiens
acctcatgtatattgcacaacacaaaaccaggtaccaacgaaatccttttaatctttccacacaggataacctctgcttcacaacatcaagactttaagtctccatcaactttttacagtttacagcagataacaaggatcgtccctggcgcatga

SEQ ID NO: 490172 - DNA, 912 bp, Homo sapiens
cttcaacagatgcttggacggaacccgggcgctcgttccccaccccggacgggcgcccatagccagaccctccgtcacctcttcaccgcaccctcggactgccccaaggccccgacgccgtccagcgccgcgcaaccacctgctcgccgccgacgcctctccttagtcgccgccatgcacgaccgggtccacctcgcacagggtggcgcccagaactacccacacaggactcaagaggccggacatcaaccgccaggatcaacactggagctctacgcctccctacgttataccgtgtccatgtcataactacttaagcaccgcgatgaatgtggggctatagacagaactttgcccacaatacagttattactttgcaccaatactcatgcaggcgagggcccccatgctgcagaacacgtgactgacaaggcttgcgagacccccacacgagtgtggccgccatcctacccttcaggatatcaagaacacccaggactggtgatgaactgccgacacgccggagctgaatgcacactggacgtgtgccttcccattttgggcaacacaacatgtgcctcacagtcacataccgtgagcaactgacaacacaaactgggccaacggacaaaaagtgaagccccccaatttagatgatggactacaattgcagaacactttaaacctgcactgacagcaggtgaaacagaccatcacaagaacttgggtggacccaggatgcagccacatttgacgcacagcatgggacggcgccagaactctggactaggcggaaaatttctctatggacaaagcaagccccctggacaaccgtgcaatacgaaaggtacgcctaccgggctaatatcaccaataccgggggtgaactatcctgtgtcacacaggacagag

SEQ ID NO: 490173 - DNA, 136 bp, Homo sapiens
tgtcggtgtgtcttccagggcaagacacaaaggtttccgtggggggatgaggtgagtggggccatgagcaccctcctgggaggggacaggctccactgtcgggcttgttgttttttgaatgtaaaaacaggactgt

SEQ ID NO: 490174 - DNA, 1133 bp, Homo sapiens
  misc_feature (159)..(159): n is a, c, g, or t
agcgggacccgactctgctgtcaaaaccctgttacatctgtcatttctaaaagacatataaccatgttgtccatcaagtctggagaaagaatagtctttacctttagctgccagagtcctgagaatcactttgtcatagagatccagaaaaatattgantgtatgtcaggcccatgtccttttggggaggttcagcttcagccctcgacatcgttgttgcctaccctcaacagaactttcatctgggatgtcaaagctcataagagcatcggttagagctgcagttttccatccctcgcctgaggcagatcggtccgggtgagagctgcccagacggagtcactcactccatcagcggccgaatcgatgccaccgtggtcaggatcggaaccttctgcagcaatggcactgtgtcccggatcaagatgcaagaaggagtgaaaatggccttacacctcccatggttccaccccagaaatgtctccggcttcagcattgcaaaccgctcatctataaaacgtctgtgcatcatcgagtctgtgtttgagggtgaaggctcagcaaccctgatgtctgccaactacccagaaggcttccctgaggatgagctcatgacgtggcagtttgtcgttcctgcacacctgcgggccagcgtctccttcctcaacttcaacctctccaactgtgagaggaaggaggagcgggttgaatactacatcccgggctccaccaccaaccccgaggtgttcaagctggaggacaagcagcctgggaacatggcggggaacttcaacctctctctgcaaggctgtgaccaagatgcccaaagtccagggatcctccggctgcagttccaagttttggtccaacatccacaaaatgaaagcagtgagtgagccccactttcctttttcttcctcctccagcaccttcgttgtttcctgggtagtctgcctgggtgaggctcccttcctgtttctcatctgtggcttctgaaacacttagactctggacccagcaagagtttcaggaagtgggttgctaggcagttagacaggcttgttggtgaacacccggtatgtagttccatttcagcacaataaaaagaaatcttgcattcaagatgctaaaag

SEQ ID NO: 490175 - DNA, 444 bp, Homo sapiens
  misc_feature (403)..(403): n is a, c, g, or t
atcggagccgagactgcttataggttgtcatttagatactcaccgacggcttctccagctaaaaagattctctacggctccagctacagcacaatctaggcaaaactcgagctccgaaaccatggatctccgcaagaaagcaaagcgccgaaactgccttaaatacagcagaaatggaacgcccacataacctttggaatacaaacgcactcctcccctgacttgcacctccaatgcggaaattccgagctctcccgctggtgctcggcttatcctcgaggagctagctttgaattgccgcctttgacttactcataagctcctcggccccgggagcaagatccacgccctagcgcgcctggctctactgccagaaaacttctacttgccacttaattgctcnaaaccaacaccggctccaaattaaaccaaatctctcgcacc

SEQ ID NO: 490176 - DNA, 1144 bp, Homo sapiens
ggcggagcgcggcggtggagatggtcagagcaaatatccaagaagaggaagattggtcgcatggatgcgcgatcgtgtcaaaggcatgacatcgtgagagtgacgtttatcttgactcgcggagactgggcgtgcaagatggctactcgtggagctagaggtgcgagtttacaccaatcacaggaccagtaatatcattatcttagccaccaggatacgactacgaatgttcttgtggtgaggataggggccgggcgtgcttcaggagaatcgtgatctgcgtgtacagttcacgaaggagagtatgagcgttttctcgaggaagtggctacgatgtacgatgcttaagtcgctgatagaatggtgggcctagcgtagcaggttcatgatgatgacacgagttgtggcctagtgtcgaggagatcttcatgactgttcactagaaatcttgccgtaggaagaggtcgttgcctggtgccggaggggccatgcgtatggtcgtggctgcgggttcgatcatgtggagagtggggccctaaggctgcgaagcgttgtgcgtgtctgggcagacgtccgacggaccagaagggctagaatcccatgaagttagtggatggcctggatgcatccgacagcgcgaagacccatgtataactactagcgtagacactgctggtgcgccacgtgtcgctccagacagggtgtgctgggcactcaaggtgacagatcatgctgccctgggacccaaactggtaagataggcctaagaagaccctgactgaccaatgtgaggcattggtgagaatacccaaaagacttgaagattagtggcacaccagccacaatgtcagaaacaaaaagggggtgaagcctgatccgcatttcatgccccaatcaagatacacaatgaaataacagggtctctgggcagcatgtatctggagtctggattgcctttaagaacttgaatacaaatggtccaagacgacatcacacaaaaaaacctcgaggaaaacacgaggggaaacaggcacaaaggcaaggcaaaggcagaaactgtgacaggagaagacggtcacaaagggaagcaacaagagaacaaaaaggagaaaaagaacaacacaaaaaagaagaaaacgccgag

SEQ ID NO: 490177 - DNA, 404 bp, Homo sapiens
  misc_feature (160)..(160): n is a, c, g, or t
  misc_feature (168)..(168): n is a, c, g, or t
  misc_feature (185)..(185): n is a, c, g, or t
  misc_feature (235)..(235): n is a, c, g, or t
  misc_feature (247)..(247): n is a, c, g, or t
  misc_feature (345)..(345): n is a, c, g, or t
aggtgggtgaggggaatcctggatttatttgggataaaacttcctttttccctttactcagtggaagccccttcaaagccagccagggctagtgaaccccagctcaaaaggcaaaagaagacaaaagccccccaggatgtagaaatgaagggccttgaanatgagagntaaaccttttcccctanaagattttcaactggagccagccttcagactcagtggttgtttcaaaggnctttgacaaaancaaggccccttttccctttccagatttcctcctacctaatggcctactgacctcccctaaagggatgtttttgggagggaaaaagggacaaaaaaaanattggagaagggcctctttagcagtcaactccctttgtaataaagccctagccctttta

SEQ ID NO: 490178 - DNA, 453 bp, Homo sapiens
catagcaagaacgcatctctaaaaaaaaaaaaaaattaaaaaattaactggacatggtggcacacgcctgtcatcccagctacttgggaggctgaggcaggaggatcgctgaccccgggaatttgaggctgcagtgagtcctgctcaggccactgcactccagccttggctacacagcaagactctgtctaagaaaaaaaaataataataattttagggatcatttaatcatgttttctagtcatgtttcagtgcgttttttaatcatgtttcagggcatgcactggcagtgcccatctgttcctaagtgtgtgatcagcaacattacgttggtaacttaaaattggccatggtgaaagtgtttaccccccagtcattggcaaaccctagaaattgaagattttaaattcctgggagaacggcttattaaacctcaaccagcaccccgctgca

SEQ ID NO: 490179 - DNA, 1499 bp, Homo sapiens
tgatctacccgcccaagacaacacacaccctcatctccactcgcaccgtaccatgcacagccgcccactcacaaagaccaactttcacacaacaataaacaccctactctcaaacattagcacaccattgaactcctttcagtataacatcctaaataatcacctaactggcacactatactcttcaacacacacacaatcctaaatcgcctctcaactaacatatcatataccatacccacatcctatccatcacacacttaaccgagtactagacacaccttctatgctaccctgataccaaccatcacaataacttacccatctacccatctacacccaactaactcatctcaccttaacactcacagagaccctcaatacaatgatatcactcttactcacaaatactcatatagaatatcaccgtttccaaacccacgcgaacacaaaaaatctgcaccacccactactccacaaaactcaacacaccccctacaccacctcgcacaccacctacacacgacaccacctctctacacctccactatcaccccaactaaacacaacccaatcacacaaccaaagcacaccactattacttcgcctcaccactcctccacacgccaactccatcacgactccacagcaacacccatcatccgacacaacacccacattaccatccataatatctgaactaccctacagccatcaatcacccaccctctcaacacctatacccaccatcaaccatcccatacagtacacactacctccctcctaaccacaagcacactacaccactaatatagaccatctacacccttccttcaacacccaaaccctatcaatacacacctacccacacagctactccacacctacttccaacaaacataaaccaataacaaatttctactcccacccactccactacaccaaaacaattcacaataaacatctaaagactcaatcaccactacaactccacaaactactctaccccaaacaaatcacacaataacacacaccatacaaacctacacacaccacctaactttcaagccaatctcatcatcatcctcccacagaatcacatccacactattcatatatcgaccatcaactatagaccatacactctagtctctcatatcacttaacacgcaatcttcacgatgcctagttgttcccactcataccagactccgactcatatactcaatctcctcatcagactcactacttatcaatcactccagttacctacctactttcttaactcacatgttcacagactactagacccttgtcgatcatcctacatcatcctatatactcatgacaatgttctcctcatcattcacccacacactttcaacccattccttccccctcattcactctacactacaccagtaccttcctcaatgcatctgcatcacaactgcctcaactgccacctacccctctctactcagcactcacctacaacg

SEQ ID NO: 490180 - DNA, 210 bp, Homo sapiens
gcgcagcagagcacagcgactgcccaaggagctgctgtcctagccaccctcccagtcatcttcaagaagaacaaaagttcactgatcgcctcagttcctttattctcctcttgttcttgaggactgaccaatgggtgtgtgtccctgtttgcctctttgctggggtcacagaggaacccaggagctcacattgagtggcccccagacatg

SEQ ID NO: 490181 - DNA, 777 bp, Homo sapiens
tactctatggggaaaatatttcaatccgcctcctttaagggtttaaatattgccacaggggggccccaccactgtgttggccttcgaagttggccgcccccccccccccacaaacattgtttggggagagtttctctcgtatatagtgtgggagaggagacactatctcggagatttaccgcccccgagaaacagttcaactaagggttgtggcccccacagcactcttggagagacttcacatgagaagagagctttaaaacatcttggcaaatcgtgtccacccatatgttgtcacaaacgggtatatgtataagagagagaatatatataggggcacgccacattttttgcacatcctgaccacattttttcccttaaaaaataatacaaagacccaccccccacacatttttggcgcgaagggggtggaaaatcacgttgttaacccttataaccctaacacgaggtggtgagcacatgtaacactgagcttattgagaccactcatagagatcgatttcttgtatattgagttttatctctttctcgtattctatagggtaaattctccagggtaaaatgttaggtgttgaaccttgagaaccctggaacccccttccctgctcagaggaacagtgtgaaaaaaaatctcttgagagatttagaatatcttttcttttgctcatcttagacccccgactgactttgaaattatgttaagtgaaatatccatgaaaattaagtttactattaataattaaaaagaaaaaaaaa

SEQ ID NO: 490182 - DNA, 479 bp, Homo sapiens
cttgggatcacgggacttttaaacaccgcaaagtgaccctgatggaagaggggcttcaatccccacggtcatccaaggataccttgtatttcatggatgatgcagagaaaacatttgtgcccatgactgagaacatttataatgcccataattgataaaactctgaagctctgaatattccctggtggtttagctcatgacatttccagaaagaaactcgatagacctcgcagagccacttcatacgtagaatccaactttaacttgattgaagactataaggtgcgattttatttttaggaaattattcattaaaaggatagttttttttttttttttaattacacctgaacctttgcaagtaaaaagatttagagacaattatttttcaatgtgcacctgccatttgtccttgcaaactaagcttcttggagagagggccttatttttttaaagacataataaactatattaacact

SEQ ID NO: 490183 - DNA, 745 bp, Homo sapiens
ttttttttttgtttttatttaactttgggtagagacaaagtgatcactatgttgcccacggctgggttaggactcctgagctcaagtgatccgcctggccactgccttcccaaggtgctaggattacaggcgtgagccacaagtgccgtgggccctgtccactgttgttaaatagcgctcagacaataagagtcatgaagaaggaactctcttctgtgacagttcgcaaaagaagttctaccatgtttacaaaataacagataatctaggataaactctgggcgcaaattcaaagttaaagagaaaagaacaatttttactagaaagtttgtcttaagagcctctcagcgcacagggtactatgctgagcccagaaggtacttcatttgtctacagtagagtaatgtacacgaagctcacctccggggtacagtgacattatggcggggcttccaactggaacgcaggggcagctcagggccctgtaaaatctgagtctactgacagaaatcctctcggccccacccccaagaagacctctaaagtccagatacagtgactgctaatccctagtcggcagggttagcccggttcagcaaaagcattaacaggaataccaagaaaacccatgtaggacgcgcagattaaattgggaattacctgagaagctttttaaaaaatcccatgtcgggtacacccaagagatcaaacccagaactgggggattcgctaatcatcaacattt

SEQ ID NO: 490184 - DNA, 705 bp, Homo sapiens
ttgtctacaacatgcttctagtccaggaggcacaaacaagaactgggattaatgaagcatttgtttcatttacacaaagtagtgagtttactgtgtggagatcctgctcagttttattttctattgatgaagtaagactggggactcaatccagagccagatagtagggggaagccacagcatttcctttataacctcagtgtcaattttgtagtgagactgagcagttttaaatccttgcgtgcatgcatacctcatcagtgatgtacataccttgccactcctagagacagctgtgctcaccttttccgtgctttgtgcctgattaaggcgtactgacccgtaaatttctgaagcaggcaggcaagaaaaattacattccttgtcatcgtaaattacctttgtgtgtacattttgactgtatttgagacatttttggtgtgtgactagttagatttgcaggatgtggcatatcattgaacggaagctaaagtcgtgtgacagtggatatagctgctggaccattccatcttatatgtcaagaaatctggaattattagtgttaaagacatatgacatgtggattataattttgcttagcattgctttgtaagaagtacaatataaactagtgggtatataaacgtactgaagtctgagaagagttatcttaggaaaatacgtttatatgcgggggtgtgcagg

SEQ ID NO: 490185 - DNA, 226 bp, Homo sapiens
  misc_feature (69)..(69): n is a, c, g, or t
ccttcccccacagtgtaggtggagcgcggaacaggaaatgtcagacacaggctcgctgctcgttggaangcagggtgggacttccttcctctgtccggagaggcacaggtgtcaccagttccagccaaagctcctcacaggcgctgtaaatttttgtccacgtcttgtatttatcgaatcaacaatttgtttcattttattaaaattgctcccttgttggggaagg

SEQ ID NO: 490186 - DNA, 453 bp, Homo sapiens
atgtggcatatcaggggaccggggtgggaggggctgatgaagccgaggccagaactaggtctgcgccctggccctctccctaatggccagatccggcctcacccgtgaagctggcctggcaggggatggcccttcctgaatttctgtgtggtctaggctggggttggcatgcttttctgtacagagacagatagtcaatatgctcagctctgcaggctgcacgggttgtgtctcagctactcagccctgctgctgtgatgctgaggctgccattgacgacacagaaataagtcgaggtggccgctgtgggccagtgccactgcatttatgaacaccaaaatgtgaatttcatataactttcacatgtcatgaaatggcatttttctttcaattgtttgtttatttatttttaacatattttttggtgacagaccgagactccatctcaaaaaa

SEQ ID NO: 490187 - DNA, 263 bp, Homo sapiens
  misc_feature (17)..(17): n is a, c, g, or t
ttagtacttctattagnggtatacattggtccaacttggggtgtgacgagtcagttatattttgggatttacaaatttattacttgtaaaaccctaccgcttcttatttttggctgctttaaggcctacaatggttttaaaatttttaatcctctcaacaaggtttttcccaattgtccaaaaacctgtccttcttcgaacaaccagtttaatttacaaggggatttaaagggttctgtggccaaatttaaaggttgaccata

SEQ ID NO: 490188 - DNA, 566 bp, Homo sapiens
tagcgccgaggttttcatggggcccgtggacacgtcaaggggacaacaagaagcggtgcccgtgcgtgtcaaactgggcttggctcctggcccacccggtaagacgcggggtttctagcactctgtgggccccgcaactctgtctggcggtgaacaccgggcctccccccgtggggtgcgcggtgtacccaattttcgtgtccaaccccccctcagaccacaatagctgtccccagacgcttgccaatcaccccggggccccgagcctttgggccctctatgggtgttgcgggttctccgtcctctcccccctggtccatcgctatctgggacaggcttcccctttttggggtctgtgacaggcctgtagcagagccacccagtggtttctatgccaactcctccccgcggcgggcctgtagtctgcgaggccacgcttcacccgcgcacgaggtgctgggcgagcatccttgtctccaccgcgtcactgggcccccacaggttacatgtgggcgaaaatcttcaacaaaatctctggggcaaaaaaaaaacacaacaataaagca

SEQ ID NO: 490189 - DNA, 216 bp, Homo sapiens
accaggaagttggatgggacttagagcccttgatcaacccagaacgccatgaccgcaggctggatcacttcagggtctgcagtgacatcactctgtacaagggtaaaacgtggggcttaggagatgatccccacaagtagcatcccagcggatgagcccatctgtggatgtaatgccttaagtgtgcacagcccaaagaaataaaatgctacttta

SEQ ID NO: 490190 - DNA, 635 bp, Homo sapiens
cacggtggctcacacctataatcccagcacttgggaggccgagtcggacagattatgaggtcaggcgttcgaggccaggagttcgagaccagcctggccgatcatggcaaaagccccatctctagctaaaaatacaaaaattagccaggcgtggtgacgggcacctgtagtcccagctacttgggaagctgaggcagtgagaatcgcttgaacccaggaggcggaggttgccgtgagccaagatggtgccactgcatttccagcctgggcgacagagtgagactctgtctcaagaaaaaaacaaaattgggcagggttacaggggttcatgcctgtaattccagcacttgggttgggccaagggggggtgggctggcgttgagcccaggagttcaagaccagcctgggcaatatgggtggaaacctcatctctacaaatacagaaactagctgagcatgggtgatgctcgcctgtggtcccagttgactcgagaggctgaggtcaggaaggacctaactggagcctggggagtcaggctgcacggagtcctgatcaaggcagtgcagtctaagctgggaccagagtggactcctggctgcaacaacaacacaacacgttggccaagcaagcaaac

SEQ ID NO: 490191 - DNA, 174 bp, Homo sapiens
tgacaatcgaaaggatcggggtagttgtcgacggactataagtgggtccacttggtcccatctacggtttgcaggttttaacctttgtaataacatgttgttgaatcgtcgtagtatgtaaaaaagtagtattgttgccagtggttgaacaactatactcgtaataaaccaggt

SEQ ID NO: 490192 - DNA, 793 bp, Homo sapiens
agcggagtcttctccctcgccgcaggtccagtgcccgagcttcggctctcccatgttcctgcaagccacctgggtccccacaatgcaacaatcgaatgtgtggagtcccagcagaagcaccactggaacgagcacagagcacggcgtgccaaagccatgtgtgggagggggagctgatcggaaccagcatggccgtggtcctactctacgcgactggaccccagagctactcagcccgggacacacagactgcgactgatgcgggcagacgacaacgatcccaagggaacgaagaacgccagcactcatcggcgtcccaacgtggacgaaatacgtggacactgccgcggaaaacgagaggcagcactggcgcacaccgcctggacaccgcagcggagcgaaccgagaaccacacagccgccacaggaagaacactgtggcacccaagaccctgcccgaggagcgaccccctaacacgcagccggcagcacacgatcacgcacactacctaccatccaaatccatcgggggaccaaccgcacgcaatcacagcaccatagccaacgccgtccgcacgcgacaacgcgcgccccggggggacccccgccatcgaggaccacgcggaccctgggcgccccaaggggacattgacgtaaagctaagcacgcgccacaaagcacgaacggtgatccaccgagggcaaaacgaaacggcgtgagccaccggcaggccgtgccacgccgacccggaagacaggcggcccggcgacgcacaggagcaagcacaacaggga

SEQ ID NO: 490193 - DNA, 429 bp, Homo sapiens
aggttcggcacgcggagagagagagagagagagagagagagagagagagagagagagagagagagagagatagagtagagcgagtgcgtgagcgatagcgagagtgctatagttcgtgcctctgacctatacctctcatccctctcttttacttactctccatctctttcctctcactcgttccctttcccccctccctttctcctcccctctttccatgcgctttcacttgctctccactcctctcctcctcctctccctcctctccctctctctgcccttcttcccctgttgctccgttttttccctctttagctcatacctttgcctccactcacctcctcttttacctctccttcctttccccttcctcctatctattacctctcatgctcttttcttcccttgctctttttttcctctctcccc

SEQ ID NO: 490194 - DNA, 351 bp, Homo sapiens
ggtcgactgatcatgtccttcttgcggtcgacgatacgcacgaagccgtccgggtcgatcaccgcgatatcgccggtcttgaaccagccctcggcatccagcacctgttccgtggcctcgacctgctgccagtagcccttcatgacctgcggccccttgatacacaactcgccacgctcgcccaacggctgctcgaccccgttgtcgtcaatgaccttcaaggccgtaccgggcactggcaaacccaccgtgcccagcttgcccttgtcgccataggggttggtgcaggcgatcggcgacgtctcggtcagcccgtagccttcggttgatgcggcaacccggtgaagtttg

SEQ ID NO: 490195 - DNA, 449 bp, Homo sapiens
  misc_feature (6)..(6): n is a, c, g, or t
  misc_feature (240)..(240): n is a, c, g, or t
  misc_feature (254)..(254): n is a, c, g, or t
  misc_feature (327)..(327): n is a, c, g, or t
  misc_feature (334)..(334): n is a, c, g, or t
  misc_feature (393)..(393): n is a, c, g, or t
  misc_feature (415)..(415): n is a, c, g, or t
cgccantccctcacatgtacttggtccaactgtaggtgactggttatcacatcttcactggcccctgtggccgtgcatgtagtaggggaggcttcagtcagcccctcactgtggtccaagaatgccacacacctttccgtagatatgccgatggtaattatcttttcttttggcttaatccgatttggtttggtttttccctttccctggattctttcctaccttcttcaggctgtcaanaccgggaaaagganacacagtgggagggaatcataaggaagaaacaagccgtctggcaggcaatggcaagaaaagttcctgttaaanatttaanctggcttcccttgttcaattggttccaagaagatgggttgttggaagaaacggcttaantgtaaggatcctctccgaatgnagcctgtgtaatcctgttacaggtttgtgttggt

SEQ ID NO: 490196 - DNA, 832 bp, Homo sapiens
  misc_feature (29)..(29): n is a, c, g, or t
  misc_feature (774)..(774): n is a, c, g, or t
ttttagggtttacgttctaaacatgttanctgggctgaccggagtactttcgcgaatgaacagtctagaaatcatatacctagaggaactttgcagcttgcaggagctgtaatatcacccagcgatgaggattctcacaccttcactgtaaacgctgccagtggggaacaatataaactcagagctacagatgcaaaagagcgaccgcactgggttagcagacttcatattttttctcagcatcatactgaagctattggaaagaatcctcctcctctgaagtcacagagcttctcacttgcatctagtagtaattctcctatatcgcagaggagagcatgtgataatgccctttcttttcttaatgttggacattccaaactgcgatcactgttcccaagaactaatctacctccagacccacttttgggactgtgagacttggagtcccattctctaggccctcctacacactttaattcgtggaatggaatgccttcctcttttcgcccccccttactccctccggctcgggacgctcttattgctcctcgtcttctcttcatgggcaactcttacctgttctaaaacgcccgccttccttttctctccatctaccttccctgcaccgtgataccataccggctccattcgccttcctgcacccaatacttcgctcttctctcccccaccttcccatgatctcttctgttcaatcctgtctccactttatcgtcctctaaccattacctctctgctcttcggttgttgttntcgttgtgccgttctcttcccactcatcacaatatttcacatcacgcaatctacacat

SEQ ID NO: 490197 - DNA, 229 bp, Homo sapiens
ttggggaatgataaacgcagccagatatttaccctgcgcgttatgcggtatcttacgccgctgcttaaaggagaatgctatgtccgcccagaaaccggggttgcatccgcgcaaccgtcatcacagccgctacgatctcgccacgctttgtcaggtcaatcctgaactgaggcaattccttacgcttacacccgccgggagcaaagctagactttgccaatccgctggg

SEQ ID NO: 490198 - DNA, 148 bp, Homo sapiens
gcggtcatatgactgatacatttcacgctggtcggcacccacggtctgcacgttcgctggcctgctgtggatggcggtgatgatgtatcaggtcaataagcacggcctgaccaacaccaacaagacccgcctgagctgcctgagcctg

SEQ ID NO: 490199 - DNA, 177 bp, Homo sapiens
ggaggggctggggggatcccagcagggggagggcatccttctaccccagttgcccaaacagtccccccacccctggggattttccttctccctccatccctttggacgggttctgggcctttccaaacttgcttttgatctttttggattcctcttggggcttgaaggcagacccaa

SEQ ID NO: 490200 - DNA, 335 bp, Homo sapiens
  misc_feature (22)..(22): n is a, c, g, or t
  misc_feature (76)..(76): n is a, c, g, or t
  misc_feature (215)..(215): n is a, c, g, or t
  misc_feature (232)..(232): n is a, c, g, or t
  misc_feature (299)..(299): n is a, c, g, or t
aaaaatgagtattacataattntttttagacagttatccttggctacaaggatgaataacatgggtggtgccagtncaagattggacaggcagttgttggacagatggccatgcaggaatttgttttgttttgttttgtttgagagagtctcgtcgctctgtcaccgaggctggagtgcaatggtgcgatcttagctcactgcaacctccgcctnctgggttcaagcaattntcctgcctcagcctcccaagtagctggggattttcaggcatgcaccaccatggcccgggttaaattnttggtaattttccagtagagaatggggtttcgccat

SEQ ID NO: 490201 - DNA, 98 bp, Homo sapiens
caatctcagatgatcagtatccactgttctcaggtctacttgctatgtacatcatgaaactgaatagaatcataataattgatgatttgaagttatcg

SEQ ID NO: 490202 - DNA, 237 bp, Homo sapiens
aggtacgtgggtgttgagctcgaacgctatcttaattcggtggctgcttttagccctactctgggtgttaccacttatttactctactctacacggttttttcctagtgtccacagagctgttcctctttggactcacagttaaatttacacggggctttagagggttctgtgggtcacctttcacagttgaacctacagacttctacttttggaccacccagactactcaccacgg

SEQ ID NO: 490203 - DNA, 491 bp, Homo sapiens
ccccaaaattttttaaatggaaaaattgttaaaatttgggttgggccccccaataataaagggggacccaaaaaggttctctttttccccccccccccttggggcaaaggggggtgtttttaaaccaagggcgccccaaaaaaaaacagggtttttttcccccatttaggggggggccccccttttcccaacgggtttttaaatggggcccccccaaggggtttttggaaaggaaacaaaggatttttttttttccccaaaaaaggcgggcccttttttttaactttccaaaagggttttccccggggccccaacttggggttcctttttgggaaaaaaaaaaagggccccccccccgccctttaaatttccgttttttttaagggcaaaacccctttttttttttgaaaccttgggaaaaaccccttttttcccattcccgggggtttttaattttgaaattttaaattaaaacccaaccccccaaccca

SEQ ID NO: 490204 - DNA, 355 bp, Homo sapiens
gggagacagagacccagagagagagagagagagacagagacccagagagggaaacagggacccagagagagggagacaaagacccagagaaagagggaaacagagacccagagagagagagacggttacagagacctggagagatagacagggacccagagagagggagacagacagcctgacagctgcgagagcgacacccacacttatcgacggctacacacatagactgctactgatgactagtacctagcctggaacatcatttgcagggagccccacaactataaacattgacgattccttctctgagcacaggcagctttctagaagtttcccttcctccatccagtct

SEQ ID NO: 490205 - DNA, 156 bp, Homo sapiens
aatgcagcattcagcaccacccgtgcagagagcttgactcacataacaggaagccctggggctcattccatgtacacatattgccacacggtatcccatgtactaggctagcatatatagtagctccacaagggaaggcctctgcaatgctccaaa

SEQ ID NO: 490206 - DNA, 123 bp, Homo sapiens
tctaagatcgtcatgagcgatgaaagtggttggttaacgtcggaattgcatctgttttaagctaatgaggggcagctcatgagtgcagacgtcttgtgatgtaattattatacgaatgggggc

SEQ ID NO: 490207 - DNA, 254 bp, Homo sapiens
ctgctataactaataataatttagaaagtgttaaaatccacctagaatttattttgggtgtgatgtgtgattcaaattattttattctcaagttagcccgttattcaaacactaaaatatggaaaaaggcatcctaagccgggtgcaggggctcacaccagcacttggggaggccaacgcaggcggatcacccgaggtggggagttcaagaccagccggaccaacatggagaataataataagccgagatcgca

SEQ ID NO: 490208 - DNA, 281 bp, Homo sapiens
ttgcaccggtggcaacgagcatttcaaacagagccatcgcgattcacggcttcatcagcccctgtgaacctgcaggtggcctgcgagtgcaggaggagcctaatcagcccgtgtggctcccagcctcatgcactatgatccatgaagaaagaggagacataaaccacaccaactcccgaggccggggcggcacaggcagtgacccaagacagcccgatagcttaggccccgactggctcctaggaagccccacttaatatcccaccgatccttagcctaga

SEQ ID NO: 490209 - DNA, 102 bp, Homo sapiens
  misc_feature (29)..(29): n is a, c, g, or t
attcaatatgcgtggtggaaatttcagangaggagcccctgggaatcggggcggatataataggaggggcaacatgcacagagagtgtggcggtggaggaag

SEQ ID NO: 490210 - DNA, 279 bp, Homo sapiens
cccccccccccccctttttttttcccccccgggggtattttttaagggggggggggggggtttcccccaaaaattttcccccggggggtatggggggggggccccccaaattttttttccaggagcttttgggggtcccccccccccccccggaaaaaaaaatcccccccccccaggggttccccccccccccccccccaattttggggggccccaaaaggggtttttttttttttttttcccttcccaaaaggttttttaatgggggggcgtttttta

SEQ ID NO: 490211 - DNA, 211 bp, Homo sapiens
tactggtgtattcactcgccacacgcccggctagttttttatattttagtagagatgggatttcaccatgttggccaggctggtctcgaactcctgacctcagatgatccacccgccttggcctcccaaagtgctgggattataggcgtgagccactgcgtccagccggcagcacccctttctttcggagtggcgagtgaaattacggcca

SEQ ID NO: 490212 - DNA, 276 bp, Homo sapiens
caactgcaagcgcggaagatagagtgcctctaaaactcgggcatgtgggaaagtctagtagatgttacaaattttaggctttaaagtttttattctcttaacaatgagaggatgagttagcttagatctttttggacgaccacctcccatttactatctgttaaatgttaaatgtgaaattcctaacagttccacttcagacaaattattcctacagaaatgctcactagagtaggtaaagatatatgcatgaagatgtacaagaattagcaattg

SEQ ID NO: 490213 - DNA, 393 bp, Homo sapiens
  misc_feature (7)..(7): n is a, c, g, or t
tatcagnaccaggatttcttcccaatccaaataaagaatatgatcaggagttacaccgggcttattttaaattaaaatatttttacatggggttccttattgaaaaatcaggggattagtcataaaacccccctcataagaataattgaaccataaagtttgctttcagaagcaggtttccaattaaaatctcatttccatttaaaacggtttcagtcctttggtaaaaatttcccttttcaaggaaggttaaatatctgcatttatcttttttcccaggttttctaaaaccaaaggtattttttaaaattcagggagatataggataaaataatgctttgagaagaatggttaatagaaaattaaaataaccttttttggccaaaaaaaaaa

SEQ ID NO: 490214 - DNA, 449 bp, Homo sapiens
  misc_feature (36)..(36): n is a, c, g, or t
  misc_feature (44)..(44): n is a, c, g, or t
  misc_feature (105)..(105): n is a, c, g, or t
aaatgagctaagaatgcacccctaaactcccaaccngggtgaanaaggccaaaactctgtcctcaaaacaaaaaaaaacattgttttccatatgcctggggtggnatgggaagagaatgttgagcccaggggattgataattgactgttactttaaaaccaaggccgggcacagtggctcacacctgtaatcccagcactttgggaggccgaggagggaggatcacttgagcctagcagtttgagaccagcctgggcaagagaggggagaccctgtctctacaaaaaaatgtaaaaatcagccaggtgtggtggtatacacgtatagtcccagctgtgtgccagaggctgaggtgggagtattgcttgttcctgggaggtcgaggttgcagtgagccatgatagtgccactattctccagcctgggcaacagagtgagaccttgtctca

SEQ ID NO: 490215 - DNA, 643 bp, Homo sapiens
tacccccctaatggaatccattaactgagtgagtcttctgatacagcagtggacagcacaaaaagaataaattagttgacaggcaagatacctttttttattaaattttttttatttccataggttattggggaacaggtggtatttggttacatgagtaggttctttagtggtgacttgtgagattttggtgcacccatcacccgagcagcatacactgcacccaatttgtggtcttttatccctcacacccttcccactttctccccaagttcccaaagcccattgtatctttctttcttatgcctttgcatcctcacagcttagctcccacatatgagtgagaacataccatgtttggttttccattcctgagatacttcacttagaataatagtctccaatctcatccaggtcactgtgagtgccattaattcattccttcttacagttgagtagtattccatcatactttctttgcactgtttatccactcgtttattgatgcgcatttgggttggttccatgtttttgccattgcaaattgtgctgctataaacatgcgtgtgccagtatctttttcatatgacgacttcattttctctgggtagatacccagtgggattgctggatcaatgatagt

SEQ ID NO: 490216 - DNA, 290 bp, Homo sapiens
tgatgctacggtctgtctgaggatcccctggtggaacgacgtgaccggggccaggctatcatcacgcaagtgcttaacatctggggcctgattttggggctcttcatgagcattctgtcatcatcatcccagtgttggtcgtccaggcccagcgatagatcaggaggcatccattgaggccaggagctctgcccgtgacctgtatcccacgtactctatcttccattcctcggcctgccccagaaggcaggagctctgcccttgacctgtattccacttactccaactag

SEQ ID NO: 490217 - DNA, 412 bp, Homo sapiens
gttctaaatccagtgctgatatcagatacaagctcaaggacaatcttttcgaaggcttataccagtttgtgtgaggctagcatgaggtgtgtgcatttgccaggttgaaatttctattctcaattagcccatgcagcaaatgctacgcaatctgctgagtccgtctagaagcatttgctgtgtcactgatggatgggtgcctgactcgtcgtactccgtgcttgctagtccacatctgctggaagtgtggacagttgagtccaggatggatgaccagcgatctaaaccgagtactagcgctcatgggcatgcgatgatcttgatcttcatggtgctgggctgcgaagccgtgtgatctccttctgcatacagtcgggaatgcccggatacatggtggtgccgcccgacagca

SEQ ID NO: 490218 - DNA, 423 bp, Homo sapiens
  misc_feature (81)..(81): n is a, c, g, or t
  misc_feature (133)..(133): n is a, c, g, or t
  misc_feature (201)..(201): n is a, c, g, or t
  misc_feature (289)..(289): n is a, c, g, or t
  misc_feature (302)..(302): n is a, c, g, or t
  misc_feature (307)..(307): n is a, c, g, or t
  misc_feature (311)..(311): n is a, c, g, or t
tgtgggttgtatggtgaattatcaaacctgaggacgtggtgggaacctccaaatttgcagccagttggtgaaaagtacatncggtctgtggacacccaagcttgcagctgcatctgaagcgagggcagcctancgggggctggtggccttaacctgtggcatttgatgtaacatcagggagttgacatcagaattacgtcncacaggccaggtgcagtggctcatgcttataatcccagcaattagaaaggcaagataagaagattgcttgagcttgagtctgagcccncagtgagctatgnccgcnccantgcactccagcctgggagacagagcgagactgtctccaaaacaaacaaacaaacaaacaaacaaaaaaaccctgtagcttgggatcagccttctcttctgttgtttttcttt

SEQ ID NO: 490219 - DNA, 1492 bp, Homo sapiens
ggggaggcgtcctattcacacttgtgcagctccagggctcttgctcgtggcatggccaggtgtagggcccggggcgtactgggtcctctgcgagactagggcgcgagcatgtgcgtgcagctgggggtccctcgagtgggtggtgctgctctgtcgactggggtcccttgtctggacggaagatggggtgcatcgtgtcgatcgtatggagggcgtgctccggtgttctgcctccgcaccatttcctcgcccggtaatgtcgtccctggcgaatccccggaagaacaatcaaggaggacgtctcgaagagcatgacaaccctagtatgtcaccgtataaattgcggaaaccagagtgcacgtggggaaccaagagtggcctggaagcgcgattcagaggaagaggccgcacttctcggttgcgactactccactagtgggaaagaggggaactacggaaagtcccaaggggggcccttcctttgggaagtagggtggggggcctatggcatcattgagtgctcgattcaacgaccaattggccccccccggaggacccggcgttggacactacggtgcacaattccttgggggtaacgacttcgtgggctatctaggtgtgaggccgttgacccacatggaattgaccgccacgagaacttaggggattgaaggattcacgtacaaaataccacatacccggttggtcccccggcaaagcctaaaggacatcggtagacgtttacccgtgccccggttcgtgtgctctgggtgaccacccaatgtggtaagagcaccgaagggttccaagggcgccttggaagatggagacccaccaaccttatgggattaccaattcttcgaagttgaccaattctgtatgcaagaccgaaggcaaaagaggcgatcttgcatccatcggtgcggcacacacatgtgcgccaccgatatggcgtgtacacccacttagggggcagtacgtatccccgaaagaggttataaccatttcgaacaatcttaaacactgcgctaccctatgtgacacactccctagggacccccccatgacgcgacaaaataacacacaccaatttacacgccaagaacccacttttggggcaccgcgtgcaaacacgaacatgataccagaggcccacaggtgggtgcctcctcaagcacacggcaaccccgcaaggcaacaccacaaggcgacaggacactacgccagatgggcaaaaacccgcctaaggtagcgaaagcaccccaaacaatgggcacacagaggccaacaccccccccccaagaaaaaaagaaccgaaaggagaacaccccaccccgaaaacgcgggccggcccccccaacaaacaaaacaaacgggcgcaccatggtgaccccccatcgtagtaagacaccacagaagaagacaacaccccccccataggggcacagacaacatcgcccgcacagcacaacgcgacctaccccgcaacaat

SEQ ID NO: 490220 - DNA, 304 bp, Homo sapiens
aaaaattgggcccccccgggggggggctggggctttaatttttttgttaccccaaaaaggggggggatgttggggttccctttggccgaaaccccacccgctggccccgttgggtcctttggggggggcccttggccccccctttccccccccctttcagcccgggggtcccttttgggttttgggggggggccaacaagccaagttggggggtccctttttttccccccccctggaccccttttggcccggccttttccctggtttggaacctggttcctaataaagattttattccccccca

SEQ ID NO: 490221 - DNA, 771 bp, Homo sapiens
ggagtcttcggcgggctcgcgagccgggcgcggcctgctggtttcagacggagtcttactctctctcccggtctggagtgcagtggcgtgatctcgcgtcaatgtaacctccactctcacgggttcaaggggttctcctgcctcagacctcccaagtagctgggaccgcagggatgaacaccatcacggctggctacatataacacgatatatttatgtagagacggggtttagccgtgattgcccgggcctgagatctacacaaatccatggtctacaagctaccatgactcgagtctcacccaaaagctgcgtggagaactcactaagcgcagtgagagaccaacaagacatacccaggacacaagaatcccgaatacgacacaaaatcacaacaccacacaagcataaccactactggcggaagcaacgatccagatgacgagaccacgcacaataccacatacaagccatacataaacgcaacgaacccacagacatagccccataacggccaactatcaccatccacaacggcccggaacgccaggcgtaaacacgagctacaatcataagaaaataacaaccaacaagaaacagcacagacatcaggagggacacccaccgcgagctcacagcgaaacaaccacgaacacagacctacagggcacaaacaacatggcccacccaaggcaaaacgcccagacagaaacacacctaatagaaacaccagccaagacaccaacatacaaggcgccaaacacctggcaa

SEQ ID NO: 490222 - DNA, 202 bp, Homo sapiens
atctagaggacccccggtacgagcggtttgtaagagcggtctgttctcagtgacccagataactgctccagcccccagtggtgtgatgcacccctggacgagcagctgcccaacactgccaaccaccgtgcaggaaccccacagcctaaaaacaccagagcaagctctgcatgaccatgtgaaatctgctaccatcgtggtg

SEQ ID NO: 490223 - DNA, 343 bp, Homo sapiens
taccaggcaaagcatgacacctccctgacgctgggcacagtgactcacacctgtaatcccaacacttctggaggccaaggcaagaggatcgagaccagcctgggcaaaatagaccccatctctggaaaaacaacaacaaaactttccgcgtggtggctcatgcctataatcaataggactttgggaggccgaggtgggaggattgcttgagtccagaagttcaagaccagcctgggcaacatggcaaaaccctatctttacttaaaaaacaaaataaaacacacacacacacacacacaaaaacctagctgggcagagcagcacatgcctgtagtgctcgggt

SEQ ID NO: 490224 - DNA, 1494 bp, Homo sapiens
gcttgtctgtgaaacaaaaaaagtatttattcgagcgcctactatgtgccaggcactcaacaaacaagtatttattagagcgcctactatgtgccaggcactcacacaaaccaagtatttattgcagcgcctcactatgtgccaggcactgttcatagaacccccccccagaagaaaaaacgacaaaaaccaagatagaggcagcaaacaccaacatctgagggagaggcaaacaggggcagttggcagtaagacacggataaagggacaactagagcaagccctgcaggtgcatcggagggcctctcgcccttacaggcctaccctccttacgagcctcctccaccgaacaatcccatacctcctcctctctcgcagagacgcgccatcccacgggaaaaacatggctgaatactcaagacagacacgcacgagacaaacaccaatagatagactccatcacggcacctcaggagagaaaccctcccaaatcacagaccaccaaatgcaccaaacagaacacagagagattaccacagaatgagagagaacagggccccatggtaccggcgcaggcacaaccactcggagcacggagagcaacctggcataccggaccgacttagacagccataggacaacaacagacctccctaggacaagaggctagaagctcacaagcgacccacaatgagaccagggtcgcacatagcacaatactctgaagggcacccaccgcaaaaagacgagggcactaggccggcagacacagggccatggacctcaggaaacaaatctaggtcaggaagacgatatccccaacgatacacaacaaagacaaaagccaagagcaagacaacctcagcgaccaacgacacacgatacaacgacctcgaggacccagaccgcacccctaccaaaaccaaggagccaaactcccgaaccgacaggaacaaaaaccacgacgaccccacgacagaaagcacaatacgaaacccgtgcgcgagacaggaacaacccaggggcacacacgaaccagacctccctagtgggcagtcacaacaaccaggcacgccggcaccaaccaggccaccacgcaaacagacacgaaacacgagcacggacaacacagaccgcggagtcaaaacggagcacacccagcagaactaagacacacacacaagtagaccacggccacccacagccagccacacaacacaaagacaacaagacaaaagccagacaaacagaacacgacgatgcaacaccaccagagtgcggaacaacgtgcaccacacaagcagagcaaagaacaaacaaaagagacaagaaaaaagaagcaccacgcaacagaacgacacaacacaaaacagcgtagcgaacaacgagacagaaaagaacccacacagacagcacaagaacaaacagaaaacacaacaaaacagcagacgcacgccacgtgcccccgcgacccaaacacaccgacaacacgca

SEQ ID NO: 490225 - DNA, 480 bp, Homo sapiens
aaatgggtcgtgttagaacaaaaaccgttaagagagcttctaaggctttgattgagcgttactacccaaagttgactttggactttgagaccaacaagcgtttgacctctgagattgctaccatcccatccaagcgtttgagaaacaagattgctggttacaccacccacttgatgaagagaattcaaaagggtccagttagaggtatttccttcaagttgcaagaggaggagcgtgagagaaaggaccaatacgttccagaagtttctgctttggacttgtctcacaccaagaaccaattggaggttgaccaacaaaccgctgacttggttaagtctttgggtttcgacttgccaatctctgtcattgctgtttcttctcaaagaggtgctgagagacgtttcagaaagagaaactaagcatttttcctatatttttagtctcttctcttctgtaaaaatataatcactggtttaaggt

SEQ ID NO: 490226 - DNA, 955 bp, Homo sapiens
  misc_feature (953)..(954): n is a, c, g, or t
ggtagtggagcgccggtgcttacctgggtgcaggagacagccggagtcgctgggggagctccgagccgcggacgcccgtgaccatgtggaggctgcgtggctcgcgctagtgcgccgctcctgcgggtgcccttgtcagattcctgggcactcctccccgccagtgctggcgtgaagacactgctcccagtaccaagtttgaagataggtttccattcctgaaaaagcctaagcttatgatttattgaaagggcaccacttgtgcctacaaatgtacagaagagaacctaacaatttaagtgacatacggggaccttccactgaggctacggagttgaccagaaggcaatgttgcaatcttgcgcattggtgtggtggctagcctgcattggggccactttgaaatgatgcgctctgacaattcaaccgctctatggaccccaagaacatgttgtgccaatatggatgagtaccagcccctttcaagcccatccactcgcaacacatgtgttgggcatcgcatggggggaggcaacaggtgctattgacactagtgacaacctgtgaaggctggtcgcttgttgtagagatggctgggcgtgtgaatctgacgaagtgcaaggtttccttgaccaggttgtccaaagtaggcttcgcagcagaggtgtgaggcgggggactctagagaggatggaaagatcggaagaagagagtaggaggcagaaccctgggatgtgatgtgaatagcaatggcaactgcgggcataggaggtatgagcattgattggactgaggaatgtggggagttaatgccaagtttatgggtgggaacgttagctgagaagggtgtttgctagtgcagggtgggcaagaaaggcgggaaatgcagtgtggcaaaggtgaaatgaaaacagggggagggaaaaaggagagatttttcctgtggttgtttnng

SEQ ID NO: 490227 - DNA, 452 bp, Homo sapiens
  misc_feature (4)..(4): n is a, c, g, or t
  misc_feature (26)..(26): n is a, c, g, or t
  misc_feature (41)..(41): n is a, c, g, or t
  misc_feature (61)..(61): n is a, c, g, or t
  misc_feature (74)..(74): n is a, c, g, or t
  misc_feature (116)..(116): n is a, c, g, or t
aacncccctgtgtccccccttttgcncccttctgaccccanctccttcacatcacgggaanaatctcctcaaancccaacaaagggcccttaccctctttttccctgccttgaaanccctctgatggtttcatatgtttccttgcaattaaaaaaaatgaaataagtggctgggcgtggtggttcatgccctgtgatccctagcactttgggaggccgaggcaggcagatcacaaggtcaggagatcgagacccatcttggctaacatggtgaaaccctatctctactaaaaaaatacaaaaaattagtcgggcgtggtggcgggtacctgtggtcccagctacttgggaggctgaggcaggagaatggtgtgaacccgagaggcggagcttgcagtgagcctagatagagccactgcactccagcctgggccacagagggagactctgact

SEQ ID NO: 490228 - DNA, 103 bp, Homo sapiens
aggccgggtctgaactgatgggaagaacagggcgcgctagtgaaaatctggcatgaaataaggactaatggccccaaaaaaagggcggcgctgggtaccgagc

SEQ ID NO: 490229 - DNA, 1629 bp, Homo sapiens
  misc_feature (1)..(1): n is a, c, g, or t
  misc_feature (871)..(871): n is a, c, g, or t
  misc_feature (1019)..(1019): n is a, c, g, or t
  misc_feature (1190)..(1190): n is a, c, g, or t
ntcgctcgctacttcattttgttgtgggtgttacgaccgctcctttctcgtccccttgtgtgggccgcgtcagtatagtcctcctttgtgaccgcagccgcatgtatgtcgctgcccggctccctgttgtcgctccgtcggccgtctttgtgatagtgttgtgccccgccccgggttgtcttccctagggcggcttttgatcaacgccgccccgctgcggtgttttaagggtgtcaaatgtggttgtactacggcgccccgtcgcaattttattggggccccgccccttgttatgtctcgctctggggggagaaaagaattcctcagagggcttcataggaaaggtttgtaaaagtcaggagggacggatattgtgtagaaaccttctattgataggaagtattctttgggaaaacccccggtgtctcgcccccccgctgggagagggtggggatcaacccaacgggctctcccccacgaaacataaagtgtaaaacccgttggcgtgtcttctgagtgtgagaaggaaattggatttggcccgcgcattggagttggattgtaacggagggggaattgtatatggaagtgaaaaaggattgtaattgacttggtaactgaaatgaactttttttggaaatggaattgaagcgggagaaagcctgggaaaggaaaataaagcccccccccttgtgaaaaggagaaattctgttagtttcccgcgagattaacgctcccccgcccccttaaaatgggcgcaccccaaaaagcgtcccgcaactctcagagaaatagtgcgaaaaagagaaccctctctctatacacccccatgctgcagtctcggcacacgctctctcaggacttcccacanaaagaggcaccaccagatagattctcgctctccagcagagaacaccaccagagggaataaagacacactctctctgttaagcacccacgcccccaaaagagcggacaccctaaggagtgtctctgtgtgagagagagacacacacctntgatagagacgcacatatataagtcgcacagcccacagagttattatagagaaatatagaggtgggtgttctctctcttctccccccagagatgtggatagcccacagatatctcatctcacatatatatagggtgacagaatatatgcgtttctccgcgtgatagccctngcgcaccacagagagagcgcttatatctcacagaatctctcttgcgcccagatgggaggaagatcttccttttaagaaaaataagtttaaccaccacatattgtttagaaaatatttcccgtctcttatattccatattcctgtacaccagattgataatctggcctgtccctttttataaatagccagagtgaggaactttccccatcccgtgtttgagtaaaatgttgtcccggttcttaattgcccagaaatgtgttgtcccaaaatgcccgtttagtttttaaaagagatggacctccccccctttgcttggttttaaagtatgtatggaatgttatgataggacactagtagtacccgtggtcagacacctggagaatggtggggagacccaaaaataaacaccatgtgaaattaaactccgtattttaataaa

SEQ ID NO: 490230 - DNA, 407 bp, Homo sapiens
gcagaatatcggctaacatgatcgtacatcgagtcgtgatcgatagagcaagcagcaggtgtgtgactgggggctgcatgccctggcaattaaaaacaaaacaggacagggatttacacagtgcttttctatacaatgtctgtaatctatagataacataaccgattaggtcaggggtcgatctttaactaccaggcccagggtgtggcgctgggctgtctgcttgtggatttcatatctgcctttaagtattactctttctttctttggaggcagaaactgggcataagacaatatgaggggtggtctcctcccttagcccaagacaattattcttccaatgtggccagggaaaccaaaaggttaaataccccttaggtgtaaagttaggttgtaaatttgaaatc

SEQ ID NO: 490231 - DNA, 228 bp, Homo sapiens
  misc_feature (6)..(6): n is a, c, g, or t
  misc_feature (36)..(37): n is a, c, g, or t
  misc_feature (39)..(39): n is a, c, g, or t
  misc_feature (42)..(42): n is a, c, g, or t
  misc_feature (44)..(44): n is a, c, g, or t
  misc_feature (46)..(47): n is a, c, g, or t
  misc_feature (68)..(68): n is a, c, g, or t
  misc_feature (78)..(78): n is a, c, g, or t
  misc_feature (97)..(98): n is a, c, g, or t
  misc_feature (101)..(101): n is a, c, g, or t
  misc_feature (103)..(104): n is a, c, g, or t
  misc_feature (125)..(125): n is a, c, g, or t
  misc_feature (221)..(221): n is a, c, g, or t
  misc_feature (226)..(226): n is a, c, g, or t
attatntttaaataacaaaatctttaaaaataatanncnatntncnncttttagccataatgtaaganaataaaattntctagcagaataatcaaanngtngnncaaagttccaacatgtttttnctttgcaattaaacatggcacttttacagttatttattattcatatcagtgcacttaccgacttcatattttcaaatcaaaatacagtgtttttcnccagngg

SEQ ID NO: 490232 - DNA, 626 bp, Homo sapiens
gctcttttcctccttggtctgtctgaagatagatccgccatcatgaacgacaccgtaagctatccgcactagaaagttcatgatccaatccgatctacttcagaggaacacaaatggtcattgatgtccttcaccccgggaaggcgacagatgcctaagacagaaatatcgcggaataaaactagaccaaaatgtacaagaccacaccggatgtcatctttgtatttggattcagaactcattcttggtggtggcaagacaactggctttggcatgatatatgattccctggcattgatgcatagagaagatatgaacgccatacacagtagactttgtccatatggacctaagtggcctgtatgagaagaaaaagacctcaagataaagcaagcgaataaggaacgcaagaacagaatgaagaaagtcagggggatctgtcaagaggccaatgttggtgctggcaaaaagccgaaggagtcaaggtgctgcgatgatgttagctgtggccactgtggattattgcgcaagaacattaataaacctatatagacttctaaatggagaccccattttggctatagacactttctgtcatcgcttcccctacgatccattggaccagt

SEQ ID NO: 490233 - DNA, 124 bp, Homo sapiens
aggtgtctccatggacagagggtgctagctatcctgggggatcttatgggcaatggaggttccttgggagtgcccagatcccctcgttctcatggctgagattgttgactgggagtctcgagcg

SEQ ID NO: 490234 - DNA, 1165 bp, Homo sapiens
ttgtcatttgaaggtgcaactaaaagaaacagaccaaatgtgcaggttggagatctcatctatggccagtttgtggttgctaataaagacatggaaccagagatggtctgtattgacagctgtggacgagccaatggaatgggtgtcattggacaggatggtctgctttctcaaagtgactctgggcttaattagaaagctattagctccagcattgtgcaaatcatacaggcaagtgggaaaactctatccactggagatacgtattccggcaatgaactggacagaatatgggcttacaggcaaaaaccatccagcagcacttcaatctcggcaaacattttacgaagcttgtgaacacatgacgtcagatcaaacgaaaacagcatcttctccagattgggcagcacacgttgaattataggtggacttatttacaggtcagctggaggcaaaaaactactgggtaactcaccgtgaaacctcccccatttaaatactcagcaagcctaagggtgtgcaactgtatgtacttatccagagtccgaaagtataccgcactaagttacatggcttacaccccacagacttttgtgggcagcagcaacaatccattgccacactcatttaaacagcatcggtacacatacaacgtttacttaacacaagcaggtcatacacagggttcaatatcgaaacgcttaagcatccccatttagctaactcggctacagagcacttaaccattacatgtacgctgcgagagtcaagcagagacaaaaatagttacacgcgcattactcacacaggtcacacacaacgcatgcaccacgaacggcaacatgtgcgaatcacctcacgctataacgacacgcacaccggacacctgttcacgacccgggtcgaccccccaaacactgacacgagggacgacacaatagtaatacaacaaacacacaacacatctgcgaaatctaagccaaagatattgcgcacgcggcaagtgatcacaacgcacacagttgatctacagaacatgtcggaagaccaccactatctcctcaatataagggaacctgacacgacccacacatgaaaactggcgacaaaaaagcacaagatgtacaaagagcagagcgaaagaatatcaagaagacgtggaaca

SEQ ID NO: 490235 - DNA, 445 bp, Homo sapiens
attggttgctacgtgggtgttaaggcagtaagagaatatttaaagctgaagagctcaatagtagctgtcaaagcaaggagagtaggatgaaggcaggctactgggacagtggcaaaatggtagtgtaccagaaaatacacacctcaccaaaaaataaatttggttttaaaaattagacaacagttgatcaattcatatggctaaagatgcatagtatgcaggctctttcacacagaaaattaattggatcagaaagcctaaaggaaagatatatcaagcaaatacaaataaaaaggaaacaggagttgcagtcttggtacttaacaagaataccagtatagaatcgagaaagcatttagaatgaggtgaagaaagatgctataagataataaagtccgtcataggaaactttaacatctacctgcagttcccagtgggtcaggtg

SEQ ID NO: 490236 - DNA, 1074 bp, Homo sapiens
caatgccccagcctgttgcttcatcccaccacacatgatgtgcattgattgcacctacatgcctccgtgtgtttctaccctcctccagtgccctcaccagccatggtctaatacgcccgagggactaacgaccgcctagtggaccctacccgtggagccgtgctgaggctcacaacatgcgcgacatgctccgtgtcgtcgcctctccacgtgcatgcatgcacaacacacgcgcgtgcagcagctgccttgacctccgtcatgacgaccccttccgcagcgcgatgcctactagtagccgaccgcgtgctgtcgcccacttgcccgccacccccccctccacccctctcccacagatcctccctccacccacgactctcgcgcctctcaccacttcaactcctcaccactcgcttgcccgttcccctaccctccctctcccttccactccggcatccgtccactcccttcgacccctcgccttgccctctgcattccaccactgaccctcccctacccaactccacccttccacaccccctatcatgagccaaagcccgacccatatagccccccccccgacaatggcgcggaacgacccctaccgacaccacgtcccaacagcgtacccccacacccgcccacctgaccagcctcgaaaccggcagcaatcggggccgcactcacagcaagcacgccgagccgcgccacagccccagaccctcgccacccaacctcgtaccccctatacccacgcacaagtcgcatagcgcccaggttggcgacgcaacccacacccccccgcgtccccagccccaatggcgggcgacccagcgcgcgacccatccatcgacccgaccgcactccgccgcataacgaacggctcccccggctcccccccccttcagacaccgcctgcaccccgtcacacctcgcagcacccgaccttcgcaccgctcgtccctcgggcgcccacacacctccccttgctacgagggcgaatctaccgagcgctgccgccagcggcatcaccagcccgccgttcagaccacagtgtgcggctacgcaaccaca

SEQ ID NO: 490237 - DNA, 328 bp, Homo sapiens
ggtttttttcctcctaggcgggagtgcaggggcacagtcttagctcacggcaacctcgacctcccgggttcaagtgattctccggcctcagcctcccgagtagctgggattacaggctatgcaccaccaactacgcccgggcaaatttttttggtatttttatgtaagagacacgggtttcacacaagttgggccagggctctgtcttcaaatctcctggactctcatggtatctctcctggctctctggctctccacaaagtggctggggtattacagggcttagagccaccggcgcccgggcctggtgtttacaagtattttaatg

SEQ ID NO: 490238 - DNA, 165 bp, Homo sapiens
tacattttctaccccagaaaattacgatagcccttataatacttaagggtcgaaggtggatttagcagttaactgagagtagagtgattagttgaacagggccctgaagcgcgtacacaccgcctgtcaccctccccaagtataattcaaaggacatgtcgacgc

SEQ ID NO: 490239 - DNA, 325 bp, Homo sapiens
ttctgggataacaggcatgaaccagcattttactttcttccaaagtatgttttactttcttctgaagccctacatgactccccattgcctacataagttccctacttggcccttgggaccctcagactggcctcacctgcccactcagtctcagatcacactggccccagccatacagatccgggcccactccgcaggtcatgctgctcccactgcctggaagaccctccccaatttctacctggcagatgcctattctaccctctagacctgctcacatgtcatctcctttttgaggatttccccaacctgggcacaattaggc

SEQ ID NO: 490240 - DNA, 311 bp, Homo sapiens
agctgccccggtaactggacttctggaaatgcgcggtgatatcccgctgtcttcctttccttggctgcttatgtcagttgtcgtggctctaaccagtctcaagtgttcgggtaaaaagaggaactttttatcacagccgtcctgtttctttttttcctttattttttttttggaaagggattcccgctctgtcgcccaggttgaagcaaagtggaaacgggtacaaggagaagcctgagaggtatgtgaaagccacaccttgtaagaaccttctaaagctttggtgagagagctaaagtattatttattcc

SEQ ID NO: 490241 - DNA, 160 bp, Homo sapiens
ccccatctctactaaaaatacgaaaattagccaggcatggtgacgcgcctgtagtcccacctactcgggctgggactacaggtgctcacagtgagccaagattgcacagatgcgctccagcctgggtgatggagtaagactctgtctcaaacaaacaaac

SEQ ID NO: 490242 - DNA, 125 bp, Homo sapiens
  misc_feature (56)..(56): n is a, c, g, or t
taatgcatcaccactaaattttattaaaattcaattcattggtcaaataacagtantctgctcaccctcacaccgtgttaggagactactgttatttgaccaatgaattgacttctaataaaatc

SEQ ID NO: 490243 - DNA, 1212 bp, Homo sapiens
gcagactgccgtggtgcagagagatgctgacattggcgtggccgaggctgaacgggacgcaggcatccgggaagctgacgtgcaagaaggagatgctggatgtgaagttcatggcagacaccaagattgctgactctaagcgagccttcgacgctgcaacaagtcagccttcagtgaggaggttaacatcaagcacagctgaggcccagtcggcctactgagctgcagggggcccgctgcaacagccagaagactccggcaggcaagacgactcgagcactcgagcgcttgctgcacgcgcaagaacacacgacttgcccgtggaggcaccaggagactcctggcgtaccgacaaggcagctcatcgcctacagctgcgccggcactgccgcaggcacgaggcccaccgcaatccacgcagatttgccgagggtgaaaacggtgaacgcaggtcctcttgcgcacaggcagagcgctgagaagatccgcaaaatcgggcgaggcggaagcggcagctcatcgaggcgatgggcaacggccgaggctgagcggatgaagctcaaggcagaagcctaccagaacatacggggatgcagccaacgatggcctggtgctagaggccctgccccagattgctgccaaaatcgctgccccacttatcaacggtcgatgacgcatcgtggtcctcagtcggagaccaccagtcaaggtacacattcagacgttgaaacgactgctgagccgagcttgcctggcctctgtagcatgccctcaacaaggcgtggacctggtctaagataaccctgactcagaaggcaacggctgttgcacagtgctgacgctcctgccaggccactctcttacgaagcaaccggtacctcctacaagacacggaataaatacacagaaacaagggcaaggtcaggaacacgggatgccctttttccgaagcgtgaccacaaatggtagtgagtttataagccaatctagcaaacttaacagaacttcggtatagaccataccatacaacacattatacaagtataaggagaatacatagatagggatgccacacacaggataacagtgtgtgttttacccaaatatcatataacagaaatatataacatcagggaggcacattcattgtatagattatatcatcaagacatagtgtgtatacaatagtagggcaacacacaacataaagag

SEQ ID NO: 490244 - DNA, 846 bp, Homo sapiens
ccccgttcttggtttctctgcttcttcttgctgttgttggtttctggtctgtttgttccacacagacaagtggggtgggcttgaggcagcgacgcgagagagggcctgtgagggtcgccataatactcggctatttccttgtttttcgtcgccgatgatctctcctgtgcgtgaaggctctttatccgcccctggatctgtgtccgttcctctcgtgatggagggtgtgaccactctggcgccggggccactctgggttttttagagtttggggactcagcagcggcctgtctgttgccccccccgttgtgcccgggtatcggggaccgctctctgtggccggccgtcaacctctgttctcctgggcgcccccctcctccggtgccttgaggtgtcgccccccctgggggttcttctcccggtggtttctccgacctcgcttagcctgcacggctcttatgcttctgagcgcattccttttccctgggccactcccgctgaatgggcgcccccagggcgcgctcctggctctccccatcaggtgtcacggagtctcgcttcccacagggggtcttccccggaggagctgttcaaggcggaagactggccccccccctgcccccgcgtcccgcggtcgcccctgtccaccgctgccgccctcagcacccttgtgtaccacaggggccataccccatttcacgactcctcccacctctcgtttttctatccgcctctataccacccctccctcatcgcgagcgtgagctggtagtatatattcatatctagggggggagagaaagagaaaaaaataaagacaaattctgtgggacaatagtcagaaaa

SEQ ID NO: 490245 - DNA, 139 bp, Homo sapiens
gctgagtcctcagcgggtggcggtggacctgttcgcgggaggagatgaccttgccatccgggacctcttccacaagggtacgcaccggacgggtggtcaccggttctttctggtactgagtcaggtgggcatcctctcc

SEQ ID NO: 490246 - DNA, 848 bp, Homo sapiens
  misc_feature (169)..(169): n is a, c, g, or t
  misc_feature (344)..(344): n is a, c, g, or t
agcggagtcgcaggtgtgctgctgaggcgtgagaatggcgtcccgcggtcggcgtcaggagcatgggggacccccagaggtgttatatgacgagacagaagcgccggatacattactgtttcgcgaacattcgaacgagactgatatgataatccaagacgcatgatgngctgggcagagtcgattgggagcgttcttctatactgcgcagaggaataaggcgcctgtgtacctgactggactattggcatgtggtacctgggctgagtggaagttatctgtcagatgaagggcactattgggtgggcctggatatcagaccctggcacatgtctggatgaganatgtgtgagcgagcagatagagggatgatctgtctgctggagggtatatgggccaggtcatcccatgcaatgccaggcgcgattacgatggttggcatcagccatttctgcatgtgcaggggcgtctgtaatgcgtaacgaagaagtctggaataaccgctgcctgagcggcctgtacatgttttcttgcgtatcatctatttattctgtacgtacgtccaggggaatccactgatgctgtccatgctagctgtactccatgtagaacttcagagccagtaggagctgatcacaagcactaaggcaacataaggccaggcattcatcctggtggcatggtggtagactaccgctaacagtgccaaagcaacagaagattctacctctgcttgttgatctagggccttcgacccttatagcagaggggctgacgtgaaagatcaggatgaagttgaacccagaggagtcctgagtgcacgaatgagaggttcccatgaaggatgc

SEQ ID NO: 490247 - DNA, 111 bp, Homo sapiens
tcaccttaccaccagacaaccttagcaaaccatttcccaaataagtataggcgatagaaattgtaacctggcgcaatagatattgtaccccaagggtgaagatgaaaattt

SEQ ID NO: 490248 - DNA, 272 bp, Homo sapiens
aagaaggaggcgccggccatggcagatgccgaaggtggtgatgatgcacctgcgggagcatgatcatgctacccgaaactggtggtcatcatgagtggtggtctacgtcggcaaggagcttcacccaggtggagatcaagcccgagatgatcgggcacgaccatggagcgagtctccattcacctacaagtccgtaaaggatgggcgtgccggccctcggggtcgcccactcctccggtttcatctctctcaagtatagctcagggccgggt

SEQ ID NO: 490249 - DNA, 115 bp, Homo sapiens
  misc_feature (1)..(1): n is a, c, g, or t
  misc_feature (76)..(76): n is a, c, g, or t
ngcaccatagtgcatggtgtgtggtgcccccagggctccaggacagatcaggccccaccgtgtctacccccatccnggctgtgaacgtgccactgaataaagtcggggaaacgtg

SEQ ID NO: 490250 - DNA, 286 bp, Homo sapiens
gctgctgcggtgatctagaggatcccagttccgggtcctccacggtcatcacttaccctggcccttctttttcctcagaacaccggaactttgggtggtattatttggtatctccccactggcatgtaaactcccgggtgacctggcatgtcttatgcaatcctcattaaaacctttttttttttttttttttttttttttttttttttttttttttttttttttttttttttttttttggggtgtgggctatcttcttcaaaaaaaaaggggggacagcgccaaa

SEQ ID NO: 490251 - DNA, 214 bp, Homo sapiens
aagggaatgtagggtgacaaaggggaggtagagttgttagaactgtgtgtattacagtttacagcgtaaggaaaataatcttaagtatgtcttatactgttgtggttgtttgtttatctagccatgaaacaatctcagcatacacttctgatccagcacttctgtcatttgctgaatattactgcaagccaactgtgaacatgggtcaggtata

SEQ ID NO: 490252 - DNA, 306 bp, Homo sapiens
  misc_feature (208)..(208): n is a, c, g, or t
gctgctgcggtgatctagaggatcccagttccgggtcctccacggtcatcacttaccctggcccttctttttcctcagaacaccggaactttgggtggtattatttggtatctccccactggcatgtaaactcccgggtgacctggcatgtcttatgcaatcctcattaaaacctttttttttttttttttttttttttttttttttntttttttttttttttttttttttacaaaaggggagggagtgtaatataggagagatatagagagtagtacaaaacccccccgagaaaaaaaaaaagtg

SEQ ID NO: 490253 - DNA, 176 bp, Homo sapiens
acttgaaggccgcattaccttccgcgacacggactgatacaccgcacgactgtgggcgtggagccggtagccgacgggaaaggtgtcgtggtggtcataaagcggagatacgggcaacggaagcctggcacctcctatggtgcggaccaccatcacacaagaaatgctacgcgcca

SEQ ID NO: 490254 - DNA, 258 bp, Homo sapiens
tgctttgatgctgggcagtccttcccatgcactggtgaggtgttgcatggtgacagcagtcattcagcttctttcacccattgacttctgtttctgtgtcaggtagtcactcagagctaagtgagccttctccaattcagaaccggagagaacagaccatgggttgggatactgcaacttgtttcttgtagtctgtgggcagcaggtcagggtacaggcccatgatgggtgggatttgtgccaagtttagcacagacc

SEQ ID NO: 490255 - DNA, 158 bp, Homo sapiens
ctggctggacacagtggcaccgccgcagcccagaccaagcacaccatcccggacatcgtgaacgtcctgctcgaagagctggtgcaccatcgctacgagctaccaggcttccggacccttgagatggccgctatcggggcgcgcgaacgggtcaacct

SEQ ID NO: 490256 - DNA, 117 bp, Homo sapiens
agaacaggctccagctaaacgatatattggaggtcagcacggtgctcacgtgtcgacggacacttgtacagggaggcatgcaccgaaatggtagaatacacgtcgaccaggctccat

SEQ ID NO: 490257 - DNA, 100 bp, Homo sapiens
gcagcaggcactgtgtaccagagtcaccattctttggtagccgactataatagttctcactgtcagtcccctgactccaatcccaggctatcctccgaga

SEQ ID NO: 490258 - DNA, 958 bp, Homo sapiens
gatatcattagcaggtgacatgagttgcgaaagaacagatgagttcgatatgcagacatggagccaagcgtaaatgaggtatgcatctaagtaacgtctacatatccataggcatgtcagcgaggcgagcgatcaagttgttcaacaagctggtcctgagaatccgtaaacgatacgggctcggtaatactaaggtagccgtgacattctatcccgtgacaagtcatggggatgccaatcgggactatatgtgggtgagccacaataggatggaaataacaacatcgtaacgttgtcgtcagtcacgtaactgctgggcctacaagaacttgtcagtgtaattcaatggagttcagcagattacacgaaagcatagggtgagttctgttactcaatccgtcttcgtaatggtgagaaattctgatggcacgcgacgcgtatgggacatattccatgacacgcgactggagggggaccaagggcggaacggctgaaacgcagtgcagataccttcactattctacttcctaagtgaaggctccttgtgcccctacatcatgcggcaacataagtttcatgctgcacgaaacatgccatagggctcactacaagcatgtactaggtacctgcactatttcacctgttccggaaaaagtatactaaagcatagcgtgaaaacacacatcaaagtttaattatgtagctaagacttagcaacaaatatgctatatatctgttgactggatactctcttatggggcagtgcacattaatgcggtcctctaaacgggcacaatgggggcaaaacccacctcgggtaaagtcgataaatactggatgctgagataagtcttgaataatagcgctgcctgtgggtatttggaagtcctcaactcattctcaaaccccctgaaaaaaatagctaccatttctggtgctatcctaagaagactattat

SEQ ID NO: 490259 - DNA, 221 bp, Homo sapiens
  misc_feature (60)..(60): n is a, c, g, or t
aatgtaaccttttctaaacaagagcagcgtataagacttatcagctctggagctagatanaattcttaccggagcgaggtcagtggctgatatgcgctcactccaactggcagcagagcaagactctgtctcaaaggggaaaaaaaattgctgatgtccctgagggactgatttcccgtgaattgtggactcacacattggtactttggtctgtgtaggcc

SEQ ID NO: 490260 - DNA, 337 bp, Homo sapiens
  misc_feature (148)..(148): n is a, c, g, or t
  misc_feature (215)..(215): n is a, c, g, or t
cggttccatggcggccaaggcggtggtgcgtgacgtggcgcgggtccagggcaagtcttacggcctggccgaccgtctgtcgaagatgatccccttcgaagtcggcatgaccctggaaaaagcctacgagcaggaggagatcctgcgngacttcatcaaggtcgatgaagaggcggcggaaatctgggagatggcgcgcaagctcgagggcgtgntgcgtaacgtcggcaagcacgccgggggtgtggtgatcgcgccgaccaagcttaccgacttctcgccgatctactgcgacgaagaaggcggcggcctggtgacccagttcgacaaggatggc

SEQ ID NO: 490261 - DNA, 404 bp, Homo sapiens
  misc_feature (52)..(52): n is a, c, g, or t
  misc_feature (66)..(66): n is a, c, g, or t
tttgactacggcgaccggttctgggatatcaagagcaagtatttcacctgcnagtgtggctctganaagtgcaagcattcagctgaggccatcgccctggagcagagccgcctggcccgtctggacccccacccggagctgctccctgacctcagctccctgccccccatcaacacctgaggactgttaaaatccaggccgggcactgcccctcagacattcccccatcggaggaccccagtaaggcctggaaggtttacagcccctctcccagagctggtttctcactgggagtgagtgacttcagggctggcctaccccactgagcctggcctcagttcgctcattgaagttgggcctctgccaactgattttctgtgctctcaataaatgttgggtttggt

SEQ ID NO: 490262 - DNA, 967 bp, Homo sapiens
ggcgggaccggcgcgcgctctcgtcgcccccgctgtcccggcggcgccaaccgaatgcgccccgcctgatccgtgtgcgacatgctgcgccgggcgtctgctgtgtgctggccgtggtcgtccctggctgcgcgccgacagccccctgtaggatggacggaccgagcgtgctgcgtgctgcggaacaatgcaggcttcgcggaggcgtctggctggcccacaaggtacccctgctttgtggagttcgtatgcctccttgcgtgtggaccacctgctagagggctctggccccttgcagtattgctcataggccgcatggggacagctgaacggccagaacggttcctgaggattcaggaggttagtggccaaaaggggttgggaagcgggcgcaactagcgaacgcggactggtctttgaacccttgtggctccacggcagataaccgagcagttgacggcgaggcataattacgccagcacattcaaaggatagcgtatcaaggcggaaaattgcggaaggaaccagaccagggcgctttcctctctcccccaacatgggggcacagcttacttaccaacggcgttgggccaacggacggaaagagcgctgagtagcaccgattccgttgatagcttacggccttggaggagaaaagtcggccaaccggggcacccccgtggcagttgggcaaaacccaagcgcacttgggcgtctttgcaactcgggtcggtcaaaagcctttgcctagggaaaggtcccccttttggagtcggcgaaagcatcccaaaggcatgaaagcgcttggggccttggtgccaatcccgggcccttatcattttctcaagggggaacccgttgtgcaacggttccgggaccttccgttgacccgaagggccagagttgttccatggccaaggggtccaaagcatacatgtggcccactccagactggagccattaccct

SEQ ID NO: 490263 - DNA, 942 bp, Homo sapiens
  misc_feature (54)..(54): n is a, c, g, or t
  misc_feature (61)..(61): n is a, c, g, or t
  misc_feature (75)..(77): n is a, c, g, or t
  misc_feature (191)..(191): n is a, c, g, or t
  misc_feature (205)..(205): n is a, c, g, or t
  misc_feature (256)..(256): n is a, c, g, or t
  misc_feature (298)..(298): n is a, c, g, or t
  misc_feature (312)..(312): n is a, c, g, or t
  misc_feature (432)..(432): n is a, c, g, or t
  misc_feature (499)..(499): n is a, c, g, or t
  misc_feature (585)..(585): n is a, c, g, or t
  misc_feature (594)..(594): n is a, c, g, or t
  misc_feature (596)..(596): n is a, c, g, or t
  misc_feature (608)..(608): n is a, c, g, or t
  misc_feature (617)..(617): n is a, c, g, or t
  misc_feature (628)..(628): n is a, c, g, or t
  misc_feature (670)..(670): n is a, c, g, or t
  misc_feature (732)..(732): n is a, c, g, or t
  misc_feature (809)..(809): n is a, c, g, or t
  misc_feature (811)..(811): n is a, c, g, or t
  misc_feature (822)..(822): n is a, c, g, or t
  misc_feature (835)..(835): n is a, c, g, or t
  misc_feature (840)..(840): n is a, c, g, or t
  misc_feature (852)..(852): n is a, c, g, or t
  misc_feature (883)..(883): n is a, c, g, or t
  misc_feature (891)..(891): n is a, c, g, or t
  misc_feature (893)..(893): n is a, c, g, or t
  misc_feature (929)..(929): n is a, c, g, or t
  misc_feature (941)..(941): n is a, c, g, or t
aaagaagacccgaagccccgcacccccccgagaaagaaaaaccaaaaaaaagcnagggccnaaaagaaagacaannnaacccccacaccccaaaaacccgaaacgaaggacgccccccccacaccaaaaaaaaagagaaggcaaaaaaagcaaaaaccaaaaaagaacgcaaccaagaaaaaaaaaaacancccgacaacaaagnaaacgaaaccacacacaacaccagcccacaaaacccaaaaaacagcccccncccgagccaggaaccaccccaaaaacccacccccaacccganacacacccagcaangcagagccccgaacaaaaccaccaaaaccgcaccaaaaacacgccaacccgaagaaccaccacccaccccgccaacaaagaaacgaagaacacgaaccacccagcaccaacaacccgcanccccccaaccacaacccgcaccgccccacaacgaacaacccaacaaaaaaaccagaaaagaaagaanagaacccccgccgccgcaccggccgcagcccccaacaaaaaccgagaccccagcccccccgaaagcccaaaaccgaaaaccaacgnaacaccaanancaaaccccaggnagcgcgagncgcccccaaanaaaaaaagcaaaacccaacaacaccagcccacccgcccaaancccccagcgaaagagaaaacgagcgcaaaccccccaaaacccaaaaaaaaagagaccggcancgacaccgaccgaaccggcgaaagccaccacaaaagccacaagaaacaaagccacaaccacaaccaccgcagccaananccccaacgcgnaacccacaaccanaaccnccaccaaagcancaagcaacccaaacgcgcccgccaagacgancaacgcancnccaaaaacaacgcagcaacaaaaaaacccccagcancacccacccccng

SEQ ID NO: 490264 - DNA, 113 bp, Homo sapiens
attcatggacgggatctatgtaccccattcgtacctcgtcgggttgtacacgtccacctcagcggagtcatccctaacaaagtacataagtccgtatatagagtcgcagcctt

SEQ ID NO: 490265 - DNA, 138 bp, Homo sapiens
cggggttggggaggcaccaaagggttacagcccaggagtcacttgttggtgttcttcttgtcacaagttttcaggtcagtactgggaggcttgttgccgtttcctgatctccggccttctgatgggaggcaagatgcg

SEQ ID NO: 490266 - DNA, 588 bp, Homo sapiens
gcccaagatagtttaagggggttcgagacatgaagcagcattcatggaggtttgaagatgccgcatttggattggatgaattccaaattctgcttgcttgctttttaatattgaaaggcttatacccctaccctttatgcccaaaatggagggttataataatgttaacatggacatgattttctttataattttactttgagggctgtctccatgtttgatggatttgagcaggttgctccccaggtagctttaggagggctggcaacttaaaggtggggagcaaagaatttttttatcccacatcaacattttggtcagatttgaacttttcaattttttgccctcaaagcttgttaaaatagttaagggggcataagttaacttcccatttacaaactctgcttagaatttggggggaaatttagaaaaataattgcccggattattgggaatttgttataatgaatgaaaccttttgtcaaataagattcaaatttactttttaaacatttgataaagtaaggcaggggtgggggtaatttggtttatttttgttcccccagttaaataaatcataaaacttga

SEQ ID NO: 490267 - DNA, 265 bp, Homo sapiens
gctctaaatacttttttccgataaaagaaccaagatttccttggagaaaatggctggtccaggacaggagagggaaaaacgcaagatgtggcccggagcaatttgtggccaaatgctcagaaaattatggggatatatcagaaggacacagcagccaaactgaaggggctcccagtggccaagtatgggatgatttgagcttaaaataaatgatagtgatgaattattcgacacttacttttgcagcaaccgtcgtgggtaccga

SEQ ID NO: 490268 - DNA, 753 bp, Homo sapiens
gaataattctgtatataaacagtggaggtggataaatctatcttcttttatagtcctatctcgtccctctttctctccctctaccatttcccctgtcctcctcgtttctcccgtgttcccccggccccatatagattttgtatattctgtactgtgacacattctggatagtattttcatccagtttttagttcattagttctttcttcaggctatgtccagtatatggttaaacatgaccattgcatttaaatttacttgtgtatgatccagttaaacagacttttataactggttccaaaccactatgacttgtgagatactgaggtttcaacggttatgcatattggtctgttaacaatggccaatgacatttattatctatggcttgacttattgccatatctgaaagtcttaaatagcggtctgataatcctgtagagtacggataattatgcatgttatcctgtctctgggtggcctttaaccatttaactcttggcacagcctttacttacttcacgtagtagtggctgtagaaagagtgggcagttgtggagaaaggttagtgttggctagaaaagcaaagtaccgtgataacaagaacacaggaggttatcatatccgcactcgagaaacaggaacatttcgtgggttggaagctttcgtggtccaaggtatggccaatgggtgttaccccgacataggttcaaagggaacataatttctaaaatccaagtggttctagtgata

SEQ ID NO: 490269 - DNA, 203 bp, Homo sapiens
  misc_feature (43)..(43): n is a, c, g, or t
atcatcagtggcgtatggcggcacgcagactacagcctggaancctttagtgagaagcagcaccccaggtgagctgtacctgacggacccttggactcagatgaagagcggccctgtcccgcaccccgcaggactgtgtcacatatgcgtggcattcatcaggcagtgaatgtgcgaagaagtaacttagctctgcaccccca

SEQ ID NO: 490270 - DNA, 95 bp, Homo sapiens
gtcagcctcctgagctgggatacaggcatgcacacacgcccagctaatttttttatttttacttgagaacgaacgggttttgccatggtttggcc

SEQ ID NO: 490271 - DNA, 139 bp, Homo sapiens
gactcggccccaccacaccgtgcctgcagtcttacttgagcatctgcctcaggaagcagtttagggtgaacaggaaggcctgggttttccagttcaggccttatccgtcgccacacgtgccacacaccacaaaacaaaa

SEQ ID NO: 490272 - DNA, 297 bp, Homo sapiens
agagcagcagcagcgggaagaaaagtctaaaacggaaagccgctgccgaagaacttcaggaggctgcaggcgctggggatggggcgaccgaaaacggggtccaacccccgaaagcatctggcttcccgtcagtctatagaataccgtagataaaaaacatacattcgccactcttaacgttcacgcgctgtaaccaggggacgtgcatggcaaagctgtccgctaaggaaaaacttcgagaagacatagcggatcttgtctaaaaggttccaccaaagcctgtacccatgaccattg

SEQ ID NO: 490273 - DNA, 724 bp, Homo sapiens
  misc_feature (127)..(127): n is a, c, g, or t
  misc_feature (130)..(130): n is a, c, g, or t
  misc_feature (190)..(190): n is a, c, g, or t
  misc_feature (200)..(200): n is a, c, g, or t
  misc_feature (211)..(211): n is a, c, g, or t
  misc_feature (214)..(214): n is a, c, g, or t
  misc_feature (216)..(216): n is a, c, g, or t
  misc_feature (218)..(218): n is a, c, g, or t
  misc_feature (353)..(353): n is a, c, g, or t
  misc_feature (525)..(525): n is a, c, g, or t
  misc_feature (617)..(617): n is a, c, g, or t
  misc_feature (644)..(644): n is a, c, g, or t
  misc_feature (649)..(649): n is a, c, g, or t
  misc_feature (655)..(655): n is a, c, g, or t
  misc_feature (660)..(661): n is a, c, g, or t
  misc_feature (667)..(667): n is a, c, g, or t
  misc_feature (671)..(671): n is a, c, g, or t
  misc_feature (673)..(673): n is a, c, g, or t
  misc_feature (677)..(677): n is a, c, g, or t
gccagtctgttgtgggcattgttttctacaaccaaatctgggtttttattcgtctattctggtaaacatagaggtaccaccacaagggatgcccgtactctctcgcagcatcttgtaaagcatctgnttngagggaaaggtctctgggcaagcaagtggttatttggattgctgcttcccttttccaccngggacattgnaatcataaatnacngnanattccaaacctcaaaaactattatggcctgagcacagctgaaatctagcagagtttaactcttctgcctccatgtctgtcacttataattcaggttctgctgttggcttcagaacatgagcagaagaatcgtttnatgctagttattgcattcatggttgaaactcaacttagggaaagggttccaatgtattaagcaatgggctgcttctccccaatcctccctaacaattcgttgtgtggacttctcatctaaaaggttagtggcttttgcttgggatcagtgctcttctattgatagttcttgntggtctccagacacattcctgttgcattaagacttgaaagacttgtagatgtgtgatgttcaggcacaggatgctgaaagctatgttactanttcttagtttgtaaatgtccttttganaccancatctngtttnnttttgnaggnanaaanaaaacacctgttgaccataaataataaactcgagactagttctctcc

SEQ ID NO: 490274 - DNA, 562 bp, Homo sapiens
  misc_feature (127)..(127): n is a, c, g, or t
  misc_feature (130)..(130): n is a, c, g, or t
  misc_feature (190)..(190): n is a, c, g, or t
  misc_feature (200)..(200): n is a, c, g, or t
  misc_feature (211)..(211): n is a, c, g, or t
  misc_feature (214)..(214): n is a, c, g, or t
  misc_feature (216)..(216): n is a, c, g, or t
  misc_feature (218)..(218): n is a, c, g, or t
  misc_feature (353)..(353): n is a, c, g, or t
gccagtctgttgtgggcattgttttctacaaccaaatctgggtttttattcgtctattctggtaaacatagaggtaccaccacaagggatgcccgtactctctcgcagcatcttgtaaagcatctgnttngagggaaaggtctctgggcaagcaagtggttatttggattgctgcttcccttttccaccngggacattgnaatcataaatnacngnanattccaaacctcaaaaactattatggcctgagcacagctgaaatctagcagagtttaactcttctgcctccatgtctgtcacttataattcaggttctgctgttggcttcagaacatgagcagaagaatcgtttnatgctagttattgcattcatggttgaaactcaacttagggaaagggttccaatgtattaagcaatgggctgcttctccccaatcctccctaacaattcgttgtgtggacttctcatctaaaaggttagtagcgttagcgtcgggattccgctgcgtctgtctaacgaccgtccgcgtatccccaatacacaggtcactgctgtctcctt

SEQ ID NO: 490275 - DNA, 253 bp, Homo sapiens
tgggcataagagctctgtctgtttgttacattttgtttctcctagtctcctctcgtattcagatcgagtaactactactgttcagttttcatcatatgctatcctcctattctatgtcaggtaatgctgtcatctaagttttggcacctattgattatcttttgcattgtttttgtttttgtttctatttttgttttgagatggagtcttgctctgttgcccaggttggagtagctcttatggcccaggctgg

SEQ ID NO: 490276 - DNA, 623 bp, Homo sapiens
  misc_feature (110)..(110): n is a, c, g, or t
  misc_feature (117)..(118): n is a, c, g, or t
  misc_feature (125)..(126): n is a, c, g, or t
  misc_feature (140)..(140): n is a, c, g, or t
  misc_feature (152)..(152): n is a, c, g, or t
  misc_feature (161)..(161): n is a, c, g, or t
  misc_feature (172)..(172): n is a, c, g, or t
  misc_feature (200)..(201): n is a, c, g, or t
  misc_feature (300)..(300): n is a, c, g, or t
gcgagcggctgcagctgcaggatgaggaagacgacagcctgtgtcgcatctgcatggatgccgtcatcgactgtgtcctactggagtgtgggcacatggcgttacctggncaccaanngtgcggnncaagcgctatgagntgacgtgtcccnatctgccgngcagtatgtgngtgcgagccgtgcagcgtgttcatagtnncctgaaacagtgctcccgctcgaccaggtacaaggtcaaccccggcgaaaacttgaaaccccccctaaaaagcaatttgtccagaatgcgccaacaganaacaggcgcacctggcgacacagctttcacttgcttttccaaaaaaagggcgggccttgggcacaaaggccgtttacttttttcttacacacaaccactctaaacttcttcgggaacctttaaaccttttaacacccgcgcttggggcgcggcgggaaaacactaagggcgaaaaaccacacggccaagtttcgccaagatttccccgtttgagaaggtatttgcgtctaggcggccccacaaagcccaatttttgggcgcgagctttccgccgaaattggccccccggggattgggaaaggggccccatttgggttcccttg

SEQ ID NO: 490277 - DNA, 193 bp, Homo sapiens
atcatcagcaacgagcactgcagtgctcagcgagatctcgcgttgtctctgtccatatgtgctatagacctacagaaccgtgccaaaccagatgacttaccatctgtgacacaggacctgttagaaacattatcttgaccaggactaccgatagggcatcacacacgagtgcgggccatacacagtgtgggtc

SEQ ID NO: 490278 - DNA, 373 bp, Homo sapiens
aggaggagccctacggtctttcaggatcagagctgcgctgctgaccttggccgtgctcttcctgacgcgaagtcacgcttgacatttctggcagcaagatgaacccctccagagcccatgtgatcgagtgaaggacctggacactgtgaacgtggatgagctcaaagacagtggccgatactatgtgccccaacttgaacgcttcgacttgggcagctcaacctgctccttgacaactgggacagtgtgacctataccttcaacaagctgagcgaacagctcgagcctgcgacccacgagttctgggataacctggatgccaaggtgcaggcctactctgacgacattctgacggtggcaggaggagattggc

SEQ ID NO: 490279 - DNA, 350 bp, Homo sapiens
ctgcaccatcactgtcgtacccttgttaaaatggtgtgtacctcacaaattataatttatgttccaggttcgccttcgtacttaatttgctattattgtgatgtgtataaaatctataatctcggcacttagagctttgaatcggtctacaggcatattcctgggatgagaggattgccaaacccaaatatagactagattatccaatggggttgtgtctgtgctccactctcaacatgtcttctcacaactataagtaatccccaggtgtagcggtagcaagtgtccttcccgacaagataccatatactcccgctccagtattacaagattggaggcagtaacatctt

SEQ ID NO: 490280 - DNA, 182 bp, Homo sapiens
cgatcgaggtaggctgggtgcagtgggtgaaagagtatgatggggtggtgattgtgaaagctgctcgtgtgtctgctgtcaatacctactgtagatatatggtgtgctcacacgataaaccctagaatagttatgctgtaatcgtttatgctgtacaatcgtttatgcggtaatagtttatg

SEQ ID NO: 490281 - DNA, 150 bp, Homo sapiens
ctgcagtgtcggagagacctcatctacatctaacacgtctaccccatccttgaggtgcatctttacgtccaaccttgcccacgtgacacacctagaggctgttctttgggcctacacctcaaggggggaaggtaacgggcggtcctttac

SEQ ID NO: 490282 - DNA, 142 bp, Homo sapiens
ttatgagatcctgagcactgagcatttatggaccatatcgccttcgtttgatgcatataaaggaaattcaacacacaacacgttgtttaaacctgtgccatgaatgatgcagctacgagttttctcttcacttttatattgt

SEQ ID NO: 490283 - DNA, 446 bp, Homo sapiens
agccttttaaaaattccctttctgagataaaaaagaaatgtggtatacacatacaatggaatattattcagtcattgaaaggaatgaagttttgatacatgctataacgcagataaaccttgaagatattatgctaagtaagccagatacaaaagaataaatgttgtataattccacttatataaaatatctaaaataagcaaattcatagaaaaagtagaatataggttaccaggggatgagggtatgggggcatgggaaattactttttaattggtacagtttctgttggagtaataaaacacttcttgaaaatagtattgatggttgtacaacattatgaatgtaattaatgccaatgaattatacatttaaaaatggctaaattgcaaattttacgttatgtgtattttaccacaataaacaatattttaaaatcccaaaaa

SEQ ID NO: 490284 - DNA, 450 bp, Homo sapiens
tgacacccattcgagagcttggaagccatgtatatggcttcaaagccacctacggcagggacacactcgtgagcttgtgtggccggcagttcaggtgatacatttaccagggtcctggttggtgtggtgccaggaaatggatttgggaaaaagtgaaataccattaaaggtgaatgtgaggcttctactttaatccaaaaggagctatataagctaggcggtgtctgatatccaatcatgggttaaccaataaaggcaattggtttaatcagtaaagggaaattcctgggcttatgaacgtgacaagtccaggggtatgggcatgggcagcaggtgagcaatttcacccagggtcttcggcctccctctgcgtaggtatcggctacatcccaggcaaccacctccgaggctgaaaagatggttgcctgcggctcccacggaatccctccc

SEQ ID NO: 490285 - DNA, 459 bp, Homo sapiens
  misc_feature (31)..(31): n is a, c, g, or t
  misc_feature (165)..(165): n is a, c, g, or t
  misc_feature (188)..(188): n is a, c, g, or t
  misc_feature (197)..(197): n is a, c, g, or t
  misc_feature (201)..(201): n is a, c, g, or t
  misc_feature (205)..(205): n is a, c, g, or t
  misc_feature (210)..(210): n is a, c, g, or t
  misc_feature (238)..(238): n is a, c, g, or t
  misc_feature (250)..(250): n is a, c, g, or t
  misc_feature (262)..(262): n is a, c, g, or t
  misc_feature (286)..(286): n is a, c, g, or t
  misc_feature (288)..(288): n is a, c, g, or t
  misc_feature (315)..(315): n is a, c, g, or t
  misc_feature (333)..(333): n is a, c, g, or t
  misc_feature (339)..(339): n is a, c, g, or t
  misc_feature (361)..(361): n is a, c, g, or t
  misc_feature (374)..(374): n is a, c, g, or t
  misc_feature (377)..(377): n is a, c, g, or t
  misc_feature (380)..(380): n is a, c, g, or t
  misc_feature (388)..(389): n is a, c, g, or t
  misc_feature (454)..(454): n is a, c, g, or t
tagtacaatacatctaaatggaaatcacaanacaaggaaagatttaaaccaaagcctcagattttcatacaaacgacacgaccaaacttccaaagtattggtattacatcttaaaattgtcccgtatccttaaaaaaaaaaaaagtgctacactcagcgtgcctnacaggatattaaaccaaaaagcnagaattaanaaanatgnaaaangttttcactttgaatcgtagacacagcncctatatttganttttacagaaangacatgtttctcaacatgcatccnangttttcaatgtatttggggtataagancaacatttaacataaggnaaaccncattaacctaaatacgcttacngcttaggtacacnccnacnacataacnnacttgaggaaagctaaaaattgttttaacagttatggtcaatactgaactttgttattatgtccnagatg

SEQ ID NO: 490286 - DNA, 319 bp, Homo sapiens
agctgactatttgtgtcagtaattttacatccccgggaggggtgcttaccggagaggcttaacctttcctgtgaagagggtgtatagtgttcgccgttagcccaaaaagtgggttgatgcctgagtggcctggggaagtcggtgagaatccgacgctgacccgtaaccgtgaccaccatttgtgtgggagtcggggtaccagatcacgtgggggtggtgtggggttccgtcgcgggttacggggtcggcatcgacgcgtgaacgtctgtgttgtctgtggaatcccctcgggacgtttccgtggagggacagtcgacgc

SEQ ID NO: 490287 - DNA, 225 bp, Homo sapiens
gctttggaatctctgtgtgtttctgtggggagaaaagtaattgagccgttacagcagccaagaccgtgccttgcatggggcaccagagcaacagatgccagctgcttttgttattaaaagatgtgtcttctgcctgggcaacatagcagactccatcaaacaaaaataaaatgaaaaaaattaaccaggtgtggtagctcatgcattggtccagctctagggaag

SEQ ID NO: 490288 - DNA, 161 bp, Homo sapiens
ctgtaggtcggactagcttgtccatgggatttgtcaccggcgcagatccttgaataagggccgggtcaacttcattcttccttgtccagttgccgtcgttagcgcccaaggacttgcgtcctcccacttggattgaatgcagcgccgcagccgcggccgat

SEQ ID NO: 490289 - DNA, 496 bp, Homo sapiens
ccaacatctgtgaaacagtaagagcggtccccacatggccttctgtcctcaaagtgaggcttatcaattcagaaagagtagggattctggagctatgctagttaatatgcaggaattctcattccgtgttatccagtaactggtagaatagatagttctgcttcattacgaatgacacagtttcacagtcaaggggcaccactcccaccccctgaacctttgaagaactccatcctcaggccttggttattccacacaaagtccagagaaatgacctaaactccacagtgaggggaaccatgacctactcctaccatccccttcatggggtcatcagccagctctttcccagcagagccaccagacccaaaactcagccctagatgctcaggaaatctttgggtttttttgagacacctgtttgcatcttctgccagacttcagactggaaatgctttgtgttctgttgcccccttgaatttgatgcctaagatat

SEQ ID NO: 490290 - DNA, 91 bp, Homo sapiens
  misc_feature (11)..(11): n is a, c, g, or t
ggaaaccattngtttgctattggcttataaaatcaaatatccagagaacttctttctcttaagaggaaaccataaatgcgattgatgccca

SEQ ID NO: 490291 - DNA, 163 bp, Homo sapiens
tgagatcactactttccagcagtcaggtcactggaacacactctcacctgccgctcagcacctctggcctcgttggagagtcacaccctcacgcctcagtccaagctcaaccgaaacaacaactttacccggcagtcccacaatgccaagcaccagctgcgga

SEQ ID NO: 490292 - DNA, 93 bp, Homo sapiens
gcctcccatttggtccccaatttttgatttctccccccccatccctctccccagttttggatactaataaaaaataagcattttggttttcca

SEQ ID NO: 490293 - DNA, 159 bp, Homo sapiens
  misc_feature (32)..(32): n is a, c, g, or t
  misc_feature (68)..(68): n is a, c, g, or t
  misc_feature (99)..(99): n is a, c, g, or t
  misc_feature (148)..(148): n is a, c, g, or t
ccccagggctgcagaaggaaaaagtgcagaangaggagcccatcccacaggagcctcagtggagtctnccaagcaaggagttgccagcgtccctggtgnatggcctgcagcctctcccagcacaccaggagaatggcttctccaccancggaccctctg

SEQ ID NO: 490294 - DNA, 186 bp, Homo sapiens
ttttggcccctttgtaagtccccctccctcccctccccaaagtaaaagccgaaaataaataaaaaattatggtatttccactgggaggaattttggggcccaacccagaaaggaaaaccctttttttttgtactggatttaatgcctttgaactgtgctgtaaataaataatacagctggccctta

SEQ ID NO: 490295 - DNA, 110 bp, Homo sapiens
gagatcatgccactgtactccagcctggcgacagagtgagactctctcaaaaaaaaagaatcatgacacaagtatggaagtaatgttttgggtctccctgccagcttgct

SEQ ID NO: 490296 - DNA, 86 bp, Homo sapiens
  misc_feature (74)..(74): n is a, c, g, or t
agtgtgtgaaaggcatggatggattttattgattaccctatatctactttttgaggtaaaacagaagcaccacnttttattgccga

SEQ ID NO: 490297 - DNA, 309 bp, Homo sapiens
ttatgtgacgtcagacgtgacaactgtccactgcgagcctcctgggcaactacagcgtatgaggactcagcagacgtgagagagccgggtgcagcagaagtcctttccacctctcatccagcttcacgcctagtgcaggttctgccctggtggtctcacctctccagggggcccaccttcatgtcttcttttggggggcataagtcgcaaaactaacaaatctccaaaccccagatattgctgcttggagtcgtgcataggacttgcaaagacatccccctttagtgtcagtcccacggtttcctgcct

SEQ ID NO: 490298 - DNA, 417 bp, Homo sapiens
gtttgggagtggtaataggattaggactgttgagactgtagaaaaagcacattgtttttcttaaatgtggatgcttgtttggggtggtgtaggctgatggagagtatttgagacagcggctactctttcttttttttttttcccagctgctactctcaatgcagacattgctttagaacaccctgtataaactatatattgccacatctaaaccatatagtacttcattaaattttgaacatttaaaatattttaactatatgagacaactatgtggtgcatgtgttaattagcttgattgtgataatcatttttcaatgtatatgtatataaaaataacacattgtacactttaaatgtatacaatttttgtcaattatatgtcaataaagctgtaaaaaaattttagataatgca

SEQ ID NO: 490299 - DNA, 438 bp, Homo sapiens
agttgggaataatttttaatataaaagaagtttttcccactttgaattgcctaaaagtggcatttttccctatgtgcagtcactcctctcatttctaaaatagggacgtggcccaggcacggtggctcatgcctgtaatcccggcgctttgggaggccgaggcgggcggctcacgaggtcaggagatcgagactatcctggctaacacggtgaagccctgtctctactaaaagtacaaaaagttggctgggcgtggtggtgggcacctgtggtcccggctactcgggaggctgaggcaggagaaaggcatgaatccaagaggcagagcttgcagtgagctgagatcgcgccattgcactccagcctgggcaacagtgttaagactctgtctcaaatataaataaataaataaataaataaataaataaataaaaaaaa

SEQ ID NO: 490300 - DNA, 244 bp, Homo sapiens
tgccccccccccttggcaggttaattggtgtttaaggaaccctccagggtgggggggtttcccccccacccctgttggagccggggggggggttgcctgtttcccagccgggcccccccccccggggtttttggggaatcccaggggggccccctttggggccatttggccttggtcccggggtttccctgaaaaaaggggcccccggggtggccaaaaaaaaaaaaaatttttttcccttcca

SEQ ID NO: 490301 - DNA, 650 bp, Homo sapiens
  misc_feature (488)..(488): n is a, c, g, or t
  misc_feature (500)..(500): n is a, c, g, or t
  misc_feature (503)..(503): n is a, c, g, or t
aggccaccaacggcttcggcagcctgagctgtcaactacaccctcgtcgtgctggatgacattagcccagggaatggatgagcctggtggccctgacagctcctctgtggtggtcaatgatggaccccgccagccagcagtgtggcactgacctgcgcttcacacatgccctccaatgatgatggcgcctgtggtgatcgcactggcccgtgggtagctcctgtgcggctcaatgtgcgtggccagctggtgcaccctctgtgccctgacatcacgtggatgaatggacgaccagtgccttgacgcgcccagagtgccgctgagcccatgtgaagaagaagtggacactgagcctgaatgaactctgctgtgcctggagtgacagctggcaaatacacctgccgcgtgtcgaaccgcgctgggcgccatcaacgccacctacaaggtggatgtgatccagcggacccgttccaagcccgtgctcacangcacgcaccctntgnacacgacggtgacttcggggtggaccacgtccttccagtgcaaggtgcgcagcgacgtgaagccggtgatccagtggctgaagcgcgtggagtactggtgccgagggccgccacaactccaccatcgatgtgggcggccagaagttg

SEQ ID NO: 490302 - DNA, 173 bp, Homo sapiens
gaccagggggtggcataagtgagggcttgtcattactacacggttcaccaggctctcttggcttccttccgtgggatagaatgtctgatctaaatgtggaaaaactgtggtctcacgacctaaggatgttctggccctcacccctgttctgggatgtccacagatgcctccac

SEQ ID NO: 490303 - DNA, 303 bp, Homo sapiens
  misc_feature (28)..(28): n is a, c, g, or t
  misc_feature (70)..(70): n is a, c, g, or t
  misc_feature (103)..(103): n is a, c, g, or t
  misc_feature (148)..(148): n is a, c, g, or t
  misc_feature (179)..(179): n is a, c, g, or t
  misc_feature (192)..(192): n is a, c, g, or t
  misc_feature (251)..(251): n is a, c, g, or t
  misc_feature (295)..(295): n is a, c, g, or t
ggcacgaggtcccagagggcaaggtgcntgaagggaatgtgggcgacaggaatgctctgcctggggcagncaaggttcctggagcctgtgcggatctgcagantcctgggaacgcctcaccctgtattttggatgacaccggctgctncttcattggaaccagcagtccattgtgtttncgtcttggaattnaaaaagccattttctctcttgttaaagagtcagctgagcataccagtctctctgccagnttcatcttgcttgggagaagtggagccctcatgtgttggggatnagggtggc

SEQ ID NO: 490304 - DNA, 588 bp, Homo sapiens
  misc_feature (43)..(43): n is a, c, g, or t
  misc_feature (55)..(55): n is a, c, g, or t
  misc_feature (66)..(66): n is a, c, g, or t
caaactcatcttgtctacacacggaccaaaacttttccacacntggcacaaaccnagcttagaagnccactgattctctagatggagggactaagattttcctttttccctttatcaacattttacagttattcttcaaatgacaggtgctgctctagtagttttaaaaatgtatacaaggtatagaaattccagtcaaacacagcagatggagcacacaggcttgttcatattccctctcaaactccatctcaaataacacaaagaattaaaaagacaagaatggagaggcagaaacgacgaaccagcctggaggactgaagcagccggccacgtgaagactgacttggcacagggaaggctgagtttcaggagcccacagaaggggcatcaactagagatgagaattcaggccacagaactccagagaggcctggacactgatttggcggccagtaagggcagggtgggctgagaacttacaggccagggcagtgggacatgtcccttccttatggctcctggggccagggacacccagcacagccacagggtgaccagacaccatccagaaatagggaacttggt

SEQ ID NO: 490305 - DNA, 195 bp, Homo sapiens
gtaccattagataaagatggggtctcactatgctggccaggctggtcttgaactcccggccttgagcaatcctttcctgctgggctcccaacgcactaagattagaggtgtgaggccagcaggaaaggattgctccaggctggtctggaactcctggcctcaggtagtcgcacccacctcggcctcccaaagtgg

SEQ ID NO: 490306 - DNA, 158 bp, Homo sapiens
acgaggatttccccacaccagttgagaggctcagcttggttgagggcagctttcccacccctggcgtgcgtgttcggtccctggtctgtagacctgtgcccaagctgccccagagcctggagccccgagttccgcaggcggggatacatggccttcat

SEQ ID NO: 490307 - DNA, 407 bp, Homo sapiens
  misc_feature (2)..(2): n is a, c, g, or t
  misc_feature (6)..(6): n is a, c, g, or t
  misc_feature (154)..(154): n is a, c, g, or t
gnggantatagtcatgcgtaatccagaaaaatcgagccgacgagtattgtgtgtagtctggttcagtaatgcttgtgcaccgtaagcttgagagtcacttagctaagaacccaaaggagtctgtattttgggctctatactattttgtctttanatatttatccgtccttagcatgaagggagatgggtatacaactaattgttcctgtttatttgcctctgtatctatagaacatattagtttgttaatataactaagtgagccatgttggggaaaggtgatagcattgtacttcatcgtcagcccagacttgataggaagcaaaatctaaatattcattacttattatatatctcctcttagaagccctataggcaacccaaacttaatgcattaaaaacaaacc

SEQ ID NO: 490308 - DNA, 164 bp, Homo sapiens
gagctgctcgggatctgctgtagtcgtctgcgctttcttctttaatctcgcctgctctcggggtactcaggtggtctttctttccttttcttctccccctgtggggttccatcggaggcatggattgagtatcttgagcactgggagatggctggtccaaattc

SEQ ID NO: 490309 - DNA, 925 bp, Homo sapiens
tgtagacgtttcatacctcctgggggggggcgactaatctcccgggcgctcctaattctaagctgccgtgccattttcctgtcccaaagggagccgaaatttgtgtgtctccaggagaaggaatcgaattttggattcccccggctcataaatgctcggtgaccattttcggaaaccatgcttgcgcccccgcttgacaaaggtagcccccgctgcccaccctctatgagggaggtttcttcttgcgggaaccgcaatacactccttgtctcgaggacgaagttttccccgcagcatggggtataccccagagaagacatggcgcgaagcccccttgttggggtcttgaacacggacccaatggcccccgaggggccccgcacgattctttcaaggacgcccgctgtgtactcacttggaggttcatatatgatcaacagacgtggcgtgttcccactttcgccagtggcaaggtactccccgggcgttctccctggaacccaccacaagagttggttggcagtgcccgcatctgccatcgtccatgggctagtccccgtaggacgggaggattcataagaacattgtatcagtgcgcggtgttacaacagacgcaggggtattattatcttcatgtggccaatggtctgtgttatttactcgtctcgagctcgcggcagttagttgatcttttttaaagaagactcgtagtcaagggattaacccccccgccgacgcgtgttgtttccgccaaggacacacagaatttttcctgcttgattccacgcatgcagacacgcgctcatgcccaataagtactaaggacgaaaaagaataataagagtggggcaccctagaggacaaccactacactcctgggaaccaaaacaagggaaaacaggggtattcttcccaacaaaaacaa

SEQ ID NO: 490310 - DNA, 1393 bp, Homo sapiens
gagaggacgtcagtacaagcttgatcaggtctgtggtgagatttgattctttgtaaacgtagggcactaggtaatgtggtagagataggtggtgcatgggacattggattagtatgaggagagatggagcctctacagagagatttgaggatcttacttgagtgggtgactgtctgttcagatcaaatttgtcatcaatccaaaggttattatgaggggagttgggggagaacacagtttagtttaaagacgaaatgagtcatcgtaagatggtgataactttgaagaattggaattgggcaagtaacactacatggaggcgatatgaaggggagatcgcgggggccgaaaagggggagatcagaaggattaggaggaattgaatgggagtttaacgggaaaagtctttaacacatgtttggggcccgttttgcttgggatagagagggggtaccattgtgtgatatcataacattatatggtatcgtctagaagggctcactagagagtgtccggggttaatcccgcgacatcttagattaggcgggtgtattgaaatattccgaagtagcgggttgggtataacggggacgtgtgggcgacaaaaagagtcgtggcgctcgatggaacgaaaaaacatccgtggtggatataagggaagtgggctaggttggattaacattagtaggctttgccttattggaaaattgttacattcgcaataatacagccgtaaggagagactggtgcagtattcagggggagaacaaggtgaaccaaattgggggggcagatcggttaaaactttttattctctaagttggaaaaagaatttacagtggatgaacctaaggggtagggaaataagacttgtttgggtaggaaggatcatgtaattctgccaagatggagggtcgccaccaaattgtctatcaggaaggaaaaggccttggtggacacttatgcacacgttgagttaccaataaagggtcaattgaattaagaaacgtgggaacccgggagaggagcgacatatttctgttgaccaagttccaatttcattataagaagtatgaagaggctgttcaattgggtataggtgtgggacaagaggttcacactttctagtgtgaaaagacaatgggggtgattgcttataaagggagtaacgaatttatgccatggggtaaagttagtggacaagggttcggatgagagcacaaacagtggaagtatatttggactatagggggtgacattgcgtggaatggagtgtagtacataattatataggaaataggtagagtagcacaagagtgtatgtggcgccgaaggagtaagagaaaaggcatgtgagagggcgacgaagatatagtgtagggtaatcctgcag

SEQ ID NO: 490311 - DNA, 545 bp, Homo sapiens
  misc_feature (66)..(66): n is a, c, g, or t
  misc_feature (418)..(418): n is a, c, g, or t
  misc_feature (489)..(489): n is a, c, g, or t
  misc_feature (533)..(533): n is a, c, g, or t
  misc_feature (538)..(538): n is a, c, g, or t
aattcggaacgaggtgtctggctaattttttgtatatttagtagagacggggcttcaccgcgttancaggatggtctcgatctcctgacctcgtgatccacctgcctcggcctcccaaagtgttgggattacaggcgtgacaccggcgcccggtctctttacccagtttttacagaagcgcatccgagccttcatccacagaaccatacaagacatgatgctactccaagaataccaacaatttcaaagccagaacccaaaccaacccctaccttccagcctctccccctaaccaccgctccctctcagctagaagcagcctgatgagaacaacgcccccttttctatcaactattaaaagctggaatgttagggtcaccccgaccagactgttctcttctttcgcaaaggtttacantacagttctttgtgaccttcgcatagcttccccagggctaaaggcaaaccccccgccacaactgacccttngagagtaactgtttgttcagaaggatttagctgaactggcaganagttncaagatg

SEQ ID NO: 490312 - DNA, 439 bp, Homo sapiens
  misc_feature (24)..(24): n is a, c, g, or t
  misc_feature (72)..(72): n is a, c, g, or t
  misc_feature (123)..(123): n is a, c, g, or t
  misc_feature (132)..(133): n is a, c, g, or t
  misc_feature (139)..(139): n is a, c, g, or t
  misc_feature (264)..(264): n is a, c, g, or t
  misc_feature (266)..(266): n is a, c, g, or t
  misc_feature (324)..(324): n is a, c, g, or t
  misc_feature (376)..(376): n is a, c, g, or t
  misc_feature (399)..(399): n is a, c, g, or t
  misc_feature (413)..(413): n is a, c, g, or t
ctaccctagaagtgtggtcagganataaagttgagacagagattatacatccagccccacctctctggaacnggagagatgactggggaggaaacacaggccagcatgggaacaggggtcacngtggacacnngggtgngctgtctctccacctcctcacattatgctaacagggacgcagacacattcaggtgcctttgcagaaagagatgccagaggctcttgaagtcacaaaggggaggcgtgaagaaatcctgcatctcngnccctcacaagacagctgtctcaggcttttcaagctgtgagagacacatcagagccctnggcactgtcgctggacgcagcctgagagtagctcccttcttttccacctganctcttcctcctacacatcacagnagcgaccacagctncgatgaccacaacttctaaggttaag

SEQ ID NO: 490313 - DNA, 414 bp, Homo sapiens
  misc_feature (312)..(312): n is a, c, g, or t
  misc_feature (329)..(329): n is a, c, g, or t
  misc_feature (333)..(333): n is a, c, g, or t
  misc_feature (345)..(345): n is a, c, g, or t
  misc_feature (353)..(353): n is a, c, g, or t
  misc_feature (355)..(356): n is a, c, g, or t
  misc_feature (364)..(364): n is a, c, g, or t
  misc_feature (367)..(368): n is a, c, g, or t
  misc_feature (374)..(375): n is a, c, g, or t
  misc_feature (389)..(389): n is a, c, g, or t
  misc_feature (391)..(391): n is a, c, g, or t
gtcctccttttattcaagcagtcgcacgtggctcacgtggacgaccacgctgttcgtgaggttcgacagcgacgccacgagtccgaggaaggagccgcggcgcatggatagagcaggaggggccggagtattgggaccgggagacacagatctccaagaccaacacacagacttaccgagagagcctgcggaacctgcgcggttactacaaccagagcgaggccgggtctcacacttggcagaggatgtatggctgcgacctggggcccgacgggcgcctcctccgcgggtataaccagttagcctacgacngcaaggattacatcgcnctgnacgaggacctgngctcctgncnngcgacacncgnncagatnnccagcgtatataananacgatcctctagtcaccgcagca

SEQ ID NO: 490314 - DNA, 844 bp, Homo sapiens
gatgccgaggtctgtcccacgcccgcccgcctggccaccacgagagaagaagacggagcagcagcggcgggggagaaggctgtgcacaggtgcgggtacggcaggccggttggggccgcccgtctctgtgccaacgaggagctgttccggctagcagcgggatcaagggcccaggtggcctgacgctggggaagctggcagcgacgcggacaggcgggcgacaaggccgcgacgaaaggctgaggtggaacaagcccgcggaaggttggggaacgggctcaggtcccaacggcaccctggaagattcggacggtggcagcgtcttggacagctccgggacgcctggaacaaggaccttccgagcttcaagaggacccctttgaaagcccccgggaggggcaacaatattcccttttcaggaaggaacgcgggttatccaaaagaacgctttccaaggagaggggacgggacattttgtagatccggagacgcccttcgcgaagagagaaaggaacgcccactggttcgaaaagcgggccaatggttaacagggggggtggaaacggctttgggttggagaagaaaaggcagagggcagtatccccgggtggaagaaactccccaaggttttaggttaacgccattgggcaaattaaatgaatttgacgcgggagaggaactttcgggctcttttttcaagagtaagaagaaagtttcttccttatcgatagggtcttgaagaagaagagaacaacaaaaaaagaggggggggggaccccgctattcagaaaggagatatatcccctgtgagagaaggggggagcccaccaagagggattatttg

SEQ ID NO: 490315 - DNA, 144 bp, Homo sapiens
ggatgatcagaaagcaccctaccccgtgatttcaatggttacctgggtacttagttatttcaagtgttgtcgtaaaggccacaagggattcctcttctttcccttctctgaaaataagttcagacttggttgatatgtatagac

SEQ ID NO: 490316 - DNA, 347 bp, Homo sapiens
ttttcttatctttcttttttagacagagtcttgctctgttgcccaggctggagtacagtggtgcaatctcagctcactacaagctccgcctcctgggttcacaccattctcctgcctcagcctcccaagtagctgggactacgggcatccaccaccatgcccggctaattttttgtatttttagtagagacagtgtttcactgtgttagccaggatggtctcgatctcctgacctcgtgatctgcccacctcggccatgtgtggtggctctcatctgcaatcccagctacttgggaggatcacttgaggccagaagtttgagtccagcctggacgacacaggtcgac

SEQ ID NO: 490317 - DNA, 130 bp, Homo sapiens
gatgaaaaagaattgagaaggtctaaatcaagacatttcagttaagctcataaaatttcattggtttcatttaaaaggagattaacggtattgatacttggataactggctaatcatattaaaggactat

SEQ ID NO: 490318 - DNA, 223 bp, Homo sapiens
tgtgccctgtatgggagcccagccactctgcctggctcatatcctgccctctctcaggaaaacgaggggttgccctcctagccaccagtgctgaccaacagcagctgtatctttgctacttaaaccttcttgaggcgagagccctttgtccccgggatgcgaacccatgcctggctgaaatgctgcccactactagtgtcacgggctccccattcatcactcc

SEQ ID NO: 490319 - DNA, 1268 bp, Homo sapiens
  misc_feature (1268)..(1268): n is a, c, g, or t
gcgtgatgatgccctgtgtgggctgtagtgcagttgggtgacactgcggtctagcattgggcgcgtagtggtgttaatacgccgatgaaacgcaggtcgttcgaggccatctatcatgcctagccttgctggcgtttagtgatagaatcgagtaaggctgcaagcacgtgataagttcttctggtatctgccgacgtccgctagtcgcatcctaacgggtggccgtcagttttgccagtccatatgcggtgtcacagttaatggacaagtcgtgcgtgagtcaaccatagggagaccagtgatgcgctgtcaggtagcacctgagaattctgcttcgttgtatctgtcggcatctggcggatgatcttttgcttaccgggacagatttaggcgtcagggctaatgctggtatctcagcgcattcgtgcatcgtctgcacgtccaggggttagtggttgcacaggccgcatttattaacatttgccgtgctctcgatgatatcgtgtgcacaacgggccaggttgcccttttcctcaatgggagtttggtcagcaattaacaaactagtaagtgtgccactgagggactgactggttgtttgctggtggcaggtggttccaatgttataacggtttggccaaagaccataagcgtctcgggttctcccaatagaacagggataataaaaggggagccgatctgggccattgtggtttcgcatgcatcaaggaagacagaggaggtggggaaattggcggaagaagcatggaaggagtattcttgagacccagactatgtgaggtggcctggactttggcacgggcacttaaatggcagagagaattgtgacacacactgccttgtgtgggtgtaaccgccggtaattacacggcaaaggggttaatttacagcccgttgaaactcccatggtggttttcccgcgggctgtgggaattccccctggacaaagttaaacaccgggggtctccctaaggcgccagtgtttaaacatggtgccgacccttccccgtgaaccaagactggaacaacagtttaatgcgcccctcaggcgaacagattggggcgcggcaatttttggaacagttggttcacacaactttaaccgggcggttttaaaaccaaatggactgacaacgaaaaccttcccacaaggccaaggggaatttggtttatggaccggcacgcgtgccggggtcgttccaaagaccatccccaatggacaaggaaaaatccaaggcgtttacatn

SEQ ID NO: 490320 - DNA, 750 bp, Homo sapiens
ggcacctgtaatcccagttacttgggaggccaaggcaggagaatcacttgaacctgggaggcggaggttgcagtgagccaagatcacgccattgcactccagcctgggcaacaagagcgaaactctgcctcaaaaaaaaaaaagttaattaaattaattagaaaaaatttcaaggccaggcattggttggctcacgcctgttaattcccaacacttttgagagccgaggttgggccagatcacttgaggtaaggagtttgagaccagcctggacgacattggttgaaaccctgtctctactaaaaatattactaattattattacaaaatttagctgagcttggtggtgcaggcctgtagtttccagccactggggaggctgtggcttgagaatcgcttgaacgtgaacctgggaggcggaggttttagtgagccaagatcgcttcactgcactccagcctgggtgacacagtgagactctgtctcataaacaattaattacaggtaacgtaagtaacgtaaagtgttgggtccaaacaaaaggaggccagttgggaaccctctgggttcccttaacctgctgttgagactctgagcactagagaataatctggtcttacttagtttccttagtcctggtagaccgatttgccaaatggccttttcccagtttcatcagaagaacaattgtggcacacatacgtctctgtcaatacacctgttcaagatcatcgccgaatacattcgggc

SEQ ID NO: 490321 - DNA, 105 bp, Homo sapiens
gaactgtgcctgagtcaaatacattcctaatgaatcccaggagacctttgctcacatcctctgtcaccttatcctggctcttgcctcatttttctgtgcttgagt

SEQ ID NO: 490322 - DNA, 310 bp, Homo sapiens
tccaccaccagcttagtcaaacgcagaacttcccgacacaggtggaaagcattcccaaaacgagattactttctttcctggagaagatgcgaaaaacagacagaacgtgaatgagcaatggaccccactgatgtatgccttcttcactaaccagaggaaaacaactgtccgtccttgaagcccaggaggcccctagggtccaatgcacgcaccttggtggtgagcgttttcacacgcttgaggttgaagatgtaatccaagtgcacgtagttgaggtttttgcggtgaatgagaaagttgagcatgttgt

SEQ ID NO: 490323 - DNA, 266 bp, Homo sapiens
ggccggtaccctatgtctcgattgttagcttgttgggctctgtatcgttcagtcagtgggcatcaccaatgttgattaagattcatacctgtacccatcttgatggtgaaagatagtcatcagtgctgaacacaatgccatcgacgagttctgaccaagcagaattctctgtctccgcctgtggaggaggaggtcttagggtgcttgtgtgtgatggttccagtgaattcattacaatagaaatggacattggatcttcataacga

SEQ ID NO: 490324 - DNA, 304 bp, Homo sapiens
gctccttgacatcgctcacctcctgctgtgtggctctagcgctgccatggctcaggagttggggacccctgctctaggtgcatccaatagcgaaccttcccacaccagtcttcacagtggtcaagggcagcaaccacttagctcccaaggcatgtgcgtcagctggcatttcgtcacaatcaacagtaagtggtagcttgagtcactgtgaggtcacctaccggaaatcaccagcatcccatttcgcactggccgggagctcagaactgccccctgggaaaccaaacctatgcccaaatcccat

SEQ ID NO: 490325 - DNA, 212 bp, Homo sapiens
actgagcaggtcctcctgccctaagtcctccctgaccggtcctccagtcctaactcgtccctgagccgtcctcctgccctaagtctcctccctgaccggtccataccaggcccgtaactcctcccctgaccggatccatcctccccgtaactcctccctgacccgtcctccagccctaagtctcctccctgaccagtacaacctgccggtgg

SEQ ID NO: 490326 - DNA, 237 bp, Homo sapiens
caactagcgtggtatacaggcgcgcacaccacgcccagctaatttttgtatatttcttagtagatatggggtttcaccatgtaggtcaggctgatcttgaactcctgacctcaggtgatccaatacactcagcctcccaaagtgctgggattacaggtgtgaaccagcgtgtctggcctagaattgttttagaatgtcccactgtttgttaccctttctcactccatttaagatctg

SEQ ID NO: 490327 - DNA, 355 bp, Homo sapiens
gtcgctcaggctggagtgcagaggcatgatcccggctcactgcaacctctgcctcctgggctcaagcaattctcccgcctcagcctcccaggcagccgggactacaagtgcccactatcacacctggctaattttcacatttttagtaaagacagggtctcaccatgttggccaggctggtctcgaactcctgacctcaagtgatctgcccgccttggcctcccaaagtgctgggtttacaggtgtgagccaccacgcctggcctaattttgttcagatgttacaagtgtctatagtcaatcttcacattgccagtttggttggttataggatttctaggttggaaggcattttc

SEQ ID NO: 490328 - DNA, 415 bp, Homo sapiens
gaggcctcccgagtagctggaactacaggcgcacactgtcgcgccagcctatttttgtattttagtagagacagggtttcgccgtgttgcccaggcttgtctcgaactcctgagctctggcaatctgcccctcctaaagtgctaggattacaggcatgagccaccttgcccggcctactacatgattttttaatgtaaataataaaataatacatttataaaggaatagatactttagcttttcttattgaggtatgaaatgtaagcattgtaaaattgccttgttttatatgaacattgagtaattttgctggatttttcgaacacttagtttcaaagaccaagtgaataactctgacacggaaattaaaacttgagcccagtgactccaagctaaggctaatattgagcctgc

SEQ ID NO: 490329 - DNA, 246 bp, Homo sapiens
acgggagagattccggtatatattgagatgtgggctcagttgttgtcatgtgagaagaagcaggccggatgtcatagcgggtgccctgggtctgacctctgggactcagaagtgaaagggggctattcctagttttatttggtatagccattatgattattaatgagtgagtattgatttggtagtatttggttataggttcatatgtcctggagcagtatatatgtgtgaaagaaggactagcta

SEQ ID NO: 490330 - DNA, 912 bp, Homo sapiens
tggtgggcaacggacagtccgccgaggatgctcggtggagtcatggcacgtgcccttctgctcggaaggactgtcgactttgtgtcgcaaaccctgaggagcaacggtgcctactggacgcaagttcaagctatgacatgtagacattacgcatgtgtaacctgtacctgaacgcacgttcagcagctgtacaagacttggtatgactactgagaacgccgttgccagtactgacctggtccagaacaacactagttacaggaacacacgacgtagtctgttacttccaatacaccatgtctaaactcaatggaacacactggtacgtacacacactgtctagtggctcaacatggcacgacgtaacggacaactactcccacactacttctacttctgctgagcatgaatagctgatacactggcagagtacgcacgtctctctgttggaaacagggatactacgacggccatgcacgcactagaggcaatggccctgacacccagtactgccctcacggacgatttccttcgcaccttcacaccctaccactgagggcacgtgcgcaggcttggcttatattcttcggccactgggctcacctatcgtgacactttacaaggcttcacacaagcaggcgacctacttgacacacttcgccattgaacagcacactttccttaccttggttctcggggaccttgaaaccaccgagggaacctaacagccccttcaaaatattacattctgcaacggaacccttttctaggactatatagcggaccagatcaccggatacttttcccgggtttaactaggcttacaacttaccgcattgaacggccggtttctccgatctttgaccacccgaatagaactgtgtcgctaggtttatcatatataagctccct

SEQ ID NO: 490331 - DNA, 608 bp, Homo sapiens
  misc_feature (71)..(71): n is a, c, g, or t
  misc_feature (88)..(88): n is a, c, g, or t
  misc_feature (113)..(113): n is a, c, g, or t
  misc_feature (116)..(116): n is a, c, g, or t
  misc_feature (129)..(129): n is a, c, g, or t
  misc_feature (145)..(146): n is a, c, g, or t
  misc_feature (155)..(155): n is a, c, g, or t
  misc_feature (162)..(162): n is a, c, g, or t
  misc_feature (179)..(179): n is a, c, g, or t
  misc_feature (189)..(189): n is a, c, g, or t
  misc_feature (210)..(210): n is a, c, g, or t
  misc_feature (212)..(212): n is a, c, g, or t
  misc_feature (218)..(218): n is a, c, g, or t
  misc_feature (222)..(222): n is a, c, g, or t
  misc_feature (228)..(228): n is a, c, g, or t
  misc_feature (231)..(231): n is a, c, g, or t
  misc_feature (249)..(250): n is a, c, g, or t
  misc_feature (254)..(254): n is a, c, g, or t
  misc_feature (258)..(258): n is a, c, g, or t
  misc_feature (260)..(260): n is a, c, g, or t
  misc_feature (266)..(266): n is a, c, g, or t
  misc_feature (274)..(274): n is a, c, g, or t
tctagaggatcccgttcgcaggcacaacacacttcataggccatgcaaggacacacagcccccttccctcnctcccaggtaccatcanagctgctagcgtgtgactgaaggcnggntccctggcccctnctgaagcactactgcnngccagcagnctcacgnaccttggcctgttgctnctaggggtcncctgtgctattcagccaaggngnccacantgcntgctgnccnagctgagctccgcctagnnagcncacntncctttnctgccacngagtctccctcttctgcttttcccagcaggaagggcccagcctcacctatgcaacctgcagccccccgccaaccagttgaggctcccctcttagacttataagtctatgggcagtggcatctagctacctgccctccctgccttccccagggtcccttcagtggaccctgggctttctgactgcccagagagggtccaggcgcctggaccctctctgccatgcattagggcagaaatcacggtctgggtctcttcacgctgagtccttgggaggtgggccgaatcttggccaaaagtagccggatggaagaaggatcctacctggctaggccat

SEQ ID NO: 490332 - DNA, 307 bp, Homo sapiens
tgaggtctatcatcaggccagtaagcagcctgactgctgttaacccagccctccatgtaactatgtgggttctaacaactagctttcaacagttgttttatggttacttcagtgttcagctttggggaaagacgtgcttaactgccattttcattcccagggaactgcttcagtccagcatattacccaggtagaaagtcctacctacaaaagatagattcactactttaagtagcatttatcaacacctttcctaaaaaacatttaagtttttagtacagctttaaaattttacatcttaacgtga

SEQ ID NO: 490333 - DNA, 186 bp, Homo sapiens
tcacatgacatctgcctgagagccctgaggtgacaataaaacatttatgctcaaggggaaaaaaaaaaaaaaaaaaattcgggggagaccttcttgggcctccttttttccttatccccaatttaaaattttagggggggtcggggttcatgggccttggcaggagttggggcagatggccaggtg

SEQ ID NO: 490334 - DNA, 229 bp, Homo sapiens
aagcccttactgtgacagtcacatatcgttaagcatctgggcttccatacacaatccaaatcttccccttgcttcacttctaataactgcagtgcttcaaacctagtactgcacaaggtgggggtggtcctgggtcttgagttggaacaagttcaggagggtaggccatcttgtgatgcctgtacacccgaaatgcacgatttactatccccgtccactttatcattag

SEQ ID NO: 490335 - DNA, 637 bp, Homo sapiens
atgggccaggctggtctcaaactcctgtctctagtggtccacctgcctcggcctccagaagtgctgggattacagatagtgagccaccatgcctggccggcatgagtcccatttttattgcagtagaagtgtagtgactaaggaatggtaaggtatcaaaatagaacaggaaataatggaagaggcaagaccttcgacatctaggaagagactggtggaattctatgaaagttaaatatttaatactgtgtttgtccagttgttattgagtccagatcacttgcaaagatgaaaagggagaagaataaagactacctgcctctaccaggcattattaagtgcccgttggagatttgaatgaggatgttagtgtctttgagtttcatagatgaaaagcgtggaagctaggtggggagaaattgcttgatctcagaactaacttgaagctccgagtgctcagagtcgaaactaaagtagagggccttgtggacaggtggggagttagcaggcaattttattcacatcatttgtcttttatagaaaaggtgtttgctgtcagattgagcaaaaatcatggaaaatgcccaagttttaacatcattgtttgaacctatcagaaaatcagatgcttgaatat

SEQ ID NO: 490336 - DNA, 181 bp, Homo sapiens
ctccagtaactgcgtcgtaacgagcgcctccgtaacgagacgcctccaaaacacgcttccagtaacgagcgcctccgtaacgagcgcctcctaacagcgccatccattatccagggctagtagaatttggcaggtgagtagttacacactccttagagcattccgaggcgctcgttacgga

SEQ ID NO: 490337 - DNA, 338 bp, Homo sapiens
aaaatgatacactttggaaaaggtctgcagtttcttaaaatgttatatatatctttccccatgactcagaaatccactcctatgtatttacctaagagacagaaagcatatgtctacaaagacttgtctaaaaatgttcatagcagctttactataaccaaaaactggaaaagtatgttcatcataggaatatggatgaacaacctgttatatccacacaatggaattctactcagctatgaaaaatgaatgaactattattatgcaacaacatggataaatctcagaaacgtctctgagtgaaagaagctggataaaaagcagtacctatttcattt

SEQ ID NO: 490338 - DNA, 194 bp, Homo sapiens
agtcaccgcgtcagccagtatttcagtttgtagatcgtttagtcaacatgtagcccagacagctcgcaaacgctcggcgtcaagtgatccgtccgctgcgagcctcacagaagggctgggattacagacgtgagccaccacacccggctatctttcttccttttaacatgggccccacgcctggcctctgttcc

SEQ ID NO: 490339 - DNA, 108 bp, Homo sapiens
cgaccgccgccgcccgaccgctcaccgcccccagcggacgcgcgcgcgacgagacgtggggtgggggggggcgcaccggcgacccgccgggctccccgggggcggccg

SEQ ID NO: 490340 - DNA, 935 bp, Homo sapiens
  misc_feature (1)..(1): n is a, c, g, or t
  misc_feature (102)..(102): n is a, c, g, or t
  misc_feature (173)..(173): n is a, c, g, or t
  misc_feature (203)..(203): n is a, c, g, or t
  misc_feature (224)..(224): n is a, c, g, or t
  misc_feature (353)..(353): n is a, c, g, or t
  misc_feature (412)..(412): n is a, c, g, or t
  misc_feature (440)..(440): n is a, c, g, or t
  misc_feature (442)..(442): n is a, c, g, or t
  misc_feature (445)..(445): n is a, c, g, or t
  misc_feature (453)..(453): n is a, c, g, or t
  misc_feature (455)..(455): n is a, c, g, or t
  misc_feature (458)..(458): n is a, c, g, or t
  misc_feature (464)..(464): n is a, c, g, or t
  misc_feature (501)..(501): n is a, c, g, or t
  misc_feature (770)..(770): n is a, c, g, or t
  misc_feature (923)..(923): n is a, c, g, or t
naactcaataaaaaacacaaaaacacaaaggatccagagtctctgacaatgaacgtaatatatgattgccataaaaagttcactctcctttcaattccaatntacctcaccccaaatcagcgatccacttaatcaaatattcttccacttgaattgtccttatctcggcttcnatgttacacatctcacagcagctaactgcnggcaccagctcttcacattanagaaaaaactgtcagtggttgccccttaattagtctaaaactcacaacattggttctgaacattaaccagattgaagggagccgcttatgatttcactgcgactaggggacaaattcaagtcagaaagnaaaccaggatcagtcaagctagccatccatctgctgtcaaaatatggagtgcgggcccnggctttcaaactaactggaatttttttntncanaaatgtcntncgncattancccacagggcattaaaactctatttgcgttgtctctnaaattctccagcccgaaactgtctgggtaagcattgcagacacttgcctgaacgagcccaacagtccccacgagaaaatatgtcagtacaatgtaccgcataaggccacagccaaacttcagcgtctgcgacgaagggcacttcctggatattgtaaaagacaagtaactgtccctggtgggtagtccggttctttggcatgaggcacaataccgacggcttccccttctcacgggctcctgaagtcacggacgcccaccaagcttttncacaacgaggtgcagcacagttgccgcgtgaacaatgatgccattggcttccctgactctccagaggcagcttaaaggctgggaaaggttgtggttatggattttctgatgggggcagcggggagaaatgagcagaggaggctgctttgaatngtttttgtgaaa

SEQ ID NO: 490341 - DNA, 387 bp, Homo sapiens
  misc_feature (45)..(45): n is a, c, g, or t
actgaggtgatctagaggatcccgacggcttcaacggaactttanaacatcctctggaggaggctattaaggttatgttccattaatataatccaagggaactgcttgagtccaggtttgaaaaatctttgttcttggagcagacaatgagatgagagattctaccattactgactacggctcctgtctttcttccatcagagttaaaagcctttcacattacgcttttctttaaataaagttgtaaaggagcatacgtttggaacagaacactgaaaatgtaatttaatgcgtgaactcctttcagcctcactccgtacagaatcggtacagggataattacttttgacctctattttcattagctgaaagttccgttgaagccgt

SEQ ID NO: 490342 - DNA, 789 bp, Homo sapiens
  misc_feature (7)..(7): n is a, c, g, or t
  misc_feature (73)..(73): n is a, c, g, or t
  misc_feature (75)..(75): n is a, c, g, or t
  misc_feature (77)..(77): n is a, c, g, or t
  misc_feature (123)..(123): n is a, c, g, or t
  misc_feature (199)..(199): n is a, c, g, or t
  misc_feature (298)..(298): n is a, c, g, or t
  misc_feature (315)..(315): n is a, c, g, or t
  misc_feature (326)..(326): n is a, c, g, or t
  misc_feature (341)..(341): n is a, c, g, or t
  misc_feature (348)..(348): n is a, c, g, or t
  misc_feature (360)..(360): n is a, c, g, or t
  misc_feature (365)..(366): n is a, c, g, or t
  misc_feature (372)..(372): n is a, c, g, or t
  misc_feature (376)..(376): n is a, c, g, or t
  misc_feature (378)..(378): n is a, c, g, or t
  misc_feature (383)..(384): n is a, c, g, or t
  misc_feature (395)..(395): n is a, c, g, or t
  misc_feature (397)..(397): n is a, c, g, or t
  misc_feature (401)..(401): n is a, c, g, or t
  misc_feature (406)..(406): n is a, c, g, or t
  misc_feature (423)..(423): n is a, c, g, or t
  misc_feature (449)..(449): n is a, c, g, or t
  misc_feature (470)..(470): n is a, c, g, or t
  misc_feature (488)..(488): n is a, c, g, or t
  misc_feature (502)..(502): n is a, c, g, or t
  misc_feature (529)..(529): n is a, c, g, or t
  misc_feature (607)..(607): n is a, c, g, or t
  misc_feature (634)..(634): n is a, c, g, or t
  misc_feature (785)..(785): n is a, c, g, or t
ggaactnaactctaaaagcggcttttattgttactttagaaatcataaaaatctcattaaggtcacatatttntnanccccaactaccatgcagctcagtctccatattactgaaaaaaagtntggatcacgttacttttggccatttctaaaaatcaaattaacactcaggggacagagatttgtcatcacagaaganatgcagaaaaaaaggcacaagaccttgaagtgaatcccaaagaggcgctccaaccacagatggagtaaccaccaccacagctggtcaagggtgacagcngccacatgatgggtgtnctttcaaagtnagtcacatgcctgcngtttgtnttgtctagaggnaaatnnaataanccangnaaggnnatcccagcagnantaanctccnagaccctgcagccaggnttactgtgcctcattaacaaactgcntccttccaacttggccaaggnaccatgagttactgaggngcctcagcctaganccttcccagtctcttcccagggatatntattcctaaaccttcatcctgtcagcatcaactccctactctgtagggctgagagtcaggaggtcagaggggcgtctnagagagatagcggaactcatttgtgtnaccataaactcatttgtgttactgacagctgaaaactgacagctctcttgggaaagctctgaagaaaccaaagaggaacagtgaaggtttcaatgcggaagtgggtctagactgtgtgccgctccattgaacatgttcagaaatcactagnaagt

SEQ ID NO: 490343 - DNA, 1390 bp, Homo sapiens
gtgcgtggtctctggataccatgcccccccggggatcgccacgtaggcctatcgtggcatgatcagtgcagtggtgggtggtgagtagagataccttgtggtagccggtctgatctgttcagcgctagtggtccgtgcgtgaacggaagccgtggctgttgctcgtactgaggactcacagctctggtgaatctgttcaggagcccggtggttcaccccgaggtcacgccgcggccgtcccgatgttcgtgcgcacgatggaggaaccactcaccagtgtccgggcacttcaagcttctgagcatggcagtgcacaacgaggcggactagacactcttacagtcgggcctttggcactggactgtcgtggcgttatccttgaggggtggataccccagatgcattgtggggccacacgtgagcaccagatatttcctacaaatatgacccgtggactccaggtgggtaaacactgaagtgctttcctgggtgtgcgcattctgcaccattccagcttggtatcacgacttggcacgtcaaaacctttgagcacggagggcccggcaacgcctggagggacccgttggtgccgggacacggcttgtcgcgtccaacgagggggcccaactgggccacgggggtcattacagtggcagtgtaagtgcggcggccttgcgtttactgccagagcccacgaactgaccaaaacattgcccttttgcctgacattcattgcgattggtaggtccccagagccgtagctgaacgtaccttacagcttgcaactaatcgcgccgaccagtctttgcccagggaatatttggcagtagacggcattgggaaagcttgacgcagacaccccttttgcggggcaaagcgatcctctttcatttcctggtcccacgcgagttccatcgtaggatccatagaacgttaactcgtaagcgcctggcagtacgcgttgattgcccccttgtggacgttcgcgtcggggccgacttcccacgtacggggtagcccctattcagttcgagaatgtccctcaatacggtgtgcaccggcccgagaaaggctttaccattgcaaggaatccccttggcagcttcaacaccgcaaactggagctgacgcttcacgtgcatcgaccttcagcactgcttgtcgccccaacattgataccccgtacgctagggcaccttggaacaccgaccactgcattccgtaggggagccatgcggttatcttggggacgcccgaaagaggcgctaatagggagactgaccagtacaccgcgactccgcgcattgagccacatagtacgtatgacccttccacacggcatagacagtcccgttcacaacgaaataggctccatcctaattaatctcgcc

SEQ ID NO: 490344 - DNA, 240 bp, Homo sapiens
ggggtatttacggtacatcacctcaagtatttatcatgcctgtgtgtcctctttctagctattttgaaatatgcaatacctgttgttaactctagtcacctaatctgctatggaacattagagcttattctatctgtgtgtttgcacccattaatcaatctcttcatcccctcccctcccacctacacactcctcccaggctctggtatctatcggtctacctgggttaggtctacctgg

SEQ ID NO: 490345 - DNA, 80 bp, Homo sapiens
ggcacgaggggagctgaggaattgcctaggaatcagcactgtggagaatgaggaaacgtggatatcaggattcctgtttg

SEQ ID NO: 490346 - DNA, 1461 bp, Homo sapiens
ggtgccaatctcgccgaagctttcacgtatgtctccgctgtctagcgagacaacccttccgctttctcgactcctatcgctgcatagccgacccagttggcttgatgagacgttctcagcaattgtactatgtctctagaaattcatgcctgggatattcttatggagctcgtcggcggcgtagatcccgagtggtatgcatggatatgaatcgtgcttgtccaccttctcaaaagagttcatcgtctcgagaatgacatggctgttagccctccgggatgagatgtcgttcacagcatgagatatcctagttaggtcgctcatcacgctccagggtacctgctgaagtgataggacgtccgcgttgtgatgagggcgaaaggagtgctgattcgttcgagaaatgggacttggtgtcgtatgactatctacttcatactcaaagagatcgtaactttcgacggacacatgggctcgcctcgggatttatgcacatagggatagaactgggaaagcggttgcgaacaagaatagccgatagggacttacacgtatttgggaccagaacctggaatggagttccggaaggcacttgcggattgcgtaggacaggctgagcacatgataggattcctttatagctcttgggcgttggcggtacacggcacgcattatggtagggtgcgcgttggttcactccttgtggccacgtgttcggggcggatacccgccattcgcgatggccacctcggtttcgcaatgccatacggggggggggttcccgcccgctttggtatcccttgcgccgactatcgggcctttgtgcatcttgtttgcgtctttcggcgcgggagacctgctttcgagagaggatatcgatttccctttgacgccataggtacgcccagtggcgcgggttacccgcactggattcccatacccaaattagtgcccgatgtttcctttcttattgccattggagatccaaatcgacagggcttgggtccccatagccaagggcaaggtcccgattggacattcccttcgcaccgaggattccgagttgcccaaggcgaaagactatccaggggggcatagccgccgaattgccggcccacttttgcggcacgccacggaacgggggttttaaccccgaacgaagagctttggagatgaaacttgttcacttccaccagggcaagaaacatagtactttgggcgacagcagcgagtttgcccaaccccacaagttgttggcggggggcgcaacttgcccacgcggacgcggggatattggacatccgccacaaacaccagaattatcgtcttggcgcagcacaactctacgatgtgcaatgccggccccatgacggacgcgcctggcttcgccatatgcaaccgtggcggttactttgtgccggcaccaacggctttgtgctttatcccccacatgcatcttaa

SEQ ID NO: 490347 - DNA, 681 bp, Homo sapiens
agcggggagagcgttacgtgacgggtcgggtggcgctggcgggtgctgtcagctgattcccggggttggtggcagcggcggtagcagtaagggagtttctcctggggaacccgttcagctctccagatgggacagggcatcgagaaagccacagatggtccctgcagagcgaggactgggccctcaacatggagatctgcgacatcatgcgagacgagacggaggaaggtcccaaagatggcctccgagcagtaacagaagagaatcgtggggaataagaacttccacgacgggatgctggcgtctcacaggcttagaaacctgtgtcaagaactgcgggcaccgggttccacgtgctggtggccaggcaggacgtcgtggagaagtgtgctggttaggaccatgctgcccaagaacaatccagcgcgagcactagtcgggcatgacaaagtgctcaacctcatccaggtgctgggcttgacgtcgttccgcagcgtcgggcgatctgacgaggtgtggtcaccatctgatgaggacctgcaggaggaaaggcctggagttccccatgacgtgacctggacatgctgtcagcgcatgcacagagcaccagaggaccgtgtgcaactcagagacgcaatcaggacaggagactgtgggcactgactccagccagcaagagga

SEQ ID NO: 490348 - DNA, 681 bp, Homo sapiens
atacggctaggtacgaggctgggtgttggcgggcgcagcagctggaacgggagtactgcgacgcagcccggagtcggccttgtaggggcgaaggtgcagggagatcgcggcgggcgcagtcttgagcgccggagcgcgtcctgcccttagcggggcttgccccagtcgcaggggcacatccagccgctgctggctgacatgcatgcctgctgctgctgctggtgagtcttgcgtgggtctgctggcagcctgcacctgctgctgggctgaccatgctgcaatggtcccctgccctgtgcttggtgctgtgtgcatgcaatggtgccggtggagatgggttgcggtgtgcatggctggtgtgccccacagggccaccttcttgcccggcggctgccgctggaaaatgtctcaggagaggcccacgttctaccggcaggagctgaacaagacaatctgggaggtgcccgagcgttaccagaacctgtctccagtgggctctggcgcctatggctctgtgtgtgctgcttttgacacaaaaacggggttacgtgtggcagtgaagaagctctccagaccatttcagtccatcattcatgcgaaaagaacctacagagaactgcggttacttaaacatatgaaacatgaacaatgtgatttggtctgttggacgttttacacctg

SEQ ID NO: 490349 - DNA, 491 bp, Homo sapiens
tcatatatcattccagtgccagtgctgtacatctgaatacatggggaacacagagatgtgggctcctaatgaggaccccagaaactctgagctctcacaactaacaaagacacttacctccctcctctgcccacacctccaccatatacagcatatgatacccacaagtaaaggagggggcggtcctatatccaccacctactctaggtatccccccaaacttactagagttgaaagagacccaggaaagggtaaagatcaggacccctctctcctgggctgaaagatattactacacgtcagctctatgtggacacaggagtttctggctaggcctggaaactgcagacggagctaatctgcccatataaaccactgcaaggtgcactagcttagcatcccgtctgagaataaggtgagagcagggaaataaaacttagacttcaaacgggacggaatgcatgacagttggaactctagcacgggcactt

SEQ ID NO: 490350 - DNA, 832 bp, Homo sapiens
gtggatgcggcttggtgtaataagcgtggggggtactggtagagtggggtgttgggtgagagtttgtttaacgttgcctcgtggatgatgtgaataggcgcgtgttgggagaagatgtaggcgggggcgggcgtatattattatgaggtgagcgtgctattgggtgcagtcgcggtgtcatgcgcgtggggtggcggccgccttggtgaatagttgactcacgagagcgggtggtggtccgagtgatagtcttctctcgtcgtattacgcacggagagttgctatgtgtggggctgcccccggtgtggtggtggtgggtagctttcggtggggtgacaccccggctggcttactgcgtgggagtgattgtctgttttggggtgcctggggcgcataatttttctcgcgcacgctgttttgtgctttggtgctaggccgcgcgggtgtctggtcagtgcctgcgtctgcgttgtgtgaccatccacggggtgtggtttgactcccgtgcgtgtgaggttgccccccttctgtgtataatgaaacggatcgctcgacagacaagtttttcgccgtacatgaggtgagtcgcctccccatgtggggttgtaaacaagaaagctatctttcggggagtgttgtatcaccagcagcttcctttgccgctccgctaccaccaaccgcgggggggaaaattcacatggtcgtcagttttttaaattattggggggagcacccacccttttttcgccctttttttagatatttttcccccaatttttttaaaaggggggttttttccccttgaccccccctttcccccttttggggccca

SEQ ID NO: 490351 - DNA, 432 bp, Homo sapiens
  misc_feature (242)..(242): n is a, c, g, or t
ggctccatccgtggctgcaggggtctcatgtggtcctcctcgctatgttggaaatgtgcaaccactgcttcttgggaggagtggtgggtgcagtccccccgctgtctttgagttgtggtggacgctggcctgggatgagagggcccagaagaccttcgtatcccctctcagtcgcccggggctgtcccgtgcatgggttggctgtggggaccccagtgggcctggcaggattccaaagtagnacaaaaggcacaagttaggggtggggaaccacaatggggaaaacccccaaatcaccagaaaaacctggggtgggggttgaaatggcatcctgttcccccacaggggggacccaacaggaggccgtggctctgatgctgagcgaagctataggctcttgttggataaaagcttttttaacagaaaaaaaaa

SEQ ID NO: 490352 - DNA, 130 bp, Homo sapiens
cagctctcagcctgtggaactgccccctcctagcagcctggcctgctgaactctgtggtgtatgggcctgagcggactcagcagcatgctgtcccacaggtggctccgtaagtggcccatctgtgatggc

SEQ ID NO: 490353 - DNA, 142 bp, Homo sapiens
tggggggcatgcgacagagggcagagataatagatatcagtggctagcatctctccctagggccacagaggcaatatgaaccttaccctcccgcgatacacaccccacttctttcctttattctggacacacagagacccag

SEQ ID NO: 490354 - DNA, 181 bp, Homo sapiens
tgcggcattcttgatatcctagctactggaaagactgaggcagaaggattgcttgagcccgggaagtcaaggctgcagtgaactatgatcgtaccactgcactccaccctagagtgacagaactgagaccctgtcctcttaaacgaaacaaaacaaaacacaaaatcactggaaattacca

SEQ ID NO: 490355 - DNA, 137 bp, Homo sapiens
  misc_feature (108)..(108): n is a, c, g, or t
gtacacacttaatattgtgccatatgtgagttttgacatgtatacacccatgaaaccatcaccacaatcaaggcaatgaacatgttcagaccccgaaaagtttccttngggcccttctgtaatccatcccttgagtt

SEQ ID NO: 490356 - DNA, 888 bp, Homo sapiens
ctctcttctggatgtttcctagttgttaagtttggtccctgatgtctttgtttccacagcctctgggatgagagaaagctgagcaagctagctggttctaggtggctggagagggggggaggaagtgccaggccctgaggcctgtctgcatcacttcctctggaagatgctcccagcagtagtgagggcttgagagagaggcaggcagttgagcaagtggcactttagaatttggggaaagaaagatttaacaactaggattgaaaaaatattttccctctttgggctaagtctgagacactggggataattggccttgcttgtagcctgggtagaggtgttaggaatcactttggcttccattttccctatgtgctacctccctgtccctatgtgacttggtgtgctgggagcagctgacccaggactgggtgggtgcaaacaaggccacttgcagttatcttggtttggccctttcctgatgtccctcgtggtgtctccgtgcctctcagaatgcctagcagtgggcatactccacggtccaagatagtccatcttttccctttcaaacttcccatacgttttccaagctgtttttctctcaggagcaacattgctccagagattttggttggtaggagggttgggtgtttaccgagacaggtttactctgtgtagccctggctgtcctggaactcacttccgtgacaagctggcttgaactctagaaatcactggcttggctcccaggctaggattaagggcacaatttgttcttgcacgggaaggggccgggacgacgaacctttcagggattgggcagcatggccggggcacagggagtgacccggacacataaatgcacttgtatgtccttctactaggatg

SEQ ID NO: 490357 - DNA, 365 bp, Homo sapiens
ggctccggcagagaaccccatctgggtgtcctcgcttctcaccgcgatctaccttccgcttaggtatgattgtacacagctctcacgtctgtccttctgtaaagggcctcggaaaaaggctctcaccttagatgctctggctgagtggacctgtccacagataagtgtgttcctcggagctgccgtcggttctctacagtgttcagccccttgttgctctgcagccggttatccttggcacctccagattgagacgttcctctccagagctcatgtggaaaggactaaaatgcgctgggacagtgtgacaggtcgtatgggagaccagtctcctcatagatatgtatctctgtgagcgagacacc

SEQ ID NO: 490358 - DNA, 607 bp, Homo sapiens
  misc_feature (357)..(357): n is a, c, g, or t
ccctgtacacgtatcctgaaaactggagggccgttcaagggctctcatcgctgctcagtacagcggggctcaggttcgcgtgctctccgcaccaccccacttccattatgggcaaaacaaccgcaccccgtgaatttctccgcaaaatttcctgccggcgaggtcccagcatttgagggtgatgatggattctgtgtgtttgagagcgaacgcgcattgcctactatgtgagcaatgaggagctgcggggaagtactccagcaggcaggcagcccaggtggtgcagtgggtgagcttggctgtattccgatgatagtgcgccccaggccagtacctgggtgttcccgcaccttgggncatctatgcagcatgaactagaagcaggtccacgtgaggaatgctgaggaggaagtgaggcgaattctgggggctgttcggatgctttgactctgaagcaccgaggacttgttctgggtggggctgaacgagtggacatgtggctggacatcacagtcgtctggcacccatgtatggggctctatagagcacggttctagaagccttcttatcctgctcaggcctttcgccaataccaaccgctggttcc

SEQ ID NO: 490359 - DNA, 354 bp, Homo sapiens
ctaagagctcctgactagggcaccaacttcacctctacccacatagccactacactgatgtgactgctagtactaggtcttactgtctctagtacattgtcaagctagtggtcaactcaagtacccttgcattgggtataccgggtgcctcaaagattctccccttggatctttatatgtctttgacttttttcattattcatatatagagctcaaatgtcacttcttcagaaagatcactttaatagtgaagaagccagttctctatcacacaaacctgctttatgtatacacagtactttccacaatctgaagttactatatttatctttgttttcattagctttttgcctg

SEQ ID NO: 490360 - DNA, 149 bp, Homo sapiens
ggtttaaaaaatgtttaaatcacatgcttctttttctgggctccagccagatctctggggaggagtgggaggtgggaaggcggtcggggtgggtctaaatccccatgtctgtgactgtcccgtgagagtgggctggtagatcggactgc

SEQ ID NO: 490361 - DNA, 281 bp, Homo sapiens
  misc_feature (89)..(89): n is a, c, g, or t
gctagcggactcaacacgatctacatattcacgcatctctgtcaaatctacagctctttggagaatagaaagtcctctaaattatatgnataatctcagacactgagcaaacatctcgaaaagacaaatgaggactcacacttcctgatttcaaaacttactactgtacacagctacagcaatgagaacagtggggtaaagatacataaagataatgcctaataaaaacggacatattaatcaatgggatagaacaccgagtccagagattgcggtgtgtg

SEQ ID NO: 490362 - DNA, 192 bp, Homo sapiens
cccccccccccaaagggttttttttttaggggctttcctttaaaaaggggccggtccaaaaaggaatttgaaaaggggtttaagatttggcaccactatcccacttaaatttttggcttccaaggtaaagatttttaaaggttttatccctttaaaataaagccagaaaaaaaaaaatggtggtttttttta

SEQ ID NO: 490363 - DNA, 169 bp, Homo sapiens
tagttctagatcgcgagcggcgcccttttttttttttagtttaacttttcctttttggctgtctagtcatcctcgtcggtctctgctgctggtatcgactcgtatcctcatgatcttcgttgcccgttgcgagtgatgtcctcatcttcatctcgagcctcttcctcac

SEQ ID NO: 490364 - DNA, 106 bp, Homo sapiens
  misc_feature (6)..(6): n is a, c, g, or t
aagtanaggagagtatttattagacattcggttgtattaaacactaaaaattagtcagagactggaggggataaggataagagaacaggataaggagagggtaccg

SEQ ID NO: 490365 - DNA, 709 bp, Homo sapiens
agtgaaagaggagtcaccattataaagatcatatatctgatatcacacaggtaccgttgaccctaagaaagagatgagtaattgaagtcatcttatctattacaccaagacctcccttatcattgcttgagtcctggcttgtgacctaggaattccgtatgaattccttctaactggaacatttgatgtagtatctgtaacactggcactgaaataaatcaccataccggtttaaataaatctttccatattgtactttatggtgttgggactgaatccttgatagcttaccatacccctatgtcagaggaggtcttacggacaccatagggtatgaatagccttccctcagtctgaaaagattggtctcttttataagacgaatctcatgaatattcacagtcaccgacttgtgcttattctagctactgagagtgcgcaggtgtcgttcatgagaaacgtgaccccatatgtaatcagagctttgccgattgacgttgctggaatgaagtacaggtgactcttcctcggtggtacacattgaatgtactatgtatgttcaagtatccaggcgccatgtcttatatactgaagaaagaaaaagtgaggcccaccttgctcttacaatgtttgcaattgttactgtattgaatacagtataatgactactatggcttcatcttagactggaaacaatatccttttttcc

SEQ ID NO: 490366 - DNA, 444 bp, Homo sapiens
aaacaatgtgtcttcgaacaatctacagtcaaaaagtggaccccgatttctatcatagtctgattctgaagtagtatcattcatgagttatactgcaattgaattgaactttgtctaatatttcttcaagtaagtaattaagaagtcctgcttccttgcatttcttaagaaaaggaacttacacagttgcatctgtatgtctgccatgctcttctttcacttgtcttatgaatgtattacatttcattgtatcgggtggctgtacatgattgcctgagaggggtttcttccttcctctttttcttttcactcctgaaaatttagctaaaaatataaaccatttaaaaattggaatccataaaggaaaagattactctttgactaccttaaatttaccactcatatgccaaaagtttttacaaagtccaaagatatggcaaactt

SEQ ID NO: 490367 - DNA, 138 bp, Homo sapiens
tttttttccccccccccccccccccctttttggttcttccccggaatttggctcccccctaccattttgcccccttggtttttcccccccccgggggaaccccccccaaaaaaaaaaaaagggggttcccctctttta

SEQ ID NO: 490368 - DNA, 365 bp, Homo sapiens
cggtggctcacacctgtaatcccagcactttgggaggctgaggcaggcgcatcacctgaggtcaggagatcgagaccatcctggccaacatggtgaaaccccatctctactaaaaatacaaaacctagctgagcgtggtggcgtgtgcctggagtcccaactactcaagaggctgaggcaggagaatcacttgcccgggaggtggaggttgcagtgggccaagatcagcccactgcactgcagcctggcgacagaaaaaaaagaaaccttgacatctttactacaacttagcaacccgctcaggccccctctgcaacggagagctcttcttcctttttgcttattaaacttctgctccaaactca

SEQ ID NO: 490369 - DNA, 473 bp, Homo sapiens
  misc_feature (375)..(375): n is a, c, g, or t
  misc_feature (380)..(380): n is a, c, g, or t
  misc_feature (395)..(395): n is a, c, g, or t
  misc_feature (397)..(397): n is a, c, g, or t
  misc_feature (399)..(399): n is a, c, g, or t
  misc_feature (401)..(401): n is a, c, g, or t
  misc_feature (404)..(404): n is a, c, g, or t
  misc_feature (426)..(426): n is a, c, g, or t
gtggggctcccgaaaaagcccttgtttgactggggcaagctcaactccccaagctatgggtcctgggtgttggtggagatcctgcgggacttcgggggcacactgtccatcaaggacctcagccagatgaccagtatcccccaaaatgacattatcagtaccctgcaatccctcaaaatggtcaagtactggaagggccagcacgtgatttgtgtcccccccaagctggtggaggagcccctcaaaagtgcccagtataaaaaaccccccatcccagtggactccgtttgcctcaagtgggccccccccaagcccaagcaagtcaagttttccaaaaagtgagcagcctggcccctgctgtgggacctgagcctnctggntcccagcctgtaaanangnanaancctgttttgtcatttttttaanaaagtcagttttgggggccctggactttggaggggaagggggggcca

SEQ ID NO: 490370 - DNA, 794 bp, Homo sapiens
gacgcgtgagttaggccgtaatgccttggctgctctcagcccccaagctggttcccgctgtagcaagacgtccgcggcctctcagtgatgtatgttggtgttcacaggcgaaggtacatcccgttcagacctgtcccagtaaaggaggattccatcatcctgataacgttagggccagtcccagccccgtttacacaacccacatcctcacgtcaaggaccgacgcgtgagacagaacgatggtgtggcgtatgacctggatgaggcccttctagatgcacagtgttcactcgtgacgtatatgctagctcctctgcactgaggcctaatacgctcgatgagcaatgaagcaaggttgcggggtgttcaggtgagcttgtataacagctgcctccggcatgatcaagatctcctgcagaaattgaatcgaatgcagcattgtctgggcaaggctgatcgactcgacaggctttgcatagagaaccatgttcaccagtaaagcccctgtggaagaagccttgctttatgctaagtttcgatatttgaatgccgggctcgtggcgcgggtacattttagtcctatccagcctgtggtggctggtggttaatcggtcaaacacctttgcactatgtgaaatacttaatcaattcatcaaggatggggaaatggtgctttctggatggaggttgtgagtctacctgtatgtgaagtgacatcacacgtacgtggccggttgaatggctggttcaccgcactgcaggcagaactctatgaagcggtctagaggtcccgg

SEQ ID NO: 490371 - DNA, 2741 bp, Homo sapiens
  misc_feature (166)..(166): n is a, c, g, or t
  misc_feature (188)..(188): n is a, c, g, or t
  misc_feature (235)..(235): n is a, c, g, or t
  misc_feature (248)..(248): n is a, c, g, or t
  misc_feature (305)..(305): n is a, c, g, or t
  misc_feature (1326)..(1326): n is a, c, g, or t
gaattcgaattcctttgtttccactgggacggaatcggagctctggaggctgggctggccaagcgccccgaaggcccgatgcctgacggctcatgcggcctccttgtttgcagggcctgggcaaaaatttacactgagtcccactcttcgctccagggcccggcangaagatgggctcccgtggacanggactcttgctggcgtactgcctgctccttgcctttgcctctggccnggtcctgagtcgngtgccccatgtccagggggaacagcaggagtgggaggggactgaggagctgccgtcncctccggaccatgccgagagggctgaagaacaacatgaaaaatacaggcccagtcaggaccaggggctccctgcttcccggtgcttgcgctgctgtgaccccggtacctccatgtacccggcgaccgccgtgccccagatcaacatcactatcttgaaaggggagaagggtgaccgcggagatcgaggcctccaagggaaatatggcaaaacaggctcagcaggggccaggggccacactggacccaaagggcagaagggctccatgggggcccctggggagcggtgcaagagccactacgccgccttttcggtgggccggaagaagcccatgcacagcaaccactactaccagacggtgatcttcgacacggagttcgtgaacctctacgaccacttcaacatgttcaccggcaagttctactgctacgtgcccggcctctacttcttcagcctcaacgtgcacacctggaaccagaaggagacctacctgcacatcatgaagaacgaggaggaggtggtgatcttgttcgcgcaggtgggcgaccgcagcatcatgcaaagccagagcctgatgctggagctgcgagagcaggaccaggtgtgggtacgcctctacaagggcgaacgtgagaacgccatcttcagcgaggagctggacacctacatcaccttcagtggctacctggtcaagcacgccaccgagccctagctggccggccacctcctttcctctcgccaccttccacccctgcgctgtgctgaccccagggctcagcaccaggctgaccccaccgcctcttccccgatccctggactccgactccctggctttggcattcagtgagacgccctgcacacacagaaagccaaagcgatcggtgctcccagatcccgcagcctctggagagagctgacggcagatgaaatcaccagggcggggcacccgcgagaaccctctgggaccttccgcggccctctctgcacacatcctcaagtgaccccgcacggcgagacgcggntggcggcagggcgtcccagggtgcggcacccgcggctccagtccttggaaataattaggcaaattctaaaggtctcaaaaggagcaaagtaaaccgtggaggacaaagaaaagggttgttatttttgtctttccagccagcctgctggctcccaagagagaggccttttcagttgagactctgcttaagagaagatccaaagttaaagctctggggtcaggggaggggccgggggcaggaaactacctctggcttaattcttttaagccacgtaggaactttcttgagggataggtggaccctgacatccctgtggccttgcccaagggctctgctggtctttctgagtcacagctgcgaggtgatgggggctggggccccaggcgtcagcctcccagagggacagctgagccccctgccttggctccaggttggtagaagcagccgaagggctcctgacagtggccagggacccctgggtcccccaggcctgcagatgtttctatgaggggcagagctcctggtacatccatgtgtggctctgctccacccctgtgccaccccagagccctggggggtggtctccatgcctgccaccctggcatcggctttctgtgccgcctcccacacaaatcagccccagaaggccccggggctttggcttctgttttttataaaacacctcaagcagcactgcagtctcccatctcctcgtgggctaagcatcaccgcttccacgtgtgttgtgttggttggcagcaaggctgatccagaccccttctgcccccactgccctcatccaggcctctgaccagtagcctgagaggggctttttctaggcttcagagcaggggagagctggaaggggctagaaagctcccgcttgtctgtttctcaggctcctgtgagcctcagtcctgagaccagagtcaagaggaagtacacatcccaatcacccgtgtcaggattcactctcaggagctgggtggcaggagaggcaatagcccctgtggcaattgcaggaccagctggagcagggttgcggtgtctccgcggtgctctcgccctgcccatggccaccccagactctgatctccaggaaccccatagcccctctccacctcaccccatgttgatgcccagggtcactcttgctacccgctgggcccccaaacccccgctgcctctcttccttccccccatcccccacctggttttgactaatcctgcttccctctctgggcctggctgccgggatctggggtccctaagtccctctctttaaagaacttctgcgggtcagactctgaagccgagttgctgtgggcgtgcccggaagcagagcgccacactcgctgcttaagctcccccagctctttccagaaaacattaaactcagaattgtgttttcagca

SEQ ID NO: 490372 - DNA, 2947 bp, Homo sapiens
  misc_feature (372)..(372): n is a, c, g, or t
  misc_feature (394)..(394): n is a, c, g, or t
  misc_feature (441)..(441): n is a, c, g, or t
  misc_feature (454)..(454): n is a, c, g, or t
  misc_feature (511)..(511): n is a, c, g, or t
  misc_feature (1532)..(1532): n is a, c, g, or t
gtggattgcatgtgtgttgggtgcatgtgaatgtgtgggttgcatgtgagtgtatgtgactgtgtgtgcatgtgtggattgcatgtgtgctgagtgtgtgcatgtgtgggggttgcatgtatgtgaatgtgtgtgcatgtgcgtatgtgcacgtgagtgcgtcgtgagtgcgtgtatgcatgcatgggtgtgtgagagtgattgtcctcccagaagctgtgtaactgcagcatttcccagtggcgtgaggctggggaagcacctccgatttccaggctgtttctctccccaattttcaggctgtttctctgtgcggctccttcctaactcggtgccttccctgtgtgtttctttcccaccagggcccggcangaagatgggctcccgtggacanggactcttgctggcgtactgcctgctccttgcctttgcctctggccnggtcctgagtcgngtgccccatgtccagggggaacagcaggagtgggaggggactgaggagctgccgtcncctccggaccatgccgagagggctgaagaacaacatgaaaaatacaggcccagtcaggaccaggggctccctgcttcccggtgcttgcgctgctgtgaccccggtacctccatgtacccggcgaccgccgtgccccagatcaacatcactatcttgaaaggggagaagggtgaccgcggagatcgaggcctccaagggaaatatggcaaaacaggctcagcaggggccaggggccacactggacccaaagggcagaagggctccatgggggcccctggggagcggtgcaagagccactacgccgccttttcggtgggccggaagaagcccatgcacagcaaccactactaccagacggtgatcttcgacacggagttcgtgaacctctacgaccacttcaacatgttcaccggcaagttctactgctacgtgcccggcctctacttcttcagcctcaacgtgcacacctggaaccagaaggagacctacctgcacatcatgaagaacgaggaggaggtggtgatcttgttcgcgcaggtgggcgaccgcagcatcatgcaaagccagagcctgatgctggagctgcgagagcaggaccaggtgtgggtacgcctctacaagggcgaacgtgagaacgccatcttcagcgaggagctggacacctacatcaccttcagtggctacctggtcaagcacgccaccgagccctagctggccggccacctcctttcctctcgccaccttccacccctgcgctgtgctgaccccagggctcagcaccaggctgaccccaccgcctcttccccgatccctggactccgactccctggctttggcattcagtgagacgccctgcacacacagaaagccaaagcgatcggtgctcccagatcccgcagcctctggagagagctgacggcagatgaaatcaccagggcggggcacccgcgagaaccctctgggaccttccgcggccctctctgcacacatcctcaagtgaccccgcacggcgagacgcggntggcggcagggcgtcccagggtgcggcacccgcggctccagtccttggaaataattaggcaaattctaaaggtctcaaaaggagcaaagtaaaccgtggaggacaaagaaaagggttgttatttttgtctttccagccagcctgctggctcccaagagagaggccttttcagttgagactctgcttaagagaagatccaaagttaaagctctggggtcaggggaggggccgggggcaggaaactacctctggcttaattcttttaagccacgtaggaactttcttgagggataggtggaccctgacatccctgtggccttgcccaagggctctgctggtctttctgagtcacagctgcgaggtgatgggggctggggccccaggcgtcagcctcccagagggacagctgagccccctgccttggctccaggttggtagaagcagccgaagggctcctgacagtggccagggacccctgggtcccccaggcctgcagatgtttctatgaggggcagagctcctggtacatccatgtgtggctctgctccacccctgtgccaccccagagccctggggggtggtctccatgcctgccaccctggcatcggctttctgtgccgcctcccacacaaatcagccccagaaggccccggggctttggcttctgttttttataaaacacctcaagcagcactgcagtctcccatctcctcgtgggctaagcatcaccgcttccacgtgtgttgtgttggttggcagcaaggctgatccagaccccttctgcccccactgccctcatccaggcctctgaccagtagcctgagaggggctttttctaggcttcagagcaggggagagctggaaggggctagaaagctcccgcttgtctgtttctcaggctcctgtgagcctcagtcctgagaccagagtcaagaggaagtacacatcccaatcacccgtgtcaggattcactctcaggagctgggtggcaggagaggcaatagcccctgtggcaattgcaggaccagctggagcagggttgcggtgtctccgcggtgctctcgccctgcccatggccaccccagactctgatctccaggaaccccatagcccctctccacctcaccccatgttgatgcccagggtcactcttgctacccgctgggcccccaaacccccgctgcctctcttccttccccccatcccccacctggttttgactaatcctgcttccctctctgggcctggctgccgggatctggggtccctaagtccctctctttaaagaacttctgcgggtcagactctgaagccgagttgctgtgggcgtgcccggaagcagagcgccacactcgctgcttaagctcccccagctctttccagaaaacattaaactcagaattgtgttttcagca

SEQ ID NO: 490373 - DNA, 351 bp, Homo sapiens
gctggacaccctcgtggagtttcctatccgggacctggacttctctgagatgtgcatccagccacagaatgagttgatatcaggtagcttgtacaaatacgacctcattcactggtatgcaaacatgaggggagcatgcgcgatggacactacacaacattcttcctgcgaaaggaacagtggcgcttagtcggtcactagctattgatgacaacagcgtgtcctcgtgctcaatgagaattcagacttgagttcaagtcagcaatagtcgtcgtgacctacgtctgacggcagagcgcttggtgtcccggcagctagttagcgccacagcataactgcctggtcacgacc

SEQ ID NO: 490374 - DNA, 146 bp, Homo sapiens
attcgcggccgcgtcgacctgctttatggaactggaataacgctactggtcttatgaatctggtgtgcagaattgcgcacgttatggactccacagacagagaatgtagtagtagagaatttgccaactaactctgactctactta

SEQ ID NO: 490375 - DNA, 324 bp, Homo sapiens
gttgttgggggagccccccttatttaaagggggggaacccccgggcccccccccccccccttttgggttttttttttccccgggttttcgggcccccccgggggggggttttttttttaaacccggggccccccccaaatttaaaggggggggcggggtttttttttttttttgccccccaaaatgggggggggtggggggggggccccggcccctttttggggaggggccccctttcccctttccgggggttttttttttttttttgtccccccccccaaaaaatttttttttgggcccccttttttaggtccccttttttta

SEQ ID NO: 490376 - DNA, 333 bp, Homo sapiens
  misc_feature (23)..(23): n is a, c, g, or t
  misc_feature (107)..(107): n is a, c, g, or t
  misc_feature (117)..(117): n is a, c, g, or t
  misc_feature (121)..(121): n is a, c, g, or t
  misc_feature (189)..(189): n is a, c, g, or t
  misc_feature (214)..(214): n is a, c, g, or t
  misc_feature (226)..(226): n is a, c, g, or t
  misc_feature (248)..(248): n is a, c, g, or t
  misc_feature (273)..(273): n is a, c, g, or t
  misc_feature (312)..(312): n is a, c, g, or t
  misc_feature (316)..(316): n is a, c, g, or t
agttatgatggccccagctattnttggtgcagctccacagggtattctccgtgccccgacactgaacattatccagccagatttgcccagtgccagttcccattttntacagggccnttcntttggagtaacccagcatgcggcagaagaaaatggcatcagaattttgccactcgtcatcgcaaattntcccccaggtaccactgtagtaaanttcagcccggcntcggttattactgccgaaaatnctgagggaaattgagttttcacctntttgacctttttttccctttattctttgctccccagaanatcntttaattccttggtttt

SEQ ID NO: 490377 - DNA, 955 bp, Homo sapiens
  misc_feature (23)..(23): n is a, c, g, or t
  misc_feature (70)..(70): n is a, c, g, or t
  misc_feature (137)..(137): n is a, c, g, or t
  misc_feature (200)..(200): n is a, c, g, or t
  misc_feature (234)..(234): n is a, c, g, or t
  misc_feature (278)..(278): n is a, c, g, or t
  misc_feature (280)..(280): n is a, c, g, or t
  misc_feature (331)..(331): n is a, c, g, or t
  misc_feature (340)..(340): n is a, c, g, or t
  misc_feature (344)..(344): n is a, c, g, or t
  misc_feature (352)..(352): n is a, c, g, or t
  misc_feature (380)..(380): n is a, c, g, or t
  misc_feature (382)..(382): n is a, c, g, or t
  misc_feature (384)..(384): n is a, c, g, or t
  misc_feature (394)..(394): n is a, c, g, or t
  misc_feature (407)..(407): n is a, c, g, or t
  misc_feature (459)..(459): n is a, c, g, or t
  misc_feature (462)..(462): n is a, c, g, or t
  misc_feature (480)..(480): n is a, c, g, or t
  misc_feature (558)..(558): n is a, c, g, or t
  misc_feature (571)..(571): n is a, c, g, or t
  misc_feature (620)..(620): n is a, c, g, or t
  misc_feature (623)..(623): n is a, c, g, or t
  misc_feature (628)..(628): n is a, c, g, or t
  misc_feature (644)..(644): n is a, c, g, or t
  misc_feature (647)..(647): n is a, c, g, or t
  misc_feature (693)..(693): n is a, c, g, or t
  misc_feature (713)..(713): n is a, c, g, or t
  misc_feature (743)..(743): n is a, c, g, or t
  misc_feature (752)..(752): n is a, c, g, or t
  misc_feature (755)..(755): n is a, c, g, or t
  misc_feature (784)..(784): n is a, c, g, or t
  misc_feature (786)..(786): n is a, c, g, or t
  misc_feature (789)..(789): n is a, c, g, or t
  misc_feature (804)..(804): n is a, c, g, or t
  misc_feature (807)..(807): n is a, c, g, or t
  misc_feature (892)..(892): n is a, c, g, or t
  misc_feature (902)..(902): n is a, c, g, or t
aactgaggtgatgggttggtctncagcggatgccttggtggatgaggctgcttttggctgcactggcctnctcccgctcccgccgccgcgcagggtccaactcaaaacagcgccatagcctcagggtctcatctgcngctgcggatgccactgtggccccatctgggctcatggtcagactcaggacccgggatgtgtgncctttgagttcagccaccttggccatggttgggnacttccaaataactagctggttctgtgcaaagccatggcctganangagccccttgtaatggggagaccagaggatggggcacacctggggatgggnatccacggnactnagacaggncccagagcacacattccagaggcgaatntntngatcactggngccccctcctgtngccaggacattggactgccagggacaccatgctacggccttgacagcccctngangctgggtgaatgtctgcngaggaacccagccaccctctccaggagcactaggccacacattgaccaagttatcattaccaccactggccaaatgtngtccatctggggnccagcgcacccacacacttcctggctgtggccactcagtgtggccacanggngttcngctacccgaacatcanggnggtggatgtggccagaacgtgaaccactggacaggatatagctgtnccagcttagggagcccactngggcagagtgactggtcatatttcgaagcngtttctgcngcngcacatcccatagctgcacctcagcactncnggngcccacagccaagtngtngccctctttgatccagggcacaaaggatatatattccccagggtgctccattggcaaaagcggcgggatgttaccagaacttgcnctccacaggnacacactgtggttcagttccagggccagttcattcccagaactccaattcaca

SEQ ID NO: 490378 - DNA, 342 bp, Homo sapiens
agtaggtccttatcattcactggatgaatgaatatccaagttacggtgtatttagtgagctgggattggaacaatacaattgatcaaatgcattactgagtatgtgccccatctaagtttgcagctttagattgtggtcagaggctgttacaagatcttatatattctatgatgggccatatgcatctaaagcatggtggttcagtttatgaatatataaaaggacaattttttgattaatgtcagctttgagtttagaatgtatcccagacatcttagttgcccttaattatttttggagatatttttctcagccattaataaagcaatccgaatgatgca

SEQ ID NO: 490379 - DNA, 130 bp, Homo sapiens
tcaaaactgctcattcaaaccaaagttcaactctgtgagatgaatgcccacatcacaaagaagtttctcagagtacttctgtgtagtttctatttgaggatagttccttttccaccacagaccagaaagg

SEQ ID NO: 490380 - DNA, 251 bp, Homo sapiens
  misc_feature (43)..(43): n is a, c, g, or t
  misc_feature (47)..(47): n is a, c, g, or t
  misc_feature (63)..(63): n is a, c, g, or t
cgagtttaagcgggaggttgggaaaaaatattttccaaaccanatanctaatgatatcttagnagggtttagtgagggggttttagtagggcttttttttccccccttcccaattttaaaagggggtaaatagggggggaaaaaaaatgtccggtcctgcgggggggggccctagaattggggggccaagaaatgaagccaccaaatttccgcccatttgggtccccagggttggtaataatttttatttt

SEQ ID NO: 490381 - DNA, 147 bp, Homo sapiens
gcctctacgacggactccgccacgctcttgccacggtttggtgtaccacggccacaagacttccaccgggtggtcctgacgaccggggtgccctcaaacactgggtgactgggggtgacacggaccgacacgcaagttctgggcaac

SEQ ID NO: 490382 - DNA, 3734 bp, Homo sapiens
gcacgaggatttttgaataccttttctgaatgtcttgaatacatgttgggaagaatcggtgtcttaacagtctccagtgtccacgcgttgactgccgtgtgtgactccagtcggcgtctcaacagtctccagtgtccacgcgttgactgccgtgtgtgactccagtcggcgtctcagcagtctccagtgtccacgcgttgactgccgtgtgtgactccagtcggcgtctcagcagtctccggtgtccacgcgttgactgccgtgtgtgactccagtcggcgtctcaacagtctccggtgtccacgcgttgactgccgtgtgtgactccagtcggcgtctcagcagtctccggtgtccacgcgttgactgccgtgtgtgactccagtcggcgtctcagcagtctccggtgtccacgcgttgactgccgtgtgtgactccagtcggcgtctcagcagtctccggtgtccacgcgttgactgccgtgtgtgactccagtcggcgtctcagcagtctccggtgtccacgcgttgactgccgtgtgtgactccagtcggcgtctcagcagtctccggtgtccacgcgttgactgccgtgtgtgactccagtcggcgtctcagcagtctccggtgtccacgcgttgactgccgtgtgtgactccagtcggcgtctcagcagtctccggtgtccacgcgttgactgccgtgtgtgactccagtcggcgtctcagcagtctccggtgtccacgcgttgactgccgtgtgtgactccagtcggcgtctcagcagtctccggtgtccacgcgttgactgccgtgtgtgactccagtcggcgtctcagcagtctccggtgtccacgcgttgactgccgtgtgtgactccagtcggcgtctcaatagtctccggtgtccatgcgttgactgccatgtatgactccaggtattgagttcatcttcaacttctcccaacaatgaactggagttttctgtgcatgtgtctggcatgttttcctttagatctagtcctaggtgttcgatatgctattgaggactgtgtatttttatttcatttgtcacctgtgcgtggtgctttaatcctgtgccctaaactcccgccttggccatggcggtgtttctgtggactcgtggggtttccgtgtgcacacgcgtgtcctctgtctgacagtggctttgcttccccttgtcagtctgtgcctcggcttctcactgcactggcgaggtgagccggcgcttgctaatcttattcccagtctcggtgaacatgggctcagtctctcccggctcagtgttgggtttgcactggtgcacttacaggcggaagagcttcctcatttgctgagggcttttcctgaatccgtgttgaatgtggtcagctgcctttcctgcacctagtgagatgctcatgaggtcacttccttaccgcattactgtagtgaattacgctgactttcatatgccaagatgacctggcatttccaggtaagtccctgtggccatggtgcattggccttttctctgcatggccagatgagatttgctcataccgggctaaggacctcctgtgtaggaatgctcttgagggacactgggcttggatgttcattgtcttgtcatgtgatgtgtctgtcatggtttgatattgcattaagtgggcctcctgaaacaagttctgccatagtttgtataggattggcattatttgtttcatagagatgtgatgggtgaggccatctatgcctgccattttctttttgcttaggtttttcattaagaacttgatttttaaaaatagacatgaggcctggcatggtggctcacgcttgtaatcccagcactttgggaggccaacgtggatggatcacctgagggcaggagtttgagaccagcctggtcaacatggtgaaaccccgtctccattaaatatatagaaattagcagggtgtggtggtgcatgcctgtagtcccagctgctctggaggctgaggcaggagaatcgcttggactcaggaggtggaggttgcagtgagctgagatcacaccactgcactccagcctgggcaacagagcgaggctctgtctcaaaaaaaaagacatgaggcttttggattttctgtttcttcctttgtcatttttttaaagataggtttgtcgcagaatttcatctaagttatcaaaacaatttacataaatcattcacagtatcctctgtgcagtgatgtccattctcattcctgctctgggccatttgtgttttcttttccccctgatcagactagctaagagtttatcatttttacagatattttccccaaagaaacctacttttgggtccattgattttttttttctattgttttctttttcattgacttttgctcttttcttatgaatttcctttcttctacctattttgtgttcaatttgctgtccttgttttaggttcttttgatagaggcttagatcattgatgaagaatatgaaagaatgggataatacagttaaaaacttggtctacttatgcccattagagaaaacattcttaagcacgcatggaatcttttaaaaatggacaaggtactaggacccaaagcaaatgtcagtaattcgcagatgataatgtaatgtataaatatatgatatgtaggtaaataatacaaatcacattctttggccagagtgcaattgaggaggaaatcagtaacaaaaagacaattaaatccatttgattcttttgttttcgttttgtagtaacttgcacttccctggtgccagaggcatgacacctttttgtctgctcttggccatttgggtggcgtctttgggaagggcctacttaattcttttgcctatttaaaaaactgggtcttggaaatcttgtctttttttttgagtcaggatctttctcgcacaggcttggagtgcagtggtgcgatcatagctcactgcaacctcaaactcctgggctcaagcgagcctcccacctcggtcttctgagtggctgggactgcaggcatgcatcactatgctctgctaatttaaagaaaaggttttttttatagagactgggtctcgctgtgttgcccgggctggtctcggagtcctggtctcaagtgattcacctgcctccacctcgcggagtgccaggattacaggtggcgggagccaccacacccagcctggtcttagcgttattcccaggtctgggtgtgagtccttcctcagatatgtgttgtgaataatttccgatcctctggcttgctattttactttcttaatggttatcttttggaaagcaaaggtttccagtttgatgaaatctaatttttattttttatttttccgttctagtggtctttctattttctcatcaaattgagactttggggaaactacacagcagcaaaccaggatatatcctcttaaaaacagctcgagccggccgggtgcggtggctcatgcctggaatcccagcactttgggaggtggaggtgggtggatcacgtgaggtcaggagtttgagaccagcctggccaacatggtgaaaccccatctctactaaaaataaaaaattagccaggcatggtggcaggcacctgtaatcccagctacttgggaggctgaggcaggagaatggcttgaacctgggaggcagaggttgcagtgagccgagatcgcgccattgcactccggcctggggacaagagcaagacttcgcctc

SEQ ID NO: 490383 - DNA, 640 bp, Homo sapiens
ggtcatccctccttatcatctccactagcttccaacttttcttctgcagcttcctcacccctctctgcctttacagaattgaagagttagggcctgctctagattaggttttggcataagggaatgttgtgactggtctgattgtctacccagaccactcaaactttctccatatcagcaataaggctgtttattttcttatcattcatgtgtccactggagtagcacttttaatttccttcaaaaacttttcctttgctttcatgatttggttgtttgctgcgagagatctagcttgcgacccatttcagcttctgacgtgccttcctaactaagcttcaacatttccagttttggatataaagtgagagatgtgtaactcttcctttcacttgaacacttagaagctattatagggttattaattggcctatcatatggtttgaatatgttttccctccaaatctcatgttgaaatgtggtctccagtgttgatggtggggcctagtgagaggtgtctggatcatgggggtgtacccctcatgaatggcttggtgccatccccttggtgataagtgagctcttgctctgagttcacacgagtaaaactccctgtagcctccctagaagtccagcagat

SEQ ID NO: 490384 - DNA, 132 bp, Homo sapiens
ggcctgtcgtcgctggcggtcttaccggtgccgatggcccagaccggttcataggcgatgatcgtgtgcgtaaggtcgtctggcgacaatccctgtaaccctgcttcttacctgcgactctagcacctgaga

SEQ ID NO: 490385 - DNA, 368 bp, Homo sapiens
gacgacatgcacacacagtgcaggctcacatgatgagcacaggtacacacacacccacatgcacacacacaatgagcacgggtacacacatacagagcacccacatgcacacacatgcaggtacacacgcatgagcacgggtacacacaaacacccacatgcacacacatagatgagcacgggtacacacatgcacacccacacgcacacacatgcacggacacacagataagcaagagtacacacacaaccacatgctcatctgtgtgtgtgcatgtatgtgtgtgtgtgtgtaaccgtgctcgtctgtgtacctgcacgtgtgtgcatatggatgtgtgtgtgtacccgtgccaatcaagggagat

SEQ ID NO: 490386 - DNA, 553 bp, Homo sapiens
aacaatggctggtcaggctggtgtaattggccgaggcgcctttcgtgggcggcagccagtccgctccacgctcgcagtctgtggtgccctccgggaggctggtggagtgtcaccgcggggagaggggctgggctgcagcattgcatgcctccttactgtgctccctcgtgaggcttgcctccgtgttctccgtgtactggagccggcggctgcgtgcggcagcctggcagctttgcagcggtgtgttctaggtcagtggcttcaaagactccagttggattcattgtgactgggcaacatgtgggaatccaatggcaaaaaatctcatgaaacatggctatccacttattatttattgattgtgttccctgattgcctgcaaagagtttcaagatgcaggtgaacaggtagtatcttccccagcagatgttgctgaaaaagctgacagaattattacaatgcttgcccaccgagtatcaattgccaataggcaaatggccttttaattttttcccccggggaagggccaaaaatttgggggggaaatttttcc

SEQ ID NO: 490387 - DNA, 348 bp, Homo sapiens
ggtcttcaagcctgacggaccctcaagattccggaaagcgtacaagccagagcaacccctggtgcgactgagagcgtcctacatcgggaggccgctggagtgctcaaaaatgagaatggggaccctcacgacaatggactgttcgcagttgttgcaagactggcttgggagtccaaagagcatcactgctcccgactgggcaggattcggacccatccacctcaacgagatccagtgcacaggcaatgagaagtccattatagactgcaagttcaatgccgagtctcagggctgcaaccacgaggaggatgctggtgtgagatgcaacacccctgccatgggcttgca

SEQ ID NO: 490388 - DNA, 93 bp, Homo sapiens
gctttgcacgtaccccgtttaaaaacttcccaggcacccaacattgaaaataaagaacccgcggttcccttgggcccctgcgaaaaaaaaaaa

SEQ ID NO: 490389 - DNA, 83 bp, Homo sapiens
  misc_feature (25)..(25): n is a, c, g, or t
tatcgcttttgtggaagtgcatatnaaatagagtatttatacaatatatgttactagaaataaaagaacacttttggaaaaaa

SEQ ID NO: 490390 - DNA, 253 bp, Homo sapiens
  misc_feature (201)..(201): n is a, c, g, or t
ctcgaggatccccctcaggaacgagctgctcactataaggcctggggctcaaggagctgtatgttccggcagagggacagagctaggctgggaggagcccaggtcctgcaccacccactatgtaaacaccaggctggtgccctgcagctgtgccagttggggcacagacgttttattaacattgaaacaagaagctaagtnacaaagaggctgggcccagcctctttgttacttaggtgcttgtcactttgta

SEQ ID NO: 490391 - DNA, 218 bp, Homo sapiens
attcgagaggatcccgttatccagggctttggaagctcagacgttacgtcattacacaggcgtactcctcaagagcaggcaccactgagcatctggcatccgatataactccttcttatggggattgccctgttccttgcaggatgtttagcaaatcatccctagacctatcctcactagatctcagcaatagctgccaccagtcgtgactagcaaaa

SEQ ID NO: 490392 - DNA, 83 bp, Homo sapiens
  misc_feature (30)..(30): n is a, c, g, or t
  misc_feature (69)..(69): n is a, c, g, or t
atgccaactcttggatgtcccagagtgcanccaatgcctttgtgtggtagtactaaattttaattgcanctgagaaaacctgg

SEQ ID NO: 490393 - DNA, 221 bp, Homo sapiens
gttcaccctgaattgaaagcacttgcaatgggttcccagtcaatggttataagaacactaggaggaattctagctccaatatatttgggggctctgattgataaaacatgtatgaagtggtccaccaacagttgtggagcacaaggagcttgtaggatatataattccgtattttttggaagggtctacttgggcttatctatagctttaagattcccagc

SEQ ID NO: 490394 - DNA, 267 bp, Homo sapiens
  misc_feature (206)..(206): n is a, c, g, or t
  misc_feature (217)..(217): n is a, c, g, or t
gaggtgactctaagaggatcccctgctgctccctcttcaagctattaatggtctcatgcaaattcaggacagcatgaaacctgtgttgaaaattcaggctgtgatgtcagcaagctcattctgtgcagactccagtcagcgttattggttccaacagatttctggttggttcttcttttatcttatagggagggagtttcagcatntcttcagcatntcagccaagtgttttttttttttttttttttttttttttttttttttttt

SEQ ID NO: 490395 - DNA, 402 bp, Homo sapiens
tagctcgcttttggctgcacaatgaacttctgtgcatggaaaagatgttcttcagtagcacagaccagttcattcagtaccttcttcagctgctcaggatcgctgttaccaggtggggcacagagctatgcatagtccttgattatgggctctgtcccgctggtgcgcatggtgtccacgcctccattagcacaggtgatggtgatcatatggctgctttgactagtggcaagaattgaatcggacagtcgaggtgtgggttccagcactctgtttccccagccttcttggtaactgatgctcccgcaagtgtgagaactcctcacagggagagaatgatggatcctcagatataaaacccatgttctccctggaccgcctccaattcagctctgtgtccac

SEQ ID NO: 490396 - DNA, 238 bp, Homo sapiens
gggctttctagaggatcccgtcgtcgatggcctggtactgctcagcggctgcccatctcgatgagcagcttcactccgtccaccgcaaatgcttctaagacggactcagcagatgcgtagacttttgctgcagtgggttaatgtgagaatagaatattggccccgtggcatagtgcacacactctcatgctaagcctcagcgaaagtggaataaagccttcgaaaaagaaattgtcct

SEQ ID NO: 490397 - DNA, 2275 bp, Homo sapiens
  misc_feature (546)..(546): n is a, c, g, or t
  misc_feature (690)..(691): n is a, c, g, or t
cgtggtgaccaaggaccagcccctgagcatgatcttcagctactgttcgcacggcgacctccacgaattcctggtcatgcgctcgccgcactcggacgtgggcagcaccgatgatgaccgcacggtgaagtccgccctggagccccccgacttcgtgcaccttgtggcacagatcgcggcggggatggagtacctatccagccaccacgtggttcacaaggacctggccacccgcaatgtgctagtgtacgacaagctgaacgtgaagatctcagacttgggcctcttccgagaggtgtatgccgccgattactacaagctgctggggaactcgctgctgcctatccgctggatggccccagaggccatcatgtacggcaagttctccatcgactcagacatctggtcctacggtgtggtcctgtgggaggtcttcagctacggcctgcagccctactgcaggtactccaaccaggatgtggtggagatgatccggaaccggcaggtgctgccttgccccgatgactgtcccgcctgggtgtatgncctcatgatcgagtgctggaacgagttccccagccggcggccccgttcaaggacatccacagccggctccgagcctggggcaacctttccaactacaacagctcggcgcagacctcggggccagcaacaccacgcagaccagcnncctgagcaccagcccagtgagcaatgtgagcaacgcccgctacgtggggcccaagcagaaggccccgcccttcccacagccccagttcatccccatgaagggccagatcagacccatggtgcccccgccgcagctctacgtccccgtcaacggctaccagccggtgccggcctatggggcctacctgcccaacttctacccggtgcagatcccaatgcagatggccccgcagcaggtgcctcctcagatggtccccaagcccagctcacaccacagtggcagtggctccaccagcacaggctacgtcaccacggccccctccaacacatccatggcagacagggcagccctgctctcagagggcgctgatgacacacagaacgccccagaagatggggcccagagcaccgtgcaggaagcagaggaggaggaggaaggctctgtcccagagactgagctgctgggggactgtgacactctgcaggtggacgaggcccaagtccagctggaagcttgagtggcaccagggcccggggttcggggatagaagccccgccgagaccccacagggacctcagtcacctttgagaagacaccatactcagcaatcacaagagcccgccggccagtgggcttgtttgcagactgggtgaggtggagccctgctcctctctgtcctctgacacagctgccctgcctaggagcacccaagccaggcagggggtctggcagcacggcgtcctggggagcaggacacatggtcatccccagggctgtatacattgattctggtggtagactggtagtgagcagcaaatgcctttcaagaaaataggtggcagcttcactccatgtcatatatggagtgaatatttcaaaacgttgggaataagggcctgcaaaaggcagcgaggaggcacctcgggtcttgaggttcctgacaaccgatctggtctgttggtttgaggatgaaggggctccatttctgctgcctccctgctgagaatattctccctttagcagccaaagattcgctggaacggaggctgccctctgctgcctgtctggggtcggaagacaaggggcttctgaaatgggagttcctgagatacaacaaaatgtgtgccttcaaagaaactgacagctttgtatttggtgaaatggttttaattatactccatgtgtattttgcccactttttttgggaattcaagggaaagtgtttcttgggtttggaatgttcagaggaagcagtattgtacagaacacggtattgttatttttgttaagaatcatgtacagagcttaaatgtaatttatatgtttttaatatgccattttcattgaagtattttggtcttaagatgactttagtaatttaactgtttatgttacccacgttgggatccagttggtcttggtttgcttctctctgtaccacgtgcacatgaggtccattcattttacagcccctgttacacacagacccacaggcagccgtctgtgccccgcacacattgttggtcctatttgtaaatcccacacccggtgtatccaataaagtgaaacaaagcaaaaaaaaaa

SEQ ID NO: 490398 - DNA, 559 bp, Homo sapiens
  misc_feature (64)..(64): n is a, c, g, or t
  misc_feature (69)..(69): n is a, c, g, or t
  misc_feature (218)..(218): n is a, c, g, or t
  misc_feature (278)..(278): n is a, c, g, or t
  misc_feature (482)..(482): n is a, c, g, or t
aagtgttcagaggatcccaatcagttaacaagctagtatatgttaggatgttagcatctgtgtntacanggatattgacatatagttttcgtgttgtgtgtgttctgccggtttggtatcagagtagtgatgatctgtaggatgaattagagagaattctgtccttttcaatttttgaagtagtttcaagacaattggtattagttctttttacgttnggtagaatttggctgtgtatccatctggtcctgggcttttctttctcaggaggctttttnattactgatataatcttgctatgcattattggtctgttcagggtttttctttctttccaattcaatcttgataggttgtatgtttttaggaatttatttattttctctaggtgtttcagtttgtcagcatgtagttgtttataatagtctctaatgattctttgcatttctgtagtatcagttgtaatgtcttctttgtttttnctgattttatttgggggcttctctctttttatttttttatttttaacctgggaaagtctaagctagcagtatatcag

SEQ ID NO: 490399 - DNA, 111 bp, Homo sapiens
ttgaggtaaatccaccaagaaagcctctcttctcccgtcaatggctctgtgagcgaatcacaaccccccgagagacaaggtagagccgagagacaaggtagggcctgagag

SEQ ID NO: 490400 - DNA, 491 bp, Homo sapiens
tgcaggattatagcataatctctgtccctttacccactagatgcgagtatcatcctacatccggtataaacaactggagtggtctctatacactgctctgtgcgcggagggcaaattgcccctggtgaagaacaagggctcttaaggaataggaccccctcaatccagatgaggagtataatgataatgacaacatctatagatctactgaatgcgtggcatatggcagcatgttctaagcagtctacgtgtgttaaatcatttagcccccagaataaccatctgaaatgggtggtgtaccaccttcatcttagaggaggaaatagacacagtgagattaagcacctcatgtgaatgaacaaaccaaagaatggcttcctgcaaaaactgagatccaacactatgtatctgaaccactattctttttttagagatggcgtctctctgtggcccaggctggagtgcagtgttgcaatcttggctcactgcaa

SEQ ID NO: 490401 - DNA, 630 bp, Homo sapiens
gggcagacccacgcgtcctgagagaatctggtgaacttgagtagaccctggagctccaggaaaatggctatgtgccaggttatgtctagccagttcacttagtggaacagcagctagccactcagtgctgtaattcccacctagaggagagtttcacatccaccgaatgaatcttccgaagaaaatgtcaactatataagggtcagacagaggcacagtaccaactgatagctgcacataccagatgcagctagtgatagcagctctcgctagtgggatatggataagtcgcagcagcaaaccaagcctggcggccggtgcagctatgtaggcacgagtcctgccctgtcccttatagttcatggccaactgtatgccaacaatacaactactaacccagcaactgcgaacgcaacggatgctgtcataacagtcacattaaccactgcgcgacaatcgtagcaccccgacgaatcatgcaacgccaaaggaacaatactacacatacctatcaaatagggccacttgatctaacgccaacgtacgctcacattaagcgcacacctatagcgctcatgagcacatgacactcgcaacattcccatacagacagcatacacaagaacctgg

SEQ ID NO: 490402 - DNA, 831 bp, Homo sapiens
  misc_feature (784)..(784): n is a, c, g, or t
tttttataaaaaccctagaagaaaacccaggaaatactattctggacataggccttggcaaagatttcctgacacagactccaaaagcagttgcaatgaaaacaaaaattgacaagtgggatctaattaaattaaagagcctctgcatagcaaaagaaacaatcaacagtataagcagacagcctacagaaagagtgaaaatattcagaaactatgcatctgacaaagatctaatatccagaatctataaggaacttaaacagatcaacaagcaacaaacaaccccattaaaaaatgggcaaaggacatgaacagatacttctcaaagaagacatacactttgccaacaattgtatgaaaaagtgctcaacatcactaatcattagagaaatgcaaatcaaaaccacaatgaaataccgtctcacaccagtcagaatgactacaattaaaaagtcaataaataaggctgggcatggtggctcatacctgtaatcccagcactttgagaggtcaaggcaggtacatcacctgaggtcaggagtttgagaccagcctggccaaaatggtgaaaccctgtctctacttaaaatacaaaaaagtacccggatgtggtggtgggtgcctgtaattccagctacttgggaggctgaggcacaagaatcgcttgaacccaggagttggaggttgcctgagatcacaccactgcacttcagcttgggcaacagagtgaggacttcgtcttcaaaaaaaataaattaaaaataacaaatctacaaacctttancttgactgacaaggaaaaaaagaagaatgtgaatactagaatcgcat

SEQ ID NO: 490403 - DNA, 311 bp, Homo sapiens
gtcttcgtttgcatggaagtagaactttgtaatttcatcctagcctctgattggttgctttgtgcaaccaatcagatgtttgcacaggagtgtgacctttgtaacttcacttcagcctgtggttcatgctgtccgcatccaatttgagacatgaggtgaacataaagtggccaataggaaacttctagggggtatttggacccaagaagattctgtatccgagcccttgagcccctgcttgggtctgctcccacacagcggagtgtacttttgttttcaataaatccctgcttttgtcctttaaaaaaaaa

SEQ ID NO: 490404 - DNA, 276 bp, Homo sapiens
acacaaagacacaaaaaacacaaccaaacaaccaaaaacacacaaccaagcagagcagagaagagacaacgaaccgccaaggaccagccaccaagaccggccgcgggccggcagagcaacgagccatatctcgaagccgaaccggaccggcagacccccacaggaacacgaagcaacggccaaacagcacaggacaaagcagggcaccacccgccagagagagacaagacgacaaacagacagcaaaggagggaagacaggaagaaggagaaaaac

SEQ ID NO: 490405 - DNA, 258 bp, Homo sapiens
attttctttcttggacccaggagaaccttgtggtcccttcctggcccctagcctgctcttacgggcgtgggggtgggggcgtagtggcacaggactggttacatttgggatgctgtaatatgggactggatgccggcagagagtgatagggagggagagaggcgtagagaggcctctgtcagtctccttctcttgtctcgcctactatactggctgtccttatggtctccagctcctgtcccaccccaaaaactagat

SEQ ID NO: 490406 - DNA, 342 bp, Homo sapiens
cttccagttttattgaggtttgatctcagttactcccttacttgaagaaggcttcgatgattcctcatggagaaatcccagatacttctgcacatgattcagaggtcccttacaactggcttcagcctgccttccaagccctgtctctcgcctctcccttccttcacgccgtgcttcagcgagatgctgtgttttttgcaaatggacggtttgggcaactctttgtggagcaagtctatcggtgccattttcccaacaacatggattcacttcatgtctctgagtcacattttggtaattttctcaatattttgaacttttcattattattatatctataaa

SEQ ID NO: 490407 - DNA, 905 bp, Homo sapiens
tgggcgcccgcctgttgtctcccgacagcggtgtctgcgcctctctgtaggacccaggcgtggcttttcttcgggagagttgagatgcccgcgttcgcgtttgaaatgtctggccccccgcggtgaaaaaccccggagccacaaacgtgttttctttgggcactcagccggctctactttctgtgcgagcgccgctgctaacaaacccgaagcgcttcgtgtatagcgtgctgctccgaggtatcaagtccccgaatggaggcgttctgtctccccaccgtccgaggttggcgctccaaaacgcaaccacacggcgtcttatgcttataacctcggaagactgcctccataggaggatgagtaagaaccacgaccccgtgggggtctatgtctttgaaaaaaacacgtttttgcatggaaaatgtagtaaactgcgacgggaaattgtaacaagattttctttaattggacgcaatagaaagggccccacgagtcaattgtgagatacctcaccacccgtgcgaccaaaagttgcttcaccctgtacactgggagggggggtgtatcaacgccacgccctcgctcccagggccacaaaatttccttggcgacgccctttaaaaagacacagggcaggcattgcccctgtgagtagtccacttgagggagaaaatatcacacacgttgtatctggtccacaccacaggaatggacccttcagaaccacgacatttccaaaagcggttgggtttgaatatcaaacagtgagtaccacgaccggacgtttttgttgtttcaacacttcccgcggaagggttatttctggctccacaacggtaccggcggccgtgtgatgtccccaagacgctgcatttttaaaacaaggaaaccgcccccacaaaaca

SEQ ID NO: 490408 - DNA, 416 bp, Homo sapiens
  misc_feature (199)..(199): n is a, c, g, or t
  misc_feature (230)..(230): n is a, c, g, or t
ctagagatcccattgatatgcgataggactcaggacagcagacaagctgtgtgtagggtggtatgcattagagagacgggcactcacgctcacgctgagctgggcagggtgcgaatcgtgttggctctcgcagccgtagttgccctggtcggccagtatgacaccatggatgaagaggcggtggatgtgcccatcctgngccatggacaggcgagagtcgtggggcaggngctgcccagctcgcacccagcgcacggcccccgctgcacccactcggcctgtctccacttcgagacacacgtcctggccttcctctgcccgcacatactgcaaccgccgtaggaacagcagctctgtctctcgaacatggagccgggcacttgtggccgtgctccctgcccgcaaagtcacggtcc

SEQ ID NO: 490409 - DNA, 274 bp, Homo sapiens
gccaatctgtatatggcgtccactgtcctcacggtcagtccagtagtagcgaagcctgccatctggatgcatgttctcaccaagtaaagaactgtcgttaatgacattagcaaggctgtgcttgctttgttctgccgcccctgtcctccaaggtttactctttctggtctctgttcttcaagattacccttatgattgatttcatgtaatctttgatgtacttctagtaggcttctatagtgaaactggtatccttacagggtggttcttgtag

SEQ ID NO: 490410 - DNA, 139 bp, Homo sapiens
aggactatgtggctgattgaagagtctgcaatgagcgattttaggatctgtttgtcgataagcagatggagcttgtaattaattatgcctcatagggatagtacaaggaaggggtaggctatgtgcttagtcaggggtt

SEQ ID NO: 490411 - DNA, 1232 bp, Homo sapiens
ggcacgagggccacccgcgccgcgcccaggtaagcaggtccgtgggtcgctgggtccatgcgtgggtccgtggctggccggggatggaccagcccctccccgcaggggcatcgcctgcccaaggacgcaggacccagtgagggaagcgcgcgctgcaggcacggggctctccaccctcgccatggttggcaccaagccacactgtgcactcgacacacgcagcgtcctggctgccacctgcagattccagctcgtgtctatgcagggccatggccgccatcacagggccatatgcaagaaactctctgagctctcctcgcccaaaaccgcagctatccttttgtggtttggtattataggtaacatgcccttccttaaagaaacagtatttcaggcctgtagtcccagctactccggaggccgaggcagaagctgaggcagaagcaggaggatcatttgagcccagaagtttgagcctgggcaatgtagcaagaccccccccccccacctcactccccaatcagttaaaagagagagagagagagatagaattccagcaggaagaagtacacatttccacgaatggtttgggaattcaagcatcatatggctgaggtttgaactacagctcatgccaataacatgtgcacatgcgccagcattccagcgtccaacagagcatgcgtgcaccattccagcatccggcaacaatgcaccagcattccagcgtccaacagagcatccgtgtaccattccggcatttggcaacaatgcaccagcattccagagtccaacagggcatgcgtgcaccattccagcatccggcaacaatgcaccagcattccagcgtccaacagagcatccgtgtaccattccggcatttggcaacaatgcaccagcattccagagtccaacagggcatgcgtgcaccattccagcatccggcaacaatgcaccagcattccagcgtccaacagagcgtgcgtgcaccattccagcatccggcaacaatgcaccagcattccagcgtccaaaagagcatccggcaacatcccggtgtccagtggcacatgtgcacctggacgttccagtgtggtgagctttcaggcacggagcaaggccaaagggataaaaagatgaaggtgacgcagtactcccccttatagtgcctacaggccttataggccagacagatctggaaataaataattcataataaaaaataattacag

SEQ ID NO: 490412 - DNA, 177 bp, Homo sapiens
  misc_feature (106)..(106): n is a, c, g, or t
  misc_feature (163)..(164): n is a, c, g, or t
gagcttgagatggaggatctcattctgccttctggttcctgctttggtgtaggggttgggaaaacaggaaatcctctcagctctgctcagatctcctacctctccnttagtcttgtaggggtgtccaaggatggctcttctaaccagaaggctggcctgtctnnttaaaacttaact

SEQ ID NO: 490413 - DNA, 123 bp, Homo sapiens
taagcagctcgatagagtgcgccctctactggaggggtgaagaaacctcatcgttacattgcctggtacttgtggcgctccgtgaatattagacgttatcagcaagtccactagaacttcttg

SEQ ID NO: 490414 - DNA, 147 bp, Homo sapiens
gagtctccgcaaggcaaagggcacgtgagggtgacggccgtcccaagtgggtccaccccgacgcgcgtcccgaaggggcacctgtgaactcaaaaggctcttgtcagagccactgacgttcgcaattaacagagccgttatttctga

SEQ ID NO: 490415 - DNA, 709 bp, Homo sapiens
tctggttcccttaaatatgaggcaatagaaatttataattggagaactacagtacccctgtttttagctcttatcacagcgggcaacgggtagtgattttttggtggtgggttggtttggtttggagagggagctctcgctcgtgtggcccagggtgggagtgcaggggcacgactctcggctcatgtgcaacctccaccttccggggtccaagtaatttctccggcctcagtctcccgagatagcggggataacgggtgcattgcccccaacaccgggataattttgggtactttagtaaaagacggggtttcaccattgttagccagggagggtctcaatctccgtgacctaattgatccgcccacctgggcctcccagagttgcggggatggcgggcgtggaccaccgcacggggcccgggtagtgatttttattccattccaacaatctatgtggcggggttaaataacaggggtcattagtggtctatttcccagggggagttaatggtgcgtcccagagatccctaactattctccttattttgacggaaactccttctaaaaaaacccctattcagaactgtgatgctctaattgagaaacaactcttgtgggccactatgtgcggccaaagttcctatccttagatgaaaaaactccatcgttattcaagtgacggggtaaaagcggattcctttgccacg

SEQ ID NO: 490416 - DNA, 849 bp, Homo sapiens
  misc_feature (322)..(322): n is a, c, g, or t
gcctttcgctgcctgcggacgcagccatgaggtatgctcaggcttcgagaagaggctcgccttctagtgtcctccggctgtggcaagaaagaaggtctggttagacccctatgagaccagatgtaaatcgcacaagtgccaactcacctgttgagcagatccaggaggctcaagtcatagagatggtgttgtctcattgccgcatagcctgtgaacagagttccgatctcccggtgctcgatgccggagaagaacatcttgggcccgccggaaagggcaaggcaccttggggcatgttaggtgagcggcaaggggtcgtagncaccaaatgtcgccaggatagtgctcgcgcaggagaagggtccaccagttgggattcgaatgggcacggaaattggacgcgcatttgatctggccgcccgggggaaatattggccctcccaaggacaaagggaattcacccccggtttggcacaccatttcctctccattggcaaatggatttcgggggaaatggccggccccaaaaccaaatttttggctttcacctttcccactcctgaagggctcccccatggggtgttaaaccccctgttgggtaaacacccagcgtcctctgcgaatactcggcgcgggaggaccactttttggcctcggatttcctccattattcaagaataatcccaaaaaacttgcccaggaggagaactttctaaccccttactaattttccggtgttaacgcccccagtctctagggttgctcacagagaatcccacagaacagaaggcctttatttgggaacacacacatggcgccgccgaaacgacacaacccccaaaacatcgg

SEQ ID NO: 490417 - DNA, 581 bp, Homo sapiens
attgcaaaccaaactgaaggcagaagaaccttcaggagccgatgattctccatcagggacaaaaagttcttcttcagtgcggatcaaaaccttctctgaggtcctggctgaaaagaaacaccggcagcaggaaatggaaagacagaaatccaaaaaggatacaagttgcctcacgctaacagacgacactgaaatgaaaaagacagtgagtctgcccactgttgctgttagcaaaggacaaccagaggagcctgcaggaagagccaggtctatgcaggaggtgcatattaagacgctagaggaaattaagctggagaaggccctgagggtgcagcaaagctctgagagtagtggcaactcccgacctcaagctgaggctgccccagggacaaagaggctgctccgcatcaccaagagagcaggtgtaaaagaagagaaaaaatgtggccttgaagacagtggtgaccctcctcagagcagtgtgactaagatggaggctaatgagacttcagatgagaccataagtgatcccacaaaacttgcagtcaacagatgtgacactgtcaaagagaaacacacac

SEQ ID NO: 490418 - DNA, 1724 bp, Homo sapiens
aaggtcctgctgcgtgagcattgacgtgtttggagctggagacggcctgggtgctggcgaagcggaggccggagttaatacacgaggaactcatgcaaaggaggggactttcggaaatccaaacttagagtgccttgtatttagaatccggaaggaaaaggaaatgaaatgtgaagaaactcatgcaccaaactcgaactgggtatatgtgatgttacctagtaagaagactgttagaatgccctcggtaacacagaggctgagagatcctgacataaatccttgtttgtcgatcctgttctaccttttaaatgatgcctctcttatatctgtaaggaatctgatgcttccaccagatgtctggatgaaaataactatgacagggaaaggtgttccacttacttcttgaggtacaaaaactgccggagattctggaattctatcgtgatgcagagaagaaagaacggagtgaagccatttatgcctacggcagcagaaagagatgaaatcttgagagcagtgggaaatatgccctattgaatgtttgcattaaaagtgtttatataacttagaagcagatgaatatttctaataaatgattgctgtaatatttaagactgtacacccctcacccagacagaccttaagttcttcaagtggagacagtgaagtcaccccgtgtcctttttgcttgctctcagtgccatgccgatggtatgttgctgttggctgtgttgtggcatgagtttgcatgactttctggaggcatggagttaggtaaggctacatgagaaattgagcttttccactgggttttgaaagaagagtatgatgtgaacaagtaaagactgaatggggctgagatgaaggcaatgtttccaaggaaaggaaatgttatgagcaagagtgtgaggcaagagaagctggaaccacattcagagagtatcctgtagattgctccacctagaatctcaggtgggtggagcagtggtgggagaagactggaaaggtaagttgaaggtaaggaatgtgtggtgggcctcagatcccaggctcattcctcaaatcacttcttacttccctcacttatctttgtttaaataaggttagtacattcactaggggcaaatgggtttttctaaataaatgacataaaaaagaactggttgtctttctttaaagaaagtcttagttacaggattctgtgattaaaatccttaaatattgggttgccttctgcagctgtagtatcagtttttgaaccacagtaatgggaagaaagacaaatggattcccttagaagtaagatttctatttgcaggatgagttgggcagggaaaagggtcagggttcatcaggtgaactcaacactgggatgagactagaacttcactttatgatataaacacaatacgattattcaatgtggtgactggggtagactgtgaagcagccctccttatgcccactgccttttagaatcgtttgttttattcatggtagttttatgaagacatactattattgaatgaaatttaatgtgtacttgaaaacattgcttttgtcccttctcttcatctggtcttgggtcaagaacattgttttaatggctgccgacaatgaactgtctgtctgagtctaaaaccaagctcaggtttctaagccacatgaccttgattgttaaatgtagttatatttgaataaaaaatgaatcatttccaaaa

SEQ ID NO: 490419 - DNA, 1679 bp, Homo sapiens
aaggtcctgctgcgtgagcattgacgtgtttggagctggagacggcctgggtgctggcgaagcggaggccggagttaatacacgaggaactcatgcaaaggaggggactttcggaaatccaaacttagagtgccttgtatttagaatccggaaggaaaaggaaatgaaatgtgaagaaactcatgcaccaaactcgaactggtaagaagactgttagaatgccctcggtaacacagaggctgagagatcctgacataaatccttgtttgtcgatcctgttctaccttttaaatgatgcctctcttatatctgtaaggaatctgatgcttccaccagatgtctggatgaaaataactatgacagggaaaggtgttccacttacttcttgagaattctatcgtgatgcagagaagaaagaacggagtgaagccatttatgcctacggcagcagaaagagatgaaatcttgagagcagtgggaaatatgccctattgaatgtttgcattaaaagtgtttatataacttagaagcagatgaatatttctaataaatgattgctgtaatatttaagactgtacacccctcacccagacagaccttaagttcttcaagtggagacagtgaagtcaccccgtgtcctttttgcttgctctcagtgccatgccgatggtatgttgctgttggctgtgttgtggcatgagtttgcatgactttctggaggcatggagttaggtaaggctacatgagaaattgagcttttccactgggttttgaaagaagagtatgatgtgaacaagtaaagactgaatggggctgagatgaaggcaatgtttccaaggaaaggaaatgttatgagcaagagtgtgaggcaagagaagctggaaccacattcagagagtatcctgtagattgctccacctagaatctcaggtgggtggagcagtggtgggagaagactggaaaggtaagttgaaggtaaggaatgtgtggtgggcctcagatcccaggctcattcctcaaatcacttcttacttccctcacttatctttgtttaaataaggttagtacattcactaggggcaaatgggtttttctaaataaatgacataaaaaagaactggttgtctttctttaaagaaagtcttagttacaggattctgtgattaaaatccttaaatattgggttgccttctgcagctgtagtatcagtttttgaaccacagtaatgggaagaaagacaaatggattcccttagaagtaagatttctatttgcaggatgagttgggcagggaaaagggtcagggttcatcaggtgaactcaacactgggatgagactagaacttcactttatgatataaacacaatacgattattcaatgtggtgactggggtagactgtgaagcagccctccttatgcccactgccttttagaatcgtttgttttattcatggtagttttatgaagacatactattattgaatgaaatttaatgtgtacttgaaaacattgcttttgtcccttctcttcatctggtcttgggtcaagaacattgttttaatggctgccgacaatgaactgtctgtctgagtctaaaaccaagctcaggtttctaagccacatgaccttgattgttaaatgtagttatatttgaataaaaaatgaatcatttccaaaa

SEQ ID NO: 490420 - DNA, 340 bp, Homo sapiens
cgattacatgtgttagccctcgacttcaggtctcgagggaagaatgcctagatacagggacagttgggtatctttgccattcctgagtagtaggaatagatacaaaatgcagcagtttgtcttttactttggagggattatcccaagcgtgctccagagcaggactacctgatgtctaaaaacttcactgaattgacaggtccctgaatctttgtagggttgctgtcgtaccttctggagcacgtgtatcttaccaaagactccagcacactagccactgcttgtttattttatctaagcaacatgataggattgatgtaatggaccagtgctctgcctc

SEQ ID NO: 490421 - DNA, 1851 bp, Homo sapiens
  misc_feature (1674)..(1674): n is a, c, g, or t
  misc_feature (1687)..(1687): n is a, c, g, or t
aaggtcctgctgcgtgagcattgacgtgtttggagctggagacggcctgggtgctggcgaagcggaggccggagttaatacacgaggaactcatgcaaaggaggggactttcggaaatccaaacttagagtgccttgtatttagaatccggaaggaaaaggaaatgaaatgtgaagaaactcatgcaccaaactcgaactggtaagaagactgttagaatgccctcggtaacacagaggctgagagatcctgacataaatccttgtttgtcggaatctgatgcttccaccagatgtctggatgaaaataactatgacagggaaaggtgttccacttacttcttgaggtacaaaaactgccggagattctggaattctatcgtgatgcagagaagaaagaacggagtgaagccatttatgcctacggcagcagaaagagatgaaatcttgagagcagtgggaaatatgccctattgaatgtttgcattaaaagtgtttatataacttagaagcagatgaatatttctaataaatgattgctgtaatatttaagactgtacacccctcacccagacagaccttaagttcttcaagtggagacagtgaagtcaccccgtgtcctttttgcttgctctcagtgccatgccgatggtatgttgctgttggctgtgttgtggcatgagtttgcatgactttctggaggcatggagttaggtaaggctacatgagaaattgagcttttccactgggttttgaaagaagagtatgatgtgaacaagtaaagactgaatggggctgagatgaaggcaatgtttccaaggaaaggaaatgttatgagcaagagtgtgaggcaagagaagctggaaccacattcagagagtatcctgtagattgctccacctagaatctcaggtgggtggagcagtggtgggagaagactggaaaggtaagttgaaggtaaggaatgtgtggtgggcctcagatcccaggctcattcctcaaatcacttcttacttccctcacttatctttgtttaaataaggttagtacattcactaggggcaaatgggtttttctaaataaatgacataaaaaagaactggttgtctttctttaaagaaagtcttagttacaggattctgtgattaaaatccttaaatattgggttgccttctgcagctgtagtatcagtttttgaaccacagtaatgggaagaaagacaaatggattcccttagaagtaagatttctatttgcaggatgagttgggcagggaaaagggtcagggttcatcaggtgaactcaacactgggatgagactagaacttcactttatgatataaacacaatacgattattcaatgtggtgactggggtagactgtgaagcagccctccttatgcccactgccttttagaatcgtttgttttattcatggtagttttatgaagacatactattattgaatgaaatttaatgtgtacttgaaaacattgcttttgtcccttctcttcatctggtcttgggtcaagaacattgttttaatggctgccgacaatgaactgtctgtctgagtctaaaaccaagctcaggtttctaagccacatgaccttgattgttaaatgtagttatatttgaataaaaaatgaatcatttccaaaaaaaaaaaaaaaaanaaaaaaaaaaaanaaaaaaaaaaggcgggggggggaaaaaaatcccggggggggcaacattttgagatcacccttttttgaaacaaggggccacaagggaggcggaaaaaaagacagggagggggagaaaaaacaggggggagggaaaggcgtggcttggacagcccttggtggggg

SEQ ID NO: 490422 - DNA, 1723 bp, Homo sapiens
aaggtcctgctgcgtgagcattgacgtgtttggagctggagacggcctgggtgctggcgaagcggaggccggagttaatacacgaggaactcatgcaaaggaggggactttcggaaatccaaacttagagtgccttgtatttagaatccggaaggaaaaggaaatgaaatgtgaagaaactcatgcaccaaactcgaactggtaagaagactgttagaatgccctcggtaacacagaggctgagagatcctgacataaatccttgtttgtcggaatctgatgcttccaccagatgtctggatgaaaataactatgacagggaaaggtgttccacttacttcttgaggtacaaaaactgccggagattctggaattctatcgtgatgcagagaagaaagaacggagtgaagccatttatgcctacggcagcagaaagagatgaaatcttgagagcagtgggaaatatgccctattgaatgtttgcattaaaagtgtttatataacttagaagcagatgaatatttctaataaatgattgctgtaatatttaagactgtacacccctcacccagacagaccttaagttcttcaagtggagacagtgaagtcaccccgtgtcctttttgcttgctctcagtgccatgccgatggtatgttgctgttggctgtgttgtggcatgagtttgcatgactttctggaggcatggagttaggtaaggctacatgagaaattgagcttttccactgggttttgaaagaagagtatgatgtgaacaagtaaagactgaatggggctgagatgaaggcaatgtttccaaggaaaggaaatgttatgagcaagagtgtgaggcaagagaagctggaaccacattcagagagtatcctgtagattgctccacctagaatctcaggtgggtggagcagtggtgggagaagactggaaaggtaagttgaaggtaaggaatgtgtggtgggcctcagatcccaggctcattcctcaaatcacttcttacttccctcacttatctttgtttaaataaggttagtacattcactaggggcaaatgggtttttctaaataaatgacataaaaaagaactggttgtctttctttaaagaaagtcttagttacaggattctgtgattaaaatccttaaatattgggttgccttctgcagctgtagtatcagtttttgaaccacagtaatgggaagaaagacaaatggattcccttagaagtaagatttctatttgcaggatgagttgggcagggaaaagggtcagggttcatcaggtgaactcaacactgggatgagactagaacttcactttatgatataaacacaatacgattattcaatgtggtgactggggtagactgtgaagcagccctccttatgcccactgccttttagaatcgtttgttttattcatggtagttttatgaagacatactattattgaatgaaatttaatgtgtacttgaaaacattgcttttgtcccttctcttcatctggtcttgggtcaagaacattgttttaatggctgccgacaatgaactgtctgtctgagtctaaaaccaagctcaggtttctaagccacatgaccttgattgttaaatgtagttatatttgaataaaaaatgaatcatttccaaaattcttttgatttgtattgactgctataaaaatgatggattaaaataggaccagaaaagaatga

SEQ ID NO: 490423 - DNA, 632 bp, Homo sapiens
  misc_feature (23)..(23): n is a, c, g, or t
  misc_feature (46)..(46): n is a, c, g, or t
  misc_feature (57)..(57): n is a, c, g, or t
  misc_feature (61)..(61): n is a, c, g, or t
  misc_feature (66)..(66): n is a, c, g, or t
  misc_feature (90)..(90): n is a, c, g, or t
  misc_feature (94)..(94): n is a, c, g, or t
  misc_feature (106)..(106): n is a, c, g, or t
  misc_feature (160)..(160): n is a, c, g, or t
  misc_feature (164)..(164): n is a, c, g, or t
  misc_feature (190)..(190): n is a, c, g, or t
  misc_feature (200)..(200): n is a, c, g, or t
  misc_feature (203)..(204): n is a, c, g, or t
  misc_feature (214)..(214): n is a, c, g, or t
  misc_feature (220)..(220): n is a, c, g, or t
aagaaaaaaaaaggaaagaacantcactaggcgcaaatggcccacnccaaaaaaatnacanaaaanagaaccggttccccccccaaaaanaaanccccagtcacangaccccgcgaccaaaacccccaaaaaacgggttgccgtcggcagctgaagtaanaggnggggaaccacaggaaggggaagaaanggaaaggganggnnggagaaggangagggngatttgcaggatgagttgggcagggaaaagggtcagggttcatcaggtgaactcaacactgggatgagactagaacttcactttatgatataaacacaatacgattattcaatgtggtgactggggtagactgtgaagcagccctccttatgcccactgccttttagaatcgtttgttttattcatggtagttttatgaagacatactattattgaatgaaatttaatgtgtacttgaaaacattgcttttgtcccttctcttcatctggtcttgggtcaagaacattgttttaatggctgccgacaatgaactgtctgtctgagtctaaaaccaagctcaggtttctaagccacatgaccttgattgttaaatgtagttatatttgaataaaaaatgaatcatttccaaaa

SEQ ID NO: 490424 - DNA, 511 bp, Homo sapiens
  misc_feature (11)..(11): n is a, c, g, or t
  misc_feature (22)..(22): n is a, c, g, or t
  misc_feature (33)..(33): n is a, c, g, or t
  misc_feature (45)..(45): n is a, c, g, or t
  misc_feature (67)..(68): n is a, c, g, or t
  misc_feature (95)..(95): n is a, c, g, or t
  misc_feature (187)..(187): n is a, c, g, or t
  misc_feature (400)..(400): n is a, c, g, or t
ccccccccccngacccttattnttgtgcacccnttaattgaggtnattctggccattgtgctacttnnattacttagtactttatctgagcattncctaatcactcatagaaagtctcattttaatttaggtcgcatactattcactcacgctaatgtaccacattagctatatattgggtaatttnctatttcccctaatataaatggcactagagtgaatattctggctcaggaacactgattgttttcttaggataagaaagaggaagaacaagtcaaagactaaatatttcaggtttcttaatgaactttttactattaaagttttaaaacatatgtatgtatttataacacatatggccaaaaagttaatatattaaccctataaaaacagcttngggtatccttaaaagaaaggcatgcatctcagtggcacaaaaaggggaaaaggaaatgacagctcagaaatacatgattacctgtgggaaattgagtagaattcagcttgg

SEQ ID NO: 490425 - DNA, 510 bp, Homo sapiens
aaggtcctgctgcgtgagcattgacgtgtttggagctggagacggcctgggtgctggcgaagcggaggccggagttaatacacgaggaactcatgcaaaggaggggactttcggaaatccaaacttagagtgccttgtatttagaatccggaaggaaaaggaaatgaaatgtgaagaaactcatgcaccaaactcgaactggtaagaagactgttagaatgccctcggtaacacagaggctgagagatcctgacataaatccttgtttgtcggaatctgatgcttccaccagatgtctggatgaaaataactatgacagggaaaggtgttccacttacttcttgaggtacaaaaactgccggagattctggaattctatcgtgatgcagagaagaaagaacggagtgaagccatttatgcctacggcagcagaaagagatgaaatcttgagagcagtgggaaatatgccctattgaatgtttgcattaaaagtgtttatataacttagaa

SEQ ID NO: 490426 - DNA, 191 bp, Homo sapiens
gctgtgaagaggccgatggacaggaggaggtctataagcagctgatgttagagctggagactctgcccagagatgtgtcccggcttggctaacacccagcgcatccttgagatctgtgtgcaaaatactggaagcagaaggaagagatcaccacagatcttgtcttgatacgaacggagcttcaagaaatg

SEQ ID NO: 490427 - DNA, 1278 bp, Homo sapiens
  misc_feature (1278)..(1278): n is a, c, g, or t
ggcggagtctgggccgctgccgtcgtaggggtcccgtcccgatggcgtccccggtatttccggtccgaatccggagtgccgggtcgcgcctgcaccgaaggtcccggctcctgtgcccaccctgcagtccgtcagggaccgtctccccaactcccctttccgctcagtgcagggtccacgcgagccatgctggccgttgttttgacccgcgcagccagaccgtatcccgggccggccagctggcaccatggtggccctgaggcctgtgccagaaactccagggggctaaagggctcagagatgcaggccgtggaggcagcgaaggggtccccgtggccctgagccccgacgccatgaccggggcaccatctgctttccccggcaattgacgccttcagtgttctctcaagagtgaagcaacccaaaagaacgtaccaccgtgcacggattcgttcacccatgggaccgcccacagaactggcaggttccaaaatttgcgaaagattgacactctggcacaacgtgctgacacgtgacccctacattcagaaataattctacgggtagatgccacgggacacccttctaggagcgagcatcccgacgtaacaaagcactgggtatagccttaaataggacacccttgcacatagatagatacatgaactcgcacggggacaccaccacaggaatggtgcactggcacagtctcaagaacaagttggtaagacaacacacaaccgtggtcacactttgtggcaactaccacttatgcacagggctattccacaacagcgagacaggacaaccgccacctagggacccacaaccattatttccagcacgtgtaaaactttaaggcggcccaagaaatatttatttagaagcccgtgatgaaacgcaaccataggtcctggaagtaaacgcactacgcattgagagattcacaacagtggagtaaagatacaccagcacaaacacgaagattcataaattcccatatccattatacacgcgcgcttaaaaacgcaaaacagcaacgagaatttagctcagacgcatagaaacccgacagacaatcgtaactatcagcagactctatcgccgtggaagagagttcataaagggtagatccacattggagcattacttaaacgaaggcccggtcctcaaggaccgcagaagcgaataggggatcggcactaaacggacaaccccccaggaggagtataaccaccaaaagcgcggggaagagtctaaatggagcgccccaaggan

SEQ ID NO: 490428 - DNA, 177 bp, Homo sapiens
agggttgaagcggttgtggttggtgcaggcagcactggagcagtcatactgagggcacccacaggttggagcgagccggtgtcaaagaggacagtagaaatcctgggcaggagttcctgatgccgattagtgccgaacgtactccaatatccagcgtagttctccgagggagctgtt

SEQ ID NO: 490429 - DNA, 961 bp, Homo sapiens
  misc_feature (464)..(464): n is a, c, g, or t
  misc_feature (477)..(477): n is a, c, g, or t
aaggtcctgctgcgtgagcattgacgtgtttggagctggagacggcctgggtgctggcgaagcggaggccggagtaagaagactgttagaatgccctcggtaacacagaggctgagagatcctgacataaatccttgtttgtcgatcctgttctaccttttaaatgatgcctctcttatatctgtaaggaatctgatgcttccaccagatgtctggatgaaaataactatgacagggaaaggtgttccacttacttcttgaggtacaaaaactgccggagattctggaattctatcgtgatgcagagaagaaagaacggagtgaagccatttatgcctacggcagcagaaagagatgaaatcttgagagcagtgggaaatatgccctattgaatgtttgcattaaaagtgtttatataacttagaaaaaaaaaagacaaaaacacaacacaaaaaaaaaaaaanaaaaaaaaaaaanaaaaaaaacaacacaaacacaacaacaaaaacaaaaaacaaaaaaaacacacacaaaaccaacaccacacgcgcacccccccccaaacagaacagaaaggaaaggcacacagagtacacacccacatcacaacaaagaaaaaaaagagacaacacaaagaaaagcaaacaaacaaaacaacaaaaaggaacaagaacaaacaaacaaaaagaaaggaagaacagcagagcacaaaaggagaaagagaaggcgaagagacgccaaaacacaggcggcagcacaaacaaagacgggacacacccaagacccgaggcacacaacacgcccgcagcagcaaaccaacaaaaaaaacaaaaacaaacaaggagacacaaagaaccgaaacaagcacacacaacacaaaaaacgcgaaacaagacgaaaccgaaaaaaaaaaacaaataacaaggaggccacgcgcacaagaacagcaagacacgacgag

SEQ ID NO: 490430 - DNA, 440 bp, Homo sapiens
aaggtcctgctgcgtgagcattgacgtgtttggagctggagacggcctgggtgctggcgaagcggaggccggagttaatacacgaggaactcatgcaaaggaggggactttcggaaatccaaacttagagtgccttgtatttagaatccggaaggaaaaggaaatgaaatgtgaagaaactcatgcaccaaactcgaactgggaatctgatgcttccaccagatgtctggatgaaaataactatgacagggaaaggtgttccacttacttcttgaggtacaaaaactgccggagattctggaattctatcgtgatgcagagaagaaagaacggagtgaagccatttatgcctacggcagcagaaagagatgaaatcttgagagcagtgggaaatatgccctattgaatgtttgcattaaaagtgtttatataacttagaa

SEQ ID NO: 490431 - DNA, 1046 bp, Homo sapiens
  misc_feature (590)..(590): n is a, c, g, or t
  misc_feature (900)..(900): n is a, c, g, or t
  misc_feature (939)..(939): n is a, c, g, or t
  misc_feature (974)..(974): n is a, c, g, or t
tttttataattctttttcacagctaagctccattcagagtatcctttttccgtatttcgctcattttgtggtttgatccttttctccttttcggaatgcacatcaggcttcatgaggaaatcaaatggttaactctttgcctgagacaaacaacacgcagaagaaaatgagaagaacttataagaccagtcttccatagttggagacatgggaaactgtgctcccggacagcagctggagggtggagtctccgaggagatgaagggccttgcccacgaggacaaggtgagaacagcctgtctccatagttggtcctgactgatgtggtggtggaatgttggtagggttgcagcgcttgtcattaactgcttctgtgagtcctatatataattgtcattccacttagtccttaatgaaaacaatcatgtgccattctctgatcttttctctgcgatctcacatggcaatatgtcgcgcaccggctcgttaatccgtcgtcgatgtctgatcgttccccgttacgcttcctccactagtacgtcgtcgtcgtttcgtcgattatccatatcatcgatcctgcgtattcgcgncgtgttgatccgcgttcatcgttctccatcctttgtctatcgtttttcccgttcgccgtatgatttatcgtccttcacgttcacatcatctgcatctttcattcgcttcgttcctatcctctcacattcttcactattatccgcagttggctcgtattgccattgtcgaatccttgttcggcgtcgattcgtatcgtatatcggtgcgcttcttcgattgtcgttgtcatcatcggtattctgtcggtgggatgtgattctcattacacgtcatattgtgtacgcgtaccgttcccgttattcgcctccntatgccattattatttcgcgacggtggtatcgtatatanggcccggtaagtattcattcttacgatttggatanatacgtacacatgttttctcgcgactgggcattccattacgttcttatattgctctcacatggatccacatg

SEQ ID NO: 490432 - DNA, 539 bp, Homo sapiens
tggcagagaggctagatgacatcgtagaactggctgaagaagcgcgacgggacccggctgccaccaccccatcgtgacggacgcagctgcagagtcctaggtgagagtccagcgaggtggctgtcatcggcttctacaaggacgtgaagatcagactctgccaagcagtttacgccggcagcagaggacatcgatgacataccatttgggatcacttccaacagtgacgtgtactccaaataccagctcgacaacgatggggtcgtcctctttacgaagtttgatgacggccggaacaactttgcaggggaggtcaccaaggagaacctgctggactttatcaaacacaaccagctgccccttgtcatcgagtacacacgagcaagacagccccgaagcattaaggaggtgaaatcaacgactcacatcctgctgtacttgcccaagagtgtgtctgactatgacggcaaactgagccaacttcaaacagcagccgagagcttcaagggcaagatcctgtacatcttcatcgacttgcg

SEQ ID NO: 490433 - DNA, 505 bp, Homo sapiens
aaggtcctgctgcgtgagcattgacgtgtttggagctggagacggcctgggtgctggcgaagcggaggccggagttaatacacgaggaactcatgcaaaggaggggactttcggaaatccaaacttagagtgccttgtatttagaatccggaaggaaaaggaaatgaaatgtgaagaaactcatgcaccaaactcgaactgggtatatgtgatgttacctagtaagaagactgttagaatgccctcggtaacacagaggctgagagatcctgacataaatccttgtttgtcggaatctgatgcttccaccagatgtctggatgaaaataactatgacagggaaaggtgttccacttacttcttgagaattctatcgtgatgcagagaagaaagaacggagtgaagccatttatgcctacggcagcagaaagagatgaaatcttgagagcagtgggaaatatgccctattgaatgtttgcattaaaagtgtttatataacttagaa

SEQ ID NO: 490434 - DNA, 320 bp, Homo sapiens
ccaggtagacctaactcatgcggtttcagcccatttctttggggcttccgacttcttgtgattggccatcgcgcgctggaacgcgccgtactgcaaagaaacaaatgcgccacagtcagataatccaagagagtacagttcgttcaggctttcattatcaatggctttgtctacagctttgcgaagaacttcgtgctcgagcttggcgagcgcctctttctcgcggggtgtaagtttgatctcacccatgtcctgtagcctcatcgtacgctgctgagccgaaaggggctctaccgactacctgggttaggtctacctgg

SEQ ID NO: 490435 - DNA, 140 bp, Homo sapiens
tccttgaggatcccgattacgtctgacggcaggtcagctcctgctgcaggtcagcaggagggtgggtcttgggagtgaaaggccgcctgtccccgtgggccagctgcaggcctctcctgaccatgcctctctaggcctct

SEQ ID NO: 490436 - DNA, 816 bp, Homo sapiens
ggaaaattgagactgagtaggagaaagattgaaacgagctcatcagaaagttcttaaagtggatccttctattttctctgcttggggtttggtctgtactgtcctcctgccattgtcctcttcttattctgccagacagcaggtgctatgttctgaatctcaaaaattgaaagaatcttttgtctcaccagcagcgcccattgaaaatgataaacaggagagggaggatgagaactggcctgtactgtcccctccagtagcagaaatagagaccccagtacaaaaaattctacatgctgtggccatagctggcgagccactaggaccttgcacttttcctattaccttaaggcctgatccaaataatccacagcagtttattcatgaacacactccagtaaaatttaaattattgaacagaattaaaagctagtgtggttaataatggaatacagagcccatttactttaggattgttagaatctgtattcagcactatgcgcctcccacccttggatataaagcatttagcttgcacttgtttctctgctagtgcatatttgacatggaatttaaattggcaacgaaatgtgttgcagaccaggctagacagcaatctcaccgctggacatgggaacattaccgaggaaatgctattgggtagtgactcttatccagatctggtgcaccacttgacacttccagatgctgcttaccatcagtgcgcctggccgcttaagggtgctgggccaccattcctgagagagggtcctcaataaatcttttcgcatattctgcaaacatcacaggacccct

SEQ ID NO: 490437 - DNA, 199 bp, Homo sapiens
caggaggattgcttgaggccaggaatttggcacaatacagccagaccccatctcaaaaaaaaaaaaaaaaggggaaaaagaagaggagggtgaaagtccaataccagagctttttaacgagatttccccataatcatatctgaggttcaacaaattaaatagctttaaaataaaagacacagcagattatggctaagga

SEQ ID NO: 490438 - DNA, 242 bp, Homo sapiens
  misc_feature (15)..(15): n is a, c, g, or t
  misc_feature (20)..(20): n is a, c, g, or t
  misc_feature (23)..(23): n is a, c, g, or t
  misc_feature (34)..(34): n is a, c, g, or t
  misc_feature (56)..(56): n is a, c, g, or t
  misc_feature (92)..(92): n is a, c, g, or t
  misc_feature (96)..(96): n is a, c, g, or t
  misc_feature (104)..(104): n is a, c, g, or t
  misc_feature (111)..(111): n is a, c, g, or t
  misc_feature (114)..(114): n is a, c, g, or t
  misc_feature (123)..(123): n is a, c, g, or t
  misc_feature (128)..(128): n is a, c, g, or t
  misc_feature (138)..(138): n is a, c, g, or t
  misc_feature (144)..(144): n is a, c, g, or t
  misc_feature (146)..(146): n is a, c, g, or t
  misc_feature (150)..(150): n is a, c, g, or t
  misc_feature (157)..(157): n is a, c, g, or t
  misc_feature (162)..(162): n is a, c, g, or t
  misc_feature (171)..(171): n is a, c, g, or t
  misc_feature (173)..(173): n is a, c, g, or t
  misc_feature (189)..(189): n is a, c, g, or t
  misc_feature (201)..(201): n is a, c, g, or t
cctttcccccatagnaaggncgnccttccctgcnccatgcccagagtatagctagntcccttcccctccctaccctctgaatgtgtgctagnagtnccccactnttttctnaancctgggagncgggnctccccatcncccctncncacncttcccntttcntcccccagngntgtctgaataaagtgngaaaaccttttntgttttcctaaattgacattttcaatgaaaaaaagaatcac

SEQ ID NO: 490439 - DNA, 144 bp, Homo sapiens
ggcagcggcacaatcgtcatatctatcagagattgccctgcatggccctacctcacagctgaaatataaaaaaaacaggatgggacaccagccacctcctccaaactcaacaacattctataactgataactccctgagaccat

SEQ ID NO: 490440 - DNA, 197 bp, Homo sapiens
gcacgaggcagtggtgggaattgtgaacggtaagccacgcagctgctgagaactagcatttaggatctgggcttggagcaacatttttaacattatgtgactttcctcgcatcaagaaggggaagttctcccttatggccacactgtcattcaatttgtcctttcaaccctcagtagggcaagcagcgcggcattct

SEQ ID NO: 490441 - DNA, 474 bp, Homo sapiens
acaggggaaagggggacttactgagcaccgtgccagtatccggacaccacaggggcccttcgctcgacgcagagaaccacacttgacaaacgcttcactcaacactaccttcctcgccagaagatgcacaaggaggaacatgaggtggctgtgctgggtgcaccctgcagtaccatccttgcaaggtccaccgtgatcaacatgcacagcgagacctccgtgcccgaccatgtcgactggcacctgtgtaacaccctcttcctgaactggtgctgcctggtcttcatagcatacgcctactctgtgaagtctacggacaggaagacggttggcgacgcgaccggcgtccaggcctatgcctgcactcgtaagtgcctgaacatctgggccctgtctgggcatgctcatgaccattggattcagcctgatactggtattgggctctgtgacagcctaccatattatgatacagtt

SEQ ID NO: 490442 - DNA, 255 bp, Homo sapiens
aggatcccgaaacataatgaatgatagtgacgtgcttaagtaatacaggacagcacgggcagaatcacagttcaataatacagtgaacagcatgggtgtctcaactgggtggaattagtccgcataataattcagcatcataacaaaaatctagcaagggctgttgagcaagtgaattggcaaaaaacgttcacaaataaactttatgccccttgaagcgagttctgcattttaacacatttctatgtgttgtcg

SEQ ID NO: 490443 - DNA, 330 bp, Homo sapiens
tttttgagacggagcttggctcgtgttgcccagactggagtgcagtggcatgatctcggctcactgcaatctcctcctcctgggttcaagcgattctcctgccttagcctcctgagtagctgggattacaggcctgtgccaccacgcctgactaattattgtactcttagtagagaaagggtttcactatgttggccaggctggtcttgaactcctgacctaggtgatccatctgcctcagcctcccaaagtgctgggattacgggcgtgactgtgaaaaaaaggcccagcttttgggttttttggcagggtctcactttgttgtcgacg

SEQ ID NO: 490444 - DNA, 105 bp, Homo sapiens
ctggctgcagcccgctggggctgagacattcttgcgtttgctgcgtgagggtaacgacaaccacgacggctacgcagctgctgggcgttacagcgtgggctggat

SEQ ID NO: 490445 - DNA, 868 bp, Homo sapiens
ttccatctatcgttcatccaattcgtcctaatgtttctcaatcttttctatccgtgtgtgtcccattggctactatggtcttttgcttttgcgacataataaatctggtctgctcagtgctagcggactgttctgtctacccgataatgggtatggatttatttatgaaatgtctgccgtcactggtgtcatcggccgttctcttcctcgtgtggactctggctcttcgtctgctctattctgttcatttctctcattctctggggtttccggtgtctcttctgtctgtgttgtcgtattcttcacgggggcttttcttgattgggttggttccctcttggatctgtccgtatccgttctttccgctttgctctgcacacggcctatccgtgctctgactcggactctgctgggcttgccactcaaggattgactgtatgctgtgcgtttgtcccctcgtcttgcagcgctgcaactcccgtgcggggctttggactgtgacagcggtctggggtcgctagggcgcttgggctgtgggcccccgcggcgccagcctcctccctggtccctcggaaatcgttgcatcatcacttctgagaacgaaatctcgcttcagtcactctgcacgataggcagctgacggcatcgcaggctcaggtaacctctgggcccggcccactcccagggcctgccgctccgtgggaataaaacagctcctccatttcccttgaaaactgaacgattacttaaaaatagattaaacttcgctggaaactgagtagccaggaagttcaggggatgggttgccgggtccttcccgggcctggcgtgtcggagccaaaaactgtacccgcatgctgccgctgag

SEQ ID NO: 490446 - DNA, 109 bp, Homo sapiens
  misc_feature (25)..(25): n is a, c, g, or t
tcgagctcggtacctttctctaacngtcgatgtgtgattgaatctgtcagaatacagaatacgcatctcaagaaagcgaatacggctcgttgttcctgatgatgtagat

SEQ ID NO: 490447 - DNA, 158 bp, Homo sapiens
agtcctcagttccagcactccaatagccagctcacctcctcatcacacaccctacaggagaagcattagggctctccgactacgtcgtttcgatagctattgcctatctaaagaggagactcctgatagcaaggcggtgaagaccttagctagccacg

SEQ ID NO: 490448 - DNA, 113 bp, Homo sapiens
gggccccaaaattttttttttttcccgggaaagggaaagggggaaatttaaacccttcccgtttgttttgggaaggccgggatttttcccaaaaaattaaaaatggggcggga

SEQ ID NO: 490449 - DNA, 943 bp, Homo sapiens
gcctgcctcagcagcaccaggttgactgctcgtgtgccagcggtgtggggagtgacggggcttggacgctgcagctctctccagccctgttggcatcctcaggtgcctgtaggcctctcgctgcctgtgtgggctgtctggggagggtggccatttagggatcgtggggacggggtccactcccaagaagaaagagaggcccgtcctaccagggcccgggtctgggccacggtgccccggaagcaggtgtgtccaagaagtcagctgagggctctcctcgcgacagcaccgagcgagtgaagctggtgctccgtttctgctctcatgggaccgagtccagcttccagccgttctggctcgagggtggtctgaccaattccttctgagtgggcttctctgggagctctccagtggactgtggacctggccacgttgttctgtaaaatcaggatacgtgggctttaggtaaagcagacaagggcttcggtggcagggaaaggtagcgtggggggaagtcaacttgaaaagtgctgcctaaggaaggttggaattagtccctgtttccagaatggctttgaatttttaaaacatgtgctttggggaagtaggttcaggaggcactaggattcagggatggttcatttttcacactttcacaagtccattgaaaactgagaagaagtggctttcaggggtgacacctatcacgttccaggccggatcactgagatccgaagggttgaagaatcttcgtaaagcggtcgagaaagccttttgctggtcccctggcacattccccgcggaattaaccggtcccgggtctcgggggaattccggcgctgggctggattgggaagcatgcagatgctactttttggcaacagggaggtgtgtccaaaaacgcggagacccgcacttttatggtgggagcaccccaggggga

SEQ ID NO: 490450 - DNA, 274 bp, Homo sapiens
cccgttaatatcggtgcgatacatagcagatgcttgatcccgatcttccttcctcgactttattatatatttgctcaagttatgtgcttagtctgccaaggacatttcttccaaaatagagcaagataagacaatgtgtctgaacaaacataactaagactctcctaatcgagctttagagatttagctcatagttaatctcttctgtgaagtcttccctgtacccaaggcagtattaatcactcttgctgatggactactctgacattttact

SEQ ID NO: 490451 - DNA, 290 bp, Homo sapiens
aggattgcttgagcctgggagtttgaggctataatgagccatgataggaccactgaactccatcctgagtgacagggcaaggtcctgtttctggacatggtggcacatgtctgtagtcccagctacttgggagactgaagtgagagaaccacttgagcccaggagtttgaggctacagtgaaccatgatcatgtcactgtactgtagcctaagcaacagagcaagacgctgtctctgaataacatgttgcccagtcagtttctcttcctggattcagaagtctttcatgg

SEQ ID NO: 490452 - DNA, 146 bp, Homo sapiens
aggatccacctcagaggcatattcttagcatttccggatcgtgactctagtaactcctgctaacctgtctaagacccggtttggacatagcctttccgtgccttctttacactccaactctattttgcttaatctggttaccgagg

SEQ ID NO: 490453 - DNA, 485 bp, Homo sapiens
agctccagctacagctcagaaagaacaaaaggccatcaaactccagtcatgcaactggagaggcggacaatggcccattctgctgggaacccttaaataggcctctgagggactttgactgctgttttgccgaaacagcaccccctgtcagcaggaagcagttaagatcggtctttgtccttatccttatccttattctaatggcagttagatgcatttctttagagggggcaatgagacagccaggtgggaaggggtccccagagaaactccagcctgcacactgggaggagtgtgcactggggtgaagacacagaagtttgcgccatttccagtggggaagagcccagcccctcctcttcctgggtggaacctgaaattcaaactgccaggtgggaagcccacaagcagggagtctggctttgcagaaggaccgtttccctcttttccttttcacccaataaacgctgccctcctcacacttc

SEQ ID NO: 490454 - DNA, 118 bp, Homo sapiens
ctcgtagtctgaatgtgaaaaatatctgaccatttctgtagcaggtcttctccctccctctgcttgcatttctccttttcctctagtggactctggttgttctgctctaccgtagatg

SEQ ID NO: 490455 - DNA, 355 bp, Homo sapiens
actcagacaagtgaccgcactgacacattcatggaacaaatcgtggtcaatctttatcaattataaatatgtgtttcataattaaacattattttattttatttttattttcttttgagggccacacctgcagcatgtggaacttcctgggctaggggttgaatcggagctgcagctgctggcctataccacagccacagcaatgctatatctgagctgcgtctgtgagctgcaccacagctcatggcaatgccagatccttaatccactgagcaaggccagggatcaaatctgcatcctcatggatactggttgggttcttagcccgctgagccacaatgggacggtcaacttg

SEQ ID NO: 490456 - DNA, 115 bp, Homo sapiens
cggccctccatgactgcttcagactcttgaaattctctaacatctgtgggcacacaatcccttttctttgataaatttggcaatctccatggcttcaagtatcaaccacatatag

SEQ ID NO: 490457 - DNA, 834 bp, Homo sapiens
atcgtctttaaagccctgcgtgggaatccactgacgcaccgtcgtgatggccagggaagacagggcgacctgtgaagtcgcaagcatacttccttaacgatcatccatacataagttggattgattcaatgcgaagatgttctcgatgtgtgggagcagcacaatgtgggctccaagtcgatgatgcatgccaggatctcgccattggtcccttcgtcggagagaggactgtcggtgcgttgagtgtgcgcagatgtaacaccctatggatgtctgcagagtgccatccggagggcagcgtggagaaacaagccagactctggagaaacctggtgcctcatatccgggggaatgtgggctttgtgttcaccacaggaggagctcagtgagaatcatgggacagtgttgctggccagattaaggtgccatgctggtggctccgatgctggtgacattgccccatgtgaagtcacgtgtgccatgcccagaaccactggtctcgggcgcgagaaagactaccttttatccaggctttatggtatcagccacgtaaaactctccaggggcaccattgaaatcctgagtgatgtgcagctgatcgagactggagacaaagtgggagccagcgaagccacgctgctgaacatgctcaagatctcccccttctccttttgggctggtcatccagcaggtgttcgacaactggcagcaatctacaaacctgaagtgttgatatcaccagaggaaaactctgcattctcgcttcctggagggtgtcgcaatgttgcaggggtatgcctgcaggatgggtaccccactggtggatcagtaccc

SEQ ID NO: 490458 - DNA, 211 bp, Homo sapiens
actctaaaagatcccctgatgcctcctgatctattcataagcctggaagaacaacactgggatgacgatgagcagaatggtcatgaagatgcccaaaatcagggcccatatgttcaagcacttggcgggggaggcataagcctgggccccggtcacgtcgccaaccatctttctgtccctagacttcacggagtaggcgaatgctatgaag

SEQ ID NO: 490459 - DNA, 320 bp, Homo sapiens
agatcccccaccgcagtgtgaatggagtgccacctggagcagaacgtaactgggggttttactaaagctgctgaggggcgtaaacaaaattggacgtattggtattttacctggacttgtgaaaggacgcaattcagttgaggtatttgtgttacattgtgcactgtagtgaaatccctgggaatggaactggagtgaagtccgagattgtcttttagaaatagatacagaacggtggtcctggactgctgcgaagtgaactgtgttattattttagggatgagtccagttgtagtaaggcaccgaacaggaattgcaaa

SEQ ID NO: 490460 - DNA, 397 bp, Homo sapiens
  misc_feature (12)..(12): n is a, c, g, or t
  misc_feature (352)..(352): n is a, c, g, or t
ctctagaggacncgcgtcatccgtacacaggatacattacagcaaaattacatgttcaagtctacacactcagaagtactagactttgcagaataaagtcacattttagaaatgcaaaccacttccaacctttgcacagtccaaaaaacaaggcattaatgatttaaagcattacatacatatctactacttgttgtttagaattatttatagtctatctggggttcatgtacaaaatttgtctctaaatcatgtacaaaaagctgtattttgaaaaagtcaccacatactgtacaagtttacaaggaaagagatccccgttattttctctagcatttttggccttgctggncttgcgtcaccaatatgagaatgattgtgtaaaccttatactctt

SEQ ID NO: 490461 - DNA, 706 bp, Homo sapiens
  misc_feature (33)..(33): n is a, c, g, or t
  misc_feature (76)..(76): n is a, c, g, or t
  misc_feature (214)..(214): n is a, c, g, or t
  misc_feature (227)..(227): n is a, c, g, or t
  misc_feature (258)..(258): n is a, c, g, or t
  misc_feature (272)..(272): n is a, c, g, or t
  misc_feature (282)..(282): n is a, c, g, or t
  misc_feature (285)..(285): n is a, c, g, or t
  misc_feature (311)..(311): n is a, c, g, or t
  misc_feature (317)..(317): n is a, c, g, or t
  misc_feature (321)..(321): n is a, c, g, or t
  misc_feature (324)..(324): n is a, c, g, or t
  misc_feature (367)..(367): n is a, c, g, or t
  misc_feature (372)..(373): n is a, c, g, or t
  misc_feature (397)..(397): n is a, c, g, or t
  misc_feature (426)..(426): n is a, c, g, or t
  misc_feature (434)..(434): n is a, c, g, or t
  misc_feature (446)..(446): n is a, c, g, or t
  misc_feature (451)..(451): n is a, c, g, or t
  misc_feature (463)..(463): n is a, c, g, or t
  misc_feature (470)..(470): n is a, c, g, or t
  misc_feature (533)..(533): n is a, c, g, or t
  misc_feature (565)..(565): n is a, c, g, or t
  misc_feature (587)..(587): n is a, c, g, or t
  misc_feature (594)..(594): n is a, c, g, or t
  misc_feature (609)..(609): n is a, c, g, or t
  misc_feature (612)..(612): n is a, c, g, or t
  misc_feature (614)..(614): n is a, c, g, or t
  misc_feature (617)..(617): n is a, c, g, or t
  misc_feature (619)..(619): n is a, c, g, or t
  misc_feature (632)..(632): n is a, c, g, or t
  misc_feature (653)..(653): n is a, c, g, or t
  misc_feature (677)..(677): n is a, c, g, or t
  misc_feature (691)..(691): n is a, c, g, or t
tttaaggaggccacatataacattttcccagtnccagattctacagagtagggacacccccacttccatttcaatnctgaagcaagggagccaggaatgacaggagatgtttaactgatggttacactttataccctcactatgaattctatttttatactaaattaacttagttatgagatctgattttccatctctccaggttgaacttctncattaggccaatncgtttgcaagtgggcactgtttcagcacctnattgaaaccctcanagagcttgangtnaccctggttctgggcacactccaganactgtntganctnatagaggcaaggctgctgctgctgttctggctgggttccctgnggctnntgggaagtgaggtgagggctgggnggcggcagcattgcgtgtcctcgcactgnggcgcccngtggtggcgtgngcgantgtgtgccccanagcagancccacagctacgccagcggcggtggttgcgatcggggcgatcagagctggctgcgggggcgcngggcggagggggcggagcggcggaggggggtnccgctgctggtggctgagcgantggtgcnggactgggtgcagcnctnanctnangggcccggctggncggaggggccatgcgggaagngcggcttcggcttccacgcggcancctaggtacgcgangcctaggcctccgga

SEQ ID NO: 490462 - DNA, 729 bp, Homo sapiens
tgggaggagaattggccacggggaaaaaaggacacaatacccacaaaagggcaagggtaagggggtgtgttttccgggaaacacactggtgggtttaaaggtgtgtgggggaaaaccctttggaaaaaaagaaaaacactgtgttaaaaaacacctctctataacgaggggtaagagtggtgctgtcgcccagagggttttgggaaatttggggggtgtgtaaattttcttttgagtttttaaaaaatataaaaatttttaaaaaaaaaaaaaaaaaaaaaaaaaaaaaaaaaaaaaaaaaaaggggggggggcgccaaaaaaattcccccgcggggggccccaattggcggccgcccccgtttttggggaaaaggggggcccaaaaggggaggggaatataaaaaagagagagagagcgggggcgcgcgcggttaaaacaagaggcgggcgaggggagaaaaagcggggaagggggagaacacgtggggagaaagagaacccactccaggggggggggcggacaaaataggggaaaaaaccccccacaaaaaattaaggcctagggggcacaaaaacaactcaaaagggggaaaacagggcgcgaacaccaaacacgagccaaaaaccgcaacgcacgcggcgccgagacaacacaaacaaaatgagggcatccccacgcaggaaaaaataaaaataacacaacaaacaccacattaaaacacaggag

SEQ ID NO: 490463 - DNA, 622 bp, Homo sapiens
ggattattatacagagtaaagcctccgctgttaatgtctccagtgtttaatcatcatacagtaggatggttttatgcatatttcatttgcatatcattaaactacgttagcgagggggcacccagagccgagaggagcacaaagttgggaagacagggaaggaaaaagagattccctatgatgcttatcttcaaacgggggcttgttccttccatgatgtgtcttctgcctttctaaaatcattatgacttggaaacctttgaagttggatacaaccttggattcctctaattcctgcagagcggtatatttttaagatcggcagcaatgtccctgcactagacaattaaaggaatataaactccagtgggctgagactagtagctctttggggaacacagtggcaggagcttctacaaataccaacacttaaaaaaaatcataataaagaacgtcataccaaaaacaaagaaagaagacaagagattttaacatgtggattatattgtcttgttggggggtaataagctaaagagagtgaagaagtcatggtaatttatcccctcattaatgaagtcaccctttttatttgtgacaaaaccaacaaaaaaaaagaaaagag

SEQ ID NO: 490464 - DNA, 200 bp, Homo sapiens
agacctctcggaactcagtggatccaggcatttgggaaatgtatcccgattgaatgcagtatattccatgcagcatggtgcaatggatgccgagtgaatgcagtggattgcatacaacgtggcccaatggtacctgattgaatgcaggggatcacatgcagcgtgcttgaatgcagtggattctatgcagagtggtgcct

SEQ ID NO: 490465 - DNA, 338 bp, Homo sapiens
ccagattggcctgcagcgcattgttctgcaggtcgctggtcacatcggcaaaatattgccggtcctgctgcagcgccagcaggaatttctgcgaccatggatagagatcgtcggcattgatgccctgcagcacgaactggtactgcgcgcgcgacgacgtgctgccgatgcgcaggttctggatggcgatgggatagctgttgatgccgggcgccttggccagcgactggcgcaggtccgtcagcagcgggtcgagcgccaggcgctgggatttgggtttgagctcaacgaagaaactgccctggttgaggctcgatgaattgaagccgccgccgatg

SEQ ID NO: 490466 - DNA, 252 bp, Homo sapiens
gatccccaaaatacagccttcagagagacatacgttagctctgggctagatatacatccacctacaatgatgggggatagcccgagttcaggctgggagcttaatcagtcatagggtcaagtgtgagttaagcaagggctgagaaagctgcatctccagtgtcattaacacagtggaaaggtacgataagcacacacactggtaccgataattcatgatacatactcttgagtctgcaaaagcttcttgtgc

SEQ ID NO: 490467 - DNA, 891 bp, Homo sapiens
gcaccatattgcttttccgaactttcgtccacattccaggcctcctggcagacttaacctttatgtctttgtacgtttcgtgatgggttggttcttttgctgcctgtttgtggtctatttgtaggatagtttagttcccagacagtttgtgtctaatttgatcttcttggacattgtccctcatggccaccagattctaatgccataaggtcccagctggttccccagtcacagaaccacccagacaggaagccgggggtacaaatgaccctcggcacaacaacagagcgctcgtgcattatcagcaagagcgccatccacagaccaatgcctgtggccagcacctgacactccagcactcgagctggagttgcatccaagaggtcaggcccagcagggcctcacctccacatagaggtggctgggccaacttgcccaaagcacgtgagacacacagggagctttatgtgttcatcttcctgctttagaaccttgctcccgagatctatggatttttcttgaggaacaagaccacagaggttccccttgaacccatccacatacctccctatactgccgtctgtctcttagggaccctggtcatgagagatatttcatctgaggccatcctagggagcaggagacacttacagcggttacataccctgaacttagtatcaaaagagacatagctggagtgacattcccagacacgaagaggagtgacgacgacaaaccacagagcactgagggacaaagtggctccaaagtaggcagccacctacggaagcacctcctgggattgagagggacacgcacatgcataccaaagcctaccccaagcaaacaacacgaagcacaacaaggctcagaaacagtgccctaccatac

SEQ ID NO: 490468 - DNA, 614 bp, Homo sapiens
  misc_feature (177)..(177): n is a, c, g, or t
ttttgtatttcagtaagatgggtttcaccttgtaaccgggtggtcttgattcctgacctctgatccacctgcctcagcctccaaagtgctggattacaggcatgagcaccgcgcctggcctaatgcttggtttatttcatggattcttgctagaattttcctttaataggattttcntaagtcatcttaaactacccccctttgcaaatttttcatgttaattacagccatacttcgaaattttgttttctggtggatattcctgctaaaaattattatttgttggcactaaaattatgtgatttagaaaaccttgcctcatggagataaattactttcttttccagagattcccgaccttctaaatgccagtaatctgaaaacctttagggaatggggctttgatttgaagaaattccccaaccttaaaatgagaaaaatttgcgctaatgatgccattccccagacgggccagaggaaaacttttataactgtaggcccagatttgggggaattggaacttaacgatgaatccagtgattcagatgaggaaatggctgcagtggcctaattgttttcccttgaattgaaaattaataatttgagagcttcca

SEQ ID NO: 490469 - DNA, 858 bp, Homo sapiens
ccgtcaatctacctctaccatcttagcaggcacactcatcagcagcgctaagctcgcactgattttttacctgaggtaggcgctaggaatataagatcatgactagctgttattccagtttctacaccacaaaaggaataaaccctgcgtgtccacagaagctgccatcaagtatttcctcacgcgagcaaccggatccataatccttcgaataggctacttcctcattcgaacaatagtactctccggtacaactgtaggccagtaagccaatagcataccaatcgaatactctagtcgatgttaactagagtcagtaatggctatagcaataaaaactaggaatagccaccctgttcgagttctgagtcccagaggttacccaagggcacccctctgtacactccggcgctgtctatctgtctctagatgacgaaagcactatgcgcccatctcaatcatatagcaaatcgtctccctcacataaacgtaagccttctcctcactctctcgaatcattagtcgcatgcaatagcaggcagttgaggtggattaaaccagaacccagcctacagcagaaatcgttgagcatacgtcctcagattacccacgataggatgaataatagcagttctaccgtacgaaccgtaacataaccattcttaatttaactatttatattatcctaaggtactaacgattcctactactcaacttaaactccagcaccacgacctactagctatctcgcaactgaaaaagctaacatgactgacacccttaattccatccacctcctctccctagaggctgccccgtaacggttttgcccaatgggccatatcgaagaatcccaaa

SEQ ID NO: 490470 - DNA, 117 bp, Homo sapiens
gtctagatgatccccgaaagaggagaggtggtcgggtcaagatagcagcagcaggtgtcagtggctcaagacagcaccccctccagcttctggggcccaggagcctctccctgctac

SEQ ID NO: 490471 - DNA, 804 bp, Homo sapiens
ctcatacagccagagctgtggacccacagctgcagtacctgagctcaaactccgcgaacaggacgtcgaatgtgcctcagcgcttccctcatcttctctgtcacaggccagctcgtgttcccggtccccgcaggaggttctcttacattcagagcaatcagtgagggctgataaccgatgtcccccaatgtgacccacggggttcctcacagtggccccacggagcacgggaggagcatgggcatgcgcaaggataagccacagtggatgaagttcaatgaagcttggagcttccatgttccacaattcatggtctgtgctcctcatgggatgaagcgaggcgggctgatccagggctcgcgaggtccccaagcactatcttagatggagccgacaagtacaccgacactagtctaaaagttgctcactagcctaggaggaatagcgcaaaacttccccggataggcaaaactcatcagtgtagagagtccctggggtcctgaggcgaggtaaggaggtgctcctccgcacaccataaatccacccatgtctgccctgggttgctgcgacggcagctccccagccgtgcgctcagcagattgggaatttcaccaagctgccctctggcacaggggctgagtccaggccctggtagacctgttgtcacagggaggcttgtctagaggccggggcctcgccaggtttaggatagaaccaatccacctgctgtcccctcagtggatgatcaagtgatgcaggacaagaagccatttcccaggtgacagaatgagacggcgctgatcg

SEQ ID NO: 490472 - DNA, 289 bp, Homo sapiens
tctgagcatccatcaatacctggtactatggatggggcttctggttctcggcgggagggccactaccctaggggggggagagagggcacaccagatgctttggtgagaaagggaggggggagtgagagccttggccttgagggtgtatgtattcacatagtcctcagggctcagtcttgggaggtaagtggaatgagagggcctggcttctcttctttccattcttctggctacacccctttgccaggggcgggggaccaaggcatctctggaaaggcaaatattatcc

SEQ ID NO: 490473 - DNA, 162 bp, Homo sapiens
ttcaaagctacccgtcaaggaaaggattcggtatgtgattagcaaacatgagcttctgcagtacaacacgtgaagatcattcgtggtgtgcctcaaattttatggtacggtacagccttcgcttcagtgctccccaacgcttccgctaattttttgcagaaa

SEQ ID NO: 490474 - DNA, 361 bp, Homo sapiens
gatccccgacacaaaagcggcccaaatgagttctttatctgccccacactctgcccctctcagcttggtccaggcacctccacgtaggctgcacagaagtggacttcgtaaggtttattgggaagggtacagagtccatccccatccagggtcctgagaatgggctggagaggaagaggtggatctcagtgggctttcttgctgtgctggatggtcttggggaaaggctgggggcccagccagagctgcagcaggatgacagcatggcacacgtgcagggcagcagagctgcaggacgtggatgggtatgtgttccaggagagctcaatgagccccagcaccagcaacccgcttttgtgtt

SEQ ID NO: 490475 - DNA, 117 bp, Homo sapiens
tgcgtgcagccgtcgcgattacgctcctagacgggcaggatgatccattagaccgaggcagtccaaggttcacagtgcagggtcaatcaatgcatggtaggtgatgtagatatgggg

SEQ ID NO: 490476 - DNA, 244 bp, Homo sapiens
gtttttttttttacccccccatttttgtggggaagcccaccccccgtgtttttttccccctcttaaaaaccccgcggcgccctccccccccccggttttttccccggcccgggggggggtcactttttttcccccggacccctttttcccttttggcctttcccaaaaattttttttggggccctttaaagggggcccccccggggccgggtccggtttttccggggggccccccggggcccga

SEQ ID NO: 490477 - DNA, 212 bp, Homo sapiens
tatgctcatccccccatggcatggcttgggaaaggagaaaaaaaatagaagaaggtcggccgggctaggtggcttaagcctgtaaccccagcactgtgggaggccgaggtgggcggatcacctagaggtcaggagttcgggaccagcctggcaaacaccccatctctactaagcgaaaacccagtctctactaaaagttacaaaagattagc

SEQ ID NO: 490478 - DNA, 297 bp, Homo sapiens
attcgcggccgtcagacaagcgttcctttttcatccacaaccctgtcagcatctgttgtttcctctccccaaaatgctatggtctgaatgtatgtatcctccaagacctagatccagcaatcccattactgggtatatacccaaaggaatataaatcattgtattataaagacacatgcatgagtatgttcactgcagcactattcacaatagcaaagacatggaatcaacccaaatgcccctcaatgatagactggataaagaaaatgtggtacatatacaccacagaatactatg

SEQ ID NO: 490479 - DNA, 439 bp, Homo sapiens
gctcttattgtccaggaggcgaaggttgcagtaagctgagatcatgccactgcactccagccagggcgacagagcaagactccgtctccaaaaataaataaataaatacataaaatgatttatatgaataatagcaaagaataaaaaaaagaagagccgggcgcggtgactcacacctataatcccagcactttgggaggtcgaggtgggtagatcgcctgaggtcctgagtttgagaccagcctggccaacatgatgaaaccctgtctctactaaaaatacaaaaaattagctggacgtggtggcagatgcctgtaatcccagctactcaggatgctgaggcaggagaatcacttgaacctgggaggcagaggttgcagtgaaccgagatcatgccactgtcctccagcctgggcaacgagagcgaaactcttgtctc

SEQ ID NO: 490480 - DNA, 565 bp, Homo sapiens
  misc_feature (88)..(88): n is a, c, g, or t
  misc_feature (205)..(205): n is a, c, g, or t
tgttggggagaagcttttttttttaaaaagaaccccccccaaaaaaaagggcgggcggggggggggggtatataataaaccctttttnaaaaagggggggggttttttttccggggggaaaaaaaagggggggaaaaaacccccccccccccggaaaaaaaaaatggtgggggggggggggccccccctataaaaaccccccccnaaaaaaaaaaaaaaaaaaaaaatctttttttttttggcccccccccccccccccccctttttgggggaaaaaaattttcttttttaaacccccccaaaaaggggtttttaaaaaaaaattttttttttcaaacctttttggaagaaaaaacaagccccccccccccttttgtgtgtttccccgggggggggggattccaaaaggtcccccggggccaaaaattttttttccccccaaatatttccggggggcccccaaaaaataaaaaagggggttttttttgggccccccccaaaaaaaaaagaccccttttggccccaagttgggatggtcacttttttttttttagccagcctttcg

SEQ ID NO: 490481 - DNA, 1169 bp, Homo sapiens
  misc_feature (53)..(53): n is a, c, g, or t
  misc_feature (61)..(61): n is a, c, g, or t
  misc_feature (154)..(154): n is a, c, g, or t
  misc_feature (267)..(267): n is a, c, g, or t
  misc_feature (407)..(407): n is a, c, g, or t
  misc_feature (410)..(410): n is a, c, g, or t
  misc_feature (412)..(412): n is a, c, g, or t
  misc_feature (496)..(496): n is a, c, g, or t
  misc_feature (997)..(997): n is a, c, g, or t
ctacatccctagcaaatttttatcactccccctaccacataatactctccganttcttcanctactgatttgcacctgatctagtagacgtgagtcgagatgcagatccaccggactacactactcatacactacctgaagccacaagaggatnatctggggtagcactgagagagcatgacttgatgtggcgcgttgaggacgcagcgatggacccagcttgcagcagaagtacgtgactcggcagtctcactctattgcatgtcntcgaagccctgcgagcaactaagattacaccgtacaatgaatatgtgacccagttggcgcgctggactcgctgcaatagaacccagttctcgattgcataagcaatcgtgcatcctcttcggcaatcccaggacgcgtgncantncaacacaaatcatacgaacactggactccgctctagctagctctattttcacaattactctcacgcccttgagaccctcctcanacctgttaattcttaatcaataggcgcgtttatgcctggctctaatgattactctctacaacccgtcatgtacttatcgcgaatcacaccaacctcaagcacacgctcattgcgacacacaccgacaagtagcgttttggatttcctgtcatcaactgtctcttttcggtctccgagcaaacttcatcattacttatcttgtctaccgtcaacttctctcctcatccgccctatcatatgagggtacccgacatatatctgcgcacttccagtccgtccatacccgtcgaaccaccatatacacgcgctctcgctccacgaacaaataaattatatgtaattataattctatttatatctcctatctccccctcatcgcactccactatcctccccatatagcatcactaccccgacctccaaatatatgatttgtctaatgtactcttatctctctaacgacccacacttgtcatacatcctatcggccacctctatagnccctcctcacacacatctttacgcactaactccgctccgcgtccaatttaactattatctctagacactctgaccattgtgcgaaacgcacaattattcaccatctcgtacccgtatcaacatcattaacctccaacatctgacattatcattactacctcttccctccacg

SEQ ID NO: 490482 - DNA, 1016 bp, Homo sapiens
  misc_feature (536)..(536): n is a, c, g, or t
gccgccgggggggaggaggagagatggacgtaataaaacggacgacgcacgagcgactggaaaagaactcatcaagcaattcatgtgcgcgaggctggtcaattagcgtagctattatattttactaaaggtggtgtaaccggaagtgtaaccccgccctattaagtggggcccgcccttaatatttggggacgagaagaccatttgtgtgtttccaaacaacttccgggggttttcccgctcacccaaaaggtttttggggtccagcaactcaccttggggttggttaagcgagaaaatcgtgctcgggtccttctaggcaacaggcatccacactggccatgtttcttaagggaagaccaccaacagggaagcaatttttctcctgggacccccgagataattgttaacaaagatggaggtcaaaccccagcactcctctcaccccgtgagatgtcatatcattgagcccgcacacaattggtagcgtcttataatcagcaagatgcgcagcgtattccactactatgccctcncacaataagaatagttagtattgatacacgcggtaacatttaaggatacatccttcagcgtttctttctggaaatattaaaaaaatagatccgcggcttctcttgtgtcagctcattttcaataagagagacatcgagtaaactctctcgctacgattatataggatctgataacataatattgacaggaccgctctcgatgaacactataggcgcacacacaccaccaacaggtgaagagatattacttctcccacctccttcttgtagcagtacacagaaacatgtctgtatataatccatcgaagccccccagacagagtgtttatacagaagtcatacacacactactctcattattagtcgcgttctaataatacaaggattaatgaatttcttcttttcagtgctttaaacaaatccctcttccctccccaattgcaaccagttttttttccgaaataaacaacccacatgaca

SEQ ID NO: 490483 - DNA, 153 bp, Homo sapiens
ccggccatcggctggtggtgttaatggcccttctagctcacgcgcgtgtcatgaaccctgccgagaggccggggctgaggccaggcgacccgatcttgggcgcggtctcttgaggtggggccggggtgagcagctgagtccgggtacccggaa

SEQ ID NO: 490484 - DNA, 140 bp, Homo sapiens
actctgaggatccccgcatatgtatagcggcccttgggcatgaccgggacctgctcacgggtccacagcgggtcgaacccggcgcccaggaagcccacgccgatctggtcggccacctgtcttgacctccatcaggtgct

SEQ ID NO: 490485 - DNA, 268 bp, Homo sapiens
tgatattcttaattaaattggaggttgtgagggaagaaaaactcagggtccacagggtgggaaaagtccacaagatcaccctcaagtgccgccatcctctaggaccccgagagccctagcggtggtaaggcttgaagttttgatttattacagtgaaaggttacagattaaaatcacccaaggaaagagatgtttggggcctcttgggggccaaggtggtcggttcacttgaggtgatctggacggttccagaaaaagggtttttcca

SEQ ID NO: 490486 - DNA, 190 bp, Homo sapiens
aggtaaaattggagttaagaaaagggagcgaactccctttttgttgcagagattagcctgcttttttgataccaccacgtgacaatgtgaatgccatgatcgtgagcgtaataccgattgcaataacaaacaatgcagctaaacctgttgcaataccacctatacgaagtgaagcttgagcaagaaagtc

SEQ ID NO: 490487 - DNA, 226 bp, Homo sapiens
gatcacccgaattaacccttacctctcatccaacataacataatacagtcttcctacacctattaatacgtacaccataatcaccaacccatcatactcttcccacccacagtcagcaatcctgacctccatcgctgaccccagtaagacactcaccaagacctcaacccttgaccccccatgccgcatgatactcctcaatagccatcgctgtagtatatccaaa

SEQ ID NO: 490488 - DNA, 794 bp, Homo sapiens
cttggagaagctgatgctgtgacccagaggatgtcagctgccattggtgtttcttgctgaatctttcatacacacacgagtcctgttgtctgtcacagcccaagggttctgtagggttgctataccaatggtcgtaattactactgtacaaggtggcgactacaagagtttcgttgtagagtcctttatactctcgtgccttctagccaagtcatgttccattcatacgagtctagtcgactctgctggtctctgttagaaatatgtgctggctatgttaaaactcaaatcttgtgggttctctgcagggctttgtgatccaatgaggtcactatttggtggggatggttgacagatggcttgctgcactccatcagagataggagtatcaattttctttgtgaaagcaggtcctgatcaccgtcgctctcctgtcaccccattgttgaagagtggtagaactggaagttgaactgcctctgttaatatcctagtttgaagcccaggaatttctagaagtaatcgaagagtgcgctttaatcgcttaaactaattgtttggatcgacccgaagttcctaacaattagcgcaagattgctctttcatatttcttcaagtccatcttgttcgctctggggcgaaaacacagcttaaattcgatacctcctagtaagatagtgccacccaggaaagcacccttcactatttggctaaaaagcggagaccgttcacacgggcatggaagaggtccctggcccgggtgtgccgtgccttttgctgctcccagggtcaca

SEQ ID NO: 490489 - DNA, 432 bp, Homo sapiens
gaaggccttaacagaataagaccgtatgtgacatctgtgccttatgagtaataccgatgtagaactcgtcttgagataaacgggatgcagggtcaaactacataactgccagctatattgagtggatacaaagaagccaggaagtacatagcatggacaaggtcccggggatgaagagctgtcgatgattctcttgaaggatgatttgggaacagaccgccgacaggatagtcatggtcactcgacgtgaagaaggaaacaggaacaattgtgcagaatactggccgtccttggacacagggcactcgggcttttggagatgttgttgtaaagatcaaccagcacaaaagatgtccagattacatcattcagaaattgaacattgtaaataaaaacgaaaaagcaactggaagagaggtgactcacattcag

SEQ ID NO: 490490 - DNA, 115 bp, Homo sapiens
gtaccgtcgcgcaagctgacaggcagcgcggtattcagccctcgccccttgctcgcagttctgaactgcctggggacttcttcaacctcacagcagaggagatcaagcgggagca

SEQ ID NO: 490491 - DNA, 153 bp, Homo sapiens
ccacacgcaagaatcatgaggaggcatccacgctgttgcctgcaccccagcaaggcctcatttgcagtgctggctgctgatgccctggccaaggtcttcgtatgatgcccacctggccctgccctgtgccgccacgctggcttggggtgtaag

SEQ ID NO: 490492 - DNA, 258 bp, Homo sapiens
ctatgacttactgaatataagtattcagtatcttaatttcgcttctctctttcgaaggtttcaaatttgagcttgccctgcttacatcaccaggttcaaggatctcgtattactcctgctctgtgcatctggaaaccctctcggtccctggcctgggaacttcacatgctgtgggtctggccaaataaaaaaaaaaaaggtgttgattttggtttaattaggttatttaaaagttcattagcttttcccgggttaccg

SEQ ID NO: 490493 - DNA, 1179 bp, Homo sapiens
ggagcctcaatgcttcaaggtgtagaccttattagccgatgctgtggccgtgtacacatggggccaaaggcgactgaactgatgattattgagcagagttgagggatcgtcccaagagtacacaagaagatggtcactgcttgcgcacagtcccaattgaccttcaacgaagataacatacaaggaaacattggagcataaacacttggttccacagcatgttgccaagtaaactccataatgcaccgaagcttggggcatggcacgtagccactgctacgtgtacttggccacgctcgtactcagcgctacaggcaaagagcttccggaggacagcattcaggcgaacaggtgcatgaatcccaggtggcaaaatcagggcagtcaggtagtggattgttgcagcttgttaagaatcgcatgttcgatggtgcgcagcaactctgatgagacagctcagtgcatcaactcgcgtgttggaactactcccgatggaaagcgacaactgaggcgcacccagtggctacgacactccacagaacttgcggtgacaacagaagtacgagccaaggaaatgacagaacatttggggccaccatcatcgagatcatcgcatgcaatggcgcaaatggcaggaacaaaagaatagggggcacccgacccggagggggaacgatcgacaaagacagaggcaaaacaagcgagaatggaggacagaccccaacgcaaaaagggggcaaaccgaggactgcgacgatggcacgacccaaataactgcacggcagacgcgtgaagcaagggacaacagcccgttgagacacacagggagaggagatgcgccaagaacaagacccccccgacaaagaccgagaacaccttccgacgcaaccaacgtccgaaggagcggggcgagaagccaacaaaaaggaaggcaacgcagcccaacaacaggaacagggcgccaaaagagcccgtgcggaaggagacaacagaacaaaacaaaagcagaaccgaacgacaaagcaaccacagcgggcagcgggcaagggatgagacaaacaccgaagaagactacggaggaagaccaagagcaaaagcaatgggaacggagaagagggcgaggaaacagagagaagcagagcacctagaggacgagacgacacagacaaggcacgcgaa

SEQ ID NO: 490494 - DNA, 728 bp, Homo sapiens
gggggctactatttatttaaaggtggcggggcggagctaacaaaaattcctgaaaaccattagtcacacaaatccgcccccacctgtggcaagcgagccaaactcttttggaacagatgcttccgtgagaccctaaggagaggatcggtttctgcacctgagacagctccggagttatcaacgatcaggggagtcttagctcctgaacatgttttacctgccacagggttttctctggcaatcctaatacaaccttttcctattttggccacacttctctcaaacgtcttttatgtggaagaggctatcaagacaagaggtggcagccacaacccgggtacacctgccagtcaaggtcacgactgctggaacatcgtagcatttataagaccatggacttgtttttcacttggcataccacgtgcacatgagatttaggcctgtctgcctttttatccaagccgtgtatagactggattcggcaaatacatcctgccagattgctgaattaatttccctagtttttgacaaaaggccgaatttttctcttgggccgcccagttttttgacctctttggagtgcacatgccctggaagtcccgcagttttttccccaacgctttaaaaaactttcaccctgggaggcctgcccaaagaagcccggatcttacgacagacctcaaagtaccccccggtgtggctgttaaaaaggggccctcaaaaagccg

SEQ ID NO: 490495 - DNA, 1088 bp, Homo sapiens
gactctgcatcaaaaaaaaaaaaaaataattaattaattaattaattaattaaccaaattagaaattattcttagaaaagtgaaagggtaatttatacattgtgagaaaccttggcgtgtaagaagtttaacataggggtttagacattagctgaagaaaagaattggacaaaccgtgaaagaagcgtgaggaaatttacccagaaaggttacccacaaaggaaccaaaggccagattgaaaaattttaaacaagatatttccagagagatatccagagggaccagagtcctgggaggttcctccctggaaaggtatctaggggatttggaacatttcctggggtacgacaacctttcaaccatttggtacgttgaatgtgcccggaattgttcccagcctttttaaaaacagagccaacacacaaagggaaccaaccgaggggtctcccagcggacttattacttcgtaaagaccatctcaaaaagggggcgagaacactacgcaggaagtctggcgccaagaaggaaatctctcccttttccgtgcgctacactctttatattctcgcacaccaattttttttatcctctcaataagcaggggcctctgcggaaccagagacactaatttatcacttgtgtctcacagaaaaaatctccgagggcgccaggggagaagctcatttttgcggcaacacgaggcaacttatttgtaatttttcaaacacaaaatctcgaggggccccgagggaagcacacgtggggggcatttataacgccccgtgtttaaattcccccattcaaacttttggacggaaaaaggggccccgggacaaacggaccaacgggggtggtttccaccaccctgtggcaaggggcttccacgaggggaaggtattcccagaaaagaaaccccaagtccctgtggggcccacaaaccctttttgcttttgaaaacacccccccccggggtagtattcctaagcgttaacaatatagtttaaccgaaagaacaatttttaagccgggggcggcataggatgtaggattgcggcacattgttaaccctctgtgcttaagctcccta

SEQ ID NO: 490496 - DNA, 319 bp, Homo sapiens
agatggagtcttgctttgtcacccaggctggagtgcagtggtgtgatctccactcactgcaacctccacctcccagcttcaagtgattctcctgcctcaaccttccaagtagcttggattacaggcgtgcgccaccacagctggctaatatttgtattgttagtagagacagggtttctccatgttgtccaggcttgtcgaacttctgacctcacgtgatccacctgcctcagcctcccaaagtgctagattataggcgtgaaccactgcgcccggccagcatgcattttaaaagtggcttagatttagttttaaatat

SEQ ID NO: 490497 - DNA, 108 bp, Homo sapiens
atgtttaaagggggcaaaaaaaatttgagcttttttttcattcccatttgtttaacaaaatttggaaagtcccctaaccaaaataaatgtaaatgttttttccccata

SEQ ID NO: 490498 - DNA, 978 bp, Homo sapiens
  misc_feature (53)..(53): n is a, c, g, or t
  misc_feature (85)..(85): n is a, c, g, or t
  misc_feature (113)..(113): n is a, c, g, or t
  misc_feature (115)..(115): n is a, c, g, or t
  misc_feature (137)..(137): n is a, c, g, or t
  misc_feature (184)..(184): n is a, c, g, or t
  misc_feature (186)..(186): n is a, c, g, or t
  misc_feature (200)..(200): n is a, c, g, or t
  misc_feature (217)..(217): n is a, c, g, or t
  misc_feature (242)..(243): n is a, c, g, or t
  misc_feature (261)..(262): n is a, c, g, or t
  misc_feature (271)..(271): n is a, c, g, or t
gcaccaacgccgacggtatcagcgccctgcaccaggcctgcattgatgagaanctggaggtggtgcgcttcttggtggagcaggntgccactgtgaaccaggcagacaacgangngctggacgccactgcacgtggncgcctcctgtggctacctagatatcgccaggtacctcctgagccacngnggccaacatcgacngccgtcaacagtgacgnggacctgcccctggacctggccganntcggacgccatggagggnnctgctgaangcggagatcgcccgccgaggtgtggatgtggacggcagccaagctgtggcagaagcaggaacttgctccattcatgacacgaggtgctgcctgaatggtcggcgccatgccagatggcccgtgcacaccccagcatcaggcgcctcttgccctagcactgtggcatgactgccaaaggtgctacacttgatggtagatgagtgtatgctaccatatcaagagcattgagcttacgaacctcagaaagcatcccgagcgagcgatgtgaccgtacatggtactttcccccttgcacagctagctgactacacacctgataggacgcagccggcaatagccttgcccgtcatgccatgtgccagacgcaattggaccgaggatgacaattaggacctccagcttgaccccaataatggacgggcaaatgctagtacccatgttgaaacaagggctctagataatacgaccagctacctgaagcaccctgaatgggtagtgacacttgcaccccgacaacctcagtgaaggagaacattacgtggaaaaccaccagaccggaaatgcttttctcctattaaaccctcgaggccactgtaagcccctcaagacgtcccctttaattctggcggagtgtaccatgtatgcgcgcgacttgttgtgtattactacttgaagataactgtgcacaacgctttctccatccggga

SEQ ID NO: 490499 - DNA, 217 bp, Homo sapiens
tagagctgaagaagcagttgatgaagctgcaggccaggtcaccctgtcaatgcccagctaagagcattcaatgagtaggagaaggcaagagaagccctcagacgagcagaagaggaaagctcaggtgaggaggcttgagggaggtagcagcactgacatcctcttaccttcctcatggagcttgcctggatggatgcacatgtgtgtggctctgggc

SEQ ID NO: 490500 - DNA, 128 bp, Homo sapiens
ttgatcccccattcgtcatgggtgtgaaccatgacaagtatgacaacagcctcaagatcatcagcaatgcctcctgcaaatgagccccagccttctccatggtggtgaaggcgccacgtggactccac

SEQ ID NO: 490501 - DNA, 493 bp, Homo sapiens
  misc_feature (33)..(33): n is a, c, g, or t
gtgacttttacctagtaatttagcacctgaatntctacatatgaaatatgaatataagatacaaattttcaagccaggcatggtgactcacacctgtagtcccagctacttagggggctgaggtgggaggatcagttgagcctaggaggtcgaggctgtagtaagccgtgatcaaaccgctgtattccagcctgggtgacagagcaagaccctgtcgcaaagaaaagatacaaatttgtatcttatatattatctggaatgactttttaaacataataaaagtattttaggtattttataagtacttaaaggtaattctgaaaatttcttagaccatccccgttaatttcagctagaaaagtgatgatataagttcactttgttatgctcattcccttaaatatgaaatgcattttataggcttcttttaccaagttatttgactcttcttcttgatatttcactggtgaagtttttcatgatgactgaatct

SEQ ID NO: 490502 - DNA, 452 bp, Homo sapiens
cgggggggggcttcggcaaggggggttttggaatggggggctccggaaaaaatggaatggattctccggggggctttggtccctttggaaaaatgggaatggggccccattcccgggggggataggggcccccccagggtttggggggttatgccccgggggggggggcccgggggggtttctatgggccagggggccaggggggggggggagggggggttttgtttttaaagccaaaccccccccaaccaggttttgcccccggcgttggggttaaaaggctttttcccagatttaatttttttgggtttttaagacctttaaaagggcgggggggggggggtttccaaaaatttttggggaaagcccccggttgggggggggaaaggtttttgggggggttttttgggggcccctttggcttaaaaaaaaattttttttttcccccccca

SEQ ID NO: 490503 - DNA, 1896 bp, Homo sapiens
  misc_feature (262)..(262): n is a, c, g, or t
  misc_feature (1454)..(1454): n is a, c, g, or t
  misc_feature (1795)..(1795): n is a, c, g, or t
ggcgccgatatgggagcggtaggacggcgagggtgctcacgagaagggtgttgcggtcccaaccggtcgtcaaaagccgggaggctgatcaatcgttggtggatgtctctctggttgagcaaccatgggctgtcaacaagattctcggccatgggcacagtgcaagagttgagcgctgtacagagcacctcaacacgctggttgagtcactctgtgtcccacggctgtgtcacgcgtgttgcatgctgagccataacgcagnactagtacccttctgaatacacgccgaggtcgaaacgcatgtcgtccattgctgagtaaaataccaagatgttcattctccatgggcccgcgtgagcaccgtgaatcagacacgaagtgttcacttcatccctcgcgtcacaagccggtgcgcacaaaaccgtagactacgaacatcgaccacgaaacttaagggccaagacgcaggagaagacacgccaagggacgtacactgtactgcggctccagggtgccgcgagatggggcacgaagaggagactaagtcttgtgggacttgacaaagccgggggaacgagtgggtccccaggtgggggaaccccaaaccgaaagcgaccaccgtgggggtccaccctcttgccctgtaggtgtcgaaaagcgcaccgttggtggagaaacggaaaactcctggattcctaaacacccaaaaggctgtggtcgccggcgtgggcggggagggacattatcaacaaccgaaatacaaagggcctggcgaaaagaacattgggggtttggggatgcggcattttggaggcccatttatctgggaaaaccccgaattggaagacaggtcgcccccgatatgtcggagaagagggggagtcggagagtatcgagccttgtttcgatttattgttccacatttgtggctcctctttggggtggtgtgtgtgcttatacaagagagttggctgaagtggtgaatctccctcttctaaagagtgtgggggatattttaatattcttagaagggggcgcacattatcggggcaaaagtagaaggctttcgagagtaacggggttcccttataggtatccattagggagcgtgcaataatcgcgagcacggtggtcaggcctgaagaataggttgcggcgttggtgtttcaatggaaccaaatggacgcgtggtcaaaatctctctggtgggcaaaatcgaacttccccagtatggggggcgggacagtttctttgggctttagagaaatgccccctgagaggttgtggcaatagggctctctaagtctaaacgagggattccggacgtgtgtcctgagcagttgaacggtatgaaagtaggcgtggagacccgcacaggagatcttcctcgggcgcccggagtaacaacctagtgtcgggctggtttgggcttagtaccgctttgccatggtggngccctccagttaaaagtggtccttggcggggcgattcagaatagattgaggaccaaacggttcctcgagatggatattggccaaagggaggttcataaggtgagcctctcggcgcaagcactctataaaggtccgcgtaccaagatgatgtcgttcaccccggtcggcctgagacgacgctcacactgggtgaccatcatgagatattatagttttgtcgcaccttatagatgccacctagcgtttcaccatctaccggagagaacaacagtcagcaagacagactccccggggggagccaacactaataagcgcggcgggcagacgaacacaacaacggngtcagtaacaacagagcgcgccacgtggtcatctaacacgcgtgtcatgcagcagccagcgattgatacaacaaggacggaggaaactaacgagagcagca

SEQ ID NO: 490504 - DNA, 800 bp, Homo sapiens
cgtggtctgtcgggccgctaccgccggggcacattgtgctattgccgcgcccgccgctcgccggccctgctgcgtgacgccacgccttgctggagtatcgtgcaaccgttcgtctcatggctgctccagtctctgtgccgcgtagactggcaggttgagcctgctgttgagaactggcctgcgtgttgcgtccctcccgagccattggtcctctccagaccctacttcgccacttggtggtgcaagtgtcgcgtatttgattgttcggccatgcccgttttcgcagcactcgatgagagacataattggggccacgcgctcactttttaggtaagtcaatctgggctttacccagtgggaagacaaaggatattcgcgcacttgtgccagatagcccttggtaagcacagcgcaggttggcaagaagcattgggtgcgccctacttcttcacatttgcctcagccagcaacccgtgcgagcgcatcacgacttgacgtacgagttcacggggcgtctgtcccagaagggctcgttgcgcagagacagcttgtgcgagcgtccctgggttgacggttgatgcgacgaacttgctatgtcctcggagagggacttcccccgcgagttggaggacatgggagccggtggagtggttgcatccctgccgtggagcagtgcgaggacgaactgagtgcctgtctagtgctgagactggtgggtcctcttacacgtaccctggcattgtccgacagtccttcccatgggtcaaccctccttggcccaggctgtgggggggcccttg

SEQ ID NO: 490505 - DNA, 1747 bp, Homo sapiens
  misc_feature (1409)..(1409): n is a, c, g, or t
tcgttgtctactgttgtcgctgctgtgtggttgtctttagtcgcgttgtttgggtgtgttgtctttgtgtttcttcaactcgtatcttcgtattcttatgttggattgttgcttttctctcctcttcttgtggtttggtggtggtctgcgtcttgtcttttgtctattcttcttgagttggtgtgtgttagtttgtggtcatttctgtcatctatatgtgtggttttcttatgtagtgatctgtcgttgtttctttgtgtctctggtttttgctttgtttcgttgttgtgttcgtcgtgtgtcgcttgctcttctttgttgtggattgtgtagtcgcttgttgtgctggtggtgtgttctttatttttgtgtttgcccccttctattatttgttggtggtttgattgggttattgtgctctgtcttgttgtcgttctatttccgtgctggtgggttcttcgtggtgttcggctcttctgtaaactccatcaccttgctgtgtgttgttgtatctgtatcgttgtgtatttgtgtgtatttagtgttcgtgtcgtcgcttggtcggttctcctcgtcatggtgtgggttgtgtctctcatgtttttcgcttgtgtctgcgtcgtgtctttttgttgttgttactgttattgcttctcttctttagctttctctgtctttcttctgttgccgcacgtctgctggtcatacttcctctcatcgtgctgtggtgcgtgtctgcgtacaggtgtgtgagttgagtaattatagagtgaggactctctcgtcttgtttatttttgctcatctgctcccctcttctgcttctgttgctctttgagttgtcttgttgctttgtgcttgttggttgttgtgttgtttcctcctctcttttatgatgtgtgttgttgtgcgcgtggctgttggtttacctctcgctctgctctgctgtgttggttcgtactcctccctctactcccactccgtcgcgctctgctctcgtcttcgtcgtggtggtgttgtctgcctactctccgcactacgtctctcctctgttatcgttggttatgtctcgcttcgttcgtgcgtgtctgatttatctactcgccctgcgcgcgatgtgttgaagtagtgcttttatgctcctacactcgtctttctagctcgctcgcactcgtctccctcgtccacaccccgggcggtgcgctcgtctgtctctctttagctgatatagcatcaggtcgcttcgctattataggtgtgcgcgcccacaccacagtgtgttgttgtgggtctctcgctagtgtagagttgttctctctcctcgtgcgcacaccacctacacagagtgtggtcttcctcaccgcccgcctcccgcgctcgtgtgcgcgcacccgcttgaggtgtttgttngcgcgctggctctctctcgcgcgctcgtctctcgcgttgagcgctcgcgcgcgcctcccccgctgttgcctaccacccaggagtgtgttctctctctctctcggtgtgtgtttgttgtttgctttggctttggtggtgtggtctctcggcgtgtgtgtgttcctcctcctccatcctctcggatctgcatcgcctatgtttcccccattttgtatatataagattgagagtgtgtgttgtgtggtgtgtcttgtgtgtcgatgttcgcgcgcggggtgtgttgtgttttgataatataatatgcgcgcgccgctccctctggcttggtgaaataaata

SEQ ID NO: 490506 - DNA, 350 bp, Homo sapiens
  misc_feature (45)..(45): n is a, c, g, or t
  misc_feature (51)..(51): n is a, c, g, or t
  misc_feature (78)..(78): n is a, c, g, or t
  misc_feature (143)..(143): n is a, c, g, or t
  misc_feature (162)..(162): n is a, c, g, or t
  misc_feature (194)..(194): n is a, c, g, or t
gtgtttccttgattttaactgagcttcctagaaatggctattttnaatttnctgtctgaaagttaacacatgtttgtnactccagatttggtcactggtgctttatttagttcattttgtaaggtcatatttacctgtatgtncctaatacttatgtttgtngatgtctgggcattaaagagttaggtacttantctagtcttcacagtatgtgtttgtttgtacccatccttcttggaaaggttttcccagtcttcaaaaagaattgagtattctgatctaagtcgttggtcactgcagccatatatacattaggggggcacatgggcccagggaacactgtggactct

SEQ ID NO: 490507 - DNA, 692 bp, Homo sapiens
  misc_feature (3)..(3): n is a, c, g, or t
  misc_feature (77)..(77): n is a, c, g, or t
  misc_feature (139)..(139): n is a, c, g, or t
  misc_feature (182)..(182): n is a, c, g, or t
  misc_feature (251)..(251): n is a, c, g, or t
  misc_feature (260)..(260): n is a, c, g, or t
  misc_feature (304)..(304): n is a, c, g, or t
  misc_feature (306)..(306): n is a, c, g, or t
  misc_feature (318)..(318): n is a, c, g, or t
  misc_feature (340)..(340): n is a, c, g, or t
  misc_feature (350)..(350): n is a, c, g, or t
  misc_feature (359)..(359): n is a, c, g, or t
  misc_feature (369)..(369): n is a, c, g, or t
  misc_feature (443)..(443): n is a, c, g, or t
  misc_feature (570)..(570): n is a, c, g, or t
  misc_feature (573)..(573): n is a, c, g, or t
  misc_feature (576)..(577): n is a, c, g, or t
  misc_feature (581)..(582): n is a, c, g, or t
  misc_feature (584)..(584): n is a, c, g, or t
  misc_feature (588)..(588): n is a, c, g, or t
  misc_feature (599)..(599): n is a, c, g, or t
  misc_feature (651)..(651): n is a, c, g, or t
ttnttttattttatgttaaataaaatgggaaaggattgtaaggatgaaaaactcagtcaacaactgcctcacaaggnataagcaaaattctgccatgttattagcaaaggtaaaggaggaaaaatttacactgtaagangcaccatttccccaaggaatacctcttggcttttcctgtatgngtgggatttgcaatctaaataaatcatatttcaagaggtaacagcaacagataaaatttaaagggattnttaaaatancatttacaagactctgaacaattcttgaactcttttttaaaccncnatgaaagaacanttctttttttatgattttcttnaaggactctntgtgcactntcttctgctngtgttgttctggttttttacaacctgtcctgtagccgaacagtttgttttttttgtgttttctttccgtaaganttctttaaaggcttagcctatttgtcgctgtacactcaaaaaaatggtctccgtgggccatactaccaatgaaatggataggtaaacaaatctttttctggtcaagagaaaaaaaaaaaaaaaaaanagnggnngggnngnttcnctctacaagangaatttccctaaaaaaaatccaatgaaaatggctgcaattacaacaagaagngaaggaagaggactggtgacattatctctgaaggatgcagt

SEQ ID NO: 490508 - DNA, 164 bp, Homo sapiens
gccgcgcccgccccttccccctccccccgcgggccctcgtggtcacgcgtcgggtggcgggggtgagagggggtcgcgcccggctgagagagaacgggtgacgtgccgctgccgcccgcgaagacggagagggaaagagagagcgcgctcgggccgagaagaaa

SEQ ID NO: 490509 - DNA, 816 bp, Homo sapiens
gaaaatatgaacactggaaatgagcgccatttaaatgagatgctgtatgtaagccaggggtcagcaaagttcagctcttgtgacctggtgtgtgtgggtgtgtgtgtgtgtgtcgtgtgtgtgtgtgtgtgtgtgcgtgtcgcggtgagtttaagaatggtttataggcttgtataggattaagaaaaaaaagaaaacccacgagaaaaatgtagggagccaagaataaaatagcgctttcacgagaaatgtggggtgacccgggaagtgtcactctcgggtgacaagagtgggtttctagggaaacagtcgggctctgtcacccaggggtggagcgcaggggcatggtcgcgggtcagggaagactaccacctccggggtcaccaagcaattcggccttaccagcctcctgagtaggcgggcatacagggggtgcaccaccacagagagaataatcaacgggtgtacccagcacacccaagaaatcactggaccccgggaagggtgggggttgcaagcgagcccggggcctcagggcagtgttccccagccctgggctgaaccatgtgtgctgaacaaactaacgacgtacacgtcgcggcgtacacaaactaaagggggctccacccaacaggaacgctggtgaacacaacaaggtgctcttaaagcactaccttaccgccctagatattaccacggagcgggggcagcaaaacctggtcgccacaccctgccacacctctccaacacgccccgcaacaacagatactcgcagacacgcgcgggctcaactggtcaccacacccggcacgcgcc

SEQ ID NO: 490510 - DNA, 1169 bp, Homo sapiens
ctggagctctctgagcagcaggaggggcatgctggagctctctgagcagcaggagggacagctgaagcacctgagcaccaggaggggcagctggaggtcccagaggagcagatgggcagctgaagtagctggagcagcaggaggggcagctggaagcacctggatcagcagtgaggagagcagtagatgctcccagagcagcagatggggcagctgaagcacctggagcagctaggaggggcagccttaagcatttggagcatgcaggaggggcaattggagcatcctgtagtgagcaaggagggggcatgttgaagcatccttggagcagcaggaggggacatgttggagcatccgtggaggcattccaggaagggtaatgttgtgaggcatccgcagagacatgcagggctgctgcaaatgttttgaaaagcatcgcgtagagataggcaggcatggcgggtagggccaataagctatcctgggacgcgaagggagtgaggggggctaaggctgatacgcaaccctgtgtggcatgggcaaggtgaagggggagctagcgttgaacgccattcgtgggttgggaggcaggttaggcggtgtatggatttgcaaatctatgccaggttcacaagggccagtgttagcgattacagactggtaatgttatgcaagggctgtcggggtcaaggtcttgcacaatcatcccttaaagtttacgccagtgcgccgttggggccatacgcttgacaagagtcctttccttggtaagtctcatggcgcggtccatgcgggtgggtcgagttttgcgaaaggatttcccctatcagttattggctggtgctgggggagccatgcgcaacaagtaaaggccttgatcctgcagtggtaggcgaagctaaagccaattgcttgcgaatggtactaccgtcaagcagttatagccaggaggaagtggggcctagcgttagcaaagtacttctctttgtacgtatatgactgctgaactgctgcctattctggcaagtccttccctctagatatcaaggctgtggtttgagagacgatgctctgatatggtaccctggacgctcaggtcgggacaaggggcagcttatgtcagcacccacaatcatgtatgtcgtgttgatggttagcaacttacaacc

SEQ ID NO: 490511 - DNA, 104 bp, Homo sapiens
tggcccgcttctgctctgcgctgttggggatatggtctcttgaagcattcttaggctgccagtattgtattaacgcagaacagtataacctcgtattttagctc

SEQ ID NO: 490512 - DNA, 934 bp, Homo sapiens
  misc_feature (232)..(232): n is a, c, g, or t
gagccggcttgtaggcattcaggacagtgtcttctcgcatctcctatggaaccatcggggagcggcgagactccgtgcgccgtggtagcgagaggcgggttccggagatccgcggactcgacgttcgtcgccacatgtggttgagagggatgagtccatgccacaatgttgaagtgatgttgctccaaggtgcccattgtcgcaggatattggtagcccgaggccagttctnctgagccgtatcaattgaggggcttcaaagggagtgcgtgactcaagaagggggtcggggaggtgttctcactgtgtcgcgtgcccgtgcgtgcgtggggtccacgtggtgctctatgtgcatcctctgcactatctacctggatgcaagtactgacgtggttggcttggcctggaattggcagcatctacatgttccaagctggcatcccagtgctgtatggtttgctgggcatgagtggtattcctatcggaggtgcgtacactggtgtacctgggctggccacaggtcgtagtggatgggtggacactaaactagtccataggtaccatcctctcccatagcgagtgcgtgcatggtaccttggatggtgacttcggtcgcgtcactgtgtaagtaggggagctcgagttagctagtccttggtactgttatacactaaaacatgggaagggactgtccaaaccgtctgactccccgttcagcagactggctgggcaatcaagcacggtgcttccctctttccgcctggcagtagggttccttgggctcatgcgtgtacttcctaccgggccctgtggcgtcccatgtgagctggcgcagacatccataaaacctattccacgtcttggaaagggagcccgacatccatactcttctgtccaatcggatccggccaatttacgggcattactggaggaa

SEQ ID NO: 490513 - DNA, 410 bp, Homo sapiens
tgtgctggtttgattagaggatcctttcttgccacgaatcgcaggggtgtttatgtcaccattctgtcctgctagaggcttgcagaggagtttctaatgcaatcagagaggagctttaaaaggtaagtcatgcgaagtgatcaatagggatcttaactcaataaagtgaggtgtcttatgaagattctttggggggcctgcaatttggaagatctgcgaagtctgagtggggcaagctgtataattcctcaatgggctacgaggatatcaagatgctgagaggaaatcagcggtggttgacgagagtggatacaaaccagggattgctctctttgagctgtgtaggaaggtgattctaaatcacggcttaaggaattcctggacacatcaggcatagattagatcatcca

SEQ ID NO: 490514 - DNA, 358 bp, Homo sapiens
tcatcgagctcggcccatcttatcgctgactgggcataccaggacgccatattggcgcggctgcaaagccaacttgatcgcctgttgctccaacaccacagacagcaccaagcgcacctgctccatcagcccacgaaaactggcgccctgatcaccgtgttggtaatgaacgttcaactgcgcacgcttactgtcactggcgaacgttgataactcaccgagcagggacaccagcgcacggaacactgcttcgggccgcacccgagcctggctcaggcagtggcgcagctccagctcggtacgattgattacttgcagcatcaggaagtcagcgacatgatgggccgagctcgattat

SEQ ID NO: 490515 - DNA, 523 bp, Homo sapiens
aactcccaaaccagaagcttgaaagtatttattaaatccccactggacgaaagacagtgatgactaacacctatccagtcttgacagttttaatcccaaacactgggctatttccccagtctgtaactgaattgcaaccatctgtttgtcaaacacctaaccatctaacttttacaccattatgcgcatagaaaggctaagtgttcattatttaaaaaacaagtagtcattaaatatccactattcccccagctcaccaagcccttattgcaatcccaaatatgcaatctgtgtcacacagtgacaggctgtatttcatatatatatatgtgtatatatacatatatatgtgtgtatatatacatacacggatatatatatatatatatatatatatatatatatacacacacacgtatatatatgtatatatacagtattaggtacaaatggcaattaacagtccctacaaaaattcaatttcagttgaggctatggctcctatgccttgggatggtttcga

SEQ ID NO: 490516 - DNA, 434 bp, Homo sapiens
tgtcttcctctagatagtcagtcatacgcactgactttccatggaatactatgcagccataaaaaatgagatcatgtcctttatggtaacatggatgcagctggaaccagtatcctaagtgaactatcacaggatcagaaaaccaaataccacgttctcactttaagtgggagctaaacattgagtaaacatggacagaagggaacaacaggcacgggggcctactggagggtggagggtgaggctccaaaaaacacccatcagggactgggcacagtggctcacatctgtaatcccagcactttgggaggcggaggtgggcggatcacctaaggtcaggagttcaataccaggctggccaacatggtgaaaccccgtctcaactaaaaatacaaaacattagccaggtggtggcgggtgcatggtggcgggta

SEQ ID NO: 490517 - DNA, 706 bp, Homo sapiens
aagacaattctcctcgcagatcacatcgcagtaatgcatgagcttaggtgtggttcatagtgtctcgtatcatccactactaaagggacactatgtgcgtgctatactaagtccataatgccagtcatgctatttcgtactgatgcgcgaaacgcaaaggattggcatttatgacgtcaccagtcccatagactcctgatcctacgcatatctctgtgtagcataagtacagtcatggctggcttgagagccttatgaaatctacgtcagtaagacattagcccgcttactatctcctcccatacaggtagaagtccgcgctctcaactcaagtttggcatcttaaagtaaactccactgttctagctagtaacacacaagttgtcagctacacattatcctctatgaactcatatgtatcacttctcaacgtctcgtatgttctgtcatctccgacaagtgtacgtataaaggtctaatgtatccacagtaatgatctcttattagtcaatgcaaagtaccgtcggcgtctgtcttcccatagtcaagcgtccctcccaaccaccatttcaaaaccatgatcatgagtccctatggcggattcatcagaatttcatgtacgtcgatgcacagtccacaaccagactgattaacataatgtacgagaatgaatgtgcctcaagttggtgcgcttcaaataattaaa

SEQ ID NO: 490518 - DNA, 478 bp, Homo sapiens
tgttgagtagattggggccaaagtacccccagcaagagccgctccatttcggcaggagggggaccacgaaaagtgaactctctgaaaccatggcccggcccggggcgtgtcgtctgacgcccaaaggcttgctccgtcatcattaaagatccagttatatctcttcgtggggggaacatcgctggactctcgtgggggtctggcttcccaggccttgtcaggtatctcctcctcttcaaatttgttggcctcgcggccacaaagtggcatggccagggcctttgtcctccaaagtggtggtggaggagttggccagagaggcatcgtactcttcgtcctcatcctattctgccgtgaggctctgctccttctcgttggccagccgggtactctcctcccttagctcctggttaatcttctcacgctccttctcgttgtctaccaccttgagggtttccaggatggttcttgatgggcc

SEQ ID NO: 490519 - DNA, 998 bp, Homo sapiens
ggcgcatgcctcgtaatcccagactatatgggaaaccaaagcaggaggacgcttgagcccaggagttcgaaaccagctggcaacatgcaagacctggtctctacaaaacaaattacaaattaagctgggtgtggtggtgcttggagaggctaaggtgggaggatcacttgagccctggagttcgagaacagactgggcaacatggcgaaagcctgtacctacaaaaaaatacaacaagttagccaggacgtggtggcacacgcctatagtcttagctacctctggtggcagaggtgggacagcttgtttgaagcctacggaggttacatggctgcaggtcaagccgagattaggacacaaatacgattccaagaccatgtgttgaccagaggtagaaaacccgtagtcttcacaaataacaaaatgtgaacatatcaggagttccaagaaccagacgtggccaaacacccggtgcaaaacccactcttgatacgtaaagagagaccacaagaatttccggccttggagcaccagaatagcaccatgagatcctgcgacacttgataaataccccaggacacagtacatgcggaaggggcccaaagtgcagtggtgaaatagtccacgatgcaacaggggatcacaggagggtatacgaagaacgccaaaccgatgagcacccaacatacttggatggaaaaaacgaacgcaagatcgtacataacactaaagaaaaaagtaacaagaaaaacaaacaaagaaaaacaaagaattaacagcacccacagggacaaatggagaaaggacacgacaagatggccaacatacatagaagacccaaaaggaaacaagacagagagcgaaaaagaataagtgaaacgcgcaaagaggagataaaccacggcgaacgggaaagcaaacgaaagggaaaaagacaaaaagaacagctgataggagaaaaaaacaccaatgtggacaaacaacaagagaaaacacaa

SEQ ID NO: 490520 - DNA, 663 bp, Homo sapiens
acaggcagtacggacgctgctgacatgctggcttatgcgtattttagcggttagatcaccgcttttcttgaggaggtgccatagggaaagagaattcacggtagggtattcgtgcggcatccgtcatgcgctattgcaagcttgtatctgcaacccgggaaactgcatttgcaatgtacttccccaactatgtctattgaatagaggtcacgccaacgaacgccactgagcgttaaggagtgaccacatgccgcagacacctgcactgcgacctggcgagcgtcgcattctgcgactcgacgaggtcgaagccaaatcgggcttcaagcgcgcccacatctacgcccttatgaaaaaaggacagttcccccaggctttgcgcctgggggtgcgcgcagtcggctgggactcggccgaagtggatttgtggatcagcgagcgtttgaagaaccgggcgcacccgcctgctctcacgcacaacgcctgaggagatcgccatgaaggtcatctccgtgatttccaccaagggcggcgtcggtaaaaccaccaccgcggccaatcttggaggactggttgccgacgctggcttgcgcgtgctgctgatcgatctcgatgtgcagccaaccctatcgtcgtacttcgaggcgtacgtagcgggcgggc

SEQ ID NO: 490521 - DNA, 1071 bp, Homo sapiens
  misc_feature (498)..(498): n is a, c, g, or t
  misc_feature (631)..(631): n is a, c, g, or t
gagatggcggcgcagcagcgagactgcgggggtgctgcgcagctggcggggccgcgccggagagaagctgaccccctaggacgcttcacagtgtcccgtgtgcttagaggtgtacgagaagccgcgatacatgtgccctgtggacacgtctttctgctctgaagtgccctgcggggaactgtcttgagagcccgtagagtaaggtcctgtcgtgtgcgggtgtgtcggcagtcgacgtctgtgcatccatgtgtcgctccagatgcctgtggatgctcgttagcggcagattcgagagcactatgacgacttcattgtccatggctgcacgtaaggacatttcttccttgtcctagaggatcgcggttcccaccgctgtgcatacattggtgtccaaacactatcgcatgcaattaacatcactggaacaggttgatgtagagggcctaccagttagagtgattgcaatctcattcgaagccatatggcaattgttcncaacatccgtgtcttacgacgcttgttcctttagttccattacctgtcctcgagacaaggaaatcttggatcgacgggacatggacctttgtaggaaccactttgcgagaattattcccatacgcgacggatnacctaatatcttgtgcgatttgtcccgagtagtgttgccgtcgaatgcgcctgtggggaagaccccgagactactcgcaatggggctcaacctttcaggagagcacattccagcgccggcaccggtttctcttactgaccacttcttgtggattatgactgttgaattgaaagaaggggaccactcgattgcacgtcagggctgctcgccagtggcgtctaagcaagataggaccctcggatggaagcataacgtccggtgggactgccaagtcgtgtcttcgcatgtttacccacatggttcacagtttaaccattgttcatccgtgtagatctattgacgcctgggttaacgatataccctgggcccacaggaaccttgaaaataaggcatggcgcttggggacacggggccactactaggcgggggaagtgggcccc

SEQ ID NO: 490522 - DNA, 189 bp, Homo sapiens
tcatagaggatcccctagggtctagggagaacagagtccgtccaccactcttccaactcacggtggcacaggctgcagaccagaggcctggaggccgagacttactgatacgtaggttttattcgtcccaccgctgttttcataaaacattggaattgctgtcgtaacatgactctccctaagacccta

SEQ ID NO: 490523 - DNA, 189 bp, Homo sapiens
cccgctggttttacccactaactttggaagaaggtaaattatttcttttaccttttaccaaattcccaataccttattaatcactttaagcaaaaaatccttttttttttttttggaaagggccaccctttctttaccatgaatttcctgggggccccatcctgcctatgggtgcaaaaaaccatttat

SEQ ID NO: 490524 - DNA, 103 bp, Homo sapiens
  misc_feature (24)..(24): n is a, c, g, or t
taactttcccttggaaagcgaaantttccccatttttcttaactattcttttaaaaaaaaagtttcacttttttagagaccatattttccttaacccataggg

SEQ ID NO: 490525 - DNA, 141 bp, Homo sapiens
tacagtctatgctgagctagcgtattcagtggactcatccatggagcgtctactcacgcacagcttcttctctgggcatattggatatacttatttgcactgaggtaatctaggcttcactatccattgtgtaggtactgg

SEQ ID NO: 490526 - DNA, 107 bp, Homo sapiens
cttagtctcatcttcccttataagcccaggaggaggtttttcgtaaaaggactccaggtgcttgagctgctgcagctgctgcgcgtcgtgtcgccgccgcttctgct

SEQ ID NO: 490527 - DNA, 442 bp, Homo sapiens
  misc_feature (155)..(156): n is a, c, g, or t
tcactgcaagctccgcttcccgggttcacgccattctcctgcctcagcctcccgagtggctgggactacaggtgcccgccaccatgcccgactaatttttttgtttttagtagagacagggtctcaccatgttagcaggacggtcttgatctccnnacctcgtgatccgcccgcctcggcctcccaaagtgttgggattacaggcgtgagccactgcgcctggctaatttttgtatttttagtacagaaggggatttgccatgttcatcaggctggtctcgaactcctgacctcaggtgatctgcccaccttggcctcccaaagtgctgggattacaggcgtgagccactgcgtctggcctcaatctctacattatatcagatgacaattaaggaatttttccgtcgacgcggccgcgaatttagtagtagtaggcggccgc

SEQ ID NO: 490528 - DNA, 752 bp, Homo sapiens
ccggagcgtgctaatggaaggtcactctggcagcaaggactcatacatgaggaactgaaatacatcactgtatataattgcggcaatcagcccagatgctatcaagtaggaatcatagagcagtagtccattagtgggatggactaaaagatccatctccacgtgatgcgttggatttataagctgatgattgttaatacgaaggatggcacaagaattatatcatgcctgggtcagacattcgagcgaatgggttactgcaggggagtttgacaaatctttgggatgatgagcctgcggtatgtggagacaactgctgaatgaggatgtgagagatcaactacctgtcgtagtgaatccctgaaagagtatgtatcggtagatatctaagcaccacgtggatacgaggatacggtgcatgatcatcgtgagagagaagtccaaataacactctggaacatgattaaaacgtaggtatcaccagtaattgatacggtgatggagacttgatttgaccctgggatctgaagggatccgcgctctgtccgaaaagtaacgctaaatcggaaagatcaaatttgatttgactatacgtaaacaaaggtcatagtgtcaccctaactacggagtcatgatgggtgggctatttatgaagatatgttagaagttctggttgacataaggtcaacatggagtagaagcgatcagtatgtagacctagtaagaacggagcatataatggcttttggtac

SEQ ID NO: 490529 - DNA, 135 bp, Homo sapiens
ctgctcaatggataaacctgtgcataagagcttagtaactgtgatataaacagattgtgaaaaatagacttagccaaatctcatgtgaggattaaaaaacgcgatgtcctagataagtcagtgtgacactaaaga

SEQ ID NO: 490530 - DNA, 533 bp, Homo sapiens
  misc_feature (322)..(322): n is a, c, g, or t
  misc_feature (510)..(510): n is a, c, g, or t
gagtagctgggactgtacataggcatgcaccactgcacctggctcataagacttgataatttataaaataattctacagcctcttccttactcttcccctttatttattccaactggcatatgctcttttcctggtgagtgagtcgtctacagtgttttctggtggataatgcatcccgatcaaccagagaaaaaacagtgagaaaaatctgtgttctgttgcaatccctctgtgatttgtctaatacaatagatgtgggtggtacccctcgcagagaaaatagtattcgctttccttgtctccttgatacaggttacaaanatatccattgtcaagaatattcaaagaggataaagtgattaggggaggaaaggtaaaattcccctgaagactcgccaaccaagaaccaactttgtaacggtttgtgggtgcgccgatactgttgcattgtatttgctgtgatatcaatggaacacccccgaaatattttagtgtaaatcttgtgatcnttacagttgttagagataaagaa

SEQ ID NO: 490531 - DNA, 813 bp, Homo sapiens
ggtgccactgcactccagcctgggcgacagagcaagactcagtctcaaaaaaaaaaaaaattactggccaggcatggtgatggtgcctgtactcctagctactgtgggaggcctgacggcatgagaaacttggctgaacccaggaggttggcggttgccagttcagtccgagactcggtgccactttgtattccagcgtgggtggttgaccacgcgcgaagaaactccggtcctcacaaacaacagcgttggcgtggtggggaacacacctgtgggtcccacgtatcgtgcagacctgaggccggcggactgtgcttgagcacaggagtcctggacatgccagcggcaccaagtgatcacgtgccaccgtggtatttcaccagaatggggctggacaaggaatgcagagccgaccaggcctttccaccacaaacgccaacactacatagaacacaaacacaccaaaattagtagccgacaaccgacaccagccaaaaaacgatcaaaacacccacaacccgatgtgtgcccgcgcgagccacccgaagaccaagaagcacacacgaggaccaaacgagagccaccaaccaggcccccgcgcgatccaacaaaacagcgcacgagaactcactcccacacaaccaacaagcgccgcgtggaaaccaccgcgtgcgcgaaacacaaccacaaaggcgctcagcagcaccaccgtgcgacccaccaagcagcgcaacggaccacaccacaaatcgaccaccggggacacagagcaagacacagaagaagcaagagacacgcacagaacaaacggca

SEQ ID NO: 490532 - DNA, 138 bp, Homo sapiens
gttgtagaatgcagaggaaaagttcttgaagtgaaattaaaagtgccactccagtgaacacgcagatgataagaaagcaaaacaacctttatttgcttgatgggagaagactggggatcctactatgagtctgacctt

SEQ ID NO: 490533 - DNA, 577 bp, Homo sapiens
ttcggcacgagaaaaattgtctccgctcccagaaaaagatggcgtttcttctgagttggtaaaacatgctgcttcacgagggaaaaaaactatcactggcccactatcctctgattttctctcatatccagacgaagcaattgatgctgatgaggacgtcactgtccaagtgccagatactcctacttgagagaacaagtaatggtgagggaaaaaatcataatatgaaatatattatgacgacgtcaattaacgtcgtccacgcctgtcgtcgtcaacccacgaaaatatgggggcggtttttataacggttattaaaacgacgggatgccgtctacggcacggacaaacccatcgctttggaaataggtgactgcgcttgaaaaacataattatttattagcataataaattcaagacagcaaatatatatgctgtcaatacgtacatattaagcctaaatattctgtggaaaaaagagacaaattggtaattatggagaaagctttggaattagacggagaatatccggaatctcttagggatgaattcaacatccctacatttaaatccatgg

SEQ ID NO: 490534 - DNA, 147 bp, Homo sapiens
acagcaaccggcactcacttggaatcccagtgttccgagttctaaggccactgaaaaccatcaagcgcttgccaagctcaaggccatcttcgactgcgcagcgacttccttgaagactgtttttaacataccaaaggaggacaagct

SEQ ID NO: 490535 - DNA, 425 bp, Homo sapiens
tcacgattctttgccctgcgcaatgacttcgatggctgcagtcaacagttcaccgcgtttttccagacggttacctaccgggcggccgcgacgtggggcgggcgctgaatcactgtcttgggagtgctgactatccgtggaaggcgcttgagcatcatgcatgagagaaagtgattccgttggttgaaggcgttgagccggcagcggctgcgaacgccattttggcttggcacgtcgcgatcatgcaatcgttcagattcgaccgctgccaatcaccgcgacggcccgaacctccacgcgcaagcccggcattgccagttgtgaaatgccgacagcggtccaggctggataacgttcagggaagtattcgtcctttacctgtccaaaggcgtgcacttcgccctgcagatcggtatgaaacgtca

SEQ ID NO: 490536 - DNA, 1593 bp, Homo sapiens
gtggcgaattcggcacgaggacaccaaggcaggaggctaggaggtctacaaatagcgactgggtagctggtgtgaacacagggggtactgggggggcttagcccccaaggaagaggaccagtttttccccagcaccaccatcaaggcctcgaggctcccagctccctctacagcctgtggactgacttagggaatcccgaactacagcggctaaagcagttactcaggaagggttctacagggacaaaggagatggaacttcccccagagccccaggccaatggggaggcagtgggagctgggggtgggcccatctactacatctatgaggaagaggaagaggaagaagaggaggaggaggagccacccccagaacctcctaagctggtcaacgataagccccacaaattcaaagatcacttcttcaagaagccaaagttctgtgatgtctgtgcccggatgattgttctcaacaacaagtttgggcttcgctgtaagaactgcaaaaccaacatccatgaacactgtcagtcctatgtggaaatgcagagatgcttcggcaagatcccacctggtttccatcgggcctatagttccccactctacagcaaccagcagtacgcttgtgtcaaagatctctctgctgccaatcgcaatgatcctgtgtttgaaaccctgcgcactggggtgatcatggcaaacaaggaacggaagaagggacaggcagataagaaaaatcctgtagcagccatgatggaggaggagccagagtcggccagaccagaggaaggcaaaccccaggatggaaaccctgaaggggataagaaggctgagaagaagacacctgatgacaagcacaagcagcctggcttccagcagtctcattactttgtggctctctatcggttcaaagccctggagaaggacgatctggatttcccgccaggagagaagatcacagtcattgatgactccaatgaagaatggtggcgggggaaaatcggggagaaggtcggatttttccctccaaacttcatcattcgggtccgggctggagaacgtgtgcaccgcgtgacgagatccttcgtggggaaccgcgagatagggcagatcactctcaagaaggaccagatcgtggtgcagaaaggagacgaagcgggcggctacgtcaaggtctacaccggccgcaaggtggggctgtttcccaccgactttctagaggaaatttaggcgtgcgggcgcctgcaagcgggagacacccacaccccattctgggcgggcccagtggagtttggggaggggggcgaaagcaacgggactgctgggagaggaggggtaggaaggcccgcctgagcgcgacggggcttccgggaagggactggttctcgcccccttccccagcctggggcctcggatacctgctgcccagagcagcccggacccgaaacctttcaggccccgcttgcaagagctggaaaaaaacgcgtatctactaggaggagccagggactggggcggggggcgggggcgagggagggcgaactgtcgaatgttgcgaatttattaaacttttgacaaaacttaaaaaaaaaa

SEQ ID NO: 490537 - DNA, 292 bp, Homo sapiens
  misc_feature (1)..(1): n is a, c, g, or t
  misc_feature (230)..(230): n is a, c, g, or t
  misc_feature (275)..(277): n is a, c, g, or t
  misc_feature (284)..(284): n is a, c, g, or t
nttgaccagacctggttattttgtgtcaacaacataagccgaattacaactgatgacgtcttagatttctaggggttttacacaattttggaacattcatatcaattacacacccataaaatataactgacgaagatctagtgtacttttttgacaatgtttttcatacagtttttcatcttccaatgggcctgattttgtttaatatgtctcttttttcaacctttggnaagtttccgggccctctgggacatccggttaattcccggtaaccnnnggcaagncaatttag

SEQ ID NO: 490538 - DNA, 1661 bp, Homo sapiens
gtggcgaattcggcacgaggacaccaaggcaggaggctaggaggtctacaaatagcgactgggtagctggtgtgaacacagggggtactgggggggcttagcccccaaggaagaggaccagtttttccccagcaccaccatcaaggcctcgaggctcccagctccctctacagcctgtggactgacttagggaatcccgaacgatgacagaaaaggaggtgctggagtcccctaagccctccttcccagcagagactcggcaaagtgggctacagcggctaaagcagttactcaggaagggttctacagggacaaaggagatggaacttcccccagagccccaggccaatggggaggcagtgggagctgggggtgggcccatctactacatctatgaggaagaggaagaggaagaagaggaggaggaggagccacccccagaacctcctaagctggtcaacgataagccccacaaattcaaagatcacttcttcaagaagccaaagttctgtgatgtctgtgcccggatgattgttctcaacaacaagtttgggcttcgctgtaagaactgcaaaaccaacatccatgaacactgtcagtcctatgtggaaatgcagagatgcttcggcaagatcccacctggtttccatcgggcctatagttccccactctacagcaaccagcagtacgcttgtgtcaaagatctctctgctgccaatcgcaatgatcctgtgtttgaaaccctgcgcactggggtgatcatggcaaacaaggaacggaagaagggacaggcagataagaaaaatcctgtagcagccatgatggaggaggagccagagtcggccagaccagaggaaggcaaaccccaggatggaaaccctgaaggggataagaaggctgagaagaagacacctgatgacaagcacaagcagcctggcttccagcagtctcattactttgtggctctctatcggttcaaagccctggagaaggacgatctggatttcccgccaggagagaagatcacagtcattgatgactccaatgaagaatggtggcgggggaaaatcggggagaaggtcggatttttccctccaaacttcatcattcgggtccgggctggagaacgtgtgcaccgcgtgacgagatccttcgtggggaaccgcgagatagggcagatcactctcaagaaggaccagatcgtggtgcagaaaggagacgaagcgggcggctacgtcaaggtctacaccggccgcaaggtggggctgtttcccaccgactttctagaggaaatttaggcgtgcgggcgcctgcaagcgggagacacccacaccccattctgggcgggcccagtggagtttggggaggggggcgaaagcaacgggactgctgggagaggaggggtaggaaggcccgcctgagcgcgacggggcttccgggaagggactggttctcgcccccttccccagcctggggcctcggatacctgctgcccagagcagcccggacccgaaacctttcaggccccgcttgcaagagctggaaaaaaacgcgtatctactaggaggagccagggactggggcggggggcgggggcgagggagggcgaactgtcgaatgttgcgaatttattaaacttttgacaaaacttaaaaaaaaaa

SEQ ID NO: 490539 - DNA, 346 bp, Homo sapiens
ctgtactgatagagattagatgtcttctgtccgttgcaaatagctagtcagttggtgctagaagcagatctcaacgaggcactagggttattataatacaggaaacttcttatctactcaacttgttccttctagtgccaagctcatgttctatgagttcatttacaatagcctccttagtagtgggtttcaaatctagactcagttgctttccagtgaggaccccagaagtgtctgttttccacatcgtacccttctacagctctacacaatacagggcattttgaaaacatctggacactagcacctagaacattgctggagtattgttttcaacgccactcag

SEQ ID NO: 490540 - DNA, 1263 bp, Homo sapiens
gtggcgaattcggcacgaggacaccaaggcaggaggctaggaggtctacaaatagcgactgggtagctggtgtgaacacagggggtactgggggggcttagcccccaaggaagaggaccagtttttccccagcaccaccatcaaggcctcgaggctcccagctccctctacagcctgtggactgacttagggaatcccgaacgatgacagaaaaggaggtgctggagtcccctaagccctccttcccagcagagactcggcaaagtgggctacagcggctaaagcagttactcaggaagggttctacagggacaaaggagatggaacttcccccagagccccaggccaatggggaggcagtgggagctgggggtgggcccatctactacatctatgaggaagaggaagaggaagaagaggaggaggaggagccacccccagaacctcctaagctggtcaacgataagccccacaaattcaaagatcacttcttcaagaagccaaagttctgtgatgtctgtgcccggatgattgttctcaacaacaagtttgggcttcgctgtaagaactgcaaaaccaacatccatgaacactgtcagtcctatgtggaaatgcagagatgcttcggcaagatcccacctggtttccatcgggcctatagttccccactctacagcaaccagcagtacgcttgtgtcaaagatctctctgctgccaatcgcaatgatcctgtgtttgaaaccctgcgcactggggtgatcatggcaaacaaggaacggaagaagggacaggcagataagaaaaatcctgtagcagccatgatggaggaggagccagagtcggccagaccagaggaaggcaaaccccaggatggaaaccctgaaggggataagaaggctgagaagaagacacctgatgacaagcacaagcagcctggcttccagcagtctcattactttgtggctctctatcggttcaaagccctggagaaggacgatctggatttcccgccaggagagaagatcacagtcattgatgactccaatgaagaatggtggcgggggaaaatcggggagaaggtcggatacctgctgcccagagcagcccggacccgaaacctttcaggccccgcttgcaagagctggaaaaaaacgcgtatctactaggaggagccagggactggggcggggggcgggggcgagggagggcgaactgtcgaatgttgcgaatttattaaacttttgacaaaacttaaaaaaaaaa

SEQ ID NO: 490541 - DNA, 171 bp, Homo sapiens
gcaggcgtcgcttcacatagcagggaactcctcccacctggagcctccgtagacctaaccatcttctccttacacctagacaggtgtctcctctctcttaggggccaacaatttcatcacaacaattatcaatatacaaccccctgccataacccaataccgcgtgcccct

SEQ ID NO: 490542 - DNA, 758 bp, Homo sapiens
  misc_feature (549)..(549): n is a, c, g, or t
  misc_feature (758)..(758): n is a, c, g, or t
tttttttttttcgatagtcatttcattccatggtgggacagatactggatcaagcttgctttccataattacttcactgactccctccatttcaaaatcgacattcacaaatgagctggatatcactgtctctggacgatctgtctgaacaatggaatcagtctgcaatttattctgttgatattaggcttctgcttcttcagacatcctgtgatcttcttcttcttcatcttcctccttcttcatccgataatattcatcaatggcatattggtactatggggtgctgatacccaaaacagatgcaatcttctctccaaggaagtcacacactgatagagttgatgtagcagcccgaagcatgtaaaaccataagtagggaccccacgtaagcactggcggatcaacagtaggcaaaacatctttcttctccaggccatcaacttggacttcatctgagctatattcttccattgtttcaccactaacaaagtgcatgactctccttgagactatcttgttttttcctatgactgccacatctacatnttcgctgcagcccggggatccgaccggctatagcggacgcaccgtagtgcacttcaactttccgtcctttcatgaagtttagttcgagctcgagcaatcgctgccgatctgacggtcacttaaacagctctgctatatagacctccaacgtacacgcctacggcccatttgggtattgagctgagttgcacaaactttggaaggtcccn

SEQ ID NO: 490543 - DNA, 1534 bp, Homo sapiens
gtggcgaattcggcacgaggacaccaaggcaggaggctaggaggtctacaaatagcgactgggtagctggtgtgaacacagggggtactgggggggcttagcccccaaggaagaggaccagtttttccccagcaccaccatcaaggcctcgaggctcccagctccctctacagcctgtggactgacttagggaatcccgaacgatgacagaaaaggaggtgctggagtcccctaagccctccttcccagcagagactcggcaaagtgggctacagcggctaaagcagttactcaggaagggttctacagggacaaaggagatggaacttcccccagagccccaggccaatggggaggcagtgggagctgggggtgggcccatctactacatctatgaggaagaggaagaggaagaagaggaggaggaggagccacccccagaacctcctaagctggtcaacgataagccccacaaattcaaagatcacttcttcaagaagccaaagttctgtgatgtctgtgcccggatgattgttctcaacaacaagtttgggcttcgctgtaagaactgcaaaaccaacatccatgaacactgtcagtcctatgtggaaatgcagagatgcttcggcaagatcccacctggtttccatcgggcctatagttccccactctacagcaaccagcagtacgcttgtgtcaaagatctctctgctgccaatcgcaatgatcctgtgtttgaaaccctgcgcactggggtgatcatggcaaacaaggaacggaagaagggacaggcagataagaaaaatcctgtagcagccatgatggaggaggagccagagtcggccagaccagaggaaggcaaaccccaggatggaaaccctgaaggggataagaaggctgagaagaagacacctgatgacaagcacaagcagcctggcttccagcagtctcattactttgtggctctctatcggttcaaagccctggagaaggacgatctggatttcccgccaggagagaagatcacagtcattgatgactccaatgaagaatggtggcgggggaaaatcggggagaaggtcggatttttccctccaaacttcatcattcgggtccgggctggagaacgtgtgcaccgcgtgacgagatccttcgtggggaaccgcgagatagggcagatcactctcaagaaggaccagatcgtggtgcagaaaggagacgaagcgggcggctacgtcaaggtctacaccggccgcaaggtggggctgtttcccaccgactttctagaggaaatttaggcgtgcgggcgcctgcaagcgggagacacccacaccccattctgggcgggccctcggatacctgctgcccagagcagcccggacccgaaacctttcaggccccgcttgcaagagctggaaaaaaacgcgtatctactaggaggagccagggactggggcggggggcgggggcgagggagggcgaactgtcgaatgttgcgaatttattaaacttttgacaaaacttaaaaaaaaaa

SEQ ID NO: 490544 - DNA, 1228 bp, Homo sapiens
gtggcgaattcggcacgaggacaccaaggcaggaggctaggaggtctacaaatagcgactgggtagctggtgtgaacacagggggtactgggggggcttagcccccaaggaagaggaccagtttttccccagcaccaccatcaaggcctcgaggctcccagctccctctacagcctgtggactgacttagggaatcccgaacccacctggtttccatcgggcctatagttccccactctacagcaaccagcagtacgcttgtgtcaaagatctctctgctgccaatcgcaatgatcctgtgtttgaaaccctgcgcactggggtgatcatggcaaacaaggaacggaagaagggacaggcagataagaaaaatcctgtagcagccatgatggaggaggagccagagtcggccagaccagaggaaggcaaaccccaggatggaaaccctgaaggggataagaaggctgagaagaagacacctgatgacaagcacaagcagcctggcttccagcagtctcattactttgtggctctctatcggttcaaagccctggagaaggacgatctggatttcccgccaggagagaagatcacagtcattgatgactccaatgaagaatggtggcgggggaaaatcggggagaaggtcggatttttccctccaaacttcatcattcgggtccgggctggagaacgtgtgcaccgcgtgacgagatccttcgtggggaaccgcgagatagggcagatcactctcaagaaggaccagatcgtggtgcagaaaggagacgaagcgggcggctacgtcaaggtctacaccggccgcaaggtggggctgtttcccaccgactttctagaggaaatttaggcgtgcgggcgcctgcaagcgggagacacccacaccccattctgggcgggcccagtggagtttggggaggggggcgaaagcaacgggactgctgggagaggaggggtaggaaggcccgcctgagcgcgacggggcttccgggaagggactggttctcgcccccttccccagcctggggcctcggatacctgctgcccagagcagcccggacccgaaacctttcaggccccgcttgcaagagctggaaaaaaacgcgtatctactaggaggagccagggactggggcggggggcgggggcgagggagggcgaactgtcgaatgttgcgaatttattaaacttttgacaaaacttaaaaaaaaaa

SEQ ID NO: 490545 - DNA, 117 bp, Homo sapiens
  misc_feature (76)..(76): n is a, c, g, or t
tcgtgggttggtctcatgtggaggaatagaagtgtctctgttgggggacagaggaacctgggtgagtccgatcgcntatgtcctacaatctgctcttagcacacggccttgccagtg

SEQ ID NO: 490546 - DNA, 615 bp, Homo sapiens
ctgacctcaggtgatccgcccacctcgacctcccaaagtgctgggattacaggtgtgaggcaccgtgcccaatccgtacttgacatttttaactcctagggtccttgggcagatatccacatcctgtcttgggaggcagtcctggtccttagctctccaccccaaccccctcatatccctggaaattgagagctgccaggagcaaagcagattgttgctgacctcagaagaacacaagttggccatttgtgaggaggagggattcaataacctcctggaacagaaataatgaagatgaggccagtctttcacgtgtggcatgttttcttggtgtgctttgctcctttggaagagacttaggggacaggagcatgagaatggggcccccaaatatacctgttccttctgaggcagatgagaagcagcccaaatgaaaaccctcttcctgactggtgctgagacagctgtctctacatcatttttcaaaaaagccacaaaggacttcatggagggtgaaatccttccccatcttaatttgcctgcctaacccaaatgtgggaagttggaaattgcttattttcaaaattagccaggattttgtcacttccaaggcaa

SEQ ID NO: 490547 - DNA, 519 bp, Homo sapiens
  misc_feature (467)..(467): n is a, c, g, or t
ttgcgggcgactctaaggaccatagctgtgtcatacagaatcacaaatgcgagcgctcatgagcaggagccacacaatcatattacagtataactacgaaattccttttacagtaaagtgccctagatccttacaagtttcactaaattttatccggttccaaccaaagcctccacgttgaaagagactatcattgtaattatcaaacatgatcgtcataacccaaaataaaaagacaattgggggaggccataaaacttctcataaaaccactgaggaaattaaaatggacttggacatgtctttagtttgatgcataaatttgaagatgcaccactgtatatggtagagctctaatagccacctaccgaggctacatcggcagctgcagcggtgctgcaaagttaaagcaggtcgcactgagctgacacataaagccctttgtgggatactgtagtggtagtgtnggcaatcaacagatttaggcactccaagtttaaggcagcatttgaatggaag

SEQ ID NO: 490548 - DNA, 1755 bp, Homo sapiens
gtggcgaattcggcacgaggacaccaaggcaggaggctaggaggtctacaaatagcgactgggtagctggtgtgaacacagggggtactgggggggcttagcccccaaggaagaggaccagtttttccccagcaccaccatcaaggcctcgaggctcccagctccctctacagcctgtggactgacttagggaatcccgaaccctcccctttgaggaccaccctactgcaagggacagaaagggagagaagaatgaaagggattagatttcatagtggggtccaacctcttgcagcgatgacagaaaaggaggtgctggagtcccctaagccctccttcccagcagagactcggcaaagtgggctacagcggctaaagcagttactcaggaagggttctacagggacaaaggagatggaacttcccccagagccccaggccaatggggaggcagtgggagctgggggtgggcccatctactacatctatgaggaagaggaagaggaagaagaggaggaggaggagccacccccagaacctcctaagctggtcaacgataagccccacaaattcaaagatcacttcttcaagaagccaaagttctgtgatgtctgtgcccggatgattgttctcaacaacaagtttgggcttcgctgtaagaactgcaaaaccaacatccatgaacactgtcagtcctatgtggaaatgcagagatgcttcggcaagatcccacctggtttccatcgggcctatagttccccactctacagcaaccagcagtacgcttgtgtcaaagatctctctgctgccaatcgcaatgatcctgtgtttgaaaccctgcgcactggggtgatcatggcaaacaaggaacggaagaagggacaggcagataagaaaaatcctgtagcagccatgatggaggaggagccagagtcggccagaccagaggaaggcaaaccccaggatggaaaccctgaaggggataagaaggctgagaagaagacacctgatgacaagcacaagcagcctggcttccagcagtctcattactttgtggctctctatcggttcaaagccctggagaaggacgatctggatttcccgccaggagagaagatcacagtcattgatgactccaatgaagaatggtggcgggggaaaatcggggagaaggtcggatttttccctccaaacttcatcattcgggtccgggctggagaacgtgtgcaccgcgtgacgagatccttcgtggggaaccgcgagatagggcagatcactctcaagaaggaccagatcgtggtgcagaaaggagacgaagcgggcggctacgtcaaggtctacaccggccgcaaggtggggctgtttcccaccgactttctagaggaaatttaggcgtgcgggcgcctgcaagcgggagacacccacaccccattctgggcgggcccagtggagtttggggaggggggcgaaagcaacgggactgctgggagaggaggggtaggaaggcccgcctgagcgcgacggggcttccgggaagggactggttctcgcccccttccccagcctggggcctcggatacctgctgcccagagcagcccggacccgaaacctttcaggccccgcttgcaagagctggaaaaaaacgcgtatctactaggaggagccagggactggggcggggggcgggggcgagggagggcgaactgtcgaatgttgcgaatttattaaacttttgacaaaacttaaaaaaaaaa

SEQ ID NO: 490549 - DNA, 1683 bp, Homo sapiens
gcaggctgtagagtcagcgaggtctaggaactgatggacctgcatgggtgctggtgagaccagccggtggagtgatctgggcggtggctgtgagcgctggagggaacaatcgactcattccaccatgatacctgaacccaagcgacatacgaccgtcacacccacttcacctactcaatgcacgtgctgagacatgaatatactgcgatacccacgcaaggaacgatgacagaaaaggaggtgctggagtcccctaagccctccttcccagcagagactcggcaaagtgggctacagcggctaaagcagttactcaggaagggttctacagggacaaaggagatggaacttcccccagagccccaggccaatggggaggcagtgggagctgggggtgggcccatctactacatctatgaggaagaggaagaggaagaagaggaggaggaggagccacccccagaacctcctaagctggtcaacgataagccccacaaattcaaagatcacttcttcaagaagccaaagttctgtgatgtctgtgcccggatgattgttctcaacaacaagtttgggcttcgctgtaagaactgcaaaaccaacatccatgaacactgtcagtcctatgtggaaatgcagagatgcttcggcaagatcccacctggtttccatcgggcctatagttccccactctacagcaaccagcagtacgcttgtgtcaaagatctctctgctgccaatcgcaatgatcctgtgtttgaaaccctgcgcactggggtgatcatggcaaacaaggaacggaagaagggacaggcagataagaaaaatcctgtagcagccatgatggaggaggagccagagtcggccagaccagaggaaggcaaaccccaggatggaaaccctgaaggggataagaaggctgagaagaagacacctgatgacaagcacaagcagcctggcttccagcagtctcattactttgtggctctctatcggttcaaagccctggagaaggacgatctggatttcccgccaggagagaagatcacagtcattgatgactccaatgaagaatggtggcgggggaaaatcggggagaaggtcggatttttccctccaaacttcatcattcgggtccgggctggagaacgtgtgcaccgcgtgacgagatccttcgtggggaaccgcgagatagggcagatcactctcaagaaggaccagatcgtggtgcagaaaggagacgaagcgggcggctacgtcaaggtctacaccggccgcaaggtggggctgtttcccaccgactttctagaggaaatttaggcgtgcgggcgcctgcaagcgggagacacccacaccccattctgggcgggcccagtggagtttggggaggggggcgaaagcaacgggactgctgggagaggaggggtaggaaggcccgcctgagcgcgacggggcttccgggaagggactggttctcgcccccttccccagcctggggcctcggatacctgctgcccagagcagcccggacccgaaacctttcaggccccgcttgcaagagctggaaaaaaacgcgtatctactaggaggagccagggactggggcggggggcgggggcgagggagggcgaactgtcgaatgttgcgaatttattaaacttttgacaaaacttaaaaaaaaaa

SEQ ID NO: 490550 - DNA, 162 bp, Homo sapiens
attcagatggctatcagaggccgacgatctacacatggtatgtcagtgacctgcggtggccatgcatgcagcagttccagaaccccgacttcccacccgaagtagaggaacaggatgccagcaccagcacgaattcccttagcaccagcactgaattccctt

SEQ ID NO: 490551 - DNA, 837 bp, Homo sapiens
gtggcgaattcggcacgaggacaccaaggcaggaggctaggaggtctacaaatagcgactgggtagctggtgtgaacacagggggtactgggggggcttagcccccaaggaagaggaccagtttttccccagcaccaccatcaaggcctcgaggctcccagctccctctacagcctgtggactgacttagggaatcccgaacgatgacagaaaaggaggtgctggagtcccctaagccctccttcccagcagagactcggcaaagtgggctacagcggctaaagcagttactcaggaagggttctacagggacaaaggagatggaacttcccccagagccccaggccaatggggaggcagtgggagctgggggtgggcccatctactacatctatgaggaagaggaagaggaagaagaggaggaggaggagccacccccagaacctcctaagctggtcaacgataagccccacaaattcaaagatcacttcttcaagaagccaaagttctgtgatgtctgtgcccggatgattgttctcaacaacaagtttgggcttcgctgtaagaactgcaaaaccaacatccatgaacactgtcagtcctatgtggaaatgcagagatgcttcggcaagatcccttccccagcctggggcctcggatacctgctgcccagagcagcccggacccgaaacctttcaggccccgcttgcaagagctggaaaaaaacgcgtatctactaggaggagccagggactggggcggggggcgggggcgagggagggcgaactgtcgaatgttgcgaatttattaaacttttgacaaaacttaaaaaaaaaa

SEQ ID NO: 490552 - DNA, 446 bp, Homo sapiens
  misc_feature (15)..(15): n is a, c, g, or t
  misc_feature (182)..(182): n is a, c, g, or t
aacctaaaaaaaacnactccaaaactttgaaaaaacttttacttttccccctcccctaactaaaaagaaaatgtaatgtaccctcataaccctgtgtcaatttagtgttcagcacttttgggaaacatcagttggtgaactttaaattttgcctgtcctactcactgggcacggtggctcanacctgtaatcccagcactttgggaggctgaggcaggtggatcacctgaggtcaggagtttgagaccagcctgaccaacatggtgaaaccccgtctctactaaaaatgcagaaattaggtgggcgcctgtaatcccagctacttgggaggctgaggcgagataatcgcttgaacctgggaggcagaggttgcagtaagccgagattgcacccactgtcgtccagcctgggtgataagagtgaaactccatctcaaaaaaaaaaaa

SEQ ID NO: 490553 - DNA, 1110 bp, Homo sapiens
ggtgtagtcagaacacaatagggtaccagatttcctaagcagatgacaagatctggttctgatgcacgttcatatatatgatcgactccagtatacggagcatacttactgaggctaggatagaactgcgcgacctagtagcggagtgtaggatttcccgtcctacgtgaagaacccgcgagctcagggtagatacactctcgtggagcatattgctgacgagccacgacgaggaacataccaagaaataccctagagctaggaaggcatctatgagcccacagagggacctacgcatgcaggagcaaccatggtagagaatgaccaacgtgtagacgctctgtaccgtacacagtgatttgcacgagtactagggcaagttgagatggacaccaagatgtactagcagtagagacagtaggtaacaatgggcaggctagcacagaaacgcgcccaaatcatactccatatggcttggtgacagagcaacacctgaagcatagacatcagtagtcatagggacggatacgacggcttcctgacccttagagtaccaggccagagagagcacaaccgagacaccccgaccaaagaaccgcacatgacaagtgataaatctcccacaaaatggcacgccccaaaaagtagagacaggccaccaccaaagaccaaacgaaaaacgcacaaggaacaaactaaccaagcgacagaaagggcacttgaaccaggacgtgaaatagaaaatctgaccacattaggagccccatagatctatggggaacagtgactgaagcaaatatgcacgacgaacgagacagagaaccaaaagacgcacacggacaatgtgacaactacggccttggtcacacggaaccgcgcaacaaccagcgccttacacgagcagacctgcacaaccgacgcacacaaacaaacaaaaaagtcggacaaagaagcaaaccacacaactagtcacaacgatggtgataaatagagcacccacaacgcacaccccattccccaaatccccgcgatagcagtactggggaatcagtgacaatcaaaaccaggaacgacattatggagacggcacaattgacacatgtgcacgaa

SEQ ID NO: 490554 - DNA, 609 bp, Homo sapiens
gtggcgaattcggcacgaggacaccaaggcaggaggctaggaggtctacaaatagcgactgggtagctggtgtgaacacagggggtactgggggggcttagcccccaaggaagaggaccagtttttccccagcaccaccatcaaggcctcgaggctcccagctccctctacagcctgtggactgacttagggaatcccgaacgatgacagaaaaggaggtgctggagtcccctaagccctccttcccagcagagactcggcaaagtgggctacagcggctaaagcagttactcaggaagggttctacagggacaaaggagatggaacttcccccagagccccaggccaatggggaggcagtgggagctgggggtgggcccatctactacatctatgaggaagaggaagaggaagaagaggaggaggaggagccacccccagaacctcctaagctggtcaacgataagccccgccccgcttgcaagagctggaaaaaaacgcgtatctactaggaggagccagggactggggcggggggcgggggcgagggagggcgaactgtcgaatgttgcgaatttattaaacttttgacaaaacttaaaaaaaaaa

SEQ ID NO: 490555 - DNA, 1788 bp, Homo sapiens
  misc_feature (1246)..(1246): n is a, c, g, or t
atctcaaaaaaaaaaaaaaaaaaaaaaaatcctaagacttagcaattggggccgggcatggtggctcacacctgtaatcccaaattgctgagattacaggcgtaaaccactgcgcccagcctcagaattatttcttacccttacccattagtagccacagagtgctcatcaaacatcactttaatacaggattaaatactgaaaataaagaatgttagcagtgtacatttgtaatgctgattacatcccaaagagacatatactttattttgaatatgcttgtaatataaatggctgttcccactctaatacggataattcaaagttagtgacatcaccacaaaaatgaatttatgcagtattcaaattggtagcatttccacatcctgaaatatcttttttttgtaatgctcatttctattcatgaaatcttaacaaaattcagatttactattattcttcttttccttcttgtttaataggtgctttaggcttaagttcatcctaccaaattgtccaaaaatctaggaagtaatattcagaagttgtttctcactcaccttggaaaatattttctctaatcaaactttaaacaaattattagctttaattaaatgtgaaataaaacaaagcatacaataaaaagccctttggtgtaaagagctgatacaaataagtccaacttgaatattcacaacttttctgtaataattgattgcaacataatcacagtaaaatttcagcatactttaagtcattttatttgtataaaagtaaatatataactctgaaatgattaaccaaaatactacttaagtatactttgtaaaagtaaacctatattttaatgtaatctgaccatttccctttctagtagtatatagtctgtatcttttctaactaatgtgtctttggatacctataacactattgatacttttcaaataatttatcatagtatccagttatataccagtagtattcattattcatctgttaagtacatttctattaagctaaaatctgagtaaaatctgaaggaaagtaatgagtaattcactcaagggcaggagcatagtgtgtgtgatatgaatgggatggatattgtggatggaggcaacacattaataaactctggcctgggagttaacataagtagactaatatgactttcctaacatactatatagtgactggttttcgctgcatgccatgatttatatgtattatataggctattgtctcnttcttaattatttagaaataccatgtctataatatagtagcattactgtttatttcttaagaggcatctctatggtgtataaggtttaggcaattctattatgaataacataggctcagattatacattgtggacaatcgaattatgcatgtgctatctgagaggagatctgtatgtgagcaagacatagaagccctgtatactctactctctctcagaggacagaggagatttgaagaccaattgtggatgggtatcgtgcatcaactgaaatacccacttatatctccttcatcagttgcccttgtgttaacatacgcatcaagttcctgcttgtgccggcccagagctatggattacccagttcttctaagaagttatatcttctaaatgcctattgttatgtatttgctgtaatatcagttttgcctatgaacacagcacgtagcatcaaaagcaaggcaatgtatgagcaccacctattagaagagatttagtgccatgttatttataacaaaacctggaaataatctcaacatccc

SEQ ID NO: 490556 - DNA, 185 bp, Homo sapiens
aacagagtgatggctccgtctcaaaaaaaaaaaggttagctgggcgcaggggcttatgcttgtaatcccagttactcaagaggctgaggcacaagattggtttgaacccaggaggtggaggttatagtgagccaagatcacaccattgcactccagcctgggttgacagagcaagagcatgtctc

SEQ ID NO: 490557 - DNA, 620 bp, Homo sapiens
  misc_feature (56)..(56): n is a, c, g, or t
  misc_feature (91)..(91): n is a, c, g, or t
  misc_feature (111)..(111): n is a, c, g, or t
  misc_feature (148)..(148): n is a, c, g, or t
  misc_feature (159)..(159): n is a, c, g, or t
  misc_feature (200)..(200): n is a, c, g, or t
  misc_feature (203)..(203): n is a, c, g, or t
  misc_feature (217)..(217): n is a, c, g, or t
  misc_feature (258)..(258): n is a, c, g, or t
  misc_feature (260)..(261): n is a, c, g, or t
  misc_feature (269)..(269): n is a, c, g, or t
  misc_feature (295)..(295): n is a, c, g, or t
  misc_feature (310)..(310): n is a, c, g, or t
  misc_feature (356)..(356): n is a, c, g, or t
  misc_feature (369)..(369): n is a, c, g, or t
  misc_feature (396)..(396): n is a, c, g, or t
  misc_feature (398)..(398): n is a, c, g, or t
  misc_feature (407)..(407): n is a, c, g, or t
  misc_feature (411)..(411): n is a, c, g, or t
  misc_feature (417)..(417): n is a, c, g, or t
  misc_feature (436)..(436): n is a, c, g, or t
  misc_feature (510)..(510): n is a, c, g, or t
  misc_feature (519)..(519): n is a, c, g, or t
  misc_feature (522)..(522): n is a, c, g, or t
  misc_feature (537)..(537): n is a, c, g, or t
  misc_feature (552)..(552): n is a, c, g, or t
  misc_feature (602)..(602): n is a, c, g, or t
gtccctaattggctccttctctactttgtgcacaattattctcactctccacaganaggctgcttaacttctcatctggtggctggcagcnctaaaatcctgattttaacngcatagtagtaaaaatgcctcagtgatttaagttgcncgctgtacacnggtacatggctcttgtacccagtatcgggaatcgctacaantgntttttattcccaantccaaaatagattatctgtaggcgtggacaatgacagcagngnncccttctntgttttgctccgctgtttcccgtacntgctggttattgtgnttttcagcccgcctttttcttcattttctccaactggcttctctgnggttattggtgcnggaacactgccttgggcttcctgtcgncngttccttantcanggtcangccctagtctaggggttgngaacatgccacctcccctcccccctccccttcccccccttgcccccattcctgggtccttctcttcttttggantttctgtgnctncaactcctggctgtngttaggcagtgaggncactccagcagcatgccattaaggcagttctcacaacctcttgttgggtnaatgattcctttttccac

SEQ ID NO: 490558 - DNA, 180 bp, Homo sapiens
  misc_feature (141)..(141): n is a, c, g, or t
ggggttactctagagtgatcctcattggaagcggactacgggggtggaagaaatcagctggccccggatgttctctggggtttgtgccaaggttctggagcctataaactttcaaaagttaactccccacgtacccatccntgcttgggtttcttgggcttttctagaggcacctggcag

SEQ ID NO: 490559 - DNA, 1112 bp, Homo sapiens
cagtataccagtatctcttcttatcttaaaggatattgacaatgctttagacatgtagtaactgctcaggttaaatgtgttagaatgtttgaattaagagtagtaatgagtagagtatttaagagtttgtttaattaattttgttcaaatttatgagagtactttgtgagtgtttaaaatgttatgtctttaaagttcaaccaggtacttgggatagccggaatagtattagaagtactatagatcccgcattagagagaacgatcgtttatctgtcccttaagaagaaagaaacgatcgaaattcgcttatgtttaatcaacactttgatagagacaaggtaaggaagatcgaggcaagtgcctaggcgcgtgtgggcttatggcctgtaatcccagaaattgcgggaagtccataagcgcatgggggacaaggtcaacaatctgagaggtccgaggagttcgtgaaccccgaagccgtgggcaaactgtattgtgagactgtccattctgtctatacataagagaattttcacaaagacttaggctaagacccgtggaatagcatagtgttcgcctgtaaatgtccctcaaacaataactgtgcggagaggtgcatagacggttgtgacatggggctctcacgttgtgaaagccccaaagagagcgttggcacgacggctggaaagtagacgcccccttggaatttaggaacacaaattattgaacatcaagagccttggggttagaccagaaattttgaagaaacccttacctctttccaaggaaaaccgcaagtagtccgttaacaaaacccccagggatttataacgggcccaaacggggtgaggttaaacactggggaccccgtgtgaaactacaacagcgcgatcacacgggtcctggggaccaaggacacccaaaggggggtttaaaacaacaacccactggtcgttccaacatgatggaaaaagggggcatactcaccggcacaaaacagattgggggccccttcgcgtgggagccgccacgaacgcctagccacagaaaggtcacataggcgggtgtacataacaaagcgggcgggtcccaacttggcgaaagacaaaagac

SEQ ID NO: 490560 - DNA, 846 bp, Homo sapiens
  misc_feature (176)..(176): n is a, c, g, or t
  misc_feature (182)..(182): n is a, c, g, or t
  misc_feature (318)..(318): n is a, c, g, or t
  misc_feature (334)..(334): n is a, c, g, or t
  misc_feature (351)..(352): n is a, c, g, or t
  misc_feature (360)..(361): n is a, c, g, or t
  misc_feature (385)..(385): n is a, c, g, or t
  misc_feature (410)..(410): n is a, c, g, or t
  misc_feature (434)..(434): n is a, c, g, or t
  misc_feature (448)..(448): n is a, c, g, or t
  misc_feature (454)..(454): n is a, c, g, or t
  misc_feature (536)..(536): n is a, c, g, or t
  misc_feature (574)..(574): n is a, c, g, or t
  misc_feature (683)..(683): n is a, c, g, or t
gagtatttttatgtcccaggatatgctgaaccaatcagtactgaatttaaaaagttctttatccaaaaagtgaagcataagagatgacgagtcatctcctcaggtcttaattctactatttccaggagctcaagaggtctgtatgaatcatgtcaccaaacatgactttcgctcanatgctntctctaaaggctcttcctatgcatagaattgcatatacactgtggtgatgcaggaacttgtctttccagtggactgaaggatacttggctctgcttgccttcagttcactcaagcctcagtctctcatacccattntcccctgtacaatgantgcagcaacagggcctnntctctccnntgtattagatacctgatgcatacncacgtgtgatttcaggtgaagactntctagtcactgctttatagcgttntctcactatgcatntctggngttaatgagattcatctgcagtaaagcctctgacattctgacagcataaggctctttctgatgactatctgagcatactagngtgcttcttggagaaagctccacactactacatcatanggctctcagatagatctgatgatatgaggctgctcagtgaagtttccgatcacaattaaaggttcctatgggattttaggtataattgacgccaggagcctcacttacncaaataggcttaccttgggttctatccacgggtggactttgaaatttcaagccgcttataagtctccctaattttatccataaacgcttttccttattcctcacaaattttttctcgccctttcagttccttctcttatactcctttttggtcgctgatgacg

SEQ ID NO: 490561 - DNA, 541 bp, Homo sapiens
tacccgataaggtgtctctgttttcacagcctcagtttcccttgctgtaaaatgatgacaagtcatgtctaagggcccacagccaggccaacctgggagcctgtatttagggcttgttcattagttgtgtctccctgctgcctggctgcatgacccctggggaagtggccaaatgaggccatatacaactccatttgcagaaataccttgccaggccccaggtgttttctgggagagtctcagttcaggtctcagctttgaggtatggcttttgactactgctcacttcagcccaggacagagtattcaaaacaggagcccttgtagcctggccagggagaggctctgcatcccatctcagtgaaggccacatgtcctgcccccacccttctccaggaaagaatgcctattgtgtgtcctgtccaatgacccccaagggaaggcagtccctgaagagctggccttgggaatagctgaattttcactaaacaaggcagaagtgatgctctctatgctcactgcctacatcattaaccgacag

SEQ ID NO: 490562 - DNA, 1047 bp, Homo sapiens
gtcacccaacgagcttccgggagttgaaaggaggccatcataggatcctggagagcctcaagtaacatgacgtgtggagctaggctgtctgcatcgggctcgcccaccgtctccgactgtggtaggcctgtagtaagccgaacgtcgggcagaggaagtttctgggatgacatcagagaagctacgaggaaaacctcaagaagaccctgtgacaatggtggccattgctggaggaggagaagatggaagcagtgcccgagcgtaccagcgcacaggaggacaaagcccgagggggcgagtcgaccatgtgaatggctgaagtggcaccaggcgaaacccccaggctagtcttgtggccagacacgtgtgggctggcaagctctggcgtcacctgtcaccaacgccgaatggcgcggaggtcttcatcctgatacttggagttctggcaccctccaaatcatatcgtttgaaggacagagttgaagcttccaggcctgccagacagtcgcaaggaagatgcttcagcactagtggcggagaggacgatggcggctggcgtggctacctcactggccgtgagtggcatcatgggtcaacgactattctgaagactcagaatggacctctgtctcaagctctcatcaaggggccccgactcgaacctccctacggaggatggcctctactgtgttggactatctcaggtccccatggattgacccaggcgtgcccccaagttgctggtacctctcccaatgcgggggccgctgaagcccaagctgtttgaccatgggcacggtgtgtgtagccctcctgaggcaccggtattgggcaggggaccgaaagggtggaccaagcaaaggcccaagcattctccagaggggcccatctacacgcgcaaggccggggcctgcgtaaagggaccgctattacaagaagccgagttcaagaggtaaacgaaggctggcagaacgcgtagaaacagcgaggaaatcagcgaagcgcccgatcccgtgattaggcacagacagaagtgctggggctcag

SEQ ID NO: 490563 - DNA, 1286 bp, Homo sapiens
ggctccggcgcttgtggccagagtggtgcgggctgtgcgcgtggcggccgatccccacgtggtggctttctcactgctagccctctttggtcctccttgactgtccctgtggcctgtgtggcccgctttcttgcctgagattgccgaatggtcaatgtctggtggtgccatctggcctgcctgcctgcgggtgctgtgcatgtgatgcatgctgcctggtgatgctgaagagctgctggagtgactcattgttcaacactgtgggcatttgggcaagcgacgatttttgcacaacaatccttctcattcattcaacatgccattatctgatcaatggctcgccttaagaccacactgatgtcagtgcttggaagttggaccttgtgaactgtgccacacgattgacctcgtcacaacgttcgtctccacgcacacaaggggcaacacaacagtgttcgtctcgcattgtcgcacacttgcacccaaacggcctcagtcagctcgcaactttccacaacacagacgttcgatctggcacgcactgtgcgccagcacaacgttcaaagctacatggcatggggtgcatgctgctcgacaaacagcaatcttgccagtctctctgcataccttcgtgttggccaggattctgcccttgatcaggatctctctccacccttccctgtccttcacacgccttgctctggcgtagcctcgcaccccttctcgccacggttggttgctatacttcactgtctcaacacgacgcacatcttggcgctccgactggctttgcacaacaacctgggcagcatacggtgatacttggcagaactcctcacactcacatccaccagcgctcgtccgcgcacgctctctggacccatcctcccttgcaccgttggggccccggcactcctcctccaagaccacccgcccccaggcttgccactctcacgccgcccgctcacactggttcagcagcgctatggaatcgaccagccccgccatcccagctctccgggcactgtgggctgtggtctccgtacggcggcttacccctgtggcgcgcgacagcagcacgcgcaacgctccctgcgccgccctcaccgccccggtcgccgcgtaccgtccttttgccagaccagccatgcaacttcgcctgtccgccacgctcatcgccggaccgcacggtatctcctgcgcacacgtctaccccgtagcgcgcagccgcccccatcacagcggaggcctttcaccagcagggcgagcaggggggcagcgcggct

SEQ ID NO: 490564 - DNA, 487 bp, Homo sapiens
gcgaacaatacccatccggcacgatgcacgcacagagtccgcccgttttaaaatgcgtaagactaatgccaacaatacaagttccggttttctttgtctttacaacttttaacaaatcatttgaaactgcatcataatctaatgaacctttaacaaaggcggattggcaaggacaagggtgtatttgtccttatcttagttctgttccgacaaggagtcgcgatattcgatattcggattttcaatgccatggagcatcatgttcatcgcgccaatccgcagcatcgtgcggtccatgtcaaaaacgtagaaccatatggttattaacatgctcttttaaactttgcactaaaaataagtcgctgcgatgttaacgcaaatactctcttgccgctactaagaaacctgcggaacctgcgggtggatcgacaataatatcttccagtgtcggtttgactaactctaccatcatcttgatagtatgaag

SEQ ID NO: 490565 - DNA, 2232 bp, Homo sapiens
  misc_feature (950)..(950): n is a, c, g, or t
  misc_feature (1095)..(1095): n is a, c, g, or t
gctgagattgcgagcatcctctgactggcgtctgctgctcttgtgtctgacatcgtagatgaatagtggagcgtcgggtgcctcagacatcagtagatggggcgggtgatatgtccacctaccgacatgaatgaatggtatatgataataatgatgagggtgggctgtgtctggaatcattggcgccacagcagctgagtgtgattggttgcgtgtagctgacagcagtcttataatcgaatatgacttgtgtctggtgtcgtgatatagatttgagatcaaagatgatggtatgcgtgtagatatagagtagctacaactatcaacggtaccgattgctagcgagtatatgttgtggtgtggtggtcacgtatcacagtatagtagatgttaggtaatacgtcgacatctatcttgtctaattggtgtgtgggtgaatatatgaatggatacgggcggtggctctgcttgggctgtgcgtacagtcctgactcgggtgtggtcgcgctacccccgataggggctgaatccgcccacgaagataaggtgtgttggacttacatgtatcgtcagtacatgtagcggtgtttctctgtacatacagggaggggtggtctctctgttgctttatgttgttgtgtgtggtataataaatgtgaggtagagcgtgtgctatctgttggtagcattggagagtagggtgttgtggctccaacgagcagatgtggatgtgtgcgttgaatagaaaaacgtggtgtgaccaccagtctgtgttttgatggagcggaacacaggtgctgtgtccatactacacggctgcttgggtagttgtttgtgtcccggtgcggtggtataggcaagtggatggctgtggtctgccaacggacggggtggcgtagtaatgataaaatctcattcggtgcctgcgccgtggtgtcgtcgttatgccncgtgtgtctacgcctcgtgggggggtccacccctttgggggtgtgttctgtgtgttgctccgtctctcgcgccgggtgttggtctgcccctcatcgatcaatcatttgagtgtggggtggtgttcctccacgtagtgtgtgtggncttcctcctcgtagtcagatatttgtggtgcggcgaccgacgtctaccactgaccggttgggggggtgtgtgttagtggtgcggttgtctaccttccggcttgtgtttgaagatggtttggtggctgtcccactggagttgttgtttctcctccggtctttgtggtggttgtggtagcactattgggtgctttgtgtgcgttgtgctgtggtgtttgtgccttctgtggtggttgttgtggcgggggtgttgttgttgttcttcgtccttggttattattacctgccgctccgtctacttctacaacttggttgccagctagtagttgtttgccccagccggatttatagtgactcctccctgcttgcctgttgtgagtagtggggtgctctgccaacgaagtcgtactccatctatctatcaacatgcagcggggggtcctccgcctctcctccattatttgtttcccctgctgtaagtaatagtattataagtattggtggtagttgggcggagcataatttgttccactggggagggacctccccttcatcggtagtagtgtgttgccaacgacagtactactatctatttgtgtatcattctggtgttataatagtataatattgtggtgtggtcacactgagagaagttgggagtgtgtctcacgcacctacgcctactgtgtgtgatatatatagacactactgtaagagaataaagggtctgtgtgcacacactgtctgtagtgtgtgatagtctctgtgctctctcactcagagtaggtgtgtgtgtccgtgtgagagagatatatagtgtataaatagtgctgtgataagataagctccacacagtgttggatatctgtgtggaatagctgctactgtgaacttgtcacttgtgtgtataagcgcacctgaagtgtgtctgggaataaagccacctcggggacgcaaacacaccggtggctgaaaattgtgatacgctaactgtatggatatgtgaccccccgcgcccagagatctgtttttaagattccagacttccaatgaggggcccaatgaaaagggctatttgtgaaaaaagataaaagtatacgcgagcatataagctcggtcgagaagagtagtgtacccc

SEQ ID NO: 490566 - DNA, 406 bp, Homo sapiens
aaaagttacaaaggttatttgaatgtaacatataaagatgcagcctttttcctagggcaagggaaggaagggctgttacataaggcacaggaatggcagcatgcaccacctgaaggcagggccctagtgggagaggaagttggcactggggtccccctgcagctgttgatggggaggtagagaccccctcaaagtgccatggtctgaggctgaactaattggccaagcagatgctatgcagcggcggtggggcggaggctttatccaccgtctttggtgcagattgcccttacacacccaaggccttttgttaaaccccagagtcctgggttccagaagccttcttttggaccacaggccctggaagggggtggtataaaatgctttgggaaaagtttaaaagttt

SEQ ID NO: 490567 - DNA, 3748 bp, Homo sapiens
gctgggacatcaagccccaccggactgctccagcctgctgaggccacatcagggagatcctgctgcctgtcctttcgttccatctgctttactggagccctggagccctttggacagtgtatttattgacaccacctacattttcaaagagactcatttaaagtgacagtggaaaatccatgtccatttacttggacagtggaaaatccatgtactgaaccccaccctcaactcccaaactctgcggtggtgcatttgcacttctaattttgagggcctggtaatgacgccaaaaccaagggttggttctctgtgaggccaagcagttttgttctgtgccaagatggcagcccctacccctcagcccagccctgaggcccgtctccagccccccaaaatccttgcctggagggctagtcagtctctagatggccagtgctgagcctttagtagaactcccaagtaccgccgcagccgagagcctgtccttaactgcacagtgattcttctgccgggggtcaaagcacaaacctgggaggcagaaaccctggagctccttctgttacactacgtggccctgaatatcaagtccagattccactgcccttttctggctattgggtgggagggtgctggggaagggcactggcacctacttacccccaagtgggcagagctcactccttcgggcccacttggtgttgcagtcaagagactcagttccaaaaaccttcagcagaggtctcccctcctcctggtatttcactggttgctctccagaagtcctcttcagaggaatgctcatcacacatgcttattctccgttttcccacttcaacagttacttcaggtttaaagtcctttttatctctgtaacctggtgacataaagccaggaacattttcccacaatccaccttagcataaaacataacaatttcattcatcagttgttattgtgtagaaccaatgaacatgttggtcatttgtctgtatttagtctttatttgtattgctatctttgagcattccaagattgcagagcatgagcgtgtgtatttgtgtgattctttaatttcagctgccttaggtttgagtaaaagatgtaaagaaaggtaagtgattttctattgtaagactttaacccatacctgtcacacttggtgaaaaggatgtacttacctgagtattgtgttttggtgattctgagccagtcgtccatacaaacttaagtagggtagctttacctgttacttatcacaactcagtagcagtgtaggggaaaccacctggcagaatgtctccctggagtagccctgggagggacagagacagcatctgacagagtctcagagagctgcaaggtcacaggagacgaggcaactaactgtggcacaggaacattctttaaggcaaggctttttctgaactcgggtgtttattctgtcctgagagaaccattcattgattctaaaatataaaattcgagttgcaaatgtccatgtgcctggaagctgagggaagttttagacacctgcccagtttccctctccttgcccactgcggtacagcacgacattctagtttctcctgatgcttcgtcaaagacatttagtgcagttatgtcctgttccttggttgggccacaatggagagaacagtacttgagaaggatttctctgtaagaataccatggcagagagacccctctgccccctgctttgcattgctaacagttattagcattttatatttctttaatgcaacctaataggaaattattattcgagacagactcctctgggaaatgcataacccaggaggcactgattccttgctgagaatcctgagtggtctgtcattttacataagatcacatccttcaaacattgtgtatgttggagcagcgaaagaactgttcaccccttatgaataactgacattcaggaagcccaactccatcatgcagatgtctatctttaattgctagctcagaagcagacagagcttcctgggacctggctaaagtaactgatagatggaactcttctttggggactattactttgcaaatggggtcagagcctcatctatgcagagaatgtcaccatatgtggtttcatgtaatctgtaattatttgttccaacagcctttaacatgactattgtttgagaaacatggcaacttttaattcccctttgatgcttctagctttctttagtattttaagaactcatacagtactaggtatgttggtccctctgagaaaaacatgtggactctcaccagtccgttgtgctcaggactgagcagcagcgtgtgtgcggggcagctgtggaggtgaatactgattgtcccccttttcctccacagggatatctgcattacctccacctcctccacctccaccaccaccagcagctcccttgcctcctgcgagcaccgaggcacctgcccagctctcgtctcaggctgtgaatggcatgagccgaggggccttgctcagctccatccagaatttccaaaaaggaactttgaggaaagccaaaacctgtgatcacagtgctccgaagatcggctgaagcttcctgtttacacttggagggaaaagttcttttttattcctactcacccctaccccccaaactaccctcttcctgggaaagtaattgctgagccagtacagccacaaacagtactattttgcagatgctcatgtaagcagcttttcgagagaaataattctttaagcagaataaagttaggctggcattgctcccttaagatcttgctcctttattaaccctgtaaaggagtcttgtttatcctctaatggccaggcttttgggacagcagcatattgaaatattttcaccaactaaaggaaatagacagaaaaacaatgacaatattcaatcacagcagtaaatggcctttgtgttgcaatcccttctaccccatcagacagctcctagaaacattcctcttacagttcatttctctaaagcattttctgattcttagataactccaatttttgctacctttatcttagacattaacactatagcccaaagcatagttactttgctaaatcagaaagcaactgagttctttgttttctcctcaaatagaatggggaacgttcacaacattctcttaagttctaacaggaataccattgtggttatagaactcagggctgctaaagcaactactctagacccatagttctttttagttagatgtattgaaacagacaaaaatattaacatcagaaaaagctcttgccaattagaggatcttcttaatcctcagcaattaagtttggggtttgaggggggcaggtcattgttacaacagaagtaaatttggcatctatagaaatcaattatgatttttgaaagatttatctaaatatatcaatatagcatctctttaatgttagtcatttattagaaagatcctttatcctgatttgcttaaacctttcaataaattgcactttaaaggattataaataatccatttaaaaattcaagtacacacatcagtgttggttactatgcagagaatgtcattgtgtatagtttcatgtaatctgttatgtcagctgtattttttattaaaatcatgtcaagaaaacgtgttgtctgtagcttgacaagatatttcaaatgagaactttttgtagcgtctgttgttagcaaagaatagattcacacagtctaaggtttccttcctacct

SEQ ID NO: 490568 - DNA, 814 bp, Homo sapiens
  misc_feature (479)..(479): n is a, c, g, or t
gctgtggttaatttgagtatatcctagtttcgaagtgagaataatcagcttgtgattcagactaatattttactgtctgttactatttgattaaatgacactaaaatctgaataatgacttgtgtcccccctttctctctctctctttgctgttttcagtagagcatgcaccattttgaacgtgaattttcggtaaagtaaactatgctgatttctcagactttaaagatgctctgtttctgtgtgtgaaataggacccaaagtgtctcgattgctgaagtgatgaacaagtgggaaagcagatttgagactatttccttatctgaatatttaaatgaaatacagcatctttaaaaagcacccagtgacttcatctatattcatttcattttcatcatgaccttcaaaatcttcattttcactctgatttcagttttaaaatacagctctaaaacctgcaaatcaactgcatggcattntggtatattttaattttggaaaccataactctcaaagtgctgggattacaggcttgagccactgtgcccggccaggattgcaacttttggctggccagcccatgcttaggctgttcttccttgcagaactggaggtcggtcttctcctgggctcaagtgatcctcctgcctcagccttctgagaggctgggactataggcgtgcaccacacatccagctaatttttaaattttgtggagacaggggtctcatcatgttgcccaggttggtatcaaactcctgggcacaagcacttcctctcacctcaagctccaaattgctgggattatagattg

SEQ ID NO: 490569 - DNA, 1635 bp, Homo sapiens
tcagcggatccctgtatcacgccattatagcagcctccgtggctctagcaagtatctgacttttacagaaatgactttcttggtttttggatggcagtttagtcttgtctgcttttttttgtttatttttttatctacttcagtgtccatttgcagtcccgtcggcctcactgttttccctgccgtttatctgttgaagagcctgggctgtttgtcccatggcttcccacagtgtagattttgctgaccacgtggtcatggtgtagttcagcatggtcctctatgtttcctgcacattggcagctgggtccagaggcttgatgagcctcaaatttgatccctttggcaggagaacaggcggttaggagctttcctcaggaaagtaccatgttgacggcagctgatgctcagtgccaagatccattaattatttggggttgcaaaatggtggtattctcattctgtcgttttgcttgcctttattagctggaatggttttctaagaaagtgttttcttttttatacttatctggttacccagtggtacagttcatataggaagggcaggataaatgcttgattctttgctcttgtacactaagtttttaagataatgcattagttgtctgtcaaggaaggtgagtggtgaagggtttttacatatatacaagaattcagctgggattacaggtgtgagccaccaaagccggccccaccttgctttttaaaacagctctgttgaggtgtaactgacaggtaatgaactgcacatacgtgaagtgaccgatgcatttgcctgtgaagctgtcgccagaacatgtccatcaccaccaacagcagtttcacaccccggtctaaaccgtccctcgtgtcctccatgttcaggcaaccactggtctgctccctctcactaaaggttaatttatatattctagaattttatctgagtggaatcgcagagcaagtactgtggggggaggtgcttctactcagcataattattttggcattcacccattttgtgtacatcaataatccacattttgtattgcatggatataccacagtttatttatttacctgttgaccgatatttcgattatttccaatttctaaataaaaataaagcaaataaagctgccgtgaacatttaaaaagcagaaacaaaacacagaaaacagacaagcaacccaccaaccgaacacaacgagacacaacacaaaaaaacaggcggggcgggggccactaaaacacacccccgagcggccccccacacggcagcgccgcgacaccctctccgcacaaccggcggcgcccaacaatgagcaggcgagaattaccaaacacagaagcggcaccggaagcccccagaatacacacccagagcgcacgccggaaacaaacaacgcccaaccgtcacggtgaccatctttgagagaaaaccaccccaatcccgtcgtagggtgcggcgctacaacagtgagggcaaccaccacccacagaccgactagaagatccaacgaccgccgcaggcaacaaatctactcacgaacaacaggagcgacacaaaggagtgcgctaccacccccgcctccatgtgtcgaccacaacagaaaatgttgagctcacacaagt

SEQ ID NO: 490570 - DNA, 582 bp, Homo sapiens
  misc_feature (117)..(117): n is a, c, g, or t
  misc_feature (193)..(193): n is a, c, g, or t
  misc_feature (377)..(377): n is a, c, g, or t
  misc_feature (462)..(464): n is a, c, g, or t
ccacattcttcttctgtagaagagggaaaggcaggaaggcattaggggcatgagaaaggactcttcctttgcatactcctctacctggcatccagacccgagccaggaagtagacangctgagcaaggaaagattttcttttatcccaataaaatgtggtttggcaaaacatgttggagaagattttcattanggaagctgccttatgtgggatatgcttacatcttatggtcttttaaagattcaccagcatcgaagactgacaagagctcagtcccaccatggatctgaggaggaaagaaaaaaaagaaagattttagctcgaaaggtaagcctgctgtctctctgcagtccctctatgagttcttgagtacatntgaagaaagttctaggttaatggtgcccatttaatgacagatgctgtgctatatctccttgaaagctaagactatttccagatgnnnggggtgcagttttttttggggaaaaaaaaagagtcatatgataatcagccgagaaatagcccatgtagtttcctagcttgctgggcagattatggcgtaatgtaattggaggaaacga

SEQ ID NO: 490571 - DNA, 172 bp, Homo sapiens
ctacctctagacgatcccggctcatcgggtggctcttggtgtggctcatcggggggctcgtggtgtggctcatcgtgtggcacctggcggggctcctcgtgctggtggcatctttcccatatttctccttgatgacattcttcaggttgtggtaaacctctgcccccacgcg

SEQ ID NO: 490572 - DNA, 3644 bp, Homo sapiens
tcagcggatccctgtatcacgccattatagcagcctccgtggctctagcaagtatctgacttttacagaaatgactttcttggtttttggatggcagtttagtcttgtctgcttttttttgtttatttttttatctacttcagtgtccatttgcagtcccgtcggcctcactgttttccctgccgtttatctgttgaagagcctgggctgtttgtcccatggcttcccacagtgtagattttgctgaccacgtggtcatggtgtagttcagcatggtcctctatgtttcctgcacattggcagctgggtccagaggcttgatgagcctcaaatttgatccctttggcaggagaacaggcggttaggagctttcctcaggaaagtaccatgttgacggcagctgatgctcagtgccaagatccattaattatttggggttgcaaaatggtggtattctcattctgtcgttttgcttgcctttattagctggaatggttttctaagaaagtgttttcttttttatacttatctggttacccagtggtacagttcatataggaagggcaggataaatgcttgattctttgctcttgtacactaagtttttaagataatgcattagttgtctgtcaaggaaggtgagtggtgaagggtttttacatatatacaagaattcatgggctgggcatggtgtcttatgcctgtaatcccagcactttgggaggctgaggctggaggatcacatgaacccaggagtttgagactagtctgggcaacatagtgacaccctgtctctacagaaaattaaaataaaatcaggtgggtgtggtagtgcctgcctgttgtcccagctattctggaggctgagatgggaggatcgcttgggcccaggaggtcgaggatgcgtgagctgtgaccatgccaccacattccagcctgggcgacagcaagtccttgtcttaaaaaaaaaaaagaatttgtggagttaagcatacttggtgggtttcaatccgttgtgatttttatctttatttagctcagactagcttattcggtcagtgagagggagcctcttcagcttggctcttgctttcttttgataagtgtgcacatgtgtgcatacatgtgtgcacagaccacacgcacagtcattgatagctccctgcagcctggcatgtcaagatgctctaggcccaatttatagagcttctgctccaaacctgtcttaaaagaaaaactttagacaagttagcagtttaattgagcagaaaatagtttcttcagctgggtagcactcaggaccaaaagtggttcagaacgttctcctgtgcgttgtgtgcaggctgtatttatttatagccacaggaagggaaagacacatgtacatggccagactgactgcaggtcagcctccacctcacataggcatgttttgggagccttcagcatgtgattggtgagactctgctgcttgttacagaagtgtactctcaagtcaggtcccagtttgcttatacattaagtgaggttataagtcactatgtacagaggcagttttaggccaaacttaattccgtttaacacttggaatccattatttttcccagagtctctggtagagatggtatttcagatccagtttaggatgctcattgctattgcgttggtcattatttctagatttttggacggagctttaaaaaaatacaaacattgcacacacatatttaaaggaagaatattttctgagcctatattgatattcccaatacaaattcagggtcctggggcctttacatagcctcctctatatgatgtctgtgtctcctgcactcggaatcctgcttctcaagacacaggacaatggcatggaatatccatcccttaatcactcacttgttttattcctctttagcatttagcatttaaaaaaaatactaataccatagcattaattgtgatgatgaaaacagcactgtgtctacgttgtcagaaaaattgctcctttttaccaccattgactcatttctgtgtgttcaggtctcataaccagtctatagtcagtgtcatcttggggacagtattccttgagtttctgatgttgaattcagttttgctggatacgaaattcttggcccagattttctttgagtatcttgttttattctgttttcttccagcataaagtgatgcatgaaaagcctgatgaatcttgttttcttcccctgacagtcatatgctgtttttccttagatgcccaaaggattttttcctttttctgtcaagtcggccgttttattcgaatgtgtcatgtgttggtattggttgtcctggtccatatttgcaagcgtatggtgtgctctttctatgtgtacttcatatctgttattttaagaagatttgcttgaactggagtttagtgttacatttttcttgctttggcttttttctgtggggatccctgttatctgtatgttgaaatctaaattggctgttctcagtgtttgccactgtctcttgaatctcttttatctctttctttgtttctttttgagttttaaaagttgttatagtaccactttggtttgtttagttatttaaaataggaacagtgtctcactgtgttgcccaggctggtcttaaactcctggcctcaagcgatcctccttccttggcctcccaaagtgctgggattacaggtgtgagccaccaaagccggccccaccttgctttttaaaacagctctgttgaggtgtaactgacaggtaatgaactgcacatacgtgaagtgaccgatgcatttgcctgtgaagctgtcgccagaacatgtccatcaccaccaacagcagtttcacaccccggtctaaaccgtccctcgtgtcctccatgttcaggcaaccactggtctgctccctctcactaaaggttaatttatatattctagaattttatctgagtggaatcgcagagcaagtactgtggggggaggtgcttctactcagcataattattttggcattcacccattttgtgtacatcaataatccacattttgtattgcatggatataccacagtttatttatttacctgttgaccgatatttcgattatttccaatttctaaataaaaataaagcaaataaagctgccgtgaacatttaaaaagcagaaacaaaacacagaaaacagacaagcaacccaccaaccgaacacaacgagacacaacacaaaaaaacaggcggggcgggggccactaaaacacacccccgagcggccccccacacggcagcgccgcgacaccctctccgcacaaccggcggcgcccaacaatgagcaggcgagaattaccaaacacagaagcggcaccggaagcccccagaatacacacccagagcgcacgccggaaacaaacaacgcccaaccgtcacggtgaccatctttgagagaaaaccaccccaatcccgtcgtagggtgcggcgctacaacagtgagggcaaccaccacccacagaccgactagaagatccaacgaccgccgcaggcaacaaatctactcacgaacaacaggagcgacacaaaggagtgcgctaccacccccgcctccatgtgtcgaccacaacagaaaatgttgagctcacacaagt

SEQ ID NO: 490573 - DNA, 381 bp, Homo sapiens
atccctgggctttgtttctcagagaagccttggggcaggagcgcgagggtccacaaagccaaagtgaggggtgaacacgctgctactctttcttccaaagacattggaaagtgtggatgtccactgctttggccacttactgtatgaaatgacttatggacgaccgccagactcggtgcctgtggactccttccctcctgccccgtccatggctgtgggtcagtatggggttgggaagggtcttctgggccctagtagtgtgcagagccactcatcccctttttcagagtccaggaaagacccagaggaagttgctgtcctccacagtccagaattcttacaaaatttaaaagtagatccagaccatctagatgaatactt

SEQ ID NO: 490574 - DNA, 506 bp, Homo sapiens
tcagctcggtccctcccagcagcaaagacggtgctgtgaaatgctttcgatcttcttactctcacaaggagaatatctatctgatcattacaccatctgcaaagacagaaattatatcaatgattcagatctcatattctagaaactgtgccaacacttaggctgaatcactcaaaacctgaagggtatgtgaactagaaactacaagtgaggagctcatgagtgtgaggttctgtcccttcgggagatgtcttctctcttctgtgcctctgagacctttatctgtatcaagatacaagctgacttctccacagtcctctcgatgtgacttgtggacttcgactctcgtgcgtggggacatggcacctagtacagtcttctacctcctagtcagccagttttctgtaagtcaataaacattcattaacaatcacacaaaccaaattactgtacctcctcaggcaagctgaccaccaaatcatttttttgtctgtccaaccagcgcc

SEQ ID NO: 490575 - DNA, 2814 bp, Homo sapiens
tcagcggatccctgtatcacgccattatagcagcctccgtggctctagcaagtatctgacttttacagaaatgactttcttggtttttggatggcagtttagtcttgtctgcttttttttgtttatttttttatctacttcagtgtccatttgcagtcccgtcggcctcactgttttccctgccgtttatctgttgaagagcctgggctgtttgtcccatggcttcccacagtgtagattttgctgaccacgtggtcatggtgtagttcagcatggtcctctatgtttcctgcacattggcagctgggtccagaggcttgatgagcctcaaatttgatccctttggcaggagaacaggcggttaggagctttcctcaggaaagtaccatgttgacggcagctgatgctcagtgccaagatccattaattatttggggttgcaaaatggtggtattctcattctgtcgttttgcttgcctttattagctggaatggttttctaagaaagtgttttcttttttatacttatctggttacccagtggtacagttcatataggaagggcaggataaatgcttgattctttgctcttgtacactaagtttttaagataatgcattagttgtctgtcaaggaaggtgagtggtgaagggtttttacatatatacaagaattcatgggctgggcatggtgtcttatgcctgtaatcccagcactttgggaggctgaggctggaggatcacatgaacccaggagtttgagactagtctgggcaacatagtgacaccctgtctctacagaaaattaaaataaaatcaggtgggtgtggtagtgcctgcctgttgtcccagctattctggaggctgagatgggaggatcgcttgggcccaggaggtcgaggatgcgtgagctgtgaccatgccaccacattccagcctgggcgacagcaagtccttgtcttaaaaaaaaaaaagaatttgtggagttaagcatacttggtgggtttcaatccgttgtgatttttatctttatttagctcagactagcttattcggtcagtgagagggagcctcttcagcttggctcttgctttcttttgataagtgtgcacatgtgtgcatacatgtgtgcacagaccacacgcacagtcattgatagctccctgcagcctggcatgtcaagatgctctaggcccaatttatagagcttctgctccaaacctgtcttaaaagaaaaactttagacaagttagcagtttaattgagcagaaaatagtttcttcagctgggtagcactcaggaccaaaagtggttcagaacgttctcctgtgcgttgtgtgcaggctgtatttatttatagccacaggaagggaaagacacatgtacatggccagactgactgcaggtcagcctccacctcacataggcatgttttgggagccttcagcatgtgattggtgagactctgctgcttgttacagaagtgtactctcaagtcaggtcccagtttgcttatacattaagtgaggttataagtcactatgtacagaggcagttttaggccaaacttaattccgtttaacacttggaatccattatttttcccagagtctctggtagagatggtatttcagatccagtttaggatgctcattgctattgcgttggtcattatttctagatttttggacggagctttaaaaaaatacaaacattgcacacacatatttaaaggaagaatattttctgagcctatattgatattcccaatacaaattcagggtcctggggcctttacatagcctcctctatatgatgtctgtgtctcctgcactcggaatcctgcttctcaagacacaggacaatggcatggaatatccatcccttaatcactcacttgttttattcctctttagcatttagcatttaaaaaaaatactaataccatagcattaattgtgatgatgaaaacagcactgtgtctacgttgtcagaaaaattgctcctttttaccaccattgactcatttctgtgtgttcaggtctcataaccagtctatagtcagtgtcatcttggggacagtattccttgagtttctgatgttgaattcagttttgctggatacgaaattcttggcccagattttctttgagtatcttgttttattctgttttcttccagcataaagtgatgcatgaaaagcctgatgaatcttgttttcttcccctgacagtcatatgctgtttttccttagatgcccaaaggattttttcctttttctgtcaagtcggccgttttattcgaatgtgtcatgtgttggtattggttgtcctggtccatatttgcaagcgtatggtgtgctctttctatgtgtacttcatatctgttattttaagaagatttgcttgaactggagtttagtgttacattttaaatgatcttcacctttattatgcatctatcttcatggggtttcccgatatctcactgtccagtccttcatcgcggaatgtgtggatagggaacaggttgaagattgcagtttagcataaagagttgggaaacagttcagagtcaggtcaactgaatcatgcttgcaccccaggcccaggagcgtcgcccactttacagacggccggcaccttcgagcctctttcaacgcccaaagcagtaccaccatgaaaataacgtcggaccagccccgcacctcaccgtatcccgccatcacgcgcacgtccgactcctcagcacctcgcactatgaaccccttagcaaacactttggctctgctcgaccttccgcacaacagcacaca

SEQ ID NO: 490576 - DNA, 2741 bp, Homo sapiens
aagatacagtgactttgatttgcttaacaacagcttacagattgcaggcctaagtctacctcttcctcccaaaaaattgatggtaacatggatcgtgaattcatagctgaaaggcagaaaggtcttcagaactatctcaacgtgatcacaacaaatcatatcttgtctaattgtgagctggttaagaagtttttagatccaaacaactattccgcaaactatactgagattgccttgcaacaggtttccatgttcttccgatcagaaccaaagtgggaggtggtggaacctttgaaagacataggttggagaataaggaagaaatatttcttgatgaagattaaaaatcagccaaaggaacggctagtgttaagctgggctgaccttggcccagacaagtatttgtcagataaagattttcagtgtctaatcaaacttctgccttcttgtttgcacccttacatctatcgggttacctttgccacagctaatgaatcctcagcgttgctaattaggatgtttaacgaaaagggaacattgaaggatctgatctacaaggcaaaaccaaaagacccatttctaaagaagtactgcaaccctaagaagattcagggcctggaactccagcaaataaaaacatatggacggcaaatattagaggtactgaagtttcttcatgacaagggattcccttatgggcatcttcacgcctccaatgtgatgctcgatggggacacttgccggctgctggaccttgagaattccttattgggcctgccttccttctaccgatcttatttttcacaattcaggaaaatcaatacattggaaagtgtggatgtccactgctttggccacttactgtatgaaatgacttatggacgaccgccagactcggtgcctgtggactccttccctcctgccccgtccatggctgtggtggccgtgttggagtctacgctgtcttgtgaagcctgtaaaaatggcatgcctaccatctcccggctcttacagatgccattattcagcgatgttttactaaccacttctgaaaaaccacagtttaagatccctacaaagttaaaagaggcattgagaattgccaaagaatgtatagagaagagactaattgaggaacagaaacagattcaccagcatcgaagactgacaagagctcagtcccaccatggatctgaggaggaaagaaaaaaaagaaagattttagctcgaaagaagtcaaaacgatctgctcttgaaaatagtgaagagcattcagcgaagtacagcaactccaataattcagcaggatctggggccagctcacctctcacgtccccgtcatcgccaactccaccctctacatcagggatatctgcattacctccacctcctccacctccaccaccaccagcagctcccttgcctcctgcgagcaccgaggcacctgcccagctctcgtctcaggctgtgaatggcatgagccgaggggccttgctcagctccatccagaatttccaaaaaggaactttgaggaaagccaaaacctgtgatcacagtgctccgaagatcggctgaagcttcctgtttacacttggagggaaaagttcttttttattcctactcacccctaccccccaaactaccctcttcctgggaaagtaattgctgagccagtacagccacaaacagtactattttgcagatgctcatgtaagcagcttttcgagagaaataattctttaagcagaataaagttaggctggcattgctcccttaagatcttgctcctttattaaccctgtaaaggagtcttgtttatcctctaatggccaggcttttgggacagcagcatattgaaatattttcaccaactaaaggaaatagacagaaaaacaatgacaatattcaatcacagcagtaaatggcctttgtgttgcaatcccttctaccccatcagacagctcctagaaacattcctcttacagttcatttctctaaagcattttctgattcttagataactccaatttttgctacctttatcttagacattaacactatagcccaaagcatagttactttgctaaatcagaaagcaactgagttctttgttttctcctcaaatagaatggggaacgttcacaacattctcttaagttctaacaggaataccattgtggttatagaactcagggctgctaaagcaactactctagacccatagttctttttagttagatgtattgaaacagacaaaaatattaacatcagaaaaagctcttgccaattagaggatcttcttaatcctcagcaattaagtttggggtttgaggggggcaggtcattgttacaacagaagtaaatttggcatctatagaaatcaattatgatttttgaaagatttatctaaatatatcaatatagcatctctttaatgttagtcatttattagaaagatcctttatcctgatttgcttaaacctttcaataaattgcactttaaaggattataaataatccatttaaaaattcaagtacacacatcagtgttggttactatgcagagaatgtcattgtgtatagtttcatgtaatctgttatgtcagctgtattttttattaaaatcatgtcaagaaaacgtgttgtctgtagcttgacaagatatttcaaatgagaactttttgtagcgtctgttgttagcaaagaatagattcacacagtctaaggtttccttcctacct

SEQ ID NO: 490577 - DNA, 924 bp, Homo sapiens
atttacgttggaagcttggatctcattaaacttcatgtctctattccatttgtgccacacacttaacaagcttagtgtactgacatgggaagcatgagcatttctagttctacacttcttcttttaccgccctcatgtgtaaaatgaaaaaactaaactatgccctaataccaaggcgctaccgtctattgcctcgtctatattcactgacctaacgtaatgatacacagtgaatatctttctgacacaagagaaactgcagtgtagtatgcagagctgctgttttcaactgcctatgcatttactctttcctgatttaggcacgaggtggcccattccttatattgcactatctcctacttctcttctaactgtacccataccttcagtactactccttggtaacgatcagcgcagacctatccattctgtgtggccttgacatattcctcatctatcaccatagttggtcattacaccagtataccacacttctatacagtaactttacttcctctctgctgtaattccctggaaccacacatctgtccgtgaccatcagaccttccctaaaatagccatgggcacatcacccgaggttgcattgcccatcctaccatctacagatatcaccatacctcgcgactatacccacgtcaaaaggaacatgggctctctatccacccccaattgatataacaccacagtgcattgggattactatcaaaataactattccctgtaaccctacacatgaacttaaaattaccgggcacactggacaccttagttatagcaattatcgccaataccgtattagatcggccgaacttttaaagatagacattcaggagagaaacacacaaactaaatatgacccggaaacacacaaacgtacaccattatactaacaacaatagtaaa

SEQ ID NO: 490578 - DNA, 193 bp, Homo sapiens
cacgcgagacgaggtcaacgattcctcccttaccatcaaatcatttggcctccagtggtactgaaacctacgagatacaccgactacggtggactaatcttcaactcctacatacttcccccattattccaagaaccaggcgacctgcgactccttgtacgttgacaatcgagtagtactcccgattgaaacc

SEQ ID NO: 490579 - DNA, 320 bp, Homo sapiens
ataggggaaggcaccagggtggggaccccggttttggccgcctcctcaatccgtgcctcggtttatcctttggtgaagcagacgccacagtttgtgagcagctttgtgggggtttgtgtgcccctccgcactggctactgttttcctcgggggccggtgggcttttgggtccccacattcagtcccaactggggttcccggggttcccgccctggccgcagaggagccacggggcacagctggctgtgtttagggccctgcacagccccccagccagtggctccccccccagttccgaaagaatatggccccccagagga

SEQ ID NO: 490580 - DNA, 2774 bp, Homo sapiens
aagatacagtgactttgatttgcttaacaacagcttacagattgcaggcctaagtctacctcttcctcccaaaaaattgatggtaacatggatcgtgaattcatagctgaaaggcagaaaggtcttcagaactatctcaacgtgatcacaacaaatcatatcttgtctaattgtgagctggttaagaagtttttagatccaaacaactattccgcaaactatactgagattgccttgcaacaggtttccatgttcttccgatcagaaccaaagtgggaggtggtggaacctttgaaagacataggttggagaataaggaagaaatatttcttgatgaagattaaaaatcagccaaaggaacggctagtgttaagctgggctgaccttggcccagacaagtatttgtcagataaagattttcagtgtctaatcaaacttctgccttcttgtttgcacccttacatctatcgggttacctttgccacagctaatgaatcctcagcgttgctaattaggatgtttaacgaaaagggaacattgaaggatctgatctacaaggcaaaaccaaaagacccatttctaaagaagtactgcaaccctaagaagattcagggcctggaactccagcaaataaaaacatatggacggcaaatattagaggtactgaagtttcttcatgacaagggattcccttatgggcatcttcacgcctccaatgtgatgctcgatggggacacttgccggctgctggaccttgagaattccttattgggcctgccttccttctaccgatcttatttttcacaattcaggaaaatcaatacattggaaagtgtggatgtccactgctttggccacttactgtatgaaatgacttatggacgaccgccagactcggtgcctgtggactccttccctcctgccccgtccatggctgtggtggccgtgttggagtctacgctgtcttgtgaagcctgtaaaaatggcatgcctaccatctcccggctcttacagatgccattattcagcgatgttttactaaccacttctgaaaaaccacagtttaagatccctacaaagttaaaagaggcattgagaattgccaaagaatgtatagagaagagactaattgaggaacagaaacagattcaccagcatcgaagactgacaagagctcagtcccaccatggatctgaggaggaaagaaaaaaaagaaagattttagctcgaaagaagtcaaaacgatctgctcttgaaaatagtgaagagcattcagcgaagtacagcaactccaataattcagcaggatctggggccagctcacctctcacgtccccgtcatcgccaactccaccctctacatcagtagagcatgcaccattttgaacgtgaatttcagggatatctgcattacctccacctcctccacctccaccaccaccagcagctcccttgcctcctgcgagcaccgaggcacctgcccagctctcgtctcaggctgtgaatggcatgagccgaggggccttgctcagctccatccagaatttccaaaaaggaactttgaggaaagccaaaacctgtgatcacagtgctccgaagatcggctgaagcttcctgtttacacttggagggaaaagttcttttttattcctactcacccctaccccccaaactaccctcttcctgggaaagtaattgctgagccagtacagccacaaacagtactattttgcagatgctcatgtaagcagcttttcgagagaaataattctttaagcagaataaagttaggctggcattgctcccttaagatcttgctcctttattaaccctgtaaaggagtcttgtttatcctctaatggccaggcttttgggacagcagcatattgaaatattttcaccaactaaaggaaatagacagaaaaacaatgacaatattcaatcacagcagtaaatggcctttgtgttgcaatcccttctaccccatcagacagctcctagaaacattcctcttacagttcatttctctaaagcattttctgattcttagataactccaatttttgctacctttatcttagacattaacactatagcccaaagcatagttactttgctaaatcagaaagcaactgagttctttgttttctcctcaaatagaatggggaacgttcacaacattctcttaagttctaacaggaataccattgtggttatagaactcagggctgctaaagcaactactctagacccatagttctttttagttagatgtattgaaacagacaaaaatattaacatcagaaaaagctcttgccaattagaggatcttcttaatcctcagcaattaagtttggggtttgaggggggcaggtcattgttacaacagaagtaaatttggcatctatagaaatcaattatgatttttgaaagatttatctaaatatatcaatatagcatctctttaatgttagtcatttattagaaagatcctttatcctgatttgcttaaacctttcaataaattgcactttaaaggattataaataatccatttaaaaattcaagtacacacatcagtgttggttactatgcagagaatgtcattgtgtatagtttcatgtaatctgttatgtcagctgtattttttattaaaatcatgtcaagaaaacgtgttgtctgtagcttgacaagatatttcaaatgagaactttttgtagcgtctgttgttagcaaagaatagattcacacagtctaaggtttccttcctacct

SEQ ID NO: 490581 - DNA, 160 bp, Homo sapiens
  misc_feature (122)..(122): n is a, c, g, or t
gtcccggagagctgagcagtcaagatgtgtgacttcaccggaggccagaccgccagagttcaaggggggcttccagctgtttggaccgaacaggtggatggcaagatcctgtacagccagtntggggatgttatggagggcctgggcaggaaccctacca

SEQ ID NO: 490582 - DNA, 2677 bp, Homo sapiens
aagatacagtgactttgatttgcttaacaacagcttacagattgcaggcctaagtctacctcttcctcccaaaaaattgatggtaacatggatcgtgaattcatagctgaaaggcagaaaggtcttcagaactatctcaacgtgatcacaacaaatcatatcttgtctaattgtgagctggttaagaagtttttagatccaaacaactattccgcaaactatactgagattgccttgcaacaggtttccatgttcttccgatcagaaccaaagtgggaggtggtggaacctttgaaagacataggttggagaataaggaagaaatatttcttgatgaagattaaaaatcagccaaaggaacggctagtgttaagctgggctgaccttggcccagacaagtatttgtcagataaagattttcagtgtctaatcaaacttctgccttcttgtttgcacccttacatctatcgggttacctttgccacagctaatgaatcctcagcgttgctaattaggatgtttaacgaaaagggaacattgaaggatctgatctacaaggcaaaaccaaaagacccatttctaaagaagtactgcaaccctaagaagattcagggcctggaactccagcaaataaaaacatatggacggcaaatattagaggtactgaagtttcttcatgacaagggattcccttatgggcatcttcacgcctccaatgtgatgctcgatggggacacttgccggctgctggaccttgagaattccttattgggcctgccttccttctaccgatcttatttttcacaattcaggaaaatcaatacattggaaagtgtggatgtccactgctttggccacttactgtatgaaatgacttatggacgaccgccagactcggtgcctgtggactccttccctcctgccccgtccatggctgtggtggccgtgttggagtctacgctgtcttgtgaagcctgtaaaaatggcatgcctaccatctcccggctcttacagatgccattattcagcgatgttttactaaccacttctgaaaaaccacagtttaagatccctacaaagttaaaagaggcattgagaattgccaaagaatgtatagagaagagactaattgaggaacagaaacagattcaccagcatcgaagactgacaagagctcagtcccaccatggatctgaggaggaaagaaaaaaaagaaagattttagctcgaaagaagtcaaaacgatctgctcttgaaaatagtgaagagcattcagcgaagtacagcaactccaataatcagggatatctgcattacctccacctcctccacctccaccaccaccagcagctcccttgcctcctgcgagcaccgaggcacctgcccagctctcgtctcaggctgtgaatggcatgagccgaggggccttgctcagctccatccagaatttccaaaaaggaactttgaggaaagccaaaacctgtgatcacagtgctccgaagatcggctgaagcttcctgtttacacttggagggaaaagttcttttttattcctactcacccctaccccccaaactaccctcttcctgggaaagtaattgctgagccagtacagccacaaacagtactattttgcagatgctcatgtaagcagcttttcgagagaaataattctttaagcagaataaagttaggctggcattgctcccttaagatcttgctcctttattaaccctgtaaaggagtcttgtttatcctctaatggccaggcttttgggacagcagcatattgaaatattttcaccaactaaaggaaatagacagaaaaacaatgacaatattcaatcacagcagtaaatggcctttgtgttgcaatcccttctaccccatcagacagctcctagaaacattcctcttacagttcatttctctaaagcattttctgattcttagataactccaatttttgctacctttatcttagacattaacactatagcccaaagcatagttactttgctaaatcagaaagcaactgagttctttgttttctcctcaaatagaatggggaacgttcacaacattctcttaagttctaacaggaataccattgtggttatagaactcagggctgctaaagcaactactctagacccatagttctttttagttagatgtattgaaacagacaaaaatattaacatcagaaaaagctcttgccaattagaggatcttcttaatcctcagcaattaagtttggggtttgaggggggcaggtcattgttacaacagaagtaaatttggcatctatagaaatcaattatgatttttgaaagatttatctaaatatatcaatatagcatctctttaatgttagtcatttattagaaagatcctttatcctgatttgcttaaacctttcaataaattgcactttaaaggattataaataatccatttaaaaattcaagtacacacatcagtgttggttactatgcagagaatgtcattgtgtatagtttcatgtaatctgttatgtcagctgtattttttattaaaatcatgtcaagaaaacgtgttgtctgtagcttgacaagatatttcaaatgagaactttttgtagcgtctgttgttagcaaagaatagattcacacagtctaaggtttccttcctacct

SEQ ID NO: 490583 - DNA, 2686 bp, Homo sapiens
aagatacagtgactttgatttgcttaacaacagcttacagattgcaggcctaagtctacctcttcctcccaaaaaattgatggtaacatggatcgtgaattcatagctgaaaggcagaaaggtcttcagaactatctcaacgtgatcacaacaaatcatatcttgtctaattgtgagctggttaagaagtttttagatccaaacaactattccgcaaactatactgagattgccttgcaacaggtttccatgttcttccgatcagaaccaaagtgggaggtggtggaacctttgaaagacataggttggagaataaggaagaaatatttcttgatgaagattaaaaatcagccaaaggaacggctagtgttaagctgggctgaccttggcccagacaagtatttgtcagataaagattttcagtgtctaatcaaacttctgccttcttgtttgcacccttacatctatcgggttacctttgccacagctaatgaatcctcagcgttgctaattaggatgtttaacgaaaagggaacattgaaggatctgatctacaaggcaaaaccaaaagacccatttctaaagaagtactgcaaccctaagaagattcagggcctggaactccagcaaataaaaacatatggacggcaaatattagaggtactgaagtttcttcatgacaagggattcccttatgggcatcttcacgcctccaatgtgatgctcgatggggacacttgccggcttcacaattcaggaaaatcaatacattggaaagtgtggatgtccactgctttggccacttactgtatgaaatgacttatggacgaccgccagactcggtgcctgtggactccttccctcctgccccgtccatggctgtggtggccgtgttggagtctacgctgtcttgtgaagcctgtaaaaatggcatgcctaccatctcccggctcttacagatgccattattcagcgatgttttactaaccacttctgaaaaaccacagtttaagatccctacaaagttaaaagaggcattgagaattgccaaagaatgtatagagaagagactaattgaggaacagaaacagattcaccagcatcgaagactgacaagagctcagtcccaccatggatctgaggaggaaagaaaaaaaagaaagattttagctcgaaagaagtcaaaacgatctgctcttgaaaatagtgaagagcattcagcgaagtacagcaactccaataattcagcaggatctggggccagctcacctctcacgtccccgtcatcgccaactccaccctctacatcagggatatctgcattacctccacctcctccacctccaccaccaccagcagctcccttgcctcctgcgagcaccgaggcacctgcccagctctcgtctcaggctgtgaatggcatgagccgaggggccttgctcagctccatccagaatttccaaaaaggaactttgaggaaagccaaaacctgtgatcacagtgctccgaagatcggctgaagcttcctgtttacacttggagggaaaagttcttttttattcctactcacccctaccccccaaactaccctcttcctgggaaagtaattgctgagccagtacagccacaaacagtactattttgcagatgctcatgtaagcagcttttcgagagaaataattctttaagcagaataaagttaggctggcattgctcccttaagatcttgctcctttattaaccctgtaaaggagtcttgtttatcctctaatggccaggcttttgggacagcagcatattgaaatattttcaccaactaaaggaaatagacagaaaaacaatgacaatattcaatcacagcagtaaatggcctttgtgttgcaatcccttctaccccatcagacagctcctagaaacattcctcttacagttcatttctctaaagcattttctgattcttagataactccaatttttgctacctttatcttagacattaacactatagcccaaagcatagttactttgctaaatcagaaagcaactgagttctttgttttctcctcaaatagaatggggaacgttcacaacattctcttaagttctaacaggaataccattgtggttatagaactcagggctgctaaagcaactactctagacccatagttctttttagttagatgtattgaaacagacaaaaatattaacatcagaaaaagctcttgccaattagaggatcttcttaatcctcagcaattaagtttggggtttgaggggggcaggtcattgttacaacagaagtaaatttggcatctatagaaatcaattatgatttttgaaagatttatctaaatatatcaatatagcatctctttaatgttagtcatttattagaaagatcctttatcctgatttgcttaaacctttcaataaattgcactttaaaggattataaataatccatttaaaaattcaagtacacacatcagtgttggttactatgcagagaatgtcattgtgtatagtttcatgtaatctgttatgtcagctgtattttttattaaaatcatgtcaagaaaacgtgttgtctgtagcttgacaagatatttcaaatgagaactttttgtagcgtctgttgttagcaaagaatagattcacacagtctaaggtttccttcctacct

SEQ ID NO: 490584 - DNA, 1781 bp, Homo sapiens
ccgcctcccgggttcaagtgatcctcttgcctcagcctcccgagtagctggaactacagattattcagcgatgttttactaaccacttctgaaaaaccacagtttaagatccctacaaagttaaaagaggcattgagaattgccaaagaatgtatagagaagagactaattgaggaacagaaacagattcaccagcatcgaagactgacaagagctcagtcccaccatggatctgaggaggaaagaaaaaaaagaaagattttagctcgaaagaagtcaaaacgatctgctcttgaaaatagtgaagagcattcagcgaagtacagcaactccaataattcagcaggatctggggccagctcacctctcacgtccccgtcatcgccaactccaccctctacatcagggatatctgcattacctccacctcctccacctccaccaccaccagcagctcccttgcctcctgcgagcaccgaggcacctgcccagctctcgtctcaggctgtgaatggcatgagccgaggggccttgctcagctccatccagaatttccaaaaaggaactttgaggaaagccaaaacctgtgatcacagtgctccgaagatcggctgaagcttcctgtttacacttggagggaaaagttcttttttattcctactcacccctaccccccaaactaccctcttcctgggaaagtaattgctgagccagtacagccacaaacagtactattttgcagatgctcatgtaagcagcttttcgagagaaataattctttaagcagaataaagttaggctggcattgctcccttaagatcttgctcctttattaaccctgtaaaggagtcttgtttatcctctaatggccaggcttttgggacagcagcatattgaaatattttcaccaactaaaggaaatagacagaaaaacaatgacaatattcaatcacagcagtaaatggcctttgtgttgcaatcccttctaccccatcagacagctcctagaaacattcctcttacagttcatttctctaaagcattttctgattcttagataactccaatttttgctacctttatcttagacattaacactatagcccaaagcatagttactttgctaaatcagaaagcaactgagttctttgttttctcctcaaatagaatggggaacgttcacaacattctcttaagttctaacaggaataccattgtggttatagaactcagggctgctaaagcaactactctagacccatagttctttttagttagatgtattgaaacagacaaaaatattaacatcagaaaaagctcttgccaattagaggatcttcttaatcctcagcaattaagtttggggtttgaggggggcaggtcattgttacaacagaagtaaatttggcatctatagaaatcaattatgatttttgaaagatttatctaaatatatcaatatagcatctctttaatgttagtcatttattagaaagatcctttatcctgatttgcttaaacctttcaataaattgcactttaaaggattataaataatccatttaaaaattcaagtacacacatcagtgttggttactatgcagagaatgtcattgtgtatagtttcatgtaatctgttatgtcagctgtattttttattaaaatcatgtcaagaaaacgtgttgtctgtagcttgacaagatatttcaaatgagaactttttgtagcgtctgttgttagcaaagaatagattcacacagtctaaggtttccttcctacct

SEQ ID NO: 490585 - DNA, 2687 bp, Homo sapiens
aagatacagtgactttgatttgcttaacaacagcttacagattgcaggcctaagtctacctcttcctcccaaaaaattgatggtaacatggatcgtgaattcatagctgaaaggcagaaaggtcttcagaactatctcaacgtgatcacaacaaatcatatcttgtctaattgtgagctggttaagaagtttttagatccaaacaactattccgcaaactatactgagattgccttgcaacaggtttccatgttcttccgatcagaaccaaagtgggaggtggtggaacctttgaaagacataggttggagaataaggaagaaatatttcttgatgaagattaaaaatcagccaaaggaacggctagtgttaagctgggctgaccttggcccagacaagtatttgtcagataaagattttcagtgtctaatcaaacttctgccttcttgtttgcacccttacatctatcgggttacctttgccacagctaatgaatcctcagcgttgctaattaggatgtttaacgaaaagggaacattgaaggatctgatctacaaggcaaaaccaaaagacccatttctaaagaagtactgcaaccctaagaagattcagggcctggaactccagcaaataaaaacatatggacggcaaatattagaggtactgaagtttcttcatgacaagggattcccttatgggcatcttcacgcctccaatgtgatgctcgatggggacacttgccggctgctggaccttgagaattccttattgggcctgccttccttctaccgatcttatttttcacaattcaggaaaatcaatacattggaaagtgtggatgtccactgctttggccacttactgtatgaaatgacttatggacgaccgccagactcggtgcctgtggactccttccctcctgccccgtccatggctgtggtggccgtgttggagtctacgctgtcttgtgaagcctgtaaaaatggcatgcctaccatctcccggctcttacagatgccattattcagcgatgttttactaaccacttctgaaaaaccacagtttaagatccctacaaagttaaaagaggcattgagaattgccaaagaatgtatagagaagagactaattgaggaacagaaacagattcaccagcatcgaagactgacaagagctcagtcccaccatggatctgaggaggaaagaaaaaaaagaaagattttagctcgaaagaagtcaaaacgatctgctcttgaaaatagtgaagagcattcagcgaagtacagcaactccaataattcagcaggatctggggccagctcacctctcacgtccccgtcatcgccaactccaccctctacatcagggatatctgcattacctccacctcctccacctccaccaccaccagcagctcccttgcctcctgcgagcaccgaggcacctgcccagctctcgtctcaggctgtgaatggcatgagccgaggggccttgctcagctccatccagaatttccaaaaaggaactttgaggaaagccaaaacctgtgatcacagtgctccgaagatcggctgaagcttcctgtttacacttggagggaaaagttcttttttattcctactcacccctaccccccaaactaccctcttcctgggaaagtaattgctgagccagtacagccacaaacagtactattttgcagatgctcatgtaagcagcttttcgagagaaataattctttaagcagaataaagttaggctggcattgctcccttaagatcttgctcctttattaaccctgtaaaggagtcttgtttatcctctaatggccaggcttttgggacagcagcatattgaaatattttcaccaactaaaggaaatagacagaaaaacaatgacaatattcaatcacagcagtaaatggcctttgtgttgcaatcccttctaccccatcagacagctcctagaaacattcctcttacagttcatttctctaaagcattttctgattcttagataactccaatttttgctacctttatcttagacattaacactatagcccaaagcatagttactttgctaaatcagaaagcaactgagttctttgttttctcctcaaatagaatggggaacgttcacaacattctcttaagttctaacaggaataccattgtggttatagaactcagggctgctaaagcaactactctagacccatagttctttttagttagatgtattgaaacagacaaaaatattaacatcagaaaaagctcttgccaattagaggatcttcttaatcctcagcaattaagtttggggtttgaggggggcagtgaaagatttatctaaatatatcaatatagcatctctttaatgttagtcatttattagaaagatcctttatcctgatttgcttaaacctttcaataaattgcactttaaaggattataaataatccatttaaaaattcaagtacacacatcagtgttggttactatgcagagaatgtcattgtgtatagtttcatgtaatctgttatgtcagctgtattttttattaaaatcatgtcaagaaaacgtgttgtctgtagcttgacaagatatttcaaatgagaactttttgtagcgtctgttgttagcaaagaatagattcacacagtctaaggtttccttcctacct

SEQ ID NO: 490586 - DNA, 802 bp, Homo sapiens
tggggaaccggggcccaacccaagaggcaatcgcgacccttgccatggcccaaaaaagcgcttgcccgcaggtagggcccagttctgtgtcaggcgaaacagcggggtcctcgtgaaccgccagtgccaccccctgtattgaaattctccacctcgagcgggatccgtaagttccagaaggcgtctttcttgaaaaagtggagaggccctagttgctccaaattggttgcaggaaggtggctttcgattgggctgtgtccacacccggacacgagtggggccataaaacatccggggcgaatgggtctgctcagaggggaagcacttgagcccgaaccagtccaataggagttgatagtggcggtcatgctcctgtaccctgtttaggccgtacggctcctggtatgtcaccccgcggtctcggacaagctggggactgtcagatgggacatgcacttgtcgagcatgctattgagcgcccatttagcaaagctagtcctcaaccagctcgtatggaatcaaagcagcatacggacaatggagcttaaatgtcatatccaaacaataagacgagtgccatccatcataatgagcctgtcacaaatgttcatttcattgacaggaaccccgggttatttggtacaccttttgcaggctatcatgtctcggcagaaatcatatccggcccccatgctgctcgagggcatgtctggtgtggccgcgttgaaccagcctccagggtaagatatccctgctgggtgcaggtgtgtctgattgtgagcaaagcagtgtgtgtcataaa

SEQ ID NO: 490587 - DNA, 252 bp, Homo sapiens
acggcatcttggacttctgggatcagcgactctcctgtctcagctccctagtctcggctcactgcagcctttgcctcctgggttcaagcgattcttatgcctcagccttatataatacagtttcataaactattttgatgtactattttaagatcccactggtttggaatcagtgtcatcaggattctgcagagtcctttctactgggatgagagttattcgtggcttccacatacgaggtatgccggaggc

SEQ ID NO: 490588 - DNA, 1131 bp, Homo sapiens
tgcttggttttttgtctgtcttgtgtctccttgctttcagttgtcttttgtcccgcgtgttttgcgctgttctgcgctttctttctagtcgtggtgtttgtttttgttccttttcgtgtcttgtggtttttcgttcttgtttgtcttgtggtgcgttcgttgctgtctgctgcctgttcttgatctctccgtctttttctttgcttctctgttggtggttggtgttgtctcctgtttctcgtttggtctctggtttgtgtattgggctcttatgtgtgtggggatcgtatgcttactttgatgtgggtgggctgttttgcagcgtttgttctgtggacagcgagacttggttaggctggggcgcgctattgttttttcatgtttcttgggagcgagggctttgtggtctagtcggatgcagggtcgttgtaggcctgtgcgtactgcggatgcgcttacggtcgatgtggggctctgtccttgccgtgccgcagcgccggtcgctgtgccgtcaagtcctgccctgtttctgtgtgccgtccccatcctccgagtttgctgtttgcctggagtgtggcttgtcctctcttccttgggatccccgctcgccaggcttggtctcgatgtttgccatgatgtattaggcttatccctaatgggagccgtgccccacctccccagcacacaggcctgtctgtgggtgctggtgtcatccgtgtcctgcctctgaggaagcagttggggcccgtcttgccatgcctccttggctgatctctccatggtcagtccctgtgttctgtcacaggctgggtcaaaagaagtccctggctctgtccctctcatgggggtccatgctggggagatgggggcttcttcctcacactgctgtcctctcccccttcagctcctgagtagctgggcctgtgcactgggcaggttcctggggaccgcctgccctgccttgccgctccccttggacctccaggggctcctgggcttggatgggaaccaccagcgttcccttctcccccttgtcttcccccctctcctcccagctgcttaacataaagctgatttgaacttttgattgagggagaaacacctgatacaatctataataaagggtcgttg

SEQ ID NO: 490589 - DNA, 274 bp, Homo sapiens
  misc_feature (157)..(157): n is a, c, g, or t
tacaggatccgtgaatatccagagagtcttggacaagagtgacgcagtgaatatctttgtcactgggtctttggtagagtgttgaattcgcccaagttcacgttttgacgggcttcggaccaattttgactgtgaatttccagtcgggagggctctnaccctcggcgtagggccgggccgacaggaacagggaaaatcctccaccaagatgctgactctcgggatatcggatcgggactggtcgcctgaaccgcgaccggtgaaaacttctggt

SEQ ID NO: 490590 - DNA, 440 bp, Homo sapiens
  misc_feature (185)..(185): n is a, c, g, or t
  misc_feature (190)..(190): n is a, c, g, or t
gtccatagagtaaagtgaaagcaagtttattaagaaagtagaggaataggccgggcacggtggctcatgcctgtcatcccagcactttgggaggccgaggcgggtggatcatgaggtcaggagttcgagaccagcctggccaacatggtgaaaccctgcctctcataaaaatacaaaaattagcntggcngcataagtggggcggcccaatggttcttggtttaaggtcccccaaaggccttggcctttggggggggaaagggggccctttgggaaaaggcaggagaattgcttgaacccaggaggcagaggttgcagtgagccaagatcgcgccactgtactccagcactccagcctaggtgacagagcaagactcagtctcaaaaaagaaacaaaaaaagtaagggaataaagaatgggctactccataggcagagca

SEQ ID NO: 490591 - DNA, 239 bp, Homo sapiens
gtggccccgtttatttggtggaacaaggcgtgtaaagttgctctgcagtgctccaccgtatcactccttctcgaatcctacagaacatcaaggtgtttgagtacacctcttagcccagaagagatgaagcagactaaatgccctgaacaaaaattggagatatatagtgcctatgcttacggtggatgggaagagagtcccaagggatgcaggacatcctctgtacccctttaatgacc

SEQ ID NO: 490592 - DNA, 546 bp, Homo sapiens
ggtccgtcctggcagctatcggttcaattcttactatgcacttactcacaaagtaaccttgagcaaattattggccaggtgcaaaggctcatgcctataagcccagtggctttggtgaggccaagatgggagatcacttgaatgccaggagtttacaaccatgcctgggcaacatggtaagtccccgtctctacaaaaaaaaaaaaaatggttgaaaaaaaaatacacagggccaagatacagtaagtatccaataaaggtgagctatcattatcaagaagacagagtatggaaccgggatagttggcctctccttaagggaaggaagcgtgatgaatgattgatgtgtagacttgagggatgactataaaagggggacgtaggatagaagagaaagaacctacagatgacaatgattgtaaactaatttttcttcatgtgtaagcggggtgctcgctgggtgatatccagatcctaacaagattactgggtaagagggttaggcccagtaacgggatggcgaccagtatgataatatttggaccc

SEQ ID NO: 490593 - DNA, 416 bp, Homo sapiens
ttaaaatggctatcctcagtatgttcagaggactgaaggaaccccagctagagattgcatggaaggtctgaagacactgtctcctcactggagaatgtcaatgaagagatataaattatttaaaaaaaaaagtcggccgggcgtggtggctcacgcctgtaatcctagcactttgggaggccgaggtgggcagatcacgaggtcaggagaacgagaccatcctggctaccatggtgaaaccccgtctctactaaaaatacaaaaaactagccaggcttggtggcgggcgcctgtggtcccagctactcgggaggttgaggcaggagaatggcatgaacccgcgaggcggagcttgcagtgagcccagattgtgccactgcgctccagcctgggcaacagagcgagactctgtctca

SEQ ID NO: 490594 - DNA, 1304 bp, Homo sapiens
gtcaacatggtgaaaccttgtctctactaaaaatacaaaaattagctgggtgtggtggcatgcgcctgtaatcccagctactcgggaggctgaggcagcagaatcacttgaacaccggaaggcagaggttgcagtgagccaagatcgtgcaactgcactccagcctgggcaaaaagagcaaaactttgtctcaaaaaaagactcttttcaagttttctaccctctgagtaagaaaatttggggatatccagtgccatctccaagggactttcagggggatcactagatggctttttccttggggctaatttggtttggccctgtgtaaaaacaagtgtgaatatctcgcgatctgctcttgtgtgatacaacagaggcttgtgcaacacacactactgagagtagatcacgaattacgacacagagggcctagtttatagacacacatgcagtggtacgcttagcgtgggtgaaattgagcatgttccactgtggttacataagtgcacgcaacagaagattgtaactccaggataaaggcgttctccctcatctataaacagttagatttgcacttaatttcttttgtaaataatgcaggaagcccaaaaaataggtaagaggcgaggggggaagaggaggcgcagcatgtgaaacgttcttggatggtggaccttgaaagagggaaaaaagaccatgagcgacacagaacaggaattcgatgcttattaaggataatgtatagaacaaggacgaagggccgtactagaaagtcgccagaagtaccagggcagccgccaagggtgggcgtggggacacaccagggcgaaacgggaaaaaaacagggatggggggtacccaaacgctggagcttgggacaatccgtggacaaggccacttcgacagggaagaaaagaaaagcggaagtgagcagtagtccacaggcataggacaaggcgcagcgaaggcaggagcacgaggggtacacatagcagagagccaacgccatgatagagacagcaccagcggagcaccatacgacactgggatacccgaagagggccgccacaaactacaagcaccgtgggcggcgtgtgaacacaaacgggaagaaaaacgagcaacaagtaaaggacaggggagaggggagcagagaaacaataacacgtataagaggcacgacataaagacgagaagggcataaagtctcagaacaaaagacgccagagggagtagcccaagcagagaccacagagctagaaaacgaacgcgacggagcagactagagaaagcggggcaagcga

SEQ ID NO: 490595 - DNA, 709 bp, Homo sapiens
tactggtgtcatggcagccccgaagacagtagctgtggggccgttggtgggagcggtggtgcacgacaccaactccactcgcttgctggtttcaattcaaaaagcagcggagactacttagtcatcacaaagtggaattaacacaagagtacccaaaagaaggatgggtggaacaaggacccgtaatacgaaattcttcagctctgtctacgagctgtatagcgagaacgtgtgagagaacttgaggagactgagatattgatatatccaacataaaagctgtgggagtcagcaatcagagggaaaccactgtaatctgggacaagttaacaggagagcctctctacaatgctgtggtgtggcttgtatctaagaacccagactactgtggaggagtcttagtaagaaaaattccaggaaatagtagcttcgtcaagtctatcgacaggccttccactcagcacttacttcagctgcagtaaagacttcggttggatgcttgacaatgtgagaaacgtccaaaaggctgtggaagaaggtagagctctggttggtaccatgtgattcatggctgtatctggagtttgaccggaggagttaatggaggcgtgcatcgtacagatgtaacaaatgcaagtaggacaatgcttatcaatatccattcttttggaatgggcataaagagctctgtgactttcgtgaaattcca

SEQ ID NO: 490596 - DNA, 369 bp, Homo sapiens
  misc_feature (91)..(91): n is a, c, g, or t
tccacgcgaggtgtgacacgagaccacaggagcgcagcctgtggccccacaccctcttctcaaaacacactctacgaggccaatctgtccncatatggccgacaccatgtggtctctcctttccccctttccaagtcacagggaagtggacacaggtcaagtgtgttggttttataagcgcaagcctttgggaaaggcacacacatttgggaattacatgtgaattccccgggagtgtggctttggcctctttctcttttgaaggccaagggccattaaccagaacttcacactataggcccaaggcacaacccccttcctttacacagagggaaccttattggctgggtggcctttcttttggtgttg

SEQ ID NO: 490597 - DNA, 234 bp, Homo sapiens
gacaaaggagttctgctagctgtgctgcatgggccagactgaggtcttgctgggagcaagggcagtactgttatacctgggttgctgcattgtgggaggggaccaaggagggtaggggaacatcgaccgtggcttaggactctcctgtctgcagggacggccccacacacacacgctcatactcacagtcatgctcaccatacatggacagatgctcacatgcatgcacccagg

SEQ ID NO: 490598 - DNA, 202 bp, Homo sapiens
actaatattagagatcaggctcgtcctattatctgttcgtgtatagttatcatttgttctgaggttcgttattgcttagtcatagcttgttttccttgtattaaacggttgttgatgagatatttggaggtggggatcaatagagggggaaatagaatgatcagtactgcggcgggtaggcctaatttctctcggaccaatg

SEQ ID NO: 490599 - DNA, 173 bp, Homo sapiens
gatgtaatctatgcttcaccatggtcttatgaggcaggctgagagatgttcgaatttttctcttcctttcagtattcttagttgtcagcttgccacggatccctgatcccattctcctctgcacgctcacctcctaccccataggacgtacgacagtacgggttcacggcctc

SEQ ID NO: 490600 - DNA, 538 bp, Homo sapiens
gttgtgctgtcccctgcctctagaagctatggggaatttggaatcttgtgtaagtgcccaaataagtctgagtgctttcctcttcttcaacactcaaccctctaatcccgttagcactgattagagaggtcccccaaagaataccagctggttttgacccatgatagcattagaaactgcattgttcagttcaggagccactagtcacatatgactatttaaatttacaagtaatacttgtagtgaatacaattcagtttcgttcaagttgcatttcagctcagcattttgagctatattcatgtaggcggtggctagatttactggtatttaagcacataatgtatatggaatcatttccatcaccacagaaagttgctgattggacagcactgcattagaatattttgcatactgctcttcctcaattaatttgttgttgttaatgttgatgtcttcattggatgggtcataatgttccagtgaaacctctcaagtacacaattgtatgttcttataatccctagccacacatatc

SEQ ID NO: 490601 - DNA, 124 bp, Homo sapiens
tcatccacatcagcatcacaaccttcattcctcagactcccatcgagaggctgctcatgcgactctagcccgtccgctagcgttcggccgcgtcaaccgtgcgagaacacgatcagcgcggccg

SEQ ID NO: 490602 - DNA, 785 bp, Homo sapiens
  misc_feature (2)..(2): n is a, c, g, or t
  misc_feature (45)..(45): n is a, c, g, or t
  misc_feature (68)..(68): n is a, c, g, or t
  misc_feature (81)..(81): n is a, c, g, or t
  misc_feature (120)..(120): n is a, c, g, or t
  misc_feature (138)..(138): n is a, c, g, or t
  misc_feature (189)..(189): n is a, c, g, or t
  misc_feature (249)..(249): n is a, c, g, or t
  misc_feature (252)..(252): n is a, c, g, or t
  misc_feature (254)..(254): n is a, c, g, or t
  misc_feature (267)..(268): n is a, c, g, or t
  misc_feature (318)..(318): n is a, c, g, or t
  misc_feature (329)..(329): n is a, c, g, or t
  misc_feature (355)..(355): n is a, c, g, or t
  misc_feature (365)..(365): n is a, c, g, or t
  misc_feature (407)..(407): n is a, c, g, or t
  misc_feature (498)..(498): n is a, c, g, or t
  misc_feature (534)..(534): n is a, c, g, or t
  misc_feature (667)..(667): n is a, c, g, or t
  misc_feature (706)..(706): n is a, c, g, or t
  misc_feature (769)..(769): n is a, c, g, or t
cntctagattcagctatacaactggatagtgtagtacggtagcanggcactatcataggcaatacaanaatgtgcatctantgtcattgtccagttgaatgatctgtgtatagggtcacncaagagtgcaaaagcccnaaagaagctgattcagcatgctgttacttagactgaagacaactgctgaanagcatctatagggcactcactaggcatctcagcacactcagctgcagagcagacccatgncancnacgctgaccatanncctgacatttcttggctatcacctccaaggtagacttcgttcagagctanactactggcanaccactaagaatgaatgtgaattctntgttcacctntgctagacagatccaagagtgctgactgaaaagaacccaccnaagtgtcagtaagactctcttctacagacatctgatctagcacctgagattacactggacaatgccagtaagtctgttgactgaacaaaanatagtctccatggaaaggataaatggaaagaccttntgtgcaccagatcctcatggctgcctcaaagccagtttttccgagtaaggtgagcctaatgttctttctgtagcctctgtacttccactggattgtgctgatggtggtaagagatatagttatagacactgtntgctgaatacaaagaaatatagcccagagaagtcaaacncaagtgctgtccactgagaaggaacaccagctacctgctggccaaaagagtcccagactaatntcttgtagaagtcagt

SEQ ID NO: 490603 - DNA, 370 bp, Homo sapiens
cccaaagaggtttagcccaagatccccaggggtttcacccgcaagctcgattgacttgcctccattgcccaccccaagcttgggaagcgtgcttgtgcccgtatttccaaggggctcaggctgttccggccaaaggccaaggcccaggccaaggccaagggtcaaaccaaggcccagggtgcagccccagcttcagtttcaggtcaggcttcccaacgtaccccggccccttcaaagggttcagagttgatatttttgcccacattagggcagaagggctggttcgaccccccccccccgcccctggggttccctttgcatggggctggggtcctcctgtgctatttgttcaaattaaccttaggccgga

SEQ ID NO: 490604 - DNA, 1438 bp, Homo sapiens
gcgagcgaggagcgctgggacctagctagacacgctagactgcctatacagagctgtggccctggggccctggagtcgtgccggagccagccctgggtacctagacccctggccctggctacccgctaccgggctactagccggcgggcgtagcgagctgcggcgtcggtaccgtggccggggggatagtactacggcggcacgcgctagcgaggatactaggatagagctagcactaaccagtgacacagatatacagatagtagccggagcacgcgcggataacgcaagtagcaaggtacaacataggacccatagaggaggacagagcaggctagagggccctaggtagcaggcagttaggcacagcagggacctaggaagtaccctaggccaggccacttaaccctaaaaccgccactagcaccaggcaatagccaggtaacagggtaggctagagcaggttatttagacatacccagaaccctaagtacacagggggcccataggacccaacagacaggacggaccacacaacagtacatacgacgctagagtaaacagaagtaatagtgcaccaacagccagtagtgaccactagctaagcccaatgccacctagcacaggggctcgggctaggcggacagccagtagccggcagaaaccgcttaggcacacagccagcctaacacaccctaagaagtgttagcccaggaaagtaatatagctagggacccgcagcgcagggaagggcaccgccataacatactagcagaagcggcccccaccaaaggggtggcctaggggggcacaccggactagggggccccgcaaggaataccggcccacgactagtaggcccaaggggcaggcacacggacccaattaggctagcataaacgaaaattacacttagggaactcaacaaacgcaatacctaagagcggcacgggtagggccccacactgcgagagggctaactatatgaggcacgacattaaccaacaagaatatggcaacagccccccagatgagtaactaaagactcagcactacggcggctaccgacggcgccgaggggaacgggcttcaccacacattaggcccaagcccccccgcgcacagggtccaggggccacgctcttactgacgacgcacttgttggaccccaacggtctccatacaatccctcacagggaggcgggccaaatcgcgccccggcagcagacatccgatcgcaacacaagactacatgaggagcctggaacccccaactgacgcgctatgacgcactgtacacgacacaagactcgtgcacgaccccgcgcaggatcccgggacgatcccctcaatgactgcctcaaggtggcgtgggcgcactactacgctttgctaatcatctacgcaatcaaatatcgcagcgtctacactagactga

SEQ ID NO: 490605 - DNA, 213 bp, Homo sapiens
catatttaagtgtctgttcccttccacgcttcttttcatttagataaaaatacagtatttcgtattctagtttagtaaatgttcagtatttattcaacaaacagcgagtgttgtatttcatggcactgtgccatgtgcttgagttaaccacataagggcaggctcgttaacaccgtgcctgaagggggcttggcggatccttctagaagtcga

SEQ ID NO: 490606 - DNA, 250 bp, Homo sapiens
  misc_feature (227)..(227): n is a, c, g, or t
cagcgctatctggcactagctaagcactccatgattgtttaagattatcttattccggcaggctcggtggctcatgcctgtaatcccaccactttgggaggcgaaggcaggtggactacctgaggtcagggagtttgagaccagctctggccaatgacggtgaagaccccgatctctcctacaaaatacaaaaatgtagccacggtgtgtgtggcagtgcgcctgcnaatcctcagatacttgggagtct

SEQ ID NO: 490607 - DNA, 159 bp, Homo sapiens
agaaggcagacgcatcccgaacttgctggaggacaaggctcagctcttgccaggccaaattgagacatgtctgacacagcgagagtggtgcaggtctaactcgcttcacggctgagcttcagaaaggcagtagctcgtgatgcagactctgttgacagt

SEQ ID NO: 490608 - DNA, 353 bp, Homo sapiens
agatccccgaaatcagaggctaagcacatttgcattagccaggaaaaatcaggaacaaggtatatcttgcaaacacaagtaaaaatacaaaggtaagatggaatagcaaacagaactaatgaaacatattcttgaccatataccaagaaaaggttgtgcaggggaggggagaggcaaaaagtctcagaagcagacaaagttctgcaagtgctgcattcatgacatccagtcagcatggacttactgcacccctgggtcaggcagtgcgtcatgacagtgcacaggaagctgagtccctgcgcttggggagctgtccctctttggccaggttgccgcgcacacgggcctgcgtg

SEQ ID NO: 490609 - DNA, 134 bp, Homo sapiens
tgtccacgtggttatgatagacacccaccgcaactgtcggtctcatatcacgaacagcaaagcgacccaataggtggactacgtctgagaagctctcagcacaaacccgccggtggatcctctagtcgtcgacc

SEQ ID NO: 490610 - DNA, 118 bp, Homo sapiens
gagacagcggatataggaaatattaagtgtaggataagacagaaactaatatgtactagggagctggcaggacctaggctaggctgctaggggtaccggagctacgaatatcgtaata

SEQ ID NO: 490611 - DNA, 179 bp, Homo sapiens
  misc_feature (15)..(15): n is a, c, g, or t
tctagaggatcccgntgaagatcggcgattatggcctgctcagtgtggaccttcggcgtgtgcagtatgggttttcggcgtgtgcagtttggatcttcggcgtgtgcacacgccgagagaccaaactgagcagaccatagtcgccgatcttcacgagtgcaaaatcgccgatcttcacg

SEQ ID NO: 490612 - DNA, 888 bp, Homo sapiens
agcgggttcgcgccagcccgggacgcgcttggccttgcccgcgcccgctcgcctcgtctcgcccggcctccccggcgtcgcctcgtcgcctgttccgtgccaggcatgggccaccccaagcactgtgtgctcgtgtgaggcatgctcagctcccaaagagacaaaagccgacgctaaagtaccatactacgcccggtgcgctgtccccgcggtcatccggtcctcgaggggtccctgtcgcctgtagccgggccaagcctagactacactcactcttcccgcagctgcggaagccggctggtgagacgaagatgctccgctgatccgaatcaacagcgagcatctgagtcatgcttgaagcttgactgctaggagcaaggaggttccgccgcggcatccagcccaactccaagctggaagaagtgccgacatcctgcgagataggcaagtcagactacctgaacgcacaggcacaaggtgatgccgcgcaccagagggcacgagaagcggcaagcaaggtggcagggactgtacatgccagaagggcaatgtgcatgaggaagacaggaaggggaaccaaaagaaatccgtaaagtgacacacgaaagtgacttacacaagaagagcgcgaaggaaaagataaagggaatgtgacccaaacatgtgaaaacactgcacacacgaggcaagaataacaacaaaaggaggaaagtacaaagacaagaaaaaagaatgagagaagccaaggaaagaaacaaacacaagaacaagaaaacacaactagagaataaaaaaaacaccacacaagcacaaagacaatagaacacagagatacaagcaaagaagaagagataaagataagaaaaacgcaaaacagaacgacaaaac

SEQ ID NO: 490613 - DNA, 420 bp, Homo sapiens
agtcgagacggaagggtttcgcagtgagcttgtggcgtcgtttcagtgcttctgcaagggtttccaattgctcatccggatccatagattttgtgggatgctataaacttagggtcaggcatccatatcgtactgagtggccttggcaaatccctgtaagtacagtttaagtgcaccagtgataatgttgatatcttcataccatgttcacaagaaatatctgcctactcaccatctctgtcgaaagccatgttgacatcttcgaattaggtcactaaatcctgatcatcggtatagtccttcagcaattacagcacctctagcatcaatctccctgaagcacatgtctaaccaccataggccgcttcagtgatatgtgctttcacgagcgtcgtaaggtcacagctgatacactttttg

SEQ ID NO: 490614 - DNA, 879 bp, Homo sapiens
gccctctaagaggtttttcctttcccccgggcttcgcgttataaggccacagacaatggggttcctacacccaaaatggtgtaacactgtgtgggtatgggaaaggcgtccttcttatcgggggagtatctccccccctggggcattatcctaccggggccacatatggtcagtgcgcccaccacaaactggcgacttgtcaacggggcaggcacctttgtgtgcccgcgaccacattatttcccaccgggcagtctcatcaagagcgagtaattaaatatggatgcttcattcccccgtggtcccccatcgttattgaagaccagaaattattggcgcgcctcacgttggcgcccccgagccgatcttctgtcgcgcactacccggattgacagaccgccccccaccatctcgccgcgacacgggtgggaacaaaacccaacggggtcaccccctggacaagaccccgccacacgggcggcggcggaccacactgaaaccaacagtagcggttctgtggagtgcccccctcccatgaagagagccattcgccattttgtctggagaaaggcatattatcttcccctactgccaatataatcagtggatagttctcatcagggggccattatactatatgtgtggcgtcgtcgccccttggtgagcacccccggacccccacctccccgcgccccgcaaggggggccccagggtcgaaacagaatttcttctgagccgagaggttcaaaaaatcttttatctttgttcaggccatgcttctgggtccccccaccggcgccttggcgtagcggataggttgttagacggcagaaaaatcccagcaaaaaaagggtttaaaaaaaacagccccacaaaaca

SEQ ID NO: 490615 - DNA, 323 bp, Homo sapiens
tttgtttcttggcaatgaacgagcaaagagggttatttacaggaattcacatccatcacacaaagtaactcttggcttttaccaccactgctactctcactgatgcagtcatgacgctgtccaagatatctgaatatgttgcatagttagagcacccaacatgacacaactggaggcatggctaccagttagaccaataaatataatttattctagactatgctacctgaccctaggctatcacaagctggaaacataaacgatccacttatatattgtggatgaggacaacatggactattttagtatttttcctatgatgc

SEQ ID NO: 490616 - DNA, 258 bp, Homo sapiens
  misc_feature (130)..(130): n is a, c, g, or t
acttgataagggacctttatttgatcccaagttggataaaaccaattaaatttgtgttacagcaggagtaaatcttataggaaacggtgatttaatgttatatatgggaagtgaggcaactgttttcttngttaaagaagtttccagcttcacttttgggcagtaggaaaaaaaagtaggccaaagtctgggccatgttgagggacagtttctcgaaatatagttttaaaacactttgataataaaacccttaaactt

SEQ ID NO: 490617 - DNA, 243 bp, Homo sapiens
cttccctttagggactaactcctaatgcagataggccaggttctagaggagcaactattgtctaccatctccagacagtattattccaccaacatctgattctccttagactgtgacagactgtatccctctgcctctgttgctgcaactgagtcccgccttctaggcttcttctgaattgtccagaccctgctgactgttctgatccttctctgagcatcaactgacggtcgcgaatggcgc

SEQ ID NO: 490618 - DNA, 293 bp, Homo sapiens
tgtgggagaaagtctcctggtttcaagaagaggatttaaattggcttaaagcagggttgccctgaggcccaggaggagagagagctacagggttcacaaaccctgacagacccagtttcttcctacactgaaaggaaagggggttccaggtctccaggcctggcctgaggaggggtcaggtggtatggatggagaggtctggccaggcatggtgatgttcatgcctttaatcccagcacttagggaggcagagacaggagaatagctccagcccaggagtttgagaccagcct

SEQ ID NO: 490619 - DNA, 1211 bp, Homo sapiens
cccacgcgtccgaacaagctaaaagttaacaatggtgtacatgtatcgacaatctaacactcaagatagtttctaaaagcgaacatcagatagtctaaggtataccgtgatctctcaacaactactttaaaggcagtaaccgtacactggactggctaggactcgagttgatatcattgatatactgataggtagggtccacactcctacttgttacgtgaatacatccttgactattatatcccatacttagtgtagtacaagtggccttgacactcacaggcagcaagcaggcctttattgacttgcatttctgtcggagatatcaacatgctattctgcctagcttcgagtttcaacaatacatgtcgtggcaggcaaaaacgagtacgatattagactgtgtagtcaaggacgacactatttggtacatccctgatccacggtcatgcacggaccctttccttcgtagatgctttggcactacatttgtactatgacaccacatccttctggactccctttactattgtaacttaaggacagctactactgtagcacacatcgtcgattagtcttaaaagctcacgaagtctcggtcacaattattatccaaagagggtcgtcatggagatcgaataagcttgttggattatggcaatacttgaacatactgatagtgtggactcacggagataatcgcaatctggttataggctctatcgatggcgtctgctgaggaagaatgtggacggatatctggtttaggcggttaaggtcaagctaaaatctcacgaaaattgggaacaggatacagcactgggataacatacagcgatccaccggtacagacaaacaatacccagacttgtcctaagaagccactggaggcaggagtcagtagggggaaacaaacgagggatatgctaaaaaaggacgaacaaaacggtcatccgggaggtaaaatccaacagggaggtcacaaacatcaacaaggacagatgctacatggcgataccctgtggccataactggtagcaaagcccccgaaagcaggaaaaatcaaatcctattgagagcgatacaaaatgagcaacgggacacaaaaagttaacacgaaaagttaagccaaaaatacacaaaacacgtaacagccaaaaaaaaagcgaggagataaaacaaaaaacacaagtaaaaagcaatagtaaaaa

SEQ ID NO: 490620 - DNA, 262 bp, Homo sapiens
tcagccggtacctgccatagcgtagtacccaaaaaaaaaaaatttgaaaaaagatagttgagatgtgagagtttgttttagattaggctagaggggacagcaggagttcatgagcacacataggctctcttaacccatgttaaagagtttagactatatcctaagagaacagggaagccattgaagggcctcagtcaagagaaatcaatggctaacatcctctacatgttaaaataagcagattgggtactacgctttggca

SEQ ID NO: 490621 - DNA, 640 bp, Homo sapiens
taggtggccctcttactcaagtgtctgatgttagggaaacagtatatagttcgagtggctgcgtatcaagtatcacctgtgactaggttacagagtaagccatcactcacaaaaatggatcatggaccaagaaaaactcaatacttgcaggtccagtatcacacagatgtgactattgacggcttgcggtccagcaggggagtatgtggttagtgtctatgctcagaatccaagctgagagagtcagcctcatggtttcaggacatgcagtaagcattattcctgcagcaactgaacgtgaagttcacatcaggtcacacccacaagcttgagctcccaggggatcgcactcaatggtacagctcactggatatcgagtgcgtgtgagccccagggagaagaccgtgaccaagtgaaggaaatcaagcttgctcctgacagctcatccgtggttgtatcaggactcatggtgggcaccaaatatgaagtgattgtctatgctcttaaggacactttgacgagcagaccagctcagtgagttgtcaccactctggagaatgtcaggccaccaagaagggctcgtgtgacagatgctactgagagcagcatcaccattagctggagaaccaagattgaacga

SEQ ID NO: 490622 - DNA, 391 bp, Homo sapiens
  misc_feature (386)..(386): n is a, c, g, or t
ttttttttttcttcacacatcgaatacccaaattttggaaactagcaggaaaaaaacaatattcaaaactgcattataaacacaaggaatattgcaaaaatcaaacatatagcaatactgaagttatcatgctgtcagttgtacataccaaagcatgaacgtgcttccaattgctctgataaagatgagagagtaagaagtgggattatatggctgggcgcgtggcttgtcggtgtaatcccagcactttgggaggccaaggcaggtggatcacctgaggtcaggagttccagaccagcctgatcaacatggagaaaccccgttagccaggatggtcttgatctcctgaactcgtgatctgcgcacctcagcctcccaaagtgctngggat

SEQ ID NO: 490623 - DNA, 390 bp, Homo sapiens
cctgtaggcccagctactcgggaggcttaggtggcaaaaaaaaaaaaaaaagggaaaaccttccggcccggtttttttgagaaatttgggggaaaaacccctaaaaattttttgccaacttaaccaccggttaaaaaggttttttcttctggagaaggggggtttttccccggggggccggggaaattccaccttagccaaacaattcagggggacccttcttccccccaaaggggggggcaaaaccctttggacttttcaattggacccggaaaaacctttggaaaaggtcaaaaacccctgctggataaaaaaaaaacccttaaaaatttggggggaaaagggaccttccctcaccttataaaagcccttttttgacaaccccccggt

SEQ ID NO: 490624 - DNA, 541 bp, Homo sapiens
gatagttctccctgactgagacttgtctgatgatctggcccctggctcctgttctggtctccagtcatggtgtgtctgaccgctcccctgagaatggcgtcctgtcagtggacaggttctagaccatgccgacactgaatggtgcgtgagctcttccactggctttgcgtctggtggtacatcgcagattcaagtttcttggaagtactctacgtctgagatgtcatttcttcaatgggacggagcggatgcggttcctggatagatagttccataaccatggagagagaacgtagcgctatctatgagcgaccgctggaggggaatttccggggcggttgaacgggcacgtggcggcagtgtcctgattgtgcgaagttccatgggaagactggcaagaagggacgattcccttggaaatactgatgcggggccatggttggactcgcttactggtggaccgtaacgtaccgggggttgtggcagagcttcacagtgcaacgtggagttcatcctaatgtgactggtttccttcactaat

SEQ ID NO: 490625 - DNA, 764 bp, Homo sapiens
  misc_feature (1)..(1): n is a, c, g, or t
nccggttgcgtccgggcagcccatcgtttttctccgccggggtgtgccccgccgggcgtgtggttgcggggacgcccccctgctttctccccccccttgtgctgccgttgtgttttatgccgccggccgcccacgtacggttgttgttgtgtttatctgccgcgccgcccgctctatttagtggcgcgcgtttgttttgctctctcgccctccctcgcggtggtgcgtcgctgggcgggcgcgctcgcgcgggttctacttcgctgttgttgctagagtgagttagctcgcgcgccgcgccacgtagtattctcttggtatttgccgcgctcgctatcttttgtatgcgaggtgtttctctcgtctctcggctcgcgtgcgccctgcgcgcgaaatattctccccgcggaggatttcgctccccctcattctccgcgccgccgcgcctatattgttgtgacgccccccccctggggggtggatgagttacgcgccccccttgctggtgttgcgcctcgtctagctcacgtcgccaccacggtggtcgttcctcaccacagcgatgttctgctcgccccccgccattctgccggccccctcctttatactacctcatctcagtacgtcgcgtcgtggcttgttcataacactcttcccttataggagaccccgttgttcttgttatcgtgctaacccctccgtcgtcctccctcctccatcacacataaaaataataaaataaaaaacacgccgacaataacaaa

SEQ ID NO: 490626 - DNA, 221 bp, Homo sapiens
  misc_feature (33)..(33): n is a, c, g, or t
  misc_feature (187)..(187): n is a, c, g, or t
tgacaccatgcctggttaatttttttaattttnattttcagtagagacaaggttgcgctatgttgcccgggctggtatggaactcctgtgcttaagcggtcctcatgcctcggcttcccaaagtgctgaggttgcagctatgagccaccgcacccagcctacattccttcttatcaccgagaaacangttgatcttcacaggtgtaatgagtatgaaggga

SEQ ID NO: 490627 - DNA, 196 bp, Homo sapiens
  misc_feature (41)..(41): n is a, c, g, or t
  misc_feature (186)..(186): n is a, c, g, or t
gtctagaggatcctgaaatagcgagggcagtgggcgagggnggcaatgatctggcactttgagatgagagagaggaaagcaggatatatgacaagcaagtatagtcaccaaacagtagcccctgttcatatctcaattttcctaatttgaatggatcacctcctttctttctttagttgcgtcggntaattttccg

SEQ ID NO: 490628 - DNA, 365 bp, Homo sapiens
atctgggtccgacgctaatgtcaagggcacccagatctggcgcctacttcggggcctccctctgctccgtggactgtggacatgcaacggcagcacctgacctggtcctcatcgtgggccccccattactacgaagcagacccgaggtgggccaggtgtcctgtgtgcccgcttgcccagtggtgtgatgggctctggtgtgcatgtgttgatgcttgttactctatcgtggtgagcatggtgccaagcccttgtgggcctgcttatgggtgcatgcccataactagttgcttgggtggactgtaaagtggtggacaatgcttgacggacgttggccatttggttgccccgaggaagaggattga

SEQ ID NO: 490629 - DNA, 2474 bp, Homo sapiens
aatttaaatatgcctttaaaataagtcactgttgacagggtcatgagtttccgagtatagttttctttttatcttatttttactcgtccgttgaaaagataatcaaggcctacattttagctgaggataatgaacttttttcctcattcggctgtataatacataaccacagcaagactgacatccacttaggatgatacaaagcagtgtaactgaaaatgtttcttttaattgatttaaaggacttgtcttctataccacccttgtcctcatctcaggtaatttatgaaatctatgtaaacttgaaaaatatttcttaattttgtttttgctccagtcaattcctgattatccacaggtcaacccacattttttcattccttctccctatctgcttatatcgcattgctcatttagagtttgcaggaggctccatactaggttcagtctgaaagaaatctcctaatggtgctatagagagggaggtaacagaaagactcttttagggcatttttctgactcatgaaaagagcacagaaaaggatgtttggcaatttgtcttttaagtcttaaccttgctaatgtgaatactgggaaagtgattttttctcactcgtttttgttgctccattgtaaagggcggaggtcagtcttagtggccttgagagttgcttttggcattaatattctaagagaattaactgtatttcctgtcacctattcactagtgcaggaaatatacttgctccaaataagtcagtatgagaagtcactgtcaatgaaagttgttttgtttgttttcagtaatattttgctgtttttaagacttggaaaactaagtgcagagtttacagagtggtaaatatctatgttacatgtagattatacatatatatacacacgtgtatatgagatatatatcttatatctccacaaacacaaattatatatatacatatccacacacatacattacatatatctgtgtatataaatccacatgcacatgaaatatatatatatatataatttgtgtgtgtgtatgtgtatgtatatgactttaaatagctatgggtacaatattaaaaaccactggaactcttgtccagtttttaaattatgtttttactggaatgtttttgtgtcagtgttttctgtacatattatttgttaattcacagctcacagagtgatagttgtcatagttcttgccttccctaagtttatataaataacttaagtattgctacagtttatctaggttgcagtggcatctgctgtgcacagagcttccatggtcactgctaagcagtagccagccatcgggcattaattgatttcctactatattcccagcagacacatttagaaactaagctatgttaacctcagtgctcaactatttgaactgttgagtgataaaggaaacaaatataactgtaaatgaatcttggtatcctgtgaaacagaataattcgtaatttaagaaagcccttatcccggtaacatgaatgttgatgaacaaatgtaaaattatatcctatatttaagtacccataataaatcatttccctctataagtgttattgattattttaaattgaaaaaagtttcacttggatgaaaaaagtagaaaagtaggtcattcttggatctacttttttttagccttattaatatttttccctattagaaaccacaattactccctctattaacccttcacttactagaccagaaaagaacttattccagataagctttgaatatcaattcttacataaactttaggcaaacagggaatagtctagtcaccaaaggaccattctcttgccaatgctgcattccttttgcacttttggattccatatttatcccaaatgctgttgggcacccctagaaataccttgatgttttttctatttatatgcctgcctttggtacttaattttacaaatgctgtaatataaagcatatcaagtttatgtgatacgtatcattgcaagagaatttgtttcaagatttttttttaatgttccagaagatggccaatagagaacattcaagggaaatggggaaacataatttagagaacaagaacaaaccatgtctcaaatttttttaaaaaaaattaatggttttaaatatatgctatagggacgttccatgcccaggttaacaaagaactgtgatatatagagtgtctaattacaaaatcatatacgatttatttaattctcttctgtattgtaacttagatgattcccaaggactctaataaaaaatcacttcattgtatttggaaacaaaaacatcattcattaattacttattttctttccataggttttaatattttgagagtgtcttttttatttcattcatgaacttttgtatttttcatttttcatttgatttgtaaatttacttatgttaaaaataaaccatttattttcagctttgaaaaaaaaaaa

SEQ ID NO: 490630 - DNA, 204 bp, Homo sapiens
  misc_feature (66)..(66): n is a, c, g, or t
  misc_feature (83)..(83): n is a, c, g, or t
taattctcttttttttccttctttcctctttttttcctctctctcctcttaatacacacttttttnagtagggggaataccangatgtcgctctagccgggccccggtagacgcgaccccggggccggcggttaaaaccacggtagaatcgagagcgggagcggtggtagtggagggaagcgtcgcgcaggggtaccgagctcg

SEQ ID NO: 490631 - DNA, 2420 bp, Homo sapiens
aatttaaatatgcctttaaaataagtcactgttgacagggtcatgagtttccgagtatagttttctttttatcttatttttactcgtccgttgaaaagataatcaaggcctacattttagctgaggataatgaacttttttcctcattcggctgtataatacataaccacagcaagactgacatccacttaggatgatacaaagcagtgtaactgaaaatgtttcttttaattgatttaaaggacttgtcttctataccacccttgtcctcatctcaggtaatttatgaaatctatgtaaacttgaaaaatatttcttaattttgtttttgctccagtcaattcctgattatccacaggtcaacccacattttttcattccttctccctatctgcttatatcgcattgctcatttagagtttgcaggaggctccatactaggttcagtctgaaagaaatctcctaatggtgctatagagagggaggtaacagaaagactcttttagggcatttttctgactcatgaaaagagcacagaaaaggatgtttggcaatttgtcttttaagtcttaaccttgctaatgtgaatactgggaaagtgattttttctcactcgtttttgttgctccattgtaaagggcggaggtcagtcttagtggccttgagagttgcttttggcattaatattctaagagaattaactgtatttcctgtcacctattcactagtgcaggaaatatacttgctccaaataagtcagtatgagaagtcactgtcaatgaaagttgttttgtttgttttcagtaatattttgctgtttttaagacttggaaaactaagtgcagagtttacagagtggtaaatatctatgttacatgtagattatacatatatatacacacgtgtatatgagatatatatcttatatctccacaaacacaaattatatatatacatatccacacacatacattacatatatctgtgtatataaatccacatgcacatgaaatatatatatatatataatttgtgtgtgtgtatgtgtatgtatatgactttaaatagctatgggtacaatattattgtgtcagtgttttctgtacatattatttgttaattcacagctcacagagtgatagttgtcatagttcttgccttccctaagtttatataaataacttaagtattgctacagtttatctaggttgcagtggcatctgctgtgcacagagcttccatggtcactgctaagcagtagccagccatcgggcattaattgatttcctactatattcccagcagacacatttagaaactaagctatgttaacctcagtgctcaactatttgaactgttgagtgataaaggaaacaaatataactgtaaatgaatcttggtatcctgtgaaacagaataattcgtaatttaagaaagcccttatcccggtaacatgaatgttgatgaacaaatgtaaaattatatcctatatttaagtacccataataaatcatttccctctataagtgttattgattattttaaattgaaaaaagtttcacttggatgaaaaaagtagaaaagtaggtcattcttggatctacttttttttagccttattaatatttttccctattagaaaccacaattactccctctattaacccttcacttactagaccagaaaagaacttattccagataagctttgaatatcaattcttacataaactttaggcaaacagggaatagtctagtcaccaaaggaccattctcttgccaatgctgcattccttttgcacttttggattccatatttatcccaaatgctgttgggcacccctagaaataccttgatgttttttctatttatatgcctgcctttggtacttaattttacaaatgctgtaatataaagcatatcaagtttatgtgatacgtatcattgcaagagaatttgtttcaagatttttttttaatgttccagaagatggccaatagagaacattcaagggaaatggggaaacataatttagagaacaagaacaaaccatgtctcaaatttttttaaaaaaaattaatggttttaaatatatgctatagggacgttccatgcccaggttaacaaagaactgtgatatatagagtgtctaattacaaaatcatatacgatttatttaattctcttctgtattgtaacttagatgattcccaaggactctaataaaaaatcacttcattgtatttggaaacaaaaacatcattcattaattacttattttctttccataggttttaatattttgagagtgtcttttttatttcattcatgaacttttgtatttttcatttttcatttgatttgtaaatttacttatgttaaaaataaaccatttattttcagctttgaaaaaaaaaaa

SEQ ID NO: 490632 - DNA, 262 bp, Homo sapiens
ctagaggatccccgataccacctcgaaatagaccagctctcctcctgtcaggcaatcaccacttgtcgctggttcactgcacacttcacaattgttttctttccaggggtcttccactcattgactctcttgtctgctcgtatgtgccgaatgccatctggatagacctagagtcagtaacagaaagaaacctgactttaacaatttgattcatcactcagaatgaccctcacatctatcagatctgtcactggtggtatag

SEQ ID NO: 490633 - DNA, 1463 bp, Homo sapiens
tcgccagccttacgggcccaaacccttcgttgttaaagggtgcagtaccataacccggagccggggttaaaggcgggccgggcaccccctttcttagacctctccagtgtgcccgccggccttcaaaatctcaaacatgtggcccaaaactttgaagagactttgggggaacggcttgcccgccgggccccgggccatgtgggcacgcggcccttgaaccctgtgttgtgctgtgggggccctgcccccggtggcccttacgggtgtgtgcgccaaatctctgtggtgttctcacgcggtggaaacgggcggagcaccagaaaacgccatctcttctctctctacaattcgagagatctcgggtgtgaagaggtgtgcacagacagagagaacacctatatctcctgtggccccagagagggcgcctttctcatcttttcaggagatttcccctgttggagtcttctccacaagatataacccccccaaatatttatctctatatgtgaaccacatctcctcagagccgcacaagagaaacactctctgagaagatacattatctctctctctcttctccctctattaccgaagaggccttttcactaaacatcgatcaccccctatagccgacggagatcctggtgtcgctgccagcatctcatcttcttcttcctccccctgttggctcgcgaaccacgctgattgctgtcgtcggctccctctcctgaagagccccaccgtaatgagagtggcccccctccacaagaggatgccagcgactgttcctccccctaatgcagtcccccatggttgttcgttcaccccaccacacagtgcggcagccctccatcattaacgtcggccggccctggtggccggccactctctattaatgcaagccaatgagcgatcaacactcgcccgtacatccgtcgctgtatcctagctggccccccccgtgatcttcctcacccatgatggactggtcgcctccccactcttcgccgataatacgtcgatagctttgcactctctcaccatccaagctaagcaaacggccaggatgcgtcgctcgggcgaaacgagttgggacacggtcctacacgcaaacagaatcgctcttcttccttacccaaaccgatagcttgggtccccccctcttatcacaacacgtacccgacacggccgccatgttagggacacttctattcactaaaaaccacccaccccgaacaaggagtcgcaccagggggagagcaccccccccccaccctccagcggagtcacattcaatacctccccccccgcactggctaggatgatcttactctagacacactccctcctcccacgaagcactccacctggtcagtcgatccacaagctcctgcctatattttgtatcaccccccaccgactataccagtcacataacggggggcaggtcccccaccacaatg

SEQ ID NO: 490634 - DNA, 161 bp, Homo sapiens
cgcagctgatcatgtgtccccctcgactccttcatataaatccgccacaccacggaaatttggggatactccccagaggtccatccggccacgctcctccccccattcacctgatcccctgaaccaacccactgtctacctactccccacaacctcctatc

SEQ ID NO: 490635 - DNA, 540 bp, Homo sapiens
aatgactgtgtacccagcgcaagctcagatggtagaaatcggcgacctagtccacatcgctcatgtagcaggatgcaacccaaccccggcagcgtcttccttttgaagcctaagctaagcctttagacaccaggggggcttttacgtgctcaggaagtgttgcgcagaaaactttttctaccaccagccccctactaagacaaggagagcaaaaatcctaaaataattgtatgtcctgtaggacttcaacccttctcctttagctctagatagcctgctatatagcgagacacaaagctggatacagctagaaccaggtgcagtgtaggttaacctcggactcaggtggtcgaatgaactgaaccactgcttgaaattggacttatatactgatccgattatttttttccagacagataacttgcagaaacaaaaccacctgctgtttcctacgccttataaagctgactgaaaaagttgactcaaacaaaatttgcaggtttgttacaactccctggtcctcccaccacaaacgtggga

SEQ ID NO: 490636 - DNA, 326 bp, Homo sapiens
  misc_feature (1)..(1): n is a, c, g, or t
nggagcggtcgcgcatctcttagcacagtgggctaagcttctcatgcagctcgtacagcttctggcgcgtgacctcttgcagctatgcggtcaccgggttcacgttctgcaggtagagctgcatctcgtccttgtacttcgtctggatgtcgtccaggtaaggctgcacattggccttcgcctcctacagatccttgctcatctcgtgcgtcaggccctctgtctccgtattcaggttattgcaaaactagtgggtcacagggcctacctgttcactcagcttgctgcgcaaggtggagccttcacagtggcacacatagtctctg

SEQ ID NO: 490637 - DNA, 944 bp, Homo sapiens
ggtgcccgggctggtgcccaggctgttgccagagccagcactaaagtagaggcggtcccaggaggtcctggtcgggagccagagggcctccgccaggcaggaggccaggaggctgaggagctcctccaggaggggctcaagcccgtcctggaggaatgtgataactaggttggggctggggaggcagtccatgcgcgatgtcctccccgtggcaaactatggctccgacgggcccctggtggcctcctctcctcctctcatggcatgctatgggccctgtgaggacatgtgcggatggctggggcctatgggcctggtccctctaccccgactatcgtgtatcggggccccctcacttcgccctctcaaggggccctgccctgtctacgcttcttcctcggttggacccgaggatgtaccacatttaatatcctacaatgtgggtgcgggcggtgtgcgccccgtccattttgctccattctggtgccagcgtgcttgtcgagtcttccttggtggatgccctggtttgtgctcactggggtcctccctcgctaatccgttggagtccccattccttcttgcttttccccttgtctgctcgtgatcttgcgtctctgggtgcttggccttggtttttctttggtgtgcatgcccgtggtggtggtgcttcctgcttgcagtctggttttccttcctcccactcgggagctccctgctcgtctgttccccggggcggatgggccgcgccctggcaacgggcgcctcagtggtcctcagttggtcctcccttcctttccggtctgtcctctgcggtctgcggcgagccgtctcatctttgtggttgacgcaattgtcttcgtgggtccgcggggtttgttgtgtgggtggttgcctcgccggctccctgtgttgcgtattgtggtgccttgtgcgttccctggtcc

SEQ ID NO: 490638 - DNA, 87 bp, Homo sapiens
  misc_feature (48)..(48): n is a, c, g, or t
  misc_feature (60)..(60): n is a, c, g, or t
gaatgtaggagtaatgataagacggatcgtttgatgtttgatgcttgngtgagtgtcagngcagtattaggagagagttcctgaagt

SEQ ID NO: 490639 - DNA, 170 bp, Homo sapiens
ggtaacttagcaggatcttcccgatagcccgacagacgagatagtttaaccctcgtttcgggcgaaagtagttcacatttcccgagcacaagcatggagcatttgaggaaaatctcccgggccctgtgaagtacaacgtgttatcccccccactgtcgggctagtcgggg

SEQ ID NO: 490640 - DNA, 363 bp, Homo sapiens
tatctaaatgtatggatatgggctaaggcttgagcctggtgttgtcataggaggatcaggagctgagggtgtcaggagttgggtttaaattcgggtatgaggagggggtgggactcttgagcttccagtgtgagtactgtggctctgggggtatctgccgccctgggccgggcgagcccttgtcccgattatgtttggggacctccttcactctcaggatgtgatggtggtgggggagcccaccctgatgggcggggagttcggggacgaggacgagaggctcatcacccggctggagaacacccagtttgacgcagccaacggaattgacgacgaggacagctttaataactccctaaacga

SEQ ID NO: 490641 - DNA, 189 bp, Homo sapiens
  misc_feature (173)..(173): n is a, c, g, or t
cttgaggatacccggttatatacttttcatacataaacattacatttgttgtagaataatcttaaaccagacatttaaatctaggacttcaatttaatttgttccttgtaatctatttttatgtggcccttaagaaatatccaaatcaacccattgcataatatagcaagtanacaaatactttgggta

SEQ ID NO: 490642 - DNA, 184 bp, Homo sapiens
cctttcagcatcatgtgcactctttcctaaagccaacgtttctgttgccttctgttttgccacaccccgtagtacacggtggtctggttgtatacacatgctgccttcttggggcttcaaaaacaggtttatgcttttgactcgcacttcgtgctctagtgctgtttaagctactacgcggtaa

SEQ ID NO: 490643 - DNA, 777 bp, Homo sapiens
ggcgccgggcctcctcgcctttgtgccatccgggtctctcgcgcgagcgatttagtctgaggcgaagcttcggagcggccggtactgttgaaagcgacaagtggaggcgccgctctagcggccgggactctgaactatggcggaaggtatgctgaaagggagtgaaaattcaacttaaaaggttgtggaataccaattctgactgatgcgcggtttccgaagtggcccgtgatgtaatcaatttgaagtccgagaagcgttacacccagagcacatgtgaggagaggcagaccatattttgcagcagcactgtgccaaggggctgttttcattaaagagggttaatgacattaagatgaggttctcacttaggctagtgatacagagcgagatggactagccccagaaaagacatcaccagatagagataagaaaaaagagcagtcagaagtatctgtttctcctagagcttcaaaacatcattattcaagatcacgatcaaggtcaagagaaagaaaacgaaagtcagataatgaaggaagaaaacacaggagccggagcagaagcaaagagcgtgcttatgcgcgaagagactgaactgaagacgctgcagactcagatagcaaaataataagcctacttcatgataagaaccaacttcttcttaaaacaggaagaagacttgatcaaagataatctctagaacatagtctgggactatggcaaggactctctgataggagagaggataaattccttcgaatgtgggccgccagc

SEQ ID NO: 490644 - DNA, 381 bp, Homo sapiens
gtagcatgaggaagaagctcttaaaagttaaagcttactcagtggtaaaaaaaaaattgcagtttttgtatgggagctcggccaattcagttcaatgcagagcttgatcagtctcaatgccggttacttctgatatttggtttcaggttcactcagaaatgttatgcgtgtggattgaaaaatattgccaatttaaagcttaagaatgatggctggatatcacttaatctttgatgagcataagaagaagattgtttgagttatccctgccttaagatattagagtgaacttgaatatccttttgttgagtctagtcaatatatataaattatgtgatccaaattcaccaaaatctagtctttctatatacacaaaaatca

SEQ ID NO: 490645 - DNA, 850 bp, Homo sapiens
  misc_feature (676)..(676): n is a, c, g, or t
agaagttgatgtatatacatggtctgtattcttttagataaacataagggattcctcttttgtctggcataatggcttttcaatatttcaactttaaaaatcattgtttctgttgtattgaaaatattttggggaggaactacattttgggtgtttatagtaaaaaaatagtaattacatctgcaacatttgggtgatgtgaaactagatcttttttttatttgccacacactcctaaggttactaatgttgcatcacaacatttttgtctactgatacccatactaactctctttgttgcactattagaaccaacttcttcttaaaacagggaagaagacatgaatccaaagataaatcctctaagaaacataagtctgaggaacataatgacaaagaacattcttctgataaaggaagagagcgactaaattcatctgaaaatggtgaggacaggcacaaacgcaaagaaagaaagtcatcaagaggcagaagtcactcaagatctaggtctcgtgaaagacgccatcgtagtagaagcagggagcggaagaagtctcgatccaggagtagggagcggaagaaatcgagatccagaagcagagagaggaagaaatcgagatccagaagcgggacaagaaaacgggggatcaggtctcgcttcccgctcaagaantaacaaacagcgctggagcacacacggggttgcacacaggggggctgcgcacaaagagagatgtgtagcgaccagatattaaaaatagcggggcgacagccccctaggggagaccacacaggtgggggcgctcacgggggcgggacacacaccgacggcagagtggaccacacg

SEQ ID NO: 490646 - DNA, 1069 bp, Homo sapiens
  misc_feature (895)..(895): n is a, c, g, or t
ggcgccgggcctcctcgcctttgtgccatccgggtctctcgcgcgagcgatttagtctgaggcgaagcttcggagcggccggtactgttgaaagcgacaagtggaggcgccgctctagcggccgggactctgaactatggccccagagcacatgtgaggagaggcagaccatattttgcagcagcactgtgccaaggggctgttttcattaaagagggttaatgacattaagatgaggttctcacttaggctagtgatacagagcgagatggactagccccagaaaagacatcaccagatagagataagaaaaaagagcagtcagaagtatctgtttctcctagagcttcaaaacatcattattcaagatcacgatcaaggtcaagagaaagaaaacgaaagtcagataatgaaggaagaaaacacaggagccggagcagaagcaaagagcgtgcttatgcgcgaagagactgaactgaagacgctgcagactcagatagcaaaataataagcctacttcatgataagaaccaacttcttcttaaaacagggaagaagacatgaatccaaagataaatcctctaagaaacataagtctgaggaacataatgacaaagaacattcttctgataaaggaagagagcgactaaattcatctgaaaatggtgaggacaggcacaaacgcaaagaaagaaagtcatcaagaggcagaagtcactcaagatctaggtctcgtgaaagacgccatcgtagtagaagcagggagcggaagaagtctcgatccaggagtagggagcggaagaaatcgagatccagaagcagagagaggaagaaatcgagatccagaagcgggacaagaaaacgggggatcaggtctcgcttcccgctcaagaantaacaaacagcgctggagcacacacggggttgcacacaggggggctgcgcacaaagagagatgtgtagcgaccagatattaaaaatagcggggcgacagccccctaggggagaccacacaggtgggggcgctcacgggggcgggacacacaccgacggcagagtggaccacacg

SEQ ID NO: 490647 - DNA, 521 bp, Homo sapiens
acccccccccccccgccccccccccccgggcggaggggaggagcgaacgccgcaaaagaggcgcttggtgggcttcctgagaataaggactggaattaaaaagaatcacttatctcatcccacacaccatcctgaggcccagacagcctgctgaggaaacatcaggtcctctccttgatgtgagccattgaaaatgacaagatggaactggagaatacctgcagtttgattccccaacagaaaaatggggaagatggggtatttcacgttcaatttctccttccacatcgatgaataagaatagatcatccctcctctgatgagaggaatgagtaaacaggaagactgaggtcaaagaagattgtaatactaaaattctgtctatatgaaaacaaaaaattaggttagaaagaagtggtcacctgcaccgtaagaattgatagtggactatagaccttgagtttgagtggaaaaaccccatttctccaataaaaattgtctttgtgagttgactagcctca

SEQ ID NO: 490648 - DNA, 102 bp, Homo sapiens
tatacatcttgtaggatctactttttgaacttttcattcccttgtagttaacaaatcctgcaagatgtaactgaatacttttctaaacatcaagatacaggc

SEQ ID NO: 490649 - DNA, 657 bp, Homo sapiens
  misc_feature (628)..(628): n is a, c, g, or t
acccccccccccccgccccccccccccgggcggaggggaggagcgaacgccgcaaaagaggcgcttggtgggcttcctgagaataaggactggaattaaaaagaatcacttatctcatcccacacaccatcctgaggcccagacagcctgctgaggaaacatcaggtcctctccttgatgtgagccattgaaaatgacaagatggaactggagaatacctgcagtttgattccccaacagaaaaatggggaagatggggtatttcacgttcaatttctccttccacatcgatgaataagaatagatcatccctcctctgatgagaggaatgagtaaacaggaagactgaggtcaaagaagattgtaatactaaaattctgtctatatgaaaacaaaaaattaggttagaaagaagtggtcacctgcaccgtaagaattgatagtggactatagaccttgagtttgagtggaaaaaccccatttctccaataaaaattgtctttgtgagttgactagcctcatcaactggtgtgatttgctgtctagttaatgaggaaggaataaggccatttcatcataagacactcaaatgggtgtttccttcctcctcccttcattgtggaaactnagagaataaatcgctgttatgattggggg

SEQ ID NO: 490650 - DNA, 345 bp, Homo sapiens
accaaacatggcggttccactaggcggtatggtgtgtgggcagacacccgctccccctcaggccccgccggaccttacgcaccaagcttagcttgttcaggcagctgcaggcgctcctagacgtagcagtagtacttcgcaggacgagtcggagccatgtctggaggcttgctgagcatttctgatgagtcaggactatgtcaatggtaccgatcaagaagtctgaaccgagaggcattgcctctgtgtacacaatgttttgggcttcagcagtatatactcagtgctaattgtatactatcatgtgcttcagtgctgaatgtattctaggaccattagagtgct

SEQ ID NO: 490651 - DNA, 170 bp, Homo sapiens
  misc_feature (106)..(106): n is a, c, g, or t
gcctccgccgattcgtgaccaagaaggctctatgcattcaggctttccaggagactcaaaagctgaagaagcaaagaagagccttaaaggctgcagcagcagtccnaaaaacaagcagagcagaggaacccagacagccctgccaaagccatgccaaagacactcaaaga
